United States Patent Application Publication US 2009/0089901 A1 - sequence listing, part 2

SEQ ID NO: 6328 - DNA, 399 bp, Zea mays
  Clone ID: LIB3137-024-Q1-K1-B1
caacatccagaaggagagcaccctccacttggtgctgcgcctcaggggaggcatgcacatcttcgtgaagaccctgaccggcaagactatcaccctcgaggtggagtcttcagacaccatcgacaatgtcaaggccaagatccaggacaaggagggcatcccaccggaccagcagcgtttgatcttcgctggcaagcagctggaggatggccgcacccttgcggattacaacatccagaaggagagcaccctccacctggtgctccgtctcaggggtggtatgcagatctttgtgaagacactcactggcaagacaatcacccttgaggtggagtcttcggataccattgacaatgtcaaggccaagatccaggacaaggagggcatcccacccgacca

SEQ ID NO: 6329 - DNA, 248 bp, Zea mays
  Clone ID: LIB3137-024-Q1-K1-B10
ctcgcacactacggatttgttgacgaggctttgtcttcttcgggcccttgggctatcaggagtgatcaagttcgcatgatgcgacatgaatcatgtggactactctctgtgtattatacttactctctgatatggacaaatgataactgccctttctactaattgattgaagcctagaagtttgacgatctatattcgtcggactacaagatgctacctatctgaacaaatcttgtgctggatatcat

SEQ ID NO: 6330 - DNA, 462 bp, Zea mays
  unsure (1)..(462): unsure at all n locations; Clone ID: LIB3137-024-Q1-K1-B11
gtcacgtacagccaagcagccaggtaccagctgcctgagggttgggtagatgggcaagctgtgctgcagcaacgaggcggaggaggaggccgggttcaacctcctggggctgctggtcgccgccatcatcgcgctggtgttcatgctcctctgcgcgccgcccaggaggcgctgcgtcgccgtctacccgtgctgctgacccctcagtcagcgctcgcgcctcctcgctgtgccgctgccgctgcctggccctcctcgtgcgggacaggagcttctggatccaaccaacaggtttcggatcagcttcagcatgtgtgcaggggagcttcaagttcttggggggaggggagcagagcaggacaggcattggttcatcacatcatctttcgatccaccaataatttctactcaactgtaatatccatcctgctccaactcatgtaatccttntgttctggcgaa

SEQ ID NO: 6331 - DNA, 387 bp, Zea mays
  Clone ID: LIB3137-024-Q1-K1-B12
cgctcgtattcccaaaggccaaagccaacctagggcgcatggcgactggcgaaacgcgttcttcctctccttttcccaaaggcaaccaaaccatctcgactcgtggggaagtttcgctctcgcgggggtcgacttcctagggttcgaggaacgtccgtccgtccgtccggggaaggtgcaggagggaggcggagatgatcgaggtggtgctcaacgaccgactgtggatgaaggtgcggctcaagtgcaacgaggacgacaccatcagcgacctcaacaagctggtggcgccgcatactgtgactcgcccggagaagatccgcatgcagaagtggtacaacatctacaaggaccacatcatccctaaggactacaaggtccacgacg

SEQ ID NO: 6332 - DNA, 400 bp, Zea mays
  unsure (1)..(400): unsure at all n locations; Clone ID: LIB3137-024-Q1-K1-B2
cgtcaaccccctccttggatagggttagagttcccccggcacgagcgcgagccatggcctccttcacctgctcccaggtcggcgctgcggcagcgggcggaacctcgcccttcctcggctaccggcggcggagcggccccgggggcgccatcccgtcgagctccctcttcgtgggccggcggttggcggcggtgcggatgcgcgcgccctctcgcggggtccgcgggggctccgcgctgcgggtcacgtgcgagaaggtggtggggatcgacctaggcaccaccaacttcgcggtcgccgccatggagggcggcaagccgaccgtcgtcaccaacgccgagggcgcgcgcacaactccctncgtagtggcgtacaccaagacaggggagcgcctggtggg

SEQ ID NO: 6333 - DNA, 455 bp, Zea mays
  Clone ID: LIB3137-024-Q1-K1-B3
agaagaagaatgatcgccctcgtgcagatattggccttatagtggaacaattcattgctgagtttgaagtagcagccgaagaagatgcaaacttgaataggcaatcaaaaccagccattaacaaacttatgaagcttcctctgctcatagatgttctctccaagaagaatcttcagcaggaatttcttgaccacggagttctcactcttctaaaaaattggcttgagccattacctgatggaagcatgccaaacatgaatattcgatctgctgtactgaaattattaactgattttccaattgacttggaacagtatgaccgaagagagcagcttaagaaaagtggtctgggaaaggtcattatgtttttgtccaaatctgacgaggagactactgcaaataggaaattggctaaggagctggttgataaatggagtcgaccaatattcaacaag

SEQ ID NO: 6334 - DNA, 392 bp, Zea mays
  Clone ID: LIB3137-024-Q1-K1-B4
tccaattgtcacttgctctccctccaacaagctaattaaggccggtcgtcatccctcttctagctcgttttattatccatggcggaggagaagcaccaccaccaccacctgttccaccataagaaggacgaggagcacgaggagcagctcgccggcggcgggtacggcgagtccgccgagtacacggaggccacggtgacggaggtggtgtccacgggcgagaacgagtactacgagtacaaggaggagaagcagcataagcacaagcagcacctctgcgaggccggcgccatcgccgccggcgccttcgcactctacgagaagcacgaggcgaaaaaggacccggagcacgcgcaccgccacaagatcgaagaagaggtcgcggcggcggc

SEQ ID NO: 6335 - DNA, 442 bp, Zea mays
  unsure (1)..(442): unsure at all n locations; Clone ID: LIB3137-024-Q1-K1-B5
gcctctgctcgcaactatcctgagaacactgtcgctgctgtcacctcggatctaccaactccgcctccacagacacctaccaactgttttggagcttgctggtaaggatcattgcgaaacttgctacaaagtaccaactgtttgcatactcaagattagtgtgcattttgagaaggataaggctttggctcgcagattccagccagtattggtgaatgagcctagccaggaggacgctgtcaagatattacttggtctgcgtgagaaatatgagacttaccataaatgcaaatacactttagaagggatcaatgcagcagtttacttgtcagcaagatacatccctgacaggtatcttcctgataaggctattgatctgatagatgaagcangcagtagagctcagatggaatcatttaaaaggaagaaggaagaacaatgc

SEQ ID NO: 6336 - DNA, 446 bp, Zea mays
  Clone ID: LIB3137-024-Q1-K1-B6
gaccagacgcaacacgacggcgacggccatggcttcgccggacctcgccgccggcgacggcagctacgactttcaccttcgctctctctccgcggcctcacgggactccgctgcggcctccgaccccgcctctgaccccaacctcctccaatctgttaggagggtgtgcgagatgtgccgaacggcgaaggaagcgaaggacgagatggtggcgcgggcgttccccgtgatgggcaagctatttcagcgatgcgccgccgctcccacgcaggccgttgcctccaccggcgtgctgctcctcaccattttgcaattcttcttggattttggggaggctgttttgcatgatgctgatggtagcttgaaaaccttcttccgctcttgcttaaggagtttgcagatcctattggtgcagagcgcacagttgaattccttgtaacaaacaa

SEQ ID NO: 6337 - DNA, 364 bp, Zea mays
  Clone ID: LIB3137-024-Q1-K1-B7
gaccactttacacacgataagtgctgcacattttatgggtagtactgaagaaaaggaacatattgaagatttcatagctaaactggcttctgaagagatcattgatacaagtaacagagatattgtcgagcatcaggatgagactgttctgaaaacaaactatgaaatagacagggcacgcaacttagaagctactgaagaaattgctgctggtggtgagagttacacgggaaccatcacagatgatgttgaagacaaattctctaatgtagaaattactctatgcactatctctcttaatatggcagacagcagcgttaaggaagaatagatgcatgactatgaatgaaacgaatatctatat

SEQ ID NO: 6338 - DNA, 308 bp, Zea mays
  Clone ID: LIB3137-024-Q1-K1-B8
ctcgacgaaggaacgaacggacaggttgttgtcacagaagcgacatggctttcgcgcccaaaacgtcctcctcctcctcgctctcctcggcgttgcaggcagctcagtcgccgccgctgctcctgaggcggatgtcgtcgaccgcaacaccgagacggaggtacgacgcggccgtcgtcgtcactaccaccaccactgctagagctgctgcggctgctgtcacggttcccgccgccccgccgtaggcgccggcgccggcgccggtgccgccaaaggaagcggcgacacccgtcgagagtagtagccgt

SEQ ID NO: 6339 - DNA, 223 bp, Zea mays
  Clone ID: LIB3137-024-Q1-K1-B9
ctggcacaagatggatttggtgaggaggctttgtcttattttgacgagtgagctatcaggagtgttccagccgccgtgatgctagctaattcattggactatctctttgcatgtactactctactattatgagaaatcatcatagtgattgcactaattgatggaaagtcaaaagttttacgatatatattctggggagttcatgatgctacctatatcaaca

SEQ ID NO: 6340 - DNA, 173 bp, Zea mays
  Clone ID: LIB3137-024-Q1-K1-C10
accaatcctatctaccctttatcacctgtttttgactttcccccagcttatatgaacaggggacacgaacatgccggtgtcgaatttgcttccaaggaacgtgtgctagtccttcctcctccatctctgggacactctagacggcttacgcttctggaccggtcgctgtatgc

SEQ ID NO: 6341 - DNA, 466 bp, Zea mays
  unsure (1)..(466): unsure at all n locations; Clone ID: LIB3137-024-Q1-K1-C11
tcttcgtactcgcctacctccgcggctcaaacctttcccccttctcccaattccttccgccggccgccgctccacccgtacgacgacaccatgagggagtgcatttcgatccacatcggccaggccggtatccaggtcggaaacgcgtgctgggagctgtactgccttgagcatggcattcaggctgacggtcagatgcccggtgacaagaccattgggggaggtgatgatgctttcaacaccttcttcagtgagactggtgctgggaagcacgtgccccgtgctgtttttgttgaccttgaacccactgtcatcgatgaggtgagaactggcacctaccgccagctcttccaccctgagcagctcatcagtgggaaggaggatgcagccaacaactttgcccgtggtcactacaccattggcaaggagattggtgacctgtgcctngatcgcatcangaaagctt

SEQ ID NO: 6342 - DNA, 419 bp, Zea mays
  Clone ID: LIB3137-024-Q1-K1-C12
gctacggactgacctacctgcaggtctcatttctttcccccttctccctatttcttccgggggccgccgctccacccgtacgactacaccatgagggagtgcattttgatccacatcggccagtccgatatccatgtcggaaacgcgtgctgggtgctgtactgccttgagcatggcattcaggctgacagtcagatgcccggtgacaagaccattgggggaggtgatgatgctttctacaccttcttcagtgagactggtgctgggaagcacgtgccccgtgctgtttttgatgaccttgaacccactgtcatcgatgaggtgagaactggcacctaccgtcagctctgtcaccctgagcagctcatcattgggaaggaggatgcagtcaacaactttgcccgtggtcactacaccat

SEQ ID NO: 6343 - DNA, 447 bp, Zea mays
  Clone ID: LIB3137-024-Q1-K1-C2
gaggcagttggctatgctcttactgcaccagcaggtcaaatggatctctctctgtgggagcgattttatttgcagggtatagattcactaatgactttgtatgagctggattattggcctccccaagacaaggaagtgaaccagcgtagcctaacactgcccgccgtggggctgctccagggctgcgttggactcaggaagctcttcgtccatggcaccacgcatgagcatttcctgacctttttcttgaaggtgccaaatctgagggacatgcagttacgggaggactactatcccgcaccagagagtgatatgatgaacacagaaatgcgagccgagtcttggctccggttcgaggtgcagctgaacaacaagctaattgaggattaacggtgaatttggtgagctgtgagagcatcagatgaatacagagaggtgctgatttac

SEQ ID NO: 6344 - DNA, 430 bp, Zea mays
  Clone ID: LIB3137-024-Q1-K1-C3
gcagttcgtggcaagagggctagtcaggacagaggagagcaagcagaagattggggcagccggtgatgtttacgttgcggacataagagacgcggatcgtctagcacctgctgtacaaggtgtggatgcgctcataatcctcaccagtgctgccccgaaaatgaaaccgggtttcgaccctagcaaaggtggacggcccgagttctactacgaagacggaatgtaccctgaacaggtggattgggttggccaaaagaatcagatcgatgctgctaaagctgctggagtgaagcatattgtgctggtgggatctatgggaggaacaaatcctaaccatccactgaacagcatgggtaatggcaatatactggtatggaagcgcaaagcagaacagtatttggcaaacagtggaatcccttatacaatcata

SEQ ID NO: 6345 - DNA, 439 bp, Zea mays
  Clone ID: LIB3137-024-Q1-K1-C4
ctcagagcagccgcatccacaacctgcctctctcgtcccctggcggcgtccgcggcaggatggcggaatctacggcgaggacggtgaaggatgtcaacccgcacgagttcgtcaaggcctactccgcccacctcaagcgctccggcaagatggagctccctgagtgggttgacattgtgaagactgcgaggttcaaggagcttcctccttatgatcctgactggtactacatcagggctgcatccattgcaaggaagatctacctaaggcaaggcatcggtgtgggtggctttcagaagatctacggtggccgccagaggaatggctcccgcccaccacacttctgcaagagcagtggtgctgttgcacgcaacatcctgcagcagctgcagattatgggcatcatcgatgtcgatcccaagggtggacgcctcatcac

SEQ ID NO: 6346 - DNA, 409 bp, Zea mays
  Clone ID: LIB3137-024-Q1-K1-C6
ctcacctgtgctcaacactgacgacgcctactccagtcaagaagttaacgggcctgacgggaagcccattggtcctcctatgggaaatccatggatctacatgtaccctgagggcttgaaggatctccttatgatcatgaagaacaaatacggaaacccacctatctacatcacggagaacggaatcggggatgttgataccaaggagacacctctacccatggaggatgccttaaatgactacaaaaggctagattacatccagcgccacatcgctactcttaaggaatcaatagacttgggatcaaatgtgcaaggctacttcgctcggtctctgctggacaactttgaatggttcgccggcttcaccgaacgttatggcattgtctacgtcgaccgcaacaataac

SEQ ID NO: 6347 - DNA, 356 bp, Zea mays
  Clone ID: LIB3137-024-Q1-K1-C7
cacatacacaagcacaagcgcactctagcattggcttctgaagttgtccgccctagcgacggcgcgctactaaaggcacaagccgacatatggcggctcaccctctcctacctgacgcccgtgtcactgaggtgcgccgaggagcttggcatccccacggcgatctaccgccatggcggagctgcctcagccgctgagctcgacacagacctgattatcccttacactaagctgtcgttcctccaacagctgctgaggcttcttgccgcatctggcgtgttcaccgataacaagcagatcacgtctgaggagcgaacccatattagccacgcattctccctcctggtggacggcat

SEQ ID NO: 6348 - DNA, 411 bp, Zea mays
  Clone ID: LIB3137-024-Q1-K1-C8
gaagccggaagccttcgccgcctgcgcgtgttcggcgatggacaccgtcgcctcatggcgcctcctctccccgcctcccttgccgcagcagctacccatacccaagcgggaagcgaccttcgcggcctcgccacagcagcattcggccagctccagcagcgccaagttcaggctcctcctctgccacctccacctccatgacaagccagcggcgtcggtgcagcagagctcgcagctgcagaggctggcaacggagctacggtgcggcgccgtctgggcagctgttgaggcgccggcggcgctggcggtgaccggggaggaggacatcgacctcctagcgatcctgccgccgatcgcggtgttcgccttcttctactttctcgtcgctcctccgctgatcatgaactggat

SEQ ID NO: 6349 - DNA, 357 bp, Zea mays
  Clone ID: LIB3137-024-Q1-K1-C9
cgcaaacgtatctccaaacgacgacgtgtaccgcgcgatccccaagcctatatcgccggggaacaagagcaccctggtctggaatctggtcgcaaaggacggtgcctcgtttttccttgaccatataacagacattcaccgcttaatatagaactggaccgctcgctatatgcgcgctgtggagcgagtaccatattccacaacggtaatctggaattgatcgacaatcactacggctacagaaatgtgcccttgaccgaggctatagtccggaaggctcatgggtaggagaacatggacatgtttgtcagctcctttgacactagctgtcacgccgtctttatgaaccgactttgc

SEQ ID NO: 6350 - DNA, 398 bp, Zea mays
  Clone ID: LIB3137-024-Q1-K1-D1
gctgagggacaagaggttgaggcagcagctgaggaaacgaaaaagagcaaccatgtcacgaggaagcttgagaagcgcaaggagggacgtacccttgacccacacattgaggagcaatttggcagtggacggttgctggcatgcatttcttcccgccctggacagtgtggccgagctgatgggtacatccttgagggtaaagagcttgagttctacatgaagaagctacagaggaagaagggcaagagcgctgtagcttagagcattctcatggattgtcttgcaccgaaatgtgtgtcctgatgagtacactttttttggttagtcgtctcaagttcagagcgttatgccatgttttcagtcctgattagtacactgttttctaaaagcgattgagc

SEQ ID NO: 6351 - DNA, 412 bp, Zea mays
  Clone ID: LIB3137-024-Q1-K1-D10
gttccctccctccctcttcccgcggaccgctagaggcactttcgccctcgattcgaccgggagtcattcgcccgcgaccgggattccctcccccaagcgcggatctgaacgctgcgctccgcgtcaccgctcgaatccgccatgaagggggccaaatccaagggcgccgacaaggccgatgccaagctggcggtgaagagcaagggggcggagaagcccgccaagggcaggaaagggaaggccggcaaggaccccaacaagcctaacagggctcccagcgctttcttcgtgttcatggaggaattacagaaggagctcaaggagaagaaccctaagaacaagtctgccgctgcggtggggaaagctgctggcgacaggcggaaatccctgaacgagtcagacaaggcttcct

SEQ ID NO: 6352 - DNA, 436 bp, Zea mays
  Clone ID: LIB3137-024-Q1-K1-D11
atcacagcgcccaccttccaaccggacttgagtcacttgactccgccgcggattccccgccagatctcattctcgcctcaaccctaaccgccgacggtggccatgatggccaccgagcccttgtccccgggaaatctcgtcgaggacctcgaaacactacccctctcctcctccactctcgcggctacgaccgacccgctgctccgcccaccttccccctcgtccaccttctctcccaccgccggcgagaaccacgtcgcgtttctggacgaggaggatgaggatggggtggatgacttcacgcctccgccggctccccatgccgctacggccgctacgaagtcccgcgaggcgtcaccgtggttcgctgagatcactgtctccgagcctaggaagcacgcggagcccgcgactggagccgtgggcgtcattcccg

SEQ ID NO: 6353 - DNA, 306 bp, Zea mays
  Clone ID: LIB3137-024-Q1-K1-D12
gtcaggtgggcgcgggccaagaaggccggtttcaccgacgaggtagtcaaggaggtgcgtggggaatgggccagtggtgaggagctcgccgccgtgcgcatagtctagccactccgccggtccatggatcgcgccagggaaatgctcgagattaaaacaggaggcttagtcgtgtgtactaaaggtgtcatgcattttgtctacagaggaagcaaatattagcaaaactcatatcatagtgacactttgatcactaacgtgcataaaggcgatctagttgatcattttgttcatacactcgaactt

SEQ ID NO: 6354 - DNA, 410 bp, Zea mays
  Clone ID: LIB3137-024-Q1-K1-D2
cccagctccagctaccacagcagccctctcgcttaaaggaggagggagaagggggcgaggcgagcaatgtcggagcagcagcagccattgccgcagcctcggagcagcatgcgggaggctctggagaaggaggacaaggagaaggcggcggctgcggcggcggccaaggagaaggcggccgtccccaagaacggcaacggcaacggcggcaagaatggcggcggcgccggcagcggcggagcgcccccgcagtccggggaggagacggcccgcgagatccaggtggtcagggaggcgtaccgccgcgagacggccgcgccggcctacgtcatacccgaggaagccgccgccgtgttcgagctcgtcggctggtacatctacggcttctgctcctacttcatcacgcacct

SEQ ID NO: 6355 - DNA, 438 bp, Zea mays
  Clone ID: LIB3137-024-Q1-K1-D3
ctgagatcgcgaggccgaggcttgtcccgtctccgctccgctccgcccacccacggtttctggaggacaattctttgctatctagccttcctcaaaagtaaaaagggtaaatgggatcagaaggaccttcagttgtcactgtccatgttactggatttaagaagttccatggggttgctgagaacccaactgagaaaattgtgaccaatcttaaatctttcttggaaaagcgagggttgccaaaaaatcttgtcctcggaagctgcacagttctcgaaacagcaggggaaggggcacttgccacattatataaggttttagagtctgctgttgcagacagaggaactgggtcctcggcacagggacaagtaatttggatccactttggggtcaacagtggcgcaataaggtttgcccttgagaaccaagctgttaatg

SEQ ID NO: 6356 - DNA, 454 bp, Zea mays
  Clone ID: LIB3137-024-Q1-K1-D4
gagagagagagagagagcgcgagcgagcgaatagggcgtgagagaggagggaggccaagccgtacgcgtcgtctcctgctgtttctccccatccctttcctgcctcggcttgcaccttcaaccttacttgtgaacatctctgattccattttcatctgttgggtggcaagaaactaatcaaggagtctctctcttctcattctctgcgtggaggactgtttagctgtagctgagtggcatgctttccagaacataaattggtggaagagaagtttgatgctaccactttgcgagaaggaccgaaccaacacaataacatcaaacttagatactgcagtttaccaactttttcaatattgaagattgaagagcagcaagatcagcctcttccatatgcagtttgaagaaatcctttttaaggtctattagactaaaatccttccggcaatcttgc

SEQ ID NO: 6357 - DNA, 402 bp, Zea mays
  Clone ID: LIB3137-024-Q1-K1-D5
ctccctccgagtccagggggcaggggcaccattaccgagtagtttaattagtgctagttgtattaccattgttagtgacttaattaccctcacgcgaagcaccctacctttgctagtcctcctacgtctcctcttcgcttaatcttggtgatttgattcttcacttcttgcgcgcattgcagagggtgctcggtctgcagctatcttaggttaaccagtcgtgtgtggtctatcggtttcgatatagtattactactgctctgttataatcagcggggaggaggaagatgacggtgacgccacggatcacggtgagcgacgggcggctgacggtgcgcggccgtacggtgctcaccggcgtgccggacaacgtgtcggcggcgcacgcggccggggcggggc

SEQ ID NO: 6358 - DNA, 432 bp, Zea mays
  unsure (1)..(432): unsure at all n locations; Clone ID: LIB3137-024-Q1-K1-D6
ggacgttctacgtgtttttgctaaaacgatcggacgttctaaactctaactacgttttatcgtttaaacgacgtttaagcgacgttttaataacaatgacgctgagaacggtaaattttaccggtttctcggttacgcaaacaattagtttattacatggctaatagtttgttagctggctaggggttctaaatatatgtcgnggaagcgctaacgtcctgatgatattggcgttgttgtcgctcaggctaataggcgggggctctatgccgattgattaggttgctgctatcattattatcaaggacggctgctttgaaaaccatttcatttggtcatgtatgacatgttcaccaacttcttgctcccaccagctgctgagagcataagggcattagatttagcgatgcgattttagattttttttgtttt

SEQ ID NO: 6359 - DNA, 427 bp, Zea mays
  Clone ID: LIB3137-024-Q1-K1-D7
cgaattccctgcgattcctgtcccctcgccttttcgtctccccctaggggatcgtcggagaggaatcgcaaagagggccgtctcatccgagttaaggaagccatggagcacaaggaggctgggtgccaggcccccgagggacccatcctctgcatcaataactgtggcttcttcggcagcgcggcgaccatgaacatgtgctccaagtgccacaaggagatgataacgaagcatgatcaggccaagctggctgcctcctctatcgacagcatcgtgaacggcagcgacgccgtcatggagccggttgttgctggcagcaacacggtagtagctgttgcccaagttgacttgcaaacaatgaacgtgcagcatcccgctgatgttgccggacccaccgagggggtggcggcgatcttccaaagggggg

SEQ ID NO: 6360 - DNA, 392 bp, Zea mays
  Clone ID: LIB3137-024-Q1-K1-D8
cccagtcccggggtctagtctgagggccgtttccatggccaaccgggcgaggccgctccgggccatctacatgaccagcacctgccatgaccctgacacgtgggcgcacctcatcaaggagtacgcctcgcaatccttggtccgggaagccgccctcggctacgccaggaacctgacccgccggactcaccaccaatccctagtaagcgtcctgatcaaggccgtcgctgccttcttcccggacgagctaggtgttggcatgtaccttcatgcggaagccctcaagagcggctttgcccgcgatctgatcatcggcaccacgatcgtgtggatgtgctgcaagtgtagtgcactcgacgacacgcgcagggcgctcgactaaatgccggacc

SEQ ID NO: 6361 - DNA, 276 bp, Zea mays
  Clone ID: LIB3137-024-Q1-K1-D9
gttcactccgtccctctccccgcgagccgccagaggcacgttcgccctcggttcgacccggattcgtccgcccgagaccgggattcgctccgcaaagcgcggatctgaacgctgcacttcgcgtaaccaatgaaatacgtcatcaagggggccaaatccaagggcgccgaggaggccgatgccaagctggcggcgaacagcaaggtggcggacaagcccaccaagggcaagaaagagaaggccggtaaggaccctaacaagcctaacacggctccc

SEQ ID NO: 6362 - DNA, 443 bp, Zea mays
  Clone ID: LIB3137-024-Q1-K1-E1
gttgaagttctttcaaagctaatcaactctccggacatggatgcgtactttgatgctattgttcatatggatatgagcttgcattcaatggaagtagtaaatcggctcactactgcagtagttttaccaccaggatttgttcatgactatatctcaaactgtattcgatcatgtgaagacattaaggacaagtatatgcaaaatagactagtgagactagtatgtgtttttctacagagcctcattcggaacaggataatagatgtgcaagatctcttcgtggaggtgcaagcattttgcatcgccttctcgcgaataagggaggcagtggggttgttcaagctcctgaaatctctagaatgaagagcgctgcaccatcagctgggcgctggattctcagaacagaaattcccaaggtgtacatccatggctctgccttttgc

SEQ ID NO: 6363 - DNA, 451 bp, Zea mays
  Clone ID: LIB3137-024-Q1-K1-E10
cacactccaccacacaccgcgcagctagctgtcaccggatcgagcaagaaggaagaaaaatcagcggcaccgataatcgatcgacgacactcgcgcgaggtgggaagcgaaataaaaggtggccttttcgaagccgccggacggagtgtagtgtagcgctagctccgcaggccggagaggaggacgatggtggggcgacgcacaggaggaggaggaggagcggcgacggccctcgtgtgggcggtggtggcggtcgcggcggcggtgtcgcgggcgcagcagcagcagcagctgctgcaggtggggttctacgacacgctgtgccccgcggcggagatcatcgtgcaggaggaggtgagcaaggcggcgtccggcaaccccggcgtcgccgcgggcctcctgcgcctccacttccacgactgcttcgtcagggggtgcgacgcgtcggtgc

SEQ ID NO: 6364 - DNA, 447 bp, Zea mays
  Clone ID: LIB3137-024-Q1-K1-E11
cgcacatcgagtcatcaagctagctagcccggagcacgcctagacacgccagcagcaatggcggctcagctggccgtcgcgtttctcgccttgttgtcctcctctgccttcttggccgtgtctggccagaagttcaacgccatcttcagcttcggcgactccatgtccgacaccggcaacctgtgcgtgaacggtccccccgccggcctgacgctcacccagccgccctacggcgagaccttctttggccgcgccacctgccgctgctccgaccgccgcctcgtcgtcgacttcctggccgagaagttcgggctaccgctgctgaagccgtcgaagcagggcggctcagacttcaagcagggcgccaacatggcgatcattggcgcgaccaccatggactcgggcttctttcagtctcttggcatcgccgacaagatctggaacaac

SEQ ID NO: 6365 - DNA, 62 bp, Zea mays
  Clone ID: LIB3137-024-Q1-K1-E12
gagctccttactcgccagtcgccatgggcatgattaagatcggaatcaacggcttggaggat

SEQ ID NO: 6366 - DNA, 452 bp, Zea mays
  Clone ID: LIB3137-024-Q1-K1-E2
cgaaggaggaacgaacggacaggttgttgcacagaagcgacatggctttcgcgcccaaaacgtcctcctcctcctcgctctcctcggcgttgcaggcagctcagtcgccgccgctgctcctgaggcggatgtcgtcgaccgcaacaccgagacggaggtacgacgcggccgtcgtcgtcactaccaccaccactgctagagctgctgcggctgctgtcacggttcccgccgccccgccgcaggcgccggcgccggcgccggtgccgccaaagcaagcggcggcacccgccgagaggaggagccgtccggtgtcggacaccatggcggcgctcatggccaagggcaagacggcgttcatcccgtacatcaccgcgggcgacccggacctagcgacgacggccgaggcgctgcgtctgctggacggctgtggcgccgacgtcatcgagctgggg

SEQ ID NO: 6367 - DNA, 454 bp, Zea mays
  Clone ID: LIB3137-024-Q1-K1-E3
aggctccctcctcctccctgcaaatcctgcatacaccaccgctcgtttttctctccgggacaggagaaaaggggagagagaggtgaggcgcggtgtccgcccgatctgctctgccccgacgcagctgttacgacctcctcagtctcagtcaggagcaagatgggtgccggcggcaggatgaccgagaaggagcgggagaagcaggagcagctcgcccgtgctaccggtggcgccgcgatgcagcggtcgccggtggagaagcctccgttcactctgggtcagatcaagaaggccatcccgccacactgcttcgagcgctcggtgctcaagtccttctcgtacgtggtccacgacctggtgatcgccgcggcgctcctctacttcgcgctggccatcataccggcgctcccaagcccgctccgctacgcggcctggccgctgtactggatcgcgc

SEQ ID NO: 6368 - DNA, 446 bp, Zea mays
  Clone ID: LIB3137-024-Q1-K1-E4
cagatccaagaagagggaagagcaccaaggaccttcggcgcccgttcaggatccacatcttgccgagcgagttcttggttgacctcttcccccttcggaccacctccaaggctcttggtgtagcttgccactctcaccaatcaagttttcatgtctgatctcgacattcagatcccaactgccttcgatcccttcgctgaggccaatgctggggactctggtgcggcagcagggtcaaaggactacgttcacgtgcgcatccagcagcgtaatggtcgcaagagcctgactaccgtccagggattgaagaaagagttcagctacagcaagatccttaaagatctcaagaaagagttctgctgcaatggtacagtggtccaagacccataacttggacaggttattcagctccagggtgatcaaaggaagaacgtcttgaatttcct

SEQ ID NO: 6369 - DNA, 314 bp, Zea mays
  Clone ID: LIB3137-024-Q1-K1-E5
gtggtcgctgtaccgcgcggtgatcgcggatttcatcgcgacgctgctgttcctgtacgtgggggtggcgacggtgatcgggtacaagcaccagacggacgcgtcggcgtcgggggccacggccgacgcggcgtgcggcggcgtgggcgtgctgggcatcgcgtgggccttcggcggcatgatcttcgtgctggtctactgcaccgccggcatctcggggggccacatcaacccggccgtcacctttggcctttttctggctcgcatggtgtcgctggtgcgcgcgctgttgtacatgttggtgcagtgcctgg

SEQ ID NO: 6370 - DNA, 446 bp, Zea mays
  Clone ID: LIB3137-024-Q1-K1-E6
tggaacgatttgctgtacgtgcaaagtacatgactctagacccagcaaagaacagatacatcaaatacattcgaaatattagagctatccaggaatacctatgcaaccgagctgacaagcatcttgtgccgaagatcaacaataccaatgttgaccagagtgtggctgctatacatgcaacagtcttcagctgtcttcgcaggcgagcagccggggagcaactgtatgacctcaacacaaacactgttgctgtagtggatgaggaatacaggaaccagcgtgcagctaacaccttgggttctaagggcatgtttcagttgatccaaaggaaggggtcttcaaggaatctgatggcacttcttaacaccgacggttcagtcaccaaagcttggcatgtaagtgcaagtgatggcaatgggaatcttaatggtatcacaaacaacaag

SEQ ID NO: 6371 - DNA, 409 bp, Zea mays
  Clone ID: LIB3137-024-Q1-K1-E8
gccacatcgagaacacgatcgatcacacaatctacgaagactcgtttaggagaaaccacaagggaccaagccgtgcatgcatcatggattacggtcagcaggggcagcgcggccacggcgccacgggccatgtcgaccagtacggcaacccagtcggcggcgtcgagcacggcaccggcggcatgaggcacggcacgggaaccaccggctgcatgggccatctgtgtgagcacggtgtcactggcatgggtggtgggcagttccagtctgcgagggaggagcacaagaccgtcggtatggtgcatcggtgcggcagctccagctccagctcgaaggatgacgacagcatgctccgaaagaggatgaagggaatctagcacaacatcatagagaagctgtccgggcgcca

SEQ ID NO: 6372 - DNA, 243 bp, Zea mays
  Clone ID: LIB3137-024-Q1-K1-E9
gtcataattttataaacacgtccgagcatgtctccacaagcccaaacccacacgagcacaggctctatccactatgcaccgacctaacttatcgtcaccaacgaaagggtcactgctgctcagaaagactcccacttgtcatagctctagctactagctaatactttgaggccggcggcatcctgaacagctgaacgctttagtcacttttgccatcaacagcgacgaccgatcgatcatcta

SEQ ID NO: 6373 - DNA, 352 bp, Zea mays
  Clone ID: LIB3137-024-Q1-K1-F1
gcggcaagtacccgctggggttcgtcctcgtgctggccgcctcggcggtgttcgcgctcattttgtccctcttcgagctcaccttcgagaaggtggtcagggtgcggacggcgcggtgggtgctgcggatgcagatgcacaccaacctggtggcgtcggcggtgtccgtggcggggctgctcgcgtcgggggactggcggacgatcccgggggagatggcgtcgttcaaagacgggaggacgaggtacgtgctgacgctggtgggcacggcggtgtcgtggcaggcagcggccgtgggcttggtgcggctgatcatgagggtgtcgtcgctgttcgcgaacgtgacgtgcac

SEQ ID NO: 6374 - DNA, 454 bp, Zea mays
  Clone ID: LIB3137-024-Q1-K1-F10
caccctcctctcttcacaccccacaggccatgcctgccgcgccgcaccgcaccgcattggacatggcgtcgtcctcctgcctcgcctcgccgtctggcgccacgctctgccgcccgcggcggccgaggtgccgcgtggcgtgctcggcggccgacgccggcgggagcaccgggccggcgtgggccaagggcgcgggccgcctcgcgtgcggcgtgctggcggcttggtccgtcgcgtccgcgtccaatccggtcattgccgcgagccagagattgcctccactctcaacggagccaaaccgatgcgagcgcgcattcgtggggaacacacatggccaggcaaacggggtgtacgacaagccccttgatctccggttctgtgattacacgaacgagaaaaccaatctaaagggcaagtctttagctgcagcgctgatgtccgaggcaaagttcga

SEQ ID NO: 6375 - DNA, 371 bp, Zea mays
  unsure (1)..(371): unsure at all n locations; Clone ID: LIB3137-024-Q1-K1-F11
agctgctctcgtccctagaaataaagcagctcctccgcggggcggagaactactacccagcggcaaaaccctagccccgatccggtcgaggagcactacttcttggcatggcggtcacccctagccaggcaagcctcctgctccagaagcagctcaaggatcttgcgaagaaccccgtggatgggttctccgcagggcttgtagacgatagcaacgtcttcgagtggcaggtcaccatcatcggcccgaccgacaccctatatgatggaggctacttcaatgcaataatgaccttcccccagaactatcccaacagcccgncatcagtaagatttacttctgggatgtggcatccgaatgttcatccggat

SEQ ID NO: 6376 - DNA, 199 bp, Zea mays
  Clone ID: LIB3137-024-Q1-K1-F12
agcctgcctaaggtgaatatggcaacactttgcttgagaagtctgattatctcacatcggaggcaaaggcttctaacatagaaaacagattgcctgccgacactacaaattcgctcaactattctaagtatgacagagtgaaaacaacaccactatcactgctctccaacacgaacgttcaaccatctgaaagacaaat

SEQ ID NO: 6377 - DNA, 298 bp, Zea mays
  Clone ID: LIB3137-024-Q1-K1-F2
ctcatctcaagagcgactagagagagagagaggacgagaacaagcgataagctcatctagcacgcaagatgcgggctccaaggggcgcaagcggctgccgcggcggccacgagcatgtggaactgatccctggcatccccagacaacgtggccgtggactgcctgacgcgcgtcccccacgcctcccaccgtgcgatgcgcccggtctgccgctgatggcggagcgccatcgacgcgccggcctttgagtctgctcgcgccgcggctgtcgccaactaggacctcgtgtacctgatgc

SEQ ID NO: 6378 - DNA, 450 bp, Zea mays
  Clone ID: LIB3137-024-Q1-K1-F3
cacaatggcaccagaaaggatgctcctcggcttctgtgccgtgctgatggtggtcggcgtcacgaacgcggcggagggccaggtggcgtcggtcgtcgtgggcctggcgaggtgcgccgacagcacgaggaagaacatgaaggctgaggccggtttcaagggtcttcaggtggcgatcaagtgcaagaacagcaacggcgagtacgagacaaaggccgtgagtgagatccaaagctccggagccttcagcgtcccactcgccgccgacctccacggcgccgactgccacgcgcagctccacagcgccgccaataacgcgccttgccctgggcaggagccgtccaggatcgcgcccatgtcaggcggcaccttcgtcgccgtgcctggcaagatgcactacccgtccgcggagtgcgcgttcgcgtttctctgctcccgatcaagaagcac

SEQ ID NO: 6379 - DNA, 435 bp, Zea mays
  Clone ID: LIB3137-024-Q1-K1-F4
gaacgaacaggacagcgagagaaagcaaagcgagctgctgcttccttatccggttcttcgccgtgagcgctccacagggaacggaacgggaactgggggatcgggatccttacgttgttgtgtgtattatcgagcaagctaagagccatgggcagcgagtgcaagggctacggcgtcggcgtcgccaccagcccgcagcaggagcaggagcacgagcaggctggcgccgccgtcgcaccgttcgtggccaagacgttccacatggtgagcgacccggccacggacgccgtcgtgcgctggggtggcgccagcaacacctttcacgttctctacccggccaccttcttcgactacctgctgcccttctactttaagcacgcgaacttcgccagctttgttcggcagctcaacacctacgggtttatgaaggtggac

SEQ ID NO: 6380 - DNA, 425 bp, Zea mays
  Clone ID: LIB3137-024-Q1-K1-F5
acaaaacataaaaacatctaacattatagcttagagagactaaatccccggaataggagccagaagaagggccaaactcttggccccggataactcccaaagctccttttcttctccagcccttctgatagctgcatccaggtttggggaaaggctgtcaaacacacaactgtttctgtggttccaaataatccaaagccccagaataattaaggagttaaaccctttcttggcaattccatgcagctgatcgctgcagcttttccaccactgcatggcgtttccctcttccatttgaggagtgagaccctcaagattaacctgtccaagcagcccttacccctagcgaaaacacaacctacaagcaggtggtttatggtttctggttcttggccacacaatgcggcaacaatcacgatggttga

SEQ ID NO: 6381 - DNA, 438 bp, Zea mays
  Clone ID: LIB3137-024-Q1-K1-F6
gcagaagagcggcaaccgcgtgtgtgccgactgcggcgcacctgatcccaaatgggcatcggctaacattggagtattcatttgcctaaagtgttctggtgttcacagaagcctcgggacacatgtttcaaaggtgctgtcagtcacactagatcaatggacggatgatgagatcaactccatgatagaagttggtggaaactcttatgccaatgctatatatgaagcatttctgccagagggctatcagaagccgcatccagattctagccaagaagagagagctgatttcatcaggtcgaagtatgagttgcaagaattcctgaagccaagcctaaggttagtttccagcaataagggctctttagaggctaccagtaccagctctcgaaaacataaggacaatactgtgtctctttctgctagtttcagcagtga

SEQ ID NO: 6382 - DNA, 328 bp, Zea mays
  Clone ID: LIB3137-024-Q1-K1-F7
gcagaacaacaataaccgtttgtttgcctattgctgtgcacctgatcccaaatggggatcgggtagcattgcaaaattcatttgcctaaaaccctttcctgttcacacaagccattacacacatgtttaagaagcgctgtcctgtccagtacatcaaattatggacgacatatatcacctccatgctagaacttcctggctactcttacacccatgctatatttaacatatttatcatatatgtctatgacacacatggtttatcttctacaacttaccttatgaaagctattttcaaggctatgggtgtgaggactgactttctgga

SEQ ID NO: 6383 - DNA, 400 bp, Zea mays
  Clone ID: LIB3137-024-Q1-K1-F8
ccgggccgacccacgcgtacggcccaaaacaccgactcttacgtcgcccgttttgcttactgcaccgccaaacgagggataggactcaaggagcgtgatggcggccatgccggcgcctcttctgcctatgattctgctgacggtggacgcggcgatgacgctctgccccgcctgacaacgcattccaggtgtgatcagccacgacgcgaccagctgcccaagccctcacgacaaggtctactgcggaagctacgcttcggacaccatgggcaacgcctgcgggtactgtaacctgtacagccaagggtactgcgtgaacaacgcggtgctgatcacggaactgttcaacgaggggctacgctgcggcgcgtgcttctagatcaggtgcgaggagcacccc

SEQ ID NO: 6384 - DNA, 398 bp, Zea mays
  Clone ID: LIB3137-024-Q1-K1-F9
ggcgtgcggaaggagtcggagggaaccgtaaactcaaggtctctaattttctaggagcggaggcgatggctggtaagggaggaaaaggattgctcgccgcgaatacgactgcggtcaagtctgcggagaatgacagggggaagaaggcccccatatcacggttctcccgcgcgggccttcagttttctgttggacgaatccaccgtcagctgaagcaaaggactcatgcaaatggccgcgttggtgccactgcagccgactactctgccgccattctggagtacttgactgccgaggttttggagctggccgagaacgctagcaaggatctgaaggtgaatcgtatcacccctcgccacctacagttggccattctcggagactaggagctggacacc

SEQ ID NO: 6385 - DNA, 298 bp, Zea mays
  Clone ID: LIB3137-024-Q1-K1-G1
cgacgcgtgggcgccagcctggtggcggccggcgacctgtttgtgtccgtgggagaggacgggctcgcggggctcaccgaagccgacaagcgtggggccgttgccgtcgtagctgatcaggacctcaacattgagggcacccttgcctgtcgcgcgctggtcattgtagacgacattttgactgcgctccgggtactccctgcctgcttgtacagccggccgtcgatgaacatggctatcataggtgtcactggcacagatggcgtaactaccacaactcacctcgtgaaagcaatgt

SEQ ID NO: 6386 - DNA, 425 bp, Zea mays
  Clone ID: LIB3137-024-Q1-K1-G10
aaaaggtgtacggaacattgctttacaatttaacagaaacttgagctggaacccgactaggggccttttctggccttccagccttctgcatctagcccatctggtgtggctagaaactatcaccgacaagcccttctatcttgtgcacatcactcctacctctggctcagtcgtgcggatgaacccatccaccctgacttcaccatcacatatgctggggtgagggcaaagctggatagaatcatggcatcgagctactacacagctcatctataaatgatgacaccaatggatctggctgctccagtggcaaactttggagccggatgtgttcaggtgcaagagagcatggttgtgtctccttaggcactggaagcaatccaagagagccatgatgttgaaaacacaatgaccagaatgaagat

SEQ ID NO: 6387 - DNA, 337 bp, Zea mays
  Clone ID: LIB3137-024-Q1-K1-G11
aaaaggtggacagaacatggctttacaattttacagaagcttgagctcttaacccttgagggaccctcccctaactctctagacactacttttatcatcacaacattgttttgacactacttagccgtgaccacctactatattattcacatagccttcatcaataccaacaacttcttattctattacatccaatctatcgcttccctaatccatgaaccaaagaatataccctctccttgatgaaaatcatcacttcattatattgcacaacttataatcccttttaattatcttttcccactactttaatagatttattttttacctctaccta

SEQ ID NO: 6388 - DNA, 302 bp, Zea mays
  Clone ID: LIB3137-024-Q1-K1-G12
gcctcacttatgactacgtcggggatgatccggaagacagtctcgtggagaccgatctgaacgccgtttctgcccttgccaccctcgcggcgtcgcgccctcctgctgcagctggagtctctcaccgtgatgccctccaggcttgtgcccatcacgcccgcctctggctcagccgtgcggatgaacccatccaccctgactccaccatcacatatgctggggtgagggcaaagctggatagaatcatggcatcgggctactacacagctcagctagaaatgaggacaccaatggatcttgct

SEQ ID NO: 6389 - DNA, 212 bp, Zea mays
  Clone ID: LIB3137-024-Q1-K1-G2
gcaagatggcctcgaacccagccctaatgggtcagcacgccttgaagcaggtcgctgcattggggattggcggcggagccagccagtccatctatgatggcggcttccagggcatcaatactgccaccggcacaacttccgtccagcagcagcagcagctcatgtactactagagtactactactccatgaggcacccagctacccatccct

SEQ ID NO: 6390 - DNA, 364 bp, Zea mays
  Clone ID: LIB3137-024-Q1-K1-G3
cctgaacacctctctctcgccacctctcctgaacacctgctcgccccaaccatttccttcggatgggcgggcttcggccttgcgccggcggagctttgaattggcttcgaccggcaattcggcgaggcgcccgtgacgcattgggtgcagcgtttggatactacacctgctggcagctacagggaaatattttgaattggagatctatatccgcaactaaaaagctctggagtacagtagctagtgcaaagcctgatgattctaaatttgaaagtgtggatgcaccacttgagccccaaacatgtgaaggcagcttcttgtgtggtctgttgaagaacctgccacacatttttctagctgcagc

SEQ ID NO: 6391 - DNA, 452 bp, Zea mays
  Clone ID: LIB3137-024-Q1-K1-G4
ctcttcgcatcccgaggcggcgcttttggggtcggaagcgacacgggcgcccggcgggtccgcgggtggtggtgctactgctagcaagcagcagcaggcgacgctaggcgagagccccagtcggagcaggccaccatgtgcggcatcctcgctgtcctcggcgtcgctgaggtctccctcgccaagcgctcccgcatcattgagctctcgcgcaggttacggcaccgagggcctgattggagtggtttgcactgtcatgaggattgttaccttgcacaccagcggttggctattatcgatcctacatctggagaccagcctttgtacaatgaggataaaacagttgttgtaacggtgaacggagagatctataaccatgaagaattgaaagctaagttgaaaactcatgagttccaaactggcagtgattgtgaaattatagcccatcttta

SEQ ID NO: 6392 - DNA, 445 bp, Zea mays
  Clone ID: LIB3137-024-Q1-K1-G5
ccccgatcccgctcgctcgctcgctcgccgccagttgtccaacagctcgaatcgtctcatacctcggcgaaaatgagagagatcttgcacatccagggagggcaatgtggcaaccagatcggtgccaagttctgggaggtcgtgtgtgacgaacacggcattgacactacaggtcggtacactggcacttctgaccttcagttggagcgcgtcaatgtctactacaatgaggcctcctgtggccgctttgtgccccgtgctgttctcatggacctagagcctgggacaatggacagtgtccgcactggaccctatgggcagatcttccgccctgacaactttgtgtttgggcaatctggtgctggtaacaactgggcgaaggggcattacactgagggcgctgagctcattgactctgttctcgatgttgtgaggaatgaagctg

SEQ ID NO: 6393 - DNA, 449 bp, Zea mays
  Clone ID: LIB3137-024-Q1-K1-G6
agcaaatgcagtcacagatgggttggagaacagtgatattgctgctctccattacagctcggcatccagatgcttctgaagttggtttcgaggctatcatgacagagagggctcacctttcactagtgaactgtcccaagagataaaagcaacatctcgcctagcttgctgcctgatgtttttccaagtcagcaggagtacgagcagcagggcagtgccggccggtcggacgcgtgggtttcagcaatctcagcactgaaggttttgaaagttacggggaaactccagaggttaacgagaccagtggaggtcattgcattcagcgatgaggaaggcatcagattccagacaacttttctgggaagcgctgctgtagctggtacactacctgaatcaattttacaagtatcagataagagtggcactacactacaagatgttctgaaaat

SEQ ID NO: 6394 - DNA, 404 bp, Zea mays
  Clone ID: LIB3137-024-Q1-K1-G7
gccaccgccctcccgcgtgccgtcgccttccctgcaatcgccgtcgcggcggcgcccctgcgcccgcgccgcgcgccgaggccggtggcggcccgggccgggggcgaggagagggagacgatactgctccccgggtgcgactacaaccactggctgatcgttatggagttccccaaggaccctgcgcccacccgcgagcagatgatcgacacctacctcatcacactcgccaccgtcctcggcagcatggaggaagccaagaagaacatgtacgccttcagcacgaccacctacaccgggttccagtgcaccgtggacgatgagacgtcggagaagctcaagggtctgtctggggtgctgtgggtgctccctgattcctacatcgacgtgaagaacaaggacta

SEQ ID NO: 6395 - DNA, 450 bp, Zea mays
  Clone ID: LIB3137-024-Q1-K1-G8
gccaccgaggaaaccgacctcgcccagaagtacgacgtccagggcttccccaccatcctcttcttcatcgatggcgtccccagaggctataacggagccaggaccaaggaagccatcgtcgactggatcaacaagaagctcggcccagccgtgcaaaatgtcaccagcgtcgacgaggcccagagcatactcaccggagatgacaaagccgtccttgccttcctcgacacactatccggtgctcacagtgatgagcttgctgctgcttcgaggctggaagatagcatcaacttttatcagacttcgactcctgatgttgctaagcttttccatatcgatgcagcagcgaagcgtccatccgtagtgctgctgaagaaagaggaggagaagttgaccttctatgatggggagtttaaagcatcagccattgctggttttgtgtctgctaac

SEQ ID NO: 6396 - DNA, 321 bp, Zea mays
  Clone ID: LIB3137-024-Q1-K1-G9
atgaggtgggcagatcatggattgacaatctatcagaagctagagcgcttctggtttcgcgcccattcgcctgaaggacaagccttactggatcatcaagaactcgtggggcgagaactggggggagaacggatactacatgatatgcaggggttccaacgttcgcaacaagtgcggcgtctattccatggtctctaccgtgtccgcagtccacgcctcgaaggagtagactctggtcatcggtgataatcgtgattccatatattgtagaactataatccctgctaagtaatcaattgctattgcctggagaggctaatc

SEQ ID NO: 6397 - DNA, 423 bp, Zea mays
  Clone ID: LIB3137-024-Q1-K1-H1
cttggacttccattaacgctgcgaaagataaccaaggatcaggcgcagccaattattgacaaatttgcaaatcagcttcctggatggaaggcagacttgatgacaagggctgggagaacagttcaagtgcggtttgtgcttactgggatgctcatctacttagtaatggcaattgatctcccaacttatatcacaaaagcaatcgataaaatccgaagaggctttctttggagaggtcgcaaagagctaaatggggggcattgtcttgtttcttggagcaaagtttgtcggcctcttgatttgggtggtcttggtatttcaagcattaaggagctgagttgggcgctgcggatgcgttggttatggctgcaaaaaacggagcttaaccgaccttagtcatccttgactattcgagttccggac

SEQ ID NO: 6398 - DNA, 453 bp, Zea mays
  Clone ID: LIB3137-024-Q1-K1-H10
ctgcagttaaatactcccgtggaacgttcatattccctgaagcacagccttccccacacaagaacttcgctgacgaggttgccttcctgaatcgcttcttcggtggcctcaagtccggtggcaatgcttatgtgattggtgactctgcgaagcccgggcagaagtggcacgtctactacgccgctgagcaccctgaggagcctgtcgttactctggagatgtgcatgactgggctggacaagaagaaagcttctgtcttcttcaagaccactgctgatggttactcgctgtgcgccaaggagatgaccaagctctctggtatctcggacatcatcccagagatggagatctgtgacttcgacttcgagccctgtggctactccatgaatgctgttcatggccctgctttgtcgaccattcatgtgaccccagaggacggcttcagctatgcaa

SEQ ID NO: 6399 - DNA, 429 bp, Zea mays
  unsure (1)..(429): unsure at all n locations; Clone ID: LIB3137-024-Q1-K1-H11
cgccggcatgccgctcgactcgctcgtctgcaacgccgccatctaccggcccacggcaaggacgccgacgttcacggcggacggatacgagatgagcgtcggcgtcaaccacctgggccacttcctcctggcgcgcctgctcctggacgacatgcagaagtccgactacccgtcccgccgcctcatcatcctcggctccatcaccggcaacaccaacacgctggccgggaacatcccgcccaaggccgggctgggcgacctncgcggcctcgcggcggggctgcgcggccagaacggctctgccatgatcgacggctccgagagcttcgacggcgccaaggcgtacaaggacagcaagatctgcaacatgctaacaatgcaggagctgcaccggcggtaccacgaggagacgggcatcacgttcgcgtc

SEQ ID NO: 6400 - DNA, 447 bp, Zea mays
  Clone ID: LIB3137-024-Q1-K1-H12
cgccgctgtgccgatcgcctggctcgtttgcaactccatcatctaccggacccctggaaggacgctgacgttcactgggggccgatacgatatgagcgttggcgtcaaccacgtgtgccacgttcctcctggcgcgcctgctactggacgacatgcagaagtccgactacccgtcccgtcgcctcatcatcctcggctgcatcaccggcaacaccaacacgctggccggtaacatcccgcccaaggccgggctgggcgacctccgaggactcgcggtggtgctgcgcggccagaacggctctgccatgatcgacggctccgagagcttcgacggcgccaaggcgtacaaggacagcaagatctgcaacatgctaacaatgcatgagctgcaccggcggtaccacgaggagacgggcatcacgttcgcgtcgctctacccggggtgca

SEQ ID NO: 6401 - DNA, 231 bp, Zea mays
  Clone ID: LIB3137-024-Q1-K1-H2
acgcttggtctttcattaacggtgacaaagatattctaggatcacgcgcatccaattattgacacgatcgcggatgagcttcctggatggcccgcagacttgatgacatcggctggaagaacagttcaagcgctggatgtacatactgatatgcgcatccacttagtaatgtcaatggatcttccaagttgggtccctaaacatgtggatatacacagaagaggctttctt

SEQ ID NO: 6402 - DNA, 329 bp, Zea mays
  Clone ID: LIB3137-024-Q1-K1-H3
cggacgcgtgggcggacgcgtgggcggacgcgtgggcggacgcgtgggcggacgcgtgggatcgaaatagcacaaaagatcggtgaggtgattgccaagtcttgcttggagaaagggatcaccaaggttgtcttcgaccgaggtggtttcctctaccatggccgcataaaggctctcgctgattctgccagagagcacgggcttgaattctgagtcgtccaggcgtttgttcatatctccaggatcacctgtaatcttcttctttttttgttctctccatatgccgaacagagctgttttgtagtcactcgccttgttctacagggtgc

SEQ ID NO: 6403 - DNA, 450 bp, Zea mays
  Clone ID: LIB3137-024-Q1-K1-H4
gagagatccggagcagccgcagtcccaccgaccccgccgccggtcgccctccatctcctcgccgctgcctctcgtttctcttttcaataatcaagatgagccgtggtggtagtgccggtggtggtcaaagttctctgggttatctctttggaagcggtgagccccccaaaccagcagtggcaccagctgcaagtgctccacctgttgagaaaccatctgctgcaaagactgatgcggccaagcaggttgctgctggggttaccagccaaaccaataactaccacagggctgatggtcagaacactggcaacttccttacggaccgtccttcaaccaaggtccacgctgctcctggcggtggctctttcctgggctacctgttcggtggcaactgatgcccgtgctggtgctcaccaaagttatccttccctgcctgctgcgtgctatgtc

SEQ ID NO: 6404 - DNA, 392 bp, Zea mays
  Clone ID: LIB3137-024-Q1-K1-H5
agtcacttcgccacgaacaaaagcgcatcgatctcgctgtcgtcactcctcgtcacccagccacgaacagaggcaccacccagcatggccctgcaggcggcgctcctcccatccaccctctcatccgtccccaagaagtgcagcctcgccgtcgcggcgaaggacacggcattccttagcgtatcccagaagaaggtgcaggcggcgtcgctgtcggtgagaacgcgggtggcgacgacggcgcctgtggccacgccggggtccagcacggcggccaaggatgggaagaagaccgtgcggcagggcgtggtggtgatcacgggcgcgtcgtcggggttgggcctggcggcggccaaggcgctggcggagaccggcaagtggcacgtggtgat

SEQ ID NO: 6405 - DNA, 449 bp, Zea mays
  Clone ID: LIB3137-024-Q1-K1-H6
cccacgcgtccgcctgaagaagaacccagagtaccacgaggagtgaagaacccagatagcatattggtgtttccgaggcccgtccagataggcagcctcgaagccgaatcgtttgcgcggccttggatatctatcttctttcttgctcagcggcagcgccatcctggccctctccttcctgggtccgtgtccatgtttgattcttatcttaccggagcggtggctaactgaaagagctgtctttggttggcttaacttgtagtacgaccgtatttattaattactagaagacgtttatagagcttacgatgtacggcgaggtgatgacatggtggcatagcgtagtgtaatttttttttggcgttcgtctcggccaatccatagcatacatagtccttgttttgacattgtgaaccatcattatccgttccctgtattttttggtttcg

SEQ ID NO: 6406 - DNA, 448 bp, Zea mays
  Clone ID: LIB3137-024-Q1-K1-H7
tgcgtgtgcaacggctaccacctgcgcgacccaccgcgagcgcccgcagctaagctagctctcgctcgcgcgctctgggagaggagagatcaatggcgtcccgtggcagcatgacctgtagtcttcagctcgccgacctcgtttccgccgccatcgcgctcgggttcggcgtccgggccggcgaggcgcagctgtccagcgagtactacggccagacgtgccccgtcgtgcaccgggtcgcgcggcgggtgctgaagaaggcgcacgaggccgacgtccgcatctacgccagcctcacccgcctccatttccacgactgcttcgtgcaaggctgcgacggctccatcctgctggacaacagctcgagcatcgtgtcggagaagttcgccacgcccaacaacaactcggcgcgcgggtaccccgtggtcgacgcccgcaaggcggcgct

SEQ ID NO: 6407 - DNA, 374 bp, Zea mays
  Clone ID: LIB3137-024-Q1-K1-H8
cgcacgcgtggggtggtgaatccaggatggcaatcgtgtcatttgatacatgagtgagaagcgtggtgataaacagctggtagatacgtgcgctccgtgtaattattggagtactgtcggtggcggcaaccactgattaccagggatgcttgtaatatgttgtgacgggatacgaatgatgatgagcatatactgctgacatgcatggtgaagtcatagattgcttatgctctcctcttcctcattccatggcaactagcgtacttgcgaagagatattcttttctgtccgttgctctagtaggggtttctgctctcaaggtgtccgcatgagagacgcagtaccatgttaaaattcttgatgaactacttgac

SEQ ID NO: 6408 - DNA, 213 bp, Zea mays
  Clone ID: LIB3137-027-Q1-K1-A1
ggccgcgtggtgaaatgttgcaagattatctcgtctaggctggcctaaaaatctgggtgctgatgttgatgctatgaaggctgttgctgagcatactctaaaagatctttaagtattttgaaactgcccttcgtgattataagtccagctggaggaggaccctattgtccacaggcatctttcttctctgtatgatacactgctggagcaaaa

SEQ ID NO: 6409 - DNA, 391 bp, Zea mays
  unsure (1)..(391): unsure at all n locations; Clone ID: LIB3137-027-Q1-K1-A10
acctcaccggctccattcgaccattccatcctttccttatcccctcccgcttcgtctccctggctggcttcctttcttcgccatggcaaccatgtccctccgctgcctcgccatggccatggccgacaccgcgctcccgcccgcccacaagctcctccccacagtttccctcccgctcctctcctcgtccacccgcgccgcgccgctcctcctcttcgccaggcgccgcctgccgctcgcgcccctcgttacctcctccgacgccgttgaggccaagtcggcagacgaggaggaggagaaggccggagagcccgtcgaaatggaagctggggagtttgaggaggtgctagcctcangcggcgaaggtgaggggcagtacgccgcggtggag

SEQ ID NO: 6410 - DNA, 303 bp, Zea mays
  Clone ID: LIB3137-027-Q1-K1-A11
ggaaaaaccgggccgaccgacgcgtacgacctgacccactccattttaccatcccattctattcttatcccctaccgctaaccctccctgcctggctttctttctacgccgtgccaaccatcaccctccgctgcctctccatcgccatgtccgacaccgcactccctcccatccacaagctcctccccacagtttccctcccactcctcacctcatccacccgcgcctcgccgctcctcctctacgccaggcgccacctgccgctcgctcccctcattacctcctccgacgccgttgaagcca

SEQ ID NO: 6411 - DNA, 228 bp, Zea mays
  Clone ID: LIB3137-027-Q1-K1-A2
gggagcgcaattccccggcgacaacgacgtttcggaagtagacgcggcccgctacggagaggtggaccgccgtgacgtgggcaagatgaagcacgggtgcgagcattaccgtcggaggtgcaagatcgcggcaccgtgctgcaaccaggtgttcccctgccgccactggcacaacgaggctacggtttccggagatcggcatacaatatgtcgtcaagatgttgaaaa

SEQ ID NO: 6412 - DNA, 261 bp, Zea mays
  unsure (1)..(261): unsure at all n locations; Clone ID: LIB3137-027-Q1-K1-A3
gcaaatcctgcanacaccaccgctcgtttttttctccgggacaggagaaaaggggagagaggggtgaggcgcggtgtccgcccgatctgctctgccccgacgcagctgttacgacctcctcagtctcagtcaggagcaagatgggtgccggcggcaggatgaccgagaaggagcgggagaagcaggagcagctcgcccgtgctaccggtggcgccgagatgcagcggtcgccggtggagaagccttcgttcactctgggtc

SEQ ID NO: 6413 - DNA, 397 bp, Zea mays
  Clone ID: LIB3137-027-Q1-K1-A5
gccttttcctcacgacctcgccgccacgcttttgtctcgccgctgattgcggtcccccatggaaccgtcgtcctctcaatccgtccgccgctccatcgtcttcctgtatttgtgctgctgatatgtgtaacttgtgtttctccaggtgaaggcggccgagcacgcggccgagatggaggcgacggtggccgtcgcggctgccgtggaggccgaggaggaggaggctgctgctgctgcggcttcgacgccgcagcggtctgggaggaaacggccccgcgcgattgggagtgggcggtaccgctcggtgtccaggtgtttctcccaatctcccctgctttcctcatcctgctgccgcttttgcttttaatcgctgtgacagcatagcactcgcctcgtc

SEQ ID NO: 6414 - DNA, 360 bp, Zea mays
  Clone ID: LIB3137-027-Q1-K1-A6
caccaccactccacagtgcacttcactctacatcaacgacagaaaagtgagcagcagcatcagctgctgccatggaggcgtggagatctctcctcgcgagcttcgtgctcgccgtgctggccgcgcaggccttggtggccgtggtcgagtccaggaccggccccgtggagcaggcgagccaaggtgacgacgtgaagaagccggactgcgtgccggggatggacccgcgctcgttcccagggaccggcggcggccacggcatcacgcccgtgacgccatcgcacggaggctccagctccccgacgccgtcccacggcggcggcggcgggtacgttccaacgccgtcgcatggcgggacgc

SEQ ID NO: 6415 - DNA, 287 bp, Zea mays
  Clone ID: LIB3137-027-Q1-K1-A7
cggacgcgtgggtgacgatgttgcacgaataatctcgtctaggctggcctaaaatatctgggtcctgatgttgatgctatgaaggctgttgctgatgcatactctaaaagatctctcaagtattttgaaactgcccttcgtgattataagtcccagctggaggaggaccctattgtccacaggcatctttcttctctgtatgatacactgctggagcaaaatctctgcaggttgattgagccctactcaagggtggagattgcgcatatagcagagatgattgaatt

SEQ ID NO: 6416 - DNA, 231 bp, Zea mays
  Clone ID: LIB3137-027-Q1-K1-A8
cggacgcgtgggatcagattcagatcagatcgtagcagccaaggattccgcgctccgggggtgccatgaagctgaagctcctctctccctgccttctcctcctcgccttctttgccaccgcggcgtacgcggcgtcggcgtcggcgtcgcgcgcggcggccgtcgtcaggggcgcgggcgccccgtcgcagtcggagttggagtcggacccggagaaccagtgcgtgtaca

SEQ ID NO: 6417 - DNA, 266 bp, Zea mays
  Clone ID: LIB3137-027-Q1-K1-A9
cggcggacggtagacgattgataccatcggtctatctaccgaccgggacacgaccgagaggcgcggaggagctgattgctcagggagcggacgaaacctaaggacctgatggctcttctactgacgatctcatgagcgcacatttggcgcgcgccatctaacacggattcgatctatgataaagggagaccgttcgtcctgaccccgtgctgcgagataagcaatagtatgactggtaaaggcactagattacaatagcctgactg

SEQ ID NO: 6418 - DNA, 371 bp, Zea mays
  unsure (1)..(371): unsure at all n locations; Clone ID: LIB3137-027-Q1-K1-B1
acgcctgctcctcgccgatcgatacgatggctgtcttctccgacctccacaccgccgacggcctcaagtccctcgaggctcacctcgccggcaaaacctatgtgtctggtgactccattactaaggatgacattaaggtcttcgccgcggtgccgtcgaagcctggcgctgagtttcctaatgccgcccgctggtacgagaccgtctctgcggctgtagcctcaagattccctggtaaggctgttggtgtaaatctgcctgcgggatcagctcctgcggcagctgctcctgcggatgaggctgaagacgatgatgaccttgatctttttggtgatgaaactgaggaggacaagaaggcanctgatgagcgt

SEQ ID NO: 6419 - DNA, 401 bp, Zea mays
  Clone ID: LIB3137-027-Q1-K1-B10
ctcctcctccctgcaaattctgcagacaccatcgctcgtttttctctccgggacaggagaaaaggggagagagaggtgaggcgcggtgtccgcccgatctgctctgccccgacgcagctgttacgacctcctcagtctcagtcaggagcaagatgggtgccggcggcaggatgaccgagaaggagcgggagaagcaggagcagctcgcccgtgctaccggtggcgccgcgatgcagcggtcgccggtggagaagcctccgttcactctgggtcagatcaagaaggccatcccgccacactgcttcgagcgctcggtgctcaagtccttctcgtacgtggtccacgacctggtgatcgccgcggcgctcctctacttcgcgctggccatcataccggcgctc

SEQ ID NO: 6420 - DNA, 302 bp, Zea mays
  Clone ID: LIB3137-027-Q1-K1-B11
cccacaccccccgcgctttccgcaccaccaatctatcttcgctcactacagtgaccagagcgcgagagctaactagagggccgcgcaaatgcccatcaatacgatcgccctgcggagccaccatgacgtgtaccaccccggcgcactccaagaggggtgcgagcggttgcatgacctatctggcgtagcagacgcagcagcagcatgcgatggctaactttagggaccacatgcagcggatccgcagtagaaacgcctacattcaatctgctccacatcaagaagctcaacctgctacactt

SEQ ID NO: 6421 - DNA, 385 bp, Zea mays
  Clone ID: LIB3137-027-Q1-K1-B12
cccatcgtcccgcctacgcactgccgcccaacgatctacgagctgccatggctaactcagcggcaccgggaggaatgaggtcgttcctgcaggccgtgtctacggtcaccgaggaggcgccgacgccactccgcgtcgtccagatggagggcctggctgtactgaagatcatcaagcactgtgaggagtttgcgccagctttagttacaggtcaattgcttggtttggatgttggtagtgttctggaagtgaccaactgttttccgttccctatcagggaagaggatgatgaagcagatgcagatggtgccaattatcagcttgagatgatgaggtgtttgagggaagttaatgttgacaacaatactattggatggtatcagtc

SEQ ID NO: 6422 - DNA, 264 bp, Zea mays
  Clone ID: LIB3137-027-Q1-K1-B2
gttctagatcgcgagcgccgccctttatttttttttttttttatttttacattttttttggggttttttttttttttgtttaaccactggcaaaataaaccaatgtttttagagccaattttaacgctgcttaagggtgaaaactgatcttgcgcaagaaaagagctccatcgcctgccttgcttttcttgctgagacgatcgaagggactgccaaattaattacttccattgcgggggacgcttacttagatttccttaccgg

SEQ ID NO: 6423 - DNA, 396 bp, Zea mays
  Clone ID: LIB3137-027-Q1-K1-B3
gatccttctaagctcagcatgaaggctgcatttgggaaggtttggcggttggaagaaactggaggtagtattattggtggaaccatcaagacaattcaggagaggagcaagaatccaaaaccaccgagggatgcccgccttccgaagccaaaagggcagacagttgcatctttcaggaagggtcttgccatgcttccaaatgccattacatccagcttgggtagtaaagtcaaactatcatggaaactcacgagcattacaaaatcagatgacaagggatatgttttggagtatgaaacgccagaaggggttgtttccgtgcaggctaaaagtgttatcatgactattccatcatatgttgctagcaacattttgcgtccactttcaaacgatgct

SEQ ID NO: 6424 - DNA, 333 bp, Zea mays
  Clone ID: LIB3137-027-Q1-K1-B4
ctccttctacttgcaaaatccgcatagcgcttgtttctgtccccgctcgcgcgcttactgggggacgcgctccggcggcaccagcgatggggaccacccgttgtcgccgatctctctaagctccgacgcgtgcctccatccctcgtcgctgaggtcctcactgcgcgcccttcaccgccggcgccgctcgcgctcccattcttactctgggccggccgccagaagggcttacgtcactgcttaccagctttacatgccctcgcctcgctactgtccgcggtaggccttccagtcaaggctgaccaggtccccgacctcatgcggacgcaacgg

SEQ ID NO: 6425 - DNA, 397 bp, Zea mays
  Clone ID: LIB3137-027-Q1-K1-B5
gcgcgttcgcgtgcgttctaggcacaggcagttcgaggcgagccccttccgctcagtggccgccgccggaccgtggacgcagctagcccatcagcccatggcagggacggacgtcgcaggctccgcacgcggctccgatgccgcgctcggcaagacgggcgaaccacccgccgcggcgcgctctggcgcagccaagaaggtggctctcgctctgctagcctccttctcggcgctgctgtacagccagattcagccgccgccgtctaagatccccggcacgccgggcgggcctccggtcacggcgcccagaacaaggctcaaggacggccggcacttggcgtacctggaatccggcgtcccaaaggagaaggccaagtacaagatcattttcgttcac

SEQ ID NO: 6426 - DNA, 344 bp, Zea mays
  Clone ID: LIB3137-027-Q1-K1-B6
cccacaccccccgagctgagcttagctccactccagctccaatcacagtcgtgaccagagcgcgagagctagctagagggccgtgaaaatgccgatcaataggatcgccctggggagccaccaggaggtgtaccacccgggcgccctcaaggcggcgttcgctgagttcatctccaccctcatcttcgtcttcgccggccagggctccggcatggccttcagcaagctgaccggcggcggcccgacgaccccggcgggcctgatcgcggcggcggtggcgcacgcgttcgcgctgttcgtggcggtgtcggtgggcgcgaacatctccggcgggcacgtgaacc

SEQ ID NO: 6427 - DNA, 300 bp, Zea mays
  Clone ID: LIB3137-027-Q1-K1-B7
caacctcgcctcgcggtcgcagcctcgccctgatttattaacaggcaaacaaatgtcccgtccgttccctcgagaaaaggccacttctgcctgtgtgcatcgcttgccagcttccgcctttccatgaccacgccgctcctgctgtgattctaggacgacgtgccgcccgggccggctgccttctcacgccgggagggttggggaacgagcgccgcagccgccgccgtcaccacgaactcgcggaagaccatgccgagatccaggggcaacgagccgccgctgcggacgtcgcagcgcgcg

SEQ ID NO: 6428 - DNA, 397 bp, Zea mays
  Clone ID: LIB3137-027-Q1-K1-B8
ccgcacaaactcgtcgcttccgctccacaggtatcctctgcgccacccacaaccgtgcgaccgtccgtgctgccggcgaccccgatccgccgacccgtcccgtcccaccacaccctaccgccgctcgcagctatgtcgccgtcggagccgacgcgggaggagagcgtgtacatggccaagctggcagagcaggcggagcggtacgaggagatggtcgagttcatggagcgcgtcgcgcgctccgccggcggcgccggcggaggggaggagctctccgtggaggagcgcaacctgctgtccgtcgcctacaagaacgtcatcggcgcccgcagggcctcgtggcggatcatctcctccatcgagcagaaggaggagggccgcgggaacgaggcgcacg

SEQ ID NO: 6429 - DNA, 301 bp, Zea mays
  Clone ID: LIB3137-027-Q1-K1-B9
ctgacgagaggagtggatggcgatgcacatttatcaaggcgtagagtgcagcctaagggccacgggtccgtatagtgatgccaaaccttgaaccgaagaacaacaagcacaaggtactaaggttgatatataaggccttgtaggacggttcaaggcataagactgtctgcaaggatgtttttagagagcatcaggtcaagtcaactgtgttgaatgacggtaggaaagagcctccaatggatgaatcatgactggtgtgctggcagaaaatgatctatgtgctgcactatctagggcatat

SEQ ID NO: 6430 - DNA, 357 bp, Zea mays
  Clone ID: LIB3137-027-Q1-K1-C1
cagaggagagcgaggagccgaggaggcgtgcgattgcttgctttgcttccgagtttcgacacgcgtgcccaggaatcggtcggattccccaatcccgtcaccatggccgcgccgccttctccttcgtcccgctccccgtccagcgaggttgccgtccacagattcagcggcaccttggatgtatcatcatcgccctcaaggaccgagttgttgagcatggtgaagaagcactcacatttgattgggtggacgattattggtgccgaggatgatgcatcagatgtgggaatggatgataaattctggcatgaaatgcttgacctattctttgtgcgtggcaggcaatcaaaaagaagt

SEQ ID NO: 6431 - DNA, 383 bp, Zea mays
  Clone ID: LIB3137-027-Q1-K1-C10
cgaaccagagctgaacggtttcgaagcagtattatatgctcatcaaggatccgagccaacgggggaattgttgcgggtgagcagacgcccacggaataaaacacgccgaaacaagggcttatcaccgaccctgatacctcgatctggaacaaccgacatgctgatgaaagataaggttgtgaaaaagtgtatggaggaatggattctagccactacaaaggtgatcacacgtttgtcccagtcactcggaatggatacaggctagtcaacattgggtgatgtccttgttgatgtaaagaccactgggttctgtgctggtggcttagcatccatctcatattcgggaactaccttgtttgttggtcccacatacattattactg

SEQ ID NO: 6432 - DNA, 286 bp, Zea mays
  Clone ID: LIB3137-027-Q1-K1-C11
gttccaatgaatacaccactgctgggacaatttattccagtctcagcccttactggactacacagtatggataatggatgttctgcaacgggcgtgactgaatcagtttttgcacgactgtagtatgagtggctaggcctatgaggctatgaaatttgctgcaattggtacataaaagatacacacactggaggagtgtatgccgagggcttataattttccacaacttttgtacttgattatttgtaacaagacattgtttgcagaattgcacaactacatttgc

SEQ ID NO: 6433 - DNA, 209 bp, Zea mays
  Clone ID: LIB3137-027-Q1-K1-C12
ggcaaccgcagaactgggattcaaaaagcattttactcatgaggagaagcttgaaaagaggaagcacagacttgctgcaatcggagaggatcttttggcgattgctgctgatcaaccatttcgcttccctgccacatttacatttgtggtcagagcattctcagttctagatggtattgggaaaggccctgatcctaggattgatctta

SEQ ID NO: 6434 - DNA, 344 bp, Zea mays
  Clone ID: LIB3137-027-Q1-K1-C2
ggctccactaggatccccagggtgcagcaactgctccaggacttcttcaacggcaaggagctgtgcaagaacatcaaccccgatgaggctgtcgcctatggtgctgctgtccaggctgccatcctgagcggtgagggcaatgagaaggtgcaggacctgcttctgctggacgtcacccctctgtccctgggtctggagactgctggaggagttatgacagtgctgatcccgaggaacaccaccatccccaccaagaaggagcaggtattctccacctactcggacaaccagcccggtgtcctgatccaggtctacgagggtgagaggacccggacacgcgacaa

SEQ ID NO: 6435 - DNA, 406 bp, Zea mays
  unsure (1)..(406): unsure at all n locations; Clone ID: LIB3137-027-Q1-K1-C3
ggcgagttcatgcagcccgattgggacatgttccatagcttgcatccggcggcagagtaccacggcgcggcgagggccatcggtggctgcccgatatacgtcagcgacaagccggggaaccacaacttcgagctgctcaggaagctcgtgctccccgacggctccgtgctacgcgcgcagcttcccggccggcccacacgcgactgcctcttctccgacccggcgcgcgacggcgagagtttgctcaagatttggaacctgaacaagtgcggtggcgtggtgggtgtgttcaactgccanggagccgggtggtgccgcgtgaccaagcggacgcgcgtgcacgacgcgtctgcggcacgctgaccggcaccgtgcgtgccgacgacgtcgacgccatagcgcgcgt

SEQ ID NO: 6436 - DNA, 400 bp, Zea mays
  Clone ID: LIB3137-027-Q1-K1-C4
cgaagtcgaggtggaaggatcccaagaggtgttagcagctcatcaaggatcgagttcaagggtggtattgttgcttctgataaagcgccaaggaagaatgtacgccgagggcgtggtcgtggtcgtggtcgtagacgtggacgtcgaactgtgaggcctcggcagccatctgttggcagagccagatcaattccaaaggaaaatttgttgggaagctttagcatgcttagcagctcaaaggctgctaccattgaggagtctccacgaagctctggcgcagacgagtggggcttggagaccagatcgacatacactgaatgtgatgagaacagctctggatcacagtcagaagataacgaggaaaatggccagcccatggatgatgattatgaagatcaag

SEQ ID NO: 6437 - DNA, 379 bp, Zea mays
  Clone ID: LIB3137-027-Q1-K1-C5
ccaaccaaacccgcacgacacgacaccaagttgaggagctcgagggcaccaatcatggccggcgtgaactccagcgtcgtcgggctcaagcccgccgcggcagtgccgcaggccgccgccgcctcatcgccggcgaagcgggtgcagctggccgcgcccgagggccgccgcgccgctctgctcggcctggcggccgacttcgacgtcacggccaccaccgggtcggccaaggccacgatcttcgatgagtacctcgagaagagcaaggccaacaaggagctgaacgacaagaataggctggccaccagtggcgccaactttgcgcgcgcctacaccgtggagttcggcagctgacagttcccctacaacttcactgggt

SEQ ID NO: 6438 - DNA, 128 bp, Zea mays
  Clone ID: LIB3137-027-Q1-K1-C7
gcttcaacaccaaacacctaggggggcgtttttttcaggacttcttcaacggcaaggaggtgggcacgaacataaaccgcgatggggctgtcgcctatggtgctgctgtccaggctgccatcctgagc

SEQ ID NO: 6439 - DNA, 232 bp, Zea mays
  Clone ID: LIB3137-027-Q1-K1-C9
gtcgctataaaaccccctgacagagacgtgtcttatagccgcaaagcgcagcctcattgcgcgggattgctgagaaatgtcggaccttgccggaaagcgcaacctgcgcaggggccgaaactgccacccgaagcactgtaaggacggctaggttcatcggcctcgcgtcgccggtttttaaggtaaagccaggtaaggccaactgttcttaaaaaagaagggaggggggcgc

SEQ ID NO: 6440 - DNA, 340 bp, Zea mays
  Clone ID: LIB3137-027-Q1-K1-D1
ctcgccagaaaagcccctgacagtccggcactcgcaagccgcaaagtgcagcctcgttgctacaggaatgctgagaaatgtctgaccttgccggaaagcgcaacctgcgcagtggccgcaactgccaccgcaagcacgtcgaggacgggtaggttcatcggcctcgtcgtcgccgggttttcaggtaaagtcaggtcaggccaactgtgtcgaagaaaggaaggaggtgggcggcaatggaggatgcggtggcggcggacgggaagagcgtgctgcaggggcggtacgagctggggcgggtgctggggcacggcaacttcgggcgggtgcacgcggcgcg

SEQ ID NO: 6441 - DNA, 393 bp, Zea mays
  Clone ID: LIB3137-027-Q1-K1-D10
gtcatcactgatttccctgggactgctcactgatacaaactgaactcctgcacgagcatgggaaagaacatgccactattcatgcagcctccgcaaccaggtggcctcctttcaaccattctcccagatgcacagccaccagcagcagcgccaatgccgctcttgacggacgctgacgtcgcagaaccagcccttcctccggtcagcaacaccaccacggctgcatcgccttcgcatgccgccctcagaatgcgaacccatgtcttgagcatcgccacattgctgatgctatgtgcttccctcctcatctgaagatagtcctgctcaacatcatacgcggcgtggcgcattagagctgaggattttcacattgagctgctaatagcaattctt

SEQ ID NO: 6442 - DNA, 417 bp, Zea mays
  Clone ID: LIB3137-027-Q1-K1-D11
ccgggccgaccgcacgcgtccgggcatcactggtcctccttttacaacaccattatactaactgaactccagcacaaccatggggaagaacatgcctgcaatcaggcgaggcatcctttaccagattgccgatgattaaaccatttcccctagcctcacacatctccaactacaagacctatgacgctcttgactgacgcatacgtggcaaaaccagccctttctgctgtaagcaacaccactacggttgcatcgtcttcacatgccgccctcagaatgctaacccatgtcttgaacatcgccacattgctgatgctatgtgcttccctcctcatctgaagatagtcctgcttcaacatcatacgcggcgtggctcattagaactgaggattctcacattgagctgctaatagcaat

SEQ ID NO: 6443 - DNA, 391 bp, Zea mays
  Clone ID: LIB3137-027-Q1-K1-D12
ctctccactctctcttctccctccaataatactctccacccctgcttgctgcagcttcaagcgctaccgaatcagggcgagtgggagcagaggagggaatcccatgtctccgcccctcgctggagcagatcgttgtcgagccgacgtggagctgctgcggtagaaagctagcggagcctgcgagctagcctgatccgtccgcagtccgatcgggatcgatgggtggggaggcgccagagccgcggcggctgacccgggcgctgagcatcggcggcggtgactgcggctgggttcccgaggagatgctgcaactcgtgatggggttcgtcgaggacccgcgcgaccgagaggccgcgtggctggtgtgtcaccggtggcaccgcgtcgacgc

SEQ ID NO: 6444 - DNA, 362 bp, Zea mays
  Clone ID: LIB3137-027-Q1-K1-D2
ctcattggaaggcccgcgactgcggctgcgcctgcgcccgaccaaacgtaggagacccatctcctctcttttctttccaagaaaagtcttctcttctctgtctcagcgccgacgcttcccaactccttccaatcgattcttcgtctcgtcctcgtgtaatccccagcttgccctcctcgctcttccctctcaaaaccctacgcctccctgaccaagctccggggacgaatggacggaggagccggcttccctggcacgccggtcccgcgctcgccggaggacgttttccgggactaccgcgcgcgccaggccggcctaatcagggcgctcaccaccgatgttgagaagttctacgtgatgtg

SEQ ID NO: 6445 - DNA, 401 bp, Zea mays
  Clone ID: LIB3137-027-Q1-K1-D3
cccaaacaaccacactgacatctcatcttgatccatccagctttgcctcgatcgccggccggtagccatgtcccccacggaagaagccgctggtggtggtggcgacgactatgaccgcttgagcgagctgaaggcgttcgacgacagcaaggccggcgtcaagggcctcgtggacgctggcgtcacgaccatccctgccatcttccgcggccatctccttcaggaagggccgaaggtatcgtcctctagcagtagcagcagtactagtcttagcattatcccggtcatcgacctctcggcggcggacgcagtcgcacgggaggaggtggtcgcccagttgaaggctgcagccgaaacggtggggttcttccagcttgtgaaccacggcgttcccagcgagc

SEQ ID NO: 6446 - DNA, 394 bp, Zea mays
  Clone ID: LIB3137-027-Q1-K1-D4
ggcaaccgcagaactgggattcaaaaagcaattaactaaggaggagaagtttgaaaagaggaagcagagacttgctgcaatcggagaggatcttttggcgattgctgctgatcaaccatttcgcttccctgccacatttacatttgtggtcagagcattctcagttctagatggtattgggaaaggccttgatcctaggtttgatattacagagattgctaagccatatgccaaggaattgctaagatttaatgacgctggtgttgaaatagttgtgaaggatgcaaagaagagatgggaaaggcagtcccgtgccttttacaatttgttccgccaacccgatagagttgaaaagctcgcacaaattattgaacggttggagcacggtgaactc

SEQ ID NO: 6447 - DNA, 383 bp, Zea mays
  Clone ID: LIB3137-027-Q1-K1-D5
cggacgcgtgggctcctctatataatcacctgcaggtggtcttcaaagaaaagaataagaagaaaaacaggcgcaatatagcatcctgcatccaatccacagtagccgcggctactagctagctagtctgctccacgctgcagggcttttagcttaatggccgggctaagcgttctcctggagaaccacagcaagagctacaccgggaaggcggcggcggcgcagatcatcagcaaggccaccctcgtgacgacgacccacggccccaaccaccaccagcagcagcggaagatccctgtctctgcggcggctgcgggctccttcctgcagcgctgctgcctgtgccacaaagagcttgccgagggcatggacatctacatgta

SEQ ID NO: 6448 - DNA, 283 bp, Zea mays
  Clone ID: LIB3137-027-Q1-K1-D6
cggacgcgtgggcggacgcttggaaggacatttgactaaggcttgagaacgtcgaacacaaggatcccggactttgtggccgtaggagacgatctcttaccatactgttgatgatatacgaattcgttgccctgacccatttacatctgacgagcggaggatccctcagccaacatggacctgggcaaatgggtggatcctacgcttgaccatacagaccatcgatgagacatatactccggtatcggtgcaaggccatgaccctagctatgaaatatatgct

SEQ ID NO: 6449 - DNA, 199 bp, Zea mays
  Clone ID: LIB3137-027-Q1-K1-D7
ctcatcggaaggcccgcgactgcggctgcgtttgctcccgaccaaacgtaggagacccaggtcctctcttttctttccaagaagagccttctcttctctgtctcagcgccgacgcttcccaactccttccaatcgattcttcgtctcgtcctcgtgtaatccccagcttgccctcctcgctcttacctctgaaaaccct

SEQ ID NO: 6450 - DNA, 196 bp, Zea mays
  Clone ID: LIB3137-027-Q1-K1-D9
cgcctactccggactgcggaccactccttgttaatctcgctcaccgagagccagagccaggggggcagtcaaagccgagccgcaaccgcaaagatcttgcgcggcctcctttccccagctcgcgtcactcactgtgccgctcgtgccatccaccctcggttcacccaaccaacaatccatccgtcaccacaccccg

SEQ ID NO: 6451 - DNA, 401 bp, Zea mays
  unsure (1)..(401): unsure at all n locations; Clone ID: LIB3137-027-Q1-K1-E1
gaacaaacttcctaaaggaaattcgaaagtttataccctgtcaatcacaaacaaagatgatagccagccaaccctagagcaaccagagttatcaaaacaagacacagaaggaaacttattggcccattctcatgatgatggacttggtgacaaccatcataatcaagctgcaacaaatgaaacctttacaagcaaccctccagctatgcatgttgctcctgacaacaaacagaataactggtgcatgaatccaccgcagaatcaatggcttgtcccagttatgtcgccttctgaaggtcttgtctataagccttttgccggcccttgtcccccagttggaaatctgctgacaccattttacgccaactgtgctccgtcaaggctgncttctacaccatatg

SEQ ID NO: 6452 - DNA, 396 bp, Zea mays
  Clone ID: LIB3137-027-Q1-K1-E10
atcgggtactactcctacctaaaacacaggctgttatccttgaagccttcgccgagcatggggcatgtctatctagtaggcgggggaccctgatgaactcatcaacaatgctgcctacatcggtacccatcacaaggctatccttgatgctgatgagggaactggcactatagctaagcgcctttacactgtaaatgtctaaaacttggacgagaaccggcgggctctacgcgagctactgttctgctgccctggtgccctccaatacattgacggtgtgatctctggttctaggagacactataccggaagaccaaggatggcaatccttttgtcgatgtcctcaaggagggaggcgtcctccctggcatcaaggttgacaaggtcaccattgag

SEQ ID NO: 6453 - DNA, 239 bp, Zea mays
  Clone ID: LIB3137-027-Q1-K1-E11
cacaggtgccgctctttagtgcagcacttcttaattttctagagccctgcgcaattctgcgggcatacatctccgcggctttgatttcccaaaagctaccgtacctggatcgttcgagatgtttacgcatagcttctttggaagaggagccgctcaaaaacgtttatttggatcagatggcctcacgaaatgtgggtatgttttcaaaaaagaaaaaccgacagactctacgagagctc

SEQ ID NO: 6454 - DNA, 392 bp, Zea mays
  unsure (1)..(392): unsure at all n locations; Clone ID: LIB3137-027-Q1-K1-E2
agatccgccgcagactacttttaactggcactccaatccaaaatagcctacaagaactgtggtctttgcttaactttattctgcccaatatttttaattcatctcagaattttgaggaatggtttaatgcaccatttgcatgtgatgttagtcttaatgatgaggaacagctattaatcatacatcgtctgcatcaagttttgcgtccatttttgctgaggaggaaaaaagatgaagtggaaaaatatctccctgtcaaaacacaagtaattctcaagtgtgatatgtctgcttggcaaaaagcatactatgaacaagtcacaagcagggaaaaggttgcactangatttgggctcagatcaaaggctctgcagaatctgtcaatgcaactt

SEQ ID NO: 6455 - DNA, 390 bp, Zea mays
  Clone ID: LIB3137-027-Q1-K1-E3
cgtcgctgtcctgcgtcagcgacacgctgttctatgtgggcgccgtgtcggccatcctcgacgagttcgcgctgcggtgcgccgcgctcccgccggcgccggcgctggctctgtccgggagcctcgacgacagcccggcgcactcgggcggccaccggcggtcccgttcggcggagagcgtgagcttcgacggcacgcgacgctccttgtcggccgcacccgtgtcgcagggcggtctggtgcaggtgggcaagttggtggacgggttcttgattgaggtcgcaaaggaccccaacatgccgatggacaagctgctcgccattgccgaggccgtgccagacagcgcccgggccgagcacgatggcatgtacaaagtcgtcgacacatacc

SEQ ID NO: 6456 - DNA, 383 bp, Zea mays
  Clone ID: LIB3137-027-Q1-K1-E4
ggccgccgctcaccttctctttgctggtggttttcttcctgctagcgctgtgtgggataactgcgaaccagggcttctacctcctgggcctgtatcacctgtcaccaacctacgcctctgcgatacagaacaccgtccccgcgatcaccttcgtcatggccgctgtcctcaggctcgagcaggtggacctgagcaggaggcatgggctggccaaggtggtgggcacggtggtgagcatcggaggggccaccgtcataaccctgtacaagggcctgccgctgctccatcacagtgatgtgcacgtcaagtcgtctccggtgacgctgtcctcctccagcggcagccccatcctcaactggactctcggctgcgtcttcatcctc

SEQ ID NO: 6457 - DNA, 396 bp, Zea mays
  Clone ID: LIB3137-027-Q1-K1-E5
agcgtgttatgcaaaataatgctgctgtatttcgtacacaagaaacacttgaagaaggttgtgagctgattagcaaaacatgggaaagtttccatgatgtgaagctcagtgaccggagtctcatttggaactctgacctgatagagacccttgagctggaaaatcttttgataaatgcatgcataaccatgtattcggcagaggctcggaaggaaagcagaggagctcatgctcgtgaggatttcacgacaagagatgacgagaagtggatgaagcactcactggggtactgggaaaacgagaaggttcgattggcatacaggccagtgcacatgaacacattagacgatgaagtagagtccttcccgccgaaagctcgtgtctattgatcgattc

SEQ ID NO: 6458 - DNA, 395 bp, Zea mays
  Clone ID: LIB3137-027-Q1-K1-E6
gcccgccggcctccctccctccccacgacgacagcctgcatgcccatggcgccgcaatgataacattcctctgagagctcgcccccgactccaaaaccgagcacacatctgctccggcttctacttctaccagtacacatccgcagtaccagccgtgtgcgcgtgcaggcaggactgcttccccttctcctcgccactgcacgccgtctagctcggcctcagctctgaccgggtgactcactgaccgacgacgcctcggaagcttctctgccgccggcctggccacgtcggtcgccgtcgtcggaccccgaatgagagccggcgatcgtcccgcagagcgcacgccgtaccgtgcctggtgatcgggggccgacaacgacagctttgggagcgag

SEQ ID NO: 6459 - DNA, 391 bp, Zea mays
  Clone ID: LIB3137-027-Q1-K1-E7
caaacaaacttattggtcctcatgtcaacttttcccagctgtttactgcgatcggaggtggcatcctgtgtgctaaggcatcaatgctgcttcagaatgtgccacctgccctactagtacgatttctgagggagcatcgctccgaatgggctgatcctggtgttgatgcttattctgccgctgctctgagggctagtccatatgcagttcctggcttgcgtgctagtgggtttatgggcagccaggttattctgccgcttgcacataccttagagcatgaagagttcttggaggttattaggcttgagggacacagcctctgccatgacgaagttgttctgtcacgagatatgtatcttctgcagttgtgcagcggtgtggatgaaaatgc

SEQ ID NO: 6460 - DNA, 390 bp, Zea mays
  Clone ID: LIB3137-027-Q1-K1-E8
cttgtttaccattcctccccaaaacacatcctgcgatcctcgaagcctccgccgagcatcgatcatgtcggcctactgcggcaagtacgcggatgagctcatcaagaatgctgcctacatcggcacccctggcaagggtatccttgctgctgatgagtcaactggcaccattggcaagcgcctttccagcatcaatgtcgagaacgtggaggagaaccggcgggctctccgtgagctcctgttctgctgccctggtgccctccagtacatcagcggtgtgatcctcttcgaggagaccctctaccagaagaccaaggatggcaagccttttgtcgatgtcctcaaggagggaggcgtcctccctggcatcaaggtcgacaagggcaccat

SEQ ID NO: 6461 - DNA, 392 bp, Zea mays
  Clone ID: LIB3137-027-Q1-K1-E9
cttgcttaccattcctccccaaaacacatcctgttatcctcgaagcctccgccgagcatcgggcatgtcggcctactgcggcaagtacgcggatgagctcatcaagaatgctgcctacatcggcacccctggcaagggtatccttgctgctgatgagtcaactggcaccattggcaagcgcctttccagcatcaatgtcgagaacgtggaggagaaccggcgggctctccgtgagctcctgttctgctgccctggtgccctccagtacatcagcggtgtgatcctcttcgaggagaccctctaccagaagaccaaggatggcaagccttttgtcgatgtcctcaaggagggaggcgtcctccctggcatcaatgtcgacaagggcaccattg

SEQ ID NO: 6462 - DNA, 354 bp, Zea mays
  Clone ID: LIB3137-027-Q1-K1-F1
cccacgcgtccgcgcgagaacgatcagccagttcccagccgcccacccaccaagagccacaggccagaggccacgccgtccccttcaccccagggttgccgacgcggcgactccgttcacccaccaccgctgcccgctgtcctccctgctgccgcctgtgccggggctagcctgccgcggagccatgtcgcggtccttgagcatgagagggagcatgaggtcgcgccgcgacctgcctcctcctgagaagacaattgaaaggcttgagagtatggtggatggaggaaatttctatgaagctcaacaaatgtacaagtcaaccagtggcaggtatattgctgctcagaagtattc

SEQ ID NO: 6463 - DNA, 284 bp, Zea mays
  Clone ID: LIB3137-027-Q1-K1-F10
cgcacaccgtcaacggtctgacccaccccttttaattttgccccaccaaccagcaccatgggggaggtctccggagcgcgaggggcctgcaacacaggcaacgaagacaccgctccgcgcggacctgatgaggaggaaggcaaccctgggcacgggaagaagccccaccatcagggtcacgatagaaacacaggccacccccccaccgacaaacagaagaacgcgaggcacccgcacgagcaggaacaccaaaggcgccggacagcgccacctgcccaagccct

SEQ ID NO: 6464 - DNA, 375 bp, Zea mays
  Clone ID: LIB3137-027-Q1-K1-F11
gaccaaatgtccactgcacacacctcacagatcctctgcagccgcagctgccacctccttgggtcctttctgcataggtggcggcacgtacatattctgaagaagagatcgagatgaccagcgtgtggaagaccaaggttctgcctggcctcaacaagatctttgacaaggatggcaagaaggctgcaactgcaggcttcttgaagtccttcaacaaggtatgtaccacgatcgaatcatctgcaggcccgagctgcttcagatgaacctagctagctacaagcctggacatcacgcttgatttccttgatcacttgatttctacttcaggaggagattgacacggagattgaggacaagaagacagagctggag

SEQ ID NO: 6465 - DNA, 264 bp, Zea mays
  Clone ID: LIB3137-027-Q1-K1-F12
aggttacgtgacatagaagtgtgggggagatttttgtgagcggcggcgaccggcacgggcgggggacttgagcgggggaacagggtacgccgatgagacccaccccggacaggcggagggaggagaaagctgcaggcggcgcagggaggagagctgcctcagtatgatgggacaggggctagcagggaaacgaccaatctgaggccgagggggagagccagtaacgtcggagcggggaagttgaggaatactgcgtggcggcgg

SEQ ID NO: 6466 - DNA, 392 bp, Zea mays
  Clone ID: LIB3137-027-Q1-K1-F2
caactgcattgctcgctctctcctttcacttttagtctgggaacatctatcagctcgctcattggccatctttggcttccatggagaggctcattgccggcctacttggcttcctattggttgcatcggtaggaagccatgcagctcgtgctccggatcagtactggaagtctgctcttcccgacactcccatgccgacctccctctcccaactccttgacgccgctccagccggcggcggcacgaccgtcaacgtcggctggggcggtgtccacgtcgatgctgggcacggtaagcccgggggtacgacagttgacgtaggcaagggcggcgtcggcgtcaacgttaaccctggcaggagcggcaagccccgcggcacgactgttggcgtc

SEQ ID NO: 6467 - DNA, 308 bp, Zea mays
  Clone ID: LIB3137-027-Q1-K1-F3
ggctaccagtgggtgtactgggtcgggcccttcatcggcggcggcctcgccggcgtcatctacgagctgctcttcatctcccacacccacgagcagctcccctccaccgactactaaaagccgaagccgaccgacctaggggtgcgcagcgcagctagcgcatccagctctctctccccgctcgccgccgtttagtttctctcgtgcacgtgcatgcatcgtcgactgtctcaggccgccgctgcgccggcgccgctcgcatcgtttgcttttccttggatcagcagtcgtcgccgtcaggttgagct

SEQ ID NO: 6468 - DNA, 220 bp, Zea mays
  Clone ID: LIB3137-023-Q1-K1-G3
acgaatgccatttgttcgccatatttacgatgcatctaagcaaatcagtgctgccatttcgggtgatcaaaacaagcatgcattcaaagaagtggtcatcattaggcacccaagaattggtgaatatgcatttggatttatcacttcggaagttcttcttcagggttattctagtgaagaacagatgtactgtgtttatgttccgaccaaccatctctat

SEQ ID NO: 6469 - DNA, 434 bp, Zea mays
  unsure (1)..(434): unsure at all n locations; Clone ID: LIB3137-021-Q1-K1-G3
cagctgccaaggtcttcgtcgcctcgtcggtctcgggtcctttgccggcgacgagcgcgggcacaccagaagaatacagtggaagttgtatgcggttgtaaaacgatttcgattattccaagcggccggcgatggctcggagcccctgcgacctccgcctccttctcctcgctgcagctgcagctttcatctacatccaagtgcgcctttttgctactcagtcccattatgcggaccgtcttgcggaagcagaaagatctgaaaatcaatgcaccagtcaattgaagtccttgatcgatcaagtcagcatgcagcaggagaagattgtagcattggaagagataaaggtacggcaagatgaagaacgtgcacatctgaggattntgataaaggatcttgaaaaaaggagtgtgcagaagctactagacaagaat

SEQ ID NO: 6470 - DNA, 424 bp, Zea mays
  Clone ID: LIB3137-021-Q1-K1-G4
tctctctctctctctctctctctctcggatccgaattgccagcgcaccagtcgagctcgcgggacctcgccggcaccggcgatggcctccgccctactggccggacagggcggggcgcgccaccacggctggggggagacgcgcgccccgctcgcgcccatacctcccaaccctaaccccagccagccccacccacgcgccgacgggtccaagtccaagccgcgggcggcagcctcctcgccggcggccggatacgtgacgttccgcccggcgtccctgggcccgcgcgaggcccgcgcgctccgggaccgcctcgcgggggagctcacccaggtgcgcgcccttcttttccgcatcgacacctggcagcagcagggcccgccgcccgcggggcttcgcggcgaggtgcggaagccgtgcgggc

SEQ ID NO: 6471 - DNA, 393 bp, Zea mays
  Clone ID: LIB3137-021-Q1-K1-G6
ggcatgaggactccttttgcttctgcccttctgcttagcaccagcgtcggattcggactgtgctggctatcctgggcaggcaatggattgcgtgacaccatcgccagcattttcagaagccgaagtggcatgaatatggatgacgaggtctcagtgaaaatagaaaaaagtgtgaacgagatcctcttcagggcattaactctcctggcaatcactgcactgaagtttgcatgagcagtcatcacgattttataggtttgtcgatgcaggtgtgatatactcacctatgtgtatgtggttcaggagtgtagtactgctttctgtaggaccaaattccacctgccccaaccatggttatagcttaccagttcctcattgatctcgtagaaaatg

SEQ ID NO: 6472 - DNA, 418 bp, Zea mays
  Clone ID: LIB3137-021-Q1-K1-G7
aaacccgggccgacgccacgcgtccgactgctaaaaagattctcttaacaaggagttagatccatcacataacattctcaatgaagccaagctataaaagacctgccgaaaattcattgcagattactaactagctctgtcacttctaattgacatcagactcatacacccacatcatgttctcatcatggctccagattatgtcactttagctgaagattccatccatgttgaagcaaatggtcacaatgagacacaagtgagagtttctgtcaatgatcatgcaaatagcacgacaatactcatcaaagatacacaaaaattctgcaacatcaccattcacagtgcaatcacacaggacacgtctggcagtgacagagtcataaggatgccacttacgccaacatacacgctactg

SEQ ID NO: 6473 - DNA, 407 bp, Zea mays
  Clone ID: LIB3137-021-Q1-K1-G8
gtgatatctttggagagcgaggcatcttgctgggtgctgtccatggtatcgtggaggctgtgtttaggaggtacacagaacaaggaatggatgaagagtcggcctacaaaaacactgtcgagggcataactgggatcatctcgaaaaccatctcaaagaaagggatgcttgaagtgtacaactctttgagcgaggaaggcaaaaaggagttcaacaaggcttatagcgcatcgttttacccgtgcatggatatactctacgaatgctatgaagatgtggcctctggaagtgaaatccggagcgtggtgttggctgggcggaggttttatgagaaagagggcctcccagcttttccgatgggcaacatcgaccaaactcgcatgtggaaggttggtgaaaaggtgcgc

SEQ ID NO: 6474 - DNA, 403 bp, Zea mays
  Clone ID: LIB3137-021-Q1-K1-H1
ggcgggaaaagtgtggctggtgacggcggcttaggctaggtaccaaacatgcccaaggagggccaactaaaagagacagtacgtaggtgcattgcggcttttcacctagctggggccgtgggacttctgcttcgccttcgccttctctatcaggggcttcagctgctgcttctcctcgagaatcttgaggaaattgaacaggaagggcacgtagttatgcttcctcctcaggttctccgctttccacttcttcaccttctcctcctccattatgatcttctccgtcacagactcgatctgagctgccacctccgcgagtgactgctcaacatgcctgcttgcgttgggatcgcccatctgctgcaagaggccctccctcttcctctggagttctttgatcttc

SEQ ID NO: 6475 - DNA, 452 bp, Zea mays
  Clone ID: LIB3137-021-Q1-K1-H11
gccgaccgacgcgtccgcccacgcgtccgctcaactcaagtcgtgccttcgctccggtcacccgtcgctccacgcaacgcggtcgaggaggaagaccagggagcccaaggaggagaacgtcacccttggacccactgtccgtgaaggagagtatgtctttggtgtcgctcacatctttgcatccttcaatgacaccttcattcatatcactgatttgtctgggagggaaactctggttcggatcaccggtggcatgaaggtgaaggctgaccgtgatgagtcgtcaccttacgctgctatgcttgctgctcaagacgtcgcacagcgctgcaaggagcttggcattactgcactgcacattaagcttcgtgccaccggaagcaacaagaccaagaccccaagacctggtgcccagtcttgccttcaggcgcttgctcgttccgggatgaaaa

SEQ ID NO: 6476 - DNA, 423 bp, Zea mays
  unsure (1)..(423): unsure at all n locations; Clone ID: LIB3137-021-Q1-K1-H12
gcgatccaatctanaagctcccctctccctcccttcctctctctctctctcttcgccgtccgaagctccgcgcccaatctaatcgacacctcaccgagatgggccgcaagttcttcgtcggtggcaactggaaatgcaatggaaccacagatcaggtcgagaagattgtcaaaaccctgaatgaaggacaggttcccccttcagatgttgttgaggtcgttgtcagccctccttatgtcttccttcctgtggtcaagagccagctgcgccaagagttccatgttgctgctcagaactgctgggtgaagaagggaggtgctttcactggtgaagtcagtgctgagatgctcgtcaaccttggtgttccctgggtcattcttggacactctgaaaggagagctctgctgggagaatcaaatgaat

SEQ ID NO: 6477 - DNA, 376 bp, Zea mays
  Clone ID: LIB3137-021-Q1-K1-H2
ctcatcgaggcccgagtcctgctttgatggcgaccgacgttgctgacactcccgcgccggtggtggatgcggcccctgaggctcccgcggacaccccggcggcgcctgctgctgacgcgaagccggctaaggccaagaaggccacagcgccgaagaagcgcgctagcccgacccatccgccgtacgccgagatggtctcggaggcgatcgcgtcgctcaaggagaggacggggtccagcagctttgctattgccaagttcttggaggacaagcacaaggacaagctcccgcccaacttccgcaagcttctgaacgttcagctcaagaagctcgtcgccggcggcaagctgaccaaggtgaagaactcgtacaagct

SEQ ID NO: 6478 - DNA, 427 bp, Zea mays
  Clone ID: LIB3137-021-Q1-K1-H3
agtattaatcgattcggatctccaaccacacgacatatgtagcacttaacccttgcatatgtcaactcgccaccggttttctcaagaccagaatgggttcacgcgacccgagagcacagcactccaccgtccagccattggcctggttggtacacgttactctcgccatggtgcccgccatgtttccgagagtacagcaccccaccttccagtctcttgccacggagggtacaagctactctcgccatctctccactcccagtgcgtgcgagctgttctggtattggtccgaccgaggctaagcttacccatgacgaggcatgtggccagttaaagggtcctagatcagcaagcctactttccgtacggtccttaatcgacacagacgggcgacctttcctgctcaacgtctggtctcatattatta

SEQ ID NO: 6479 - DNA, 374 bp, Zea mays
  Clone ID: LIB3137-021-Q1-K1-H4
cggacgcgtgggctcgcgccgccgccacatctaacccttgcagccccaatcccccacggcggccatggccggcgcgcaggagtccctctccctggtgggcacgatgcgcggccataacggcgaggtgacggcgatcgcgaccccgatcgacaactcgcctttcatcgtctcctcctcccgggacaagtccgtgctggtgtgggacctgaccaacccggtccactccaccccggaatccggcgtcaccgccgactacggcgtccccttccgccgcctcaccggccactcccacttcgtccaggacgtcgtccttagttccgacggccagttcgcactctctggctcctgggacggcgagctccgcctttgggacc

SEQ ID NO: 6480 - DNA, 437 bp, Zea mays
  Clone ID: LIB3137-021-Q1-K1-H5
gagctagctcacttgatatacatattgcattggcataaaaactgaatttaccatggcccggttgatctcttctgcaatcgcaggcgcgggcaacttggtcgctgatggaatcagtggtgtcactggcgtatcgtctcaggttgtagaaggcgtagaggacactttaggcagtatcgtagaagcattcgaccaaggagtcaaggatgaggaccaactggatttgcccaagtacgtgtgtttcaagggagataaccgtctgtacctgagtgctcgaacggttgaaggccatccctacctgcagcttgcatcggaagacattggcgacccaagtgtgaggttcattacctacaaccacaatgtgaacggcaaacgggtggtgcgcttcaagtctaaccatctcggcaagttctggaggcggagccccaactggatcttgg

SEQ ID NO: 6481 - DNA, 184 bp, Zea mays
  Clone ID: LIB3137-021-Q1-K1-H7
gacctcttgttaatgaacaccttatccggaagatcatgaatggtccccgctacatcatccctttatgaactaaactggaccaagggaatcaaaaatgtcatactcgcaataaactcgacatgcagaccatcgcaaataagctcactcttctacggcaggtggatcactcactatatcacatgct

SEQ ID NO: 6482 - DNA, 368 bp, Zea mays
  Clone ID: LIB3137-021-Q1-K1-H8
tttctctttccttccccacattttcccttgcagccccaatcccccacggcggccatttttttactcgcatatttcctctttctcgttgtcactattctcttccataacttcaaggtgactgctatcgctacccctatcgacaacttccctttcatcgtcttctcctcccgggacaagtccgtgctggtgtgggacctgaccaacccgtttcactccaccccgtaatccggcgtcaccgccgactacagcgtcccctttcgccgccttaccggccactcccacttcgtccaagacgtcttccttagttccgacggccatttctcactcttttgcttcttggacggcgagctccgcctttgtgacctttt

SEQ ID NO: 6483 - DNA, 344 bp, Zea mays
  Clone ID: LIB3137-022-Q1-K1-A1
atcggcgtgtccatggacaacacccgtctcgcccttgccgccatcggcaagctcatgttcgcgcagttctcggagctggtgaacgactactacaacaacggcctcccgtccaacctgtccggcgggcgcaaccccagcttggactacggcttcaagggcgccgagatcgccatggcctcctactgctcggagctccagttcctgggcaacccggtgaccaaccacgtccagagcgcggagcagcacaaccaggacgtgaactccctgggcctcatctcgtccaggaagaccgccgaggcagtggacatcctgaagctgatgacgtccacgttcctgatcgcgct

SEQ ID NO: 6484 - DNA, 393 bp, Zea mays
  unsure (1)..(393): unsure at all n locations; Clone ID: LIB3137-022-Q1-K1-A10
cagtaggaagctaggaggaaatcaaatcaactaagntgttgtccgagagaagcaaccatgagacctcaggcgtcgttactcgtcacactggctgttatcgtcgtcgtccttgcagctctgccactcagcaaagggacggaggaggaaggaggaggaggggaggcagtcgccgccgtggacgccgccgccggaacgagctcgtggccatgctgcaacaagtgcggtttctgctacctgtctgacccgccgcagtgccaatgcctggacttctcgacggtcgggtgccacccagagtgcaagcagtgcatcatgtacaccgccgacggtggcgtctacatcccgcccgtgcacgcctaccgctgcgccgacatcctcttcaacttctgcgagcgc

SEQ ID NO: 6485 - DNA, 374 bp, Zea mays
  Clone ID: LIB3137-022-Q1-K1-A12
gacacagagctcgaccctccctcccctttttttgttggccaagcctgaccaagcgcattggggtcagtcatgggagcggcaggaggccgaagccccgtgcctgcgctgtcccaaaaggagcaggacatacagatgatgctcgccggcgacgttcaccttggcaccaagaactgcgatttccagatggagcgctatgcctttaagcgccgcaccgacagcatctacattataaaccttggcaagacatgggagaaactgcagcttgcaacgagggttatctttgccatatagaacacgcaggacataatagtgcagaccgcccgcccctataggcagcgtgctgtgctcaaaatcgctcagaacactggcgctca

SEQ ID NO: 6486 - DNA, 407 bp, Zea mays
  Clone ID: LIB3137-022-Q1-K1-A2
caaattcttctattttagctctagctcgctcgccatcccctgcccggctgctgcccccaacggaacgacggccagaggaagctaccagagtcgatcgatcgatcgagatcgagagagagagagagagagcatggctggcaggagtttcctgattcggtcccccaaggaggaggagtccaacgccgccgtcagagaagctgtactgctgggagcaaagaacgccgcaatagctggtactgtggttgcagttcccacgttggttggctgccgtgtccttccttgggcaaaggcgaatctcaactacactgcacaagcactcattatatctgcagcctgtattgctggcttcttcatcactgctgacaaaaccattctacggaacgcacgacaaaacaccatcgggaagc

SEQ ID NO: 6487 - DNA, 410 bp, Zea mays
  Clone ID: LIB3137-022-Q1-K1-A3
ggacagttgagagagagagagagggatcgatagcgcggcggaggcgatggcgagcggagggaagggactcaacgcgactggggagttcttccggcggagggacgagtggaggaggcaccctatggcggggaaccagctgcgccacgccacacccgggctcggcatcgccatcgtcgccttcgggatctacctcgtcggcgaggccgcctacaaccgcctctaccgcccctccggcgacaaccaccactagatcgccggcaggatccgtgactcggtcaagaagctggagccaactttaccaagcactggtgctgttgatgtttttacagttttgagctcataaggtcagccatgaccatattgtaatctgtgaccaggtagacttgcccactggtccgtccaactattgt

SEQ ID NO: 6488 - DNA, 408 bp, Zea mays
  Clone ID: LIB3137-022-Q1-K1-A4
cggacgcgtgggttgttattaatatgcctcgttgtctacacagttcagcctaaatccccggccattatagaagatgttctggacttctacgtctaaagttaactaacggtctaggatctgcttccatttacacttttttacttcaagagagtaagtagttgccagagcactttttccacatatttgtggataataagtagacatcaaactagatcacctggacaacagagaataaggtggcataactttagcaaaaaaatagctaaagttatgattctctttatgaattttcatagagattgtgatgtcaaatatctaagaagaaacgcatggaaaacttctatattgatagagtagtttcgctgcagaaaaaaatactatattgaaacgtgtttgaggcgagaggca

SEQ ID NO: 6489 - DNA, 401 bp, Zea mays
  Clone ID: LIB3137-022-Q1-K1-A5
gcaagtcaatgccggagcttccagaagcaatgcgtaggcgttatgagaatatgggactcagcatgcaagatgttctgttccttgctaatgatgataatattggtcatttctttgattctactcttgagcatggcgctgatgcaaagctggctgccaactggatcatgggtgacatcgctgcttatctcaaagatgaaaaagtatccattgatgaaattaaattaacacctctagagctttctgaactgatagcatcaattaagaatggaactataagtgggaagatcggcaaggagatactggccgagctcattgccaaaggcggaacacttaacgctgtgatagaagagaaagatttggttcatatagcagatccagcagcaattgaggcaatggtagat

SEQ ID NO: 6490 - DNA, 400 bp, Zea mays
  Clone ID: LIB3137-022-Q1-K1-A6
cgccaccgccacctacgcaacaccagacgctccagcagtccagcactcggagctcgcgcgcccgacggcccaccatgatcatccccaagaagaaccgcaatgagatctgcaagtacctcttcaaggagggcgtgctgtatgccaagaaggactacaacctggcgaagcacccacagattgatgtgcccaacctccaggtgatcaagctcatgcagagcttcaagtccaaggagtatgtcagagagaccttctcctggcagtactactactggtacctcaccaacgatggcattgagcacctacgcaactacctgaacctcccgtctgagatcgtgcctgccacgctcaagaagtctgccaggccactgggccgtccatttggctctggccctcctggtga

SEQ ID NO: 6491 - DNA, 407 bp, Zea mays
  Clone ID: LIB3137-022-Q1-K1-A7
cgcgaccgcaagcagctcggcaggcaggtcttcaccggtccaccacctacactcggtctgcgtgctccgtcaccaaacccacccggaccaacgccgaagcaacccctccctccgtcctccccagatccggcgccgtctccgccctcacttacactaacacgcacggcggacacgtcgtctctcccgcgcgatctgatgcaggcgcacgcggtggccagcggcgatgcggtggaagcttaactcctccgtctacaagcgcgtgccgttcagggaaaccgccatggaacccgacgtggagacgcctatgataatgaccgacggcggcggcagcagagcgtggccgtcgtggcgcatgtcgctagcgcatgtctgtgtcgccacgctcacctcgttcctatttggatacc

SEQ ID NO: 6492 - DNA, 381 bp, Zea mays
  unsure (1)..(381): unsure at all n locations; Clone ID: LIB3137-022-Q1-K1-A8
gcacagtcatccacactaacgaacgaactcttgctccgatcacgagctagctgaggtcgacgatggcggctgtgctgaacagcaggaagacgccgaggtnggtggccggctggtggggggcgctgctggcttctccgcgtcgngcgggatacctgcggcaggtggggtcgtcgctggcgccgtcatcccgtacgcgacggggagggccagcgcgctcccgcgtcgtgctgcagcggcgtaagagcctaacagcgcggcgcggaccagcgcggaccgcaggcggcgtgccgtgcctaagagcctcgcaacagcgtaagagcgtaacatggcaccgtcgcaccatccccggaagtgcggcgtcttcgcggattcccatcagca

SEQ ID NO: 6493 - DNA, 356 bp, Zea mays
  Clone ID: LIB3137-022-Q1-K1-A9
ggcgagaccgaaatcaatccttctagccgttagaagcgaatgcacatgctcatgtgcatcgggggctgtgctagggcgacacctcaagccaagccatggatctccatggtacaacttttccatgcagaatacccccaatggtgcctggtctttttcccttggtcgaaaacacctctgcacttaaccccctatgtcgatgagggacgtatctacatccatggtacctagatctgcatccccatgcgcctgcagctcgctctcaagccggcaaccataatgcgtcctgcgcctgggagaagactcgttattacttttgcgagtattactcgctgatactccgatctagatgatgtatt

SEQ ID NO: 6494 - DNA, 408 bp, Zea mays
  Clone ID: LIB3137-022-Q1-K1-B1
accgaattccctgcgattcctctcccctcgcctcctcgtctccccctaggggatcgtcggagaggaatcgcaaagagggccgtctcatccgagttaaggaagccatggagcacaaggaggctgggtgccaggcccccgagggacccatcctctgcatcaataactgtggcttcttcggcagcgcggcgaccatgaacatgtgctccaagtgccacaaggagatgataacgaagcaggatcaggccaagctggctgcctcctctatcgacagcatcgtgaacggcagcgacgccgtcatggagccggttgttgctggcagcaacacggtagtagctgttgcccaagttgagttgcaaacaatgaacgtgcagcagcccgctgatgttgccggacccagcgagggggtgg

SEQ ID NO: 6495 - DNA, 421 bp, Zea mays
  Clone ID: LIB3137-022-Q1-K1-B10
gcggccgggtcggatctgagacgagacgagtcccctccccccacctcgcctcacgcaaccggaacgaacaagttacaatctcatcccaaccccgcctcgaccggatctcgtcggactcggatccgcccgaccaccccgcgccgccgcagatcaaagaagatggcagctgtcgacacattcctcttcacctcggagtctgtgaacgagggacaccctgacaagctctgtgaccaggtctcagatgccgttcttgacgcttgccttgctgaggaccctgacagcaaggttgcttgtgagacctgcaccaagaccaacatggtcatggtctttggtgagatcaccaccaaggccaatgttgactacgagaagattgtcagggagacctgccgcaacattggttttgtgtcaaacgatgttgggc

SEQ ID NO: 6496 - DNA, 191 bp, Zea mays
  Clone ID: LIB3137-022-Q1-K1-B11
gtgtactcatttcatcttatactacaatatttgaacacacaaacttcacctaagacttctgtgacgttcaaaatacattttcatcccaacaacgagctcactgcatatcactctactctaattagcaataactcccttctcacacaaaaactaaacaacatgcatattacacacacattcctcttcaccta

SEQ ID NO: 6497 - DNA, 404 bp, Zea mays
  unsure (1)..(404): unsure at all n locations; Clone ID: LIB3137-022-Q1-K1-B2
caancaccaccccgtctctcctcttcccagcggtttcctgatccccccacctcgttcgccgaggccgcagcgagcccgcccgtcctccgtccccgcgggagattgtgcgaccgcagagtttggatgctcctgcctatgcaagcaagatgtcaaccaccagagatattgtttagtgctgggcaagttatgcaattttggatcataaattacacagggacaagataattatggaccgcgcagacacatcaggctttgtcagtggtggttgctttggtactacactcctgctgatattcttccattttgtctattctacgatccatgtctgaaagaccctcangaaccctgcagctgtctgggcagaaatatcatcaggcccctgttctttgagatctctggtgttt

SEQ ID NO: 6498 - DNA, 381 bp, Zea mays
  Clone ID: LIB3137-022-Q1-K1-B6
ggctagcaaccattctagctccgaattcggagcaggcgagggcgaactgaccgaggcgaggacgatcactgtccatgtccatggaggcggcggttggggcggagttcggacctcatctgcatcccgctctcgggttcagacacagccagcgccgcgtctttttttgctgttggcgcctgcatccgccccggccggcctcgcttggcctctgcggtggcgtgggagcccgtccccgcggcgctatccccgtcgcggatggcgaccagcggcggcggctgcgagagctctaggcggaggcggaggcggaggcggaagctggatcgatcttgggtcctccgaggagcagcccccgcgaggtgagggaggagatggcccggtgct

SEQ ID NO: 6499 - DNA, 407 bp, Zea mays
  Clone ID: LIB3137-022-Q1-K1-B7
cgctcggccaccagctttgaccgtctcccctgccctccgctccgatgctgttcctgcatgccccactcccccgcaggagcggcgcggcggtggcaaaggcaaaggcaagatgttcgggcgcgcgccgaagaagagcgacaacaccaagtactacgagatccttggggtgcccaagtcggcgtcccaggacgacctcaagaaggcctaccgcaaggccgctatcaagaaccaccccgacaagggcggtgaccccgagaagttcaaggagctcgcacaagcctatgaggttttgagtgatccagagaaacgtgagatttatgatcagtatggtgaagatgcccttaaggaaggaatgggtggtggtggatcccatgctgatccatttgacattttttcatcattctttg

SEQ ID NO: 6500 - DNA, 406 bp, Zea mays
  Clone ID: LIB3137-022-Q1-K1-B8
ctccagtccacccattccattccactacccacgcccagaattcacgcgaacgcacacgcgcccacacgacacatccagatgatgcttagggtttccccgtccccggccgccgcggtgccaacccagctctccggtgcgcccgcgacccctgctcccgtcgtcagggtggcggcgccgcgcggcgtcgcctcgccggccgctggcgccgcgtgcagggccgcgggcaaggggaaggaggtgctcagcggggtcgtgttccagcccttcgaggagatcaagggggagctcgccctcgtgccccagtcccccgacaagtcgctcgcgcgccacaagttcgtcgatgactgcgaggccgccctcaacgagcagatcaacgtggagtacaacgcctcgtatgcataccact

SEQ ID NO: 6501 - DNA, 437 bp, Zea mays
  unsure (1)..(437): unsure at all n locations; Clone ID: LIB3137-022-Q1-K1-B9
attgattattgccctttcagttcgccatcgtgtagccgagcaccatgagctccacaggcggggacgatggcgccaagaagtcttggccggaagtggtcgggctcagcctggaagaagccaagagggtgatcctgtgcgacaagcccgacgccgacatcgtcgtgctgcccgtcggcacgccggtgaccatggatttccgccccaaccgcgttcgcatcttcgtcgacaccgtcgcggaggcaccccacatcggctgagaatcaaatctataaaatgaataactcggacatgtcatgcgtgcatgtccgtcgccgaataatggatgtgtgtgcttcgttccaataaattgctagtaaaaataatggcatcgtcggtatgcatgaataaaatgtatcagagtgttcatcctttcacgnatggatatatgaacatgtgct

SEQ ID NO: 6502 - DNA, 408 bp, Zea mays
  Clone ID: LIB3137-022-Q1-K1-C1
cgctacgtgaagttcgcctcgcggcctcgcctaccaccacccgtgcccgtgtcccgccggcggcggcgctggggatggcggggcccaaggcggctgaggacggctcggcggctccgctgctgcctgcgcaggcgggggaacggagctcaggaggcgtgggcggaggggccacgtccgcgcagacgctggggaacgtggttgtctccatcgtgggcaccggtgtgctcggcctcccctacgccttccgcgcggccggctgggtcgcgggctccatcggcgtcgccgccgccggctccgccacgctctactgcatgttgctactcgtcagtacgctcgcccgcccgcccatccctccttactgatcctcacactgcctgctgctcccgagcaggagtaggcgagtacagt

SEQ ID NO: 6503 - DNA, 405 bp, Zea mays
  Clone ID: LIB3137-022-Q1-K1-C10
agtttctgctgttttgtttaatcaaatgcgtgtcatggtctctacctgagctgggaccttgtacagacttgaacttgtgttaagttcaaagcaagagtccttgactacaaaaagacttacataaataaataagtcaaaacaagaatggaaagggtctaaatactcattagtaatgttttaagacaaagtcttgctttcagcttccaggggttaattttattttttgttttaaattgataattggatatggttgatttatattgggtttaaactgtggagctttcatgtttactgtaattagtcttaaaatattttttacttagtaaccagtacttttgataatgtggtggcaacaaaccagcaactatttagaagtgttacaagacttcgttcttgagtattggg

SEQ ID NO: 6504 - DNA, 444 bp, Zea mays
  Clone ID: LIB3137-022-Q1-K1-C11
atcttctgctcttttctttaatttaatgcgtgtcatggcctctacctgagctgcgaccttgtacagacttgaacttgtgttaggctcaaagcaagagtccttgactacaaaaagacttacataaataaataagtcaaaacaagaatggatagggtctaaatactcattagtaatgtattaagacaaagtcttgctttcagcttacaggggttaattttattttttgttttaaatcgataattggatatggttgatttatatcgagtctaaactgtgtagctttcatgtttactgcaattagtattaaaatattttttacttattaaccagtacttttaataatgtggtggcaacataccagtaactatttataagtgttacacgacttcgttcttaattattgtaagctcattcataccccaattaaagcatttgcacatataa

SEQ ID NO: 6505 - DNA, 339 bp, Zea mays
  Clone ID: LIB3137-022-Q1-K1-C12
gactaccagcaaccactgctgcatcgggcgttatcgatggacagtgctaaaggcgggcatgctgttccatgactgtacctaaaacgcacccatgctacaatatacctaggcatcactatatatatacgttcagtaaatgtattgcatgtctcggactgccggtgtctccgtcgtttaattctacctactgtatagagcgagtgacatatctcccgccactgcctacttatagctgtgagtaacaagcctgcatatgtaatactgaactatctgtcatgcatacgcaagaggtgcaacactgtaataaatgtaaaggaacccatcgactccgaaaaaaca

SEQ ID NO: 6506 - DNA, 403 bp, Zea mays
  Clone ID: LIB3137-022-Q1-K1-C2
cgaggatccgggcgacctctacggggtgatcgccgtcgacgacggctccggctcgcagaggctcttcgaccggaacaggtccgacgtccagtcggtccgcccaggcgagcaggcggagatcacgggtcccggccgagccgtgtcgggcgccgacggcttcgccgtcagcttcgatctcatggaccgagacacggacccgtctccggacgacgaggtgagcaaggaggtggtggtgtggaacccgctggacgccaccagcgacgagtacgacgttatccgcagcaggacggtcgccggcaagcacgggctcgtcgagctccgctacgcggtgatgacggacgcggcggtggccaccgtggaggtcctcgtggccgagagcagcgaggacgtcccggacgtctac

SEQ ID NO: 6507 - DNA, 407 bp, Zea mays
  Clone ID: LIB3137-022-Q1-K1-C3
ggacaaggccaatccattggctacaattcttagtgcagcgatgctattgagatatggcctaggagaagaaaatgctgcgaacagaattgaagctgcagttactgaaacactgaaccatgggttccgaactggggacatatattctcctggaacagtaagatagattttcttgcagaaccattatcaatgaattatggggctgtttggtttgaggaatcacctcatccttagttgagatggtccatcatgattcatgagttcatcacatgaattttggtggaatggatccaaccttcatgctttttttagctttatatcgtacatgtttaatgccaattacttgatcctcacctagagaaggtagtattggacaaatcattcaggtagtgtaatagcattggacaaat

SEQ ID NO: 6508 - DNA, 408 bp, Zea mays
  Clone ID: LIB3137-022-Q1-K1-C4
ctaattaagggaaggaaataaagctccgtcgtcgagccgatcgacgaccaccatcaccatgtcggcggcacggcggtgcggcggccggcggcggctggagagggcggcggcggcgggagacaacgccaacggatacgtcgagactgaccccaccggtcgctatggacggttcgacgagctcctgggcaaaggcgccatgaagtcggcgtaccggggcttcgacgaggagcgcggcgtggaggtggcgtggaaccaggcgagcctcgccgacgtgctccgctccccggacgccgtgcagcgcatgtactcggaggtgcagctgctgagcgagctccggcacgacggcatcatcggcttccacgcgtcctgggtggacgtgcccgggcgcagcttcaacttcatcaccga

SEQ ID NO: 6509 - DNA, 383 bp, Zea mays
  unsure (1)..(383): unsure at all n locations; Clone ID: LIB3137-022-Q1-K1-C5
gattggaaaanccggcccgagcgacgcgtccgatcaaacttcaggggggttgaatgttaatttaacaccctatcgagatatggcggcggggaagataatgatgggaacagacatgaagcttcagtaactgaaacactgtaccatggtttctgaactggcgacatatcttctcttagaacacttagatagattttcctgcataacccttatcaatgaaatatggggctgcttcatttgaggaaccaccttattcttacttgactacgcccatcatgattcatgatttcatcacatgaatattggtgtgatggatccaaccttcatgctcttttaagctttatattacacatgtttaaagctcattacttgatccctaacttata

SEQ ID NO: 6510 - DNA, 290 bp, Zea mays
  Clone ID: LIB3137-022-Q1-K1-C6
gcgtacggaacacgatcgatcacatatcacgatgatttttttacgagaaaccacataccacgggggggtgaaagcatcatggagtacggtcagcaggtgcagcacggccacggcgccacgagacatgtccaccagtacggcaacccattcggcggcgtggagctcggcaccggtggaatgagtcacggcacgggaaccggcggcatgggccaactgggtgagcacggcggcgctggcatgggaggcggtcagttccaacctgagagtgaggaacacaataccgtcggcat

SEQ ID NO: 6511 - DNA, 405 bp, Zea mays
  Clone ID: LIB3137-022-Q1-K1-C7
ctcgacgttgccgacgccgacgccggcgcttgcgcctctccgaaccgacgccatgccccgcgtcaaatggttgatgcactggcatccgagtcccggggcgacgctcaacagccagatcctggcggaggcgtgtggctgcgccgagtccctaggcggctccaaggacgggcggtggaagacctccatcttcttctaccgcgccatgacccgggacggcgcgggaggccccgcggtgcagcagcaccccgacttgcctagggagctcctcggcgtcgcgctccacgagcgcccgggtctctacttctccatcgtccgcgcccagcgcctcgttctccaggccgatgcggcgttcccccaggtcatggagaagctccagtcatacagaatccgcgtcgccctcaactt

SEQ ID NO: 6512 - DNA, 405 bp, Zea mays
  Clone ID: LIB3137-022-Q1-K1-C8
ctccgctgcaaccccaaatctctccttccttgcatacgcgcgcagcagaggagctgagaggaacgaagaagaagaacaaccgagcaagcacaagcttagctagcgtggaggtgcccaaggcgacgacggccgccgcgccaggctagccaaccagctgctcatcgctcctagctgcggagccgatggctggagccgacgtcgacgtcgggacggagctccgcctcggcctgccaggaggaggcgccgatgcggccaaggctgccaagaggggcttcgaggacaccatcgacctcaagctgaagctgcccaccgccggcatggaggaagctgccgctgccgccgccgccaagccggagccggccgccgagaaggccaagaggcccgccgaggcgccggccgctgatg

SEQ ID NO: 6513 - DNA, 444 bp, Zea mays
  Clone ID: LIB3137-022-Q1-K1-C9
agtttctgctgttttgaataatcaaatgcgtgtcatggcctctacctgatctgcaacctgtgacagacttgaacttgtgtgaagttcaaagcaagagtccttgactacaaaaagacttacataaattaataagtcaaaacaagaatggaaagggtctaaatactcattagtaatgttttaagacaaagtcttgctttcagcttccaggggttaattttattttttgtattaaattgataattacgatatggttgatctatattgcatacaaactgtggagcttttatgattacttgaagtagtcttaaaatattatttacttagtcaccaccacttatgatacagtggaggcatcaaaccatcaactatttagaagtgttacacgacttccttcttgagtattgcgagctgattcagacgagactgaaagcatatgaacatatt

SEQ ID NO: 6514 - DNA, 407 bp, Zea mays
  Clone ID: LIB3137-022-Q1-K1-D1
gcttcagagtggtcttcaagaatacctcaaccagcaaggattccatatcgttggctatgggtgtaccacttgcattggaaactctggtgatctcgatgaatctgtatcaactgccattacagaaaatgatgttgttgctgctgctgttttgtcgggtaaccgtaacttcgagggtcgtgtgcaccctttaactcgggctaactatcttgcttcgccacctcttgttgttgcttatgcacttgccggaactgttgatattgattttgagaaagagcccattggatttggaaaggatggcaaggaagtctacttcagggatatatggccctcgacagaagaaattgcgcaggttgtccaatccagtgtgctgcctgacatgttcaagggcacctatgaggctatcacaa

SEQ ID NO: 6515 - DNA, 387 bp, Zea mays
  Clone ID: LIB3137-022-Q1-K1-D10
aaataaaaaaaacaaacttacattcacggtttctacacccaacaaaaaccaaacagacatacgcaaactttcaaacatcaacactggcacatactcacacaacaaacacaaaacactaaccgggcgcccacaccaaacgacccaggctaacccactcctgaacacaactccatagaccctcaacaccatccccaaaacaacaccgcgaccttgcctccacacccacacccctgggaaatccccacctttccccacattaaatgcccaatgacacaccccctctcccccctcttatatacttgcgaatagaccgactccactctccatatccaatactcacgcacccgtactagctaattttacgacccatgtagcccccccttaatc

SEQ ID NO: 6516 - DNA, 331 bp, Zea mays
  Clone ID: LIB3137-022-Q1-K1-D11
cgcgtccgaccgtcacataaaaccctttaaataaacgcgtagacgtcccccagacaacaagaccgcgcacgcgccattgaaacggccccgaggccataccgaacctgaagtggacaccactgagccatgaccgcgcgtggtgctcaacccagcaaactgcttcgggtgcaaaatcaactctgatcatccggaggagatgagatcccacgacctgcggggagcgccacctctgccgcattgggaaatccagaggggatcataccgtaagtgcgctcggggagacccaccacaacttcgcattcagaggcacgaagaagttctcccaccatca

SEQ ID NO: 6517 - DNA, 444 bp, Zea mays
  Clone ID: LIB3137-022-Q1-K1-D12
aaaaccggccgacggcacgcgtcggagttcgtcagcctcattagatcccgttttcaggaatgggaacagcggatgcagtgggctggattgggatgccatacgtcgcgtttccttgaattttatgcagcccgtggccacaagatccttccgagctcgtcgcttgtgcctgacgacccaactgtgttccttaccatagcgggaatgcttcagttcaagcctatattcctcggcaaggaacctaggcgtgtgccacgcgccactacctctcagaagtgcatacggacaaacgacattgaaaacgtgggtcgcactgctcgacaccagaccttctttgaaatgcttgggaatttcagtcttggtgattacttcaagaaggaagcaaccacatgggcatgggagcttgcaaccaatgagtacggattgcctgcagaaaggctgtggatt

SEQ ID NO: 6518 - DNA, 401 bp, Zea mays
  Clone ID: LIB3137-022-Q1-K1-D2
cggacgcgtgggcgctcacgccggcgacaagtttccgccagagttaggtagatcaggtgctgcgccggcagccgtggaagggatggaggacctcgcgagttcgcgtggcggcgggggatgcggtggtcttgatgcgcagatcgaacagctcatggagtgccgcccgctcccagagacggaggttaaaacactgtgtgagaaggccaaggagatattaatggaggaaagcaatgttcagccagttaaaagccctgtgacgatttgtggtgatattcatggccaattccatgatcttttagaacttttccggattggtgggaagtgtccagatacaaattatttgtttatgggtgattatgtggatcgtggctattactctgttgagacagtaacgcttttag

SEQ ID NO: 6519 - DNA, 409 bp, Zea mays
  Clone ID: LIB3137-022-Q1-K1-D3
gccaatatctcagacggaatcgatccaaagctatcctagggttccgccgtcccgtccagatccgggctcgtcgatggggaaggagggcgtggcggcggggccggcggcggaggggagtaaatcgcggtcggagtgtatcaactcgtccaacccgtaccacgagtgctccgactactgcctccgcaagatcgccgaggccaggcagcgcctcgacgacgagctccctgactcgtggaagcgcccgcccgagcagcgcaccgtccacccggactgcatcaatgcctccaacccttaccacgagtgctccgactactgcttcaagcgcatcgccgacgctaaatcccctgcctgcgggctggagcgtgaggagcgacagccaccagctgatgtgtttgccgccgccggcatg

SEQ ID NO: 6520 - DNA, 318 bp, Zea mays
  Clone ID: LIB3137-022-Q1-K1-D5
aaaccggcggagcgacgcgtccgctcattttactcatttttcatcctttgtattctatggagaggctccttgccggtcggcgggtcttcttcctattaatgatcgcctcagtaggaagccatgcaactcgtgctccaaaacagtactggaagtgtgttatttccgacactcccatgccgagctgcttctactaactcctcaacaccatagctggtctctatcactacttgatacacgatgtatatggatgctcgaacatcgtacaaacatatatacgtaataacaccgactgatctcttgaattccatgcttattcct

SEQ ID NO: 6521 - DNA, 370 bp, Zea mays
  Clone ID: LIB3137-022-Q1-K1-D7
cggactcgtgggcggactcttggtctgactcttgggttggcatgccacgcggcttggcgggattcgttggtccaaggttccctgtttactttgctagaggccctataccagggatgattttccttgtcacgatttcgcatcctctacctctgcgacttgacatgatgattgggccttaccacgattcgctgatcgcaggcctgtctacgctacgagctacgttgcttattgaactcttggctgtgcagcagcacactccacttggaatgatgaatgccctgcattgcaaaaattattagatgatcttctgcttcaacctcatgatctgcgtttcatctcttatctatgggctgtatctcatgcacctaca

SEQ ID NO: 6522 - DNA, 403 bp, Zea mays
  Clone ID: LIB3137-022-Q1-K1-D8
tcaaaatcttcagggagccgtagaggagcatcaggtgcaccaaaaggatggcagcgccaggctccctgcgacttctccaggccccgtccttcgctgcggccaagtgccagccggtggcgggccgggcatcggcccggcgagcgccacggccactgttcgccgtgcgcgcctcggctgctgacgccgccaacagggatgccgtgctcaaggccttccgcgagaacagggctctcaagataatttccgggcttcagaactttgacaggagcagtgttgcatctgttgtcacagctgcagataagggaggtgcaacccatgttgacatagcatgtgacaaagacttagtaaagcttgccatggatcttaccaatcttccgatctgtgtctcatctgtagatccttc

SEQ ID NO: 6523 - DNA, 293 bp, Zea mays
  Clone ID: LIB3137-022-Q1-K1-D9
aacgagaacaaaaacatttaacaaccgggcgtataagatccagacgacccaacctaacgtacggaaaattctatacactacaactggttctataaacactcacacaacacattaaagagacggggggccctctttataagctccaggataaacaccaccattacccaacatgactactttcgtatagagccccctattacactccaatgaaagaacataatacaacgccatgaatagaaaaaccctactgtatcaagattaaatgactagattacaaacccattttctgattt

SEQ ID NO: 6524 - DNA, 405 bp, Zea mays
  Clone ID: LIB3137-022-Q1-K1-E1
gccgtgaacgtgccgtcgtcgtccgccttcggcgaggcccgcgtgacgatgcgcaagacggcggggaaggccaagccggcggcggcgtccgggagcccgtggtacggccccgaccgcgtgctgtacctgggcccactgtccggcgagccgccgagctacctgacgggcgagttcccgggcgactacggctgggacaccgcggggctgtcggcggacccggagacgttcgccaagaaccgggagctggaggtgatccactcccgctgggccatgctgggcgcgctcggctgcgtcttcccggagctgctcgcccgcaacggcgtcaagttcggcgaggccgtgtggttcaaggccggctcccagatcttcagcgagggtggactggactacctcgggaacccgagc

SEQ ID NO: 6525 - DNA, 370 bp, Zea mays
  Clone ID: LIB3137-022-Q1-K1-E10
gcgccagggccattgctttagccttcccattcataacatgcactgggctggccggttccgagatcattgccaccaaaccggccgctggagcgatgataaactatgtccaaggctacatgttcagtttcattccacctgctcaaacggtctggctaaagcttgtgctgcaccacctgaccaatgaggagtgcgtcaagctcctgtctcaatgccagaaggcgattccttcactgaaggatggcgggaaagttataatcggagatattatgactgaccactctgggcctatgctggaaactcaccttctgatggacatcggcatgatgaccatgacatatagactgctgactgatttaaaagaatggagcga

SEQ ID NO: 6526 - DNA, 293 bp, Zea mays
  Clone ID: LIB3137-022-Q1-K1-E11
acccacgcgtccgcccggcgttctttccaaatattcttcttttttaaacctactacaagcaagctgtgcttatcgaacatttcacaaatatacacaccaccagccaactcatcacctcacccagactcaacatctcttacgctcaccccgcgtaaaagacttacacaaaattagagcacccccagacgctaatgctgaacgaatggcacaccggttacaacatctcaacagaatccgaccctttcttctcaatcgcaaactcttcttctccggcactttaaacacaacaactt

SEQ ID NO: 6527 - DNA, 399 bp, Zea mays
  Clone ID: LIB3137-022-Q1-K1-E2
aaaaataatacgttatgctaggccagatcacccaactagaaaagggagtgatgcatctgccgagtctggatctgaagtggaagatgtaacatctcctactgcatcaaggaacctgattacacatcctattttgacccctgttcacgaagagtcaaaattgtcgccacatggttccacatttgttgctcatgcttctattgaagaaaacattcctgttgtagacaaggttgtggatgatggatggggtactcccagaggtagtctccaagcttcttcaggttcgttgccctcgagaaacacgcacggcacattcgaaggactgagagttcaagctgtcgcatggctgacgttcttgatcacggcccttttcgccacgctctgttccgtcccgagcaagat

SEQ ID NO: 6528 - DNA, 404 bp, Zea mays
  Clone ID: LIB3137-022-Q1-K1-E3
ctcccctcgactgttgggtgtggtggattttctccgctcccgccgaacggtcgatcttttgcatggcagcagcggcggctagctccaaggggcgggcgatcgctgggagcttcgtcagccgcgtccttgccggcaaggccgcctccccgaggagggccgtgcacgcctcgtcgtacgacaagaacccggaggagcacgtgcgcccggcgttcgtgccggacgatgtgatcggccgcggcgcggggagccccgacaagtactggagcccccaccccaagaccggcgtgttcggcccggcggcggtggaccccaaccagctgggcgtcgccgctgacgctgcagcagcaggaggcacggttctggaccagaaggtgtggttccgcccgctcgaggacgtcgagaag

SEQ ID NO: 6529 - DNA, 349 bp, Zea mays
  Clone ID: LIB3137-022-Q1-K1-E4
gcgagctgctgccatggccggcgccggtgcgcccgcagttccccaggccggtcgcccagccccgaacttcgacgtcatcgtggtgggcgccggcatcatgggcagctgcacggcgcacgcggcggcgtctcgcggcgcccgcgtcctgctgctggagcgtttcgacctgctccacccgctgggctcctcgcacggcgactcccgcatcatccgcgacgcctacgcgcagccgcggtacctccgcatggtgcgcctcgcccgccgcctctgggccgccgccgaggccgaggccggctatcgcgtgctcaccccgacgccgcaccttttcatgggcccgcggagcagcgcc

SEQ ID NO: 6530 - DNA, 401 bp, Zea mays
  Clone ID: LIB3137-022-Q1-K1-E5
ggtggagcaagcccagtccccaatcccaccctgccacccaaccttgcttcttctccgatagctatttctctggtttctccccaatcttcccgggtttccctgattaaagatggctgagtcctttgttctcaataccggctcgaggatcccatcggttgggcttggcgtatggcaaatacaacctgacgctgccaacgacgccatctacgctgctgtcaaggctgggtatcggcatattgactgtgcagcagcatacaacaatgagaaggaggtgggcctggctttgaagaaattatttgaagatggtgtggttaagcgtgatgatttgtttatcacctctaagctatgggctgctaatcatgcacctgaagatgtggaagagggaatcgacaccacacttc

SEQ ID NO: 6531 - DNA, 398 bp, Zea mays
  Clone ID: LIB3137-022-Q1-K1-E6
accgtatccattggaagacaggaaccagggggttttgctgctgttctttggaggagaagagaaatgggaggcttgctcttgccgcatcaccgaacctttccaaattctttgcaagcttccatcccgggacctctctctcttcacaaaggcgaccgcaaaaaccttcattactttgcacctgatgtgcacctcttctgttccctgcggcaaggctttccacgctcatcttggtcggccgtcatcagatcagaagccagcggcaacgcggtggcgtcgccaggcacggtcatcaagcgtagcaaggaggagctcatcaccttcttcagagacatacagacatccattgccgagtgctcgcgtaaagcttccaagaggacgaggaagcagccgcctgatct

SEQ ID NO: 6532 - DNA, 404 bp, Zea mays
  Clone ID: LIB3137-022-Q1-K1-E7
gcgcgagcgcaacagggagagggagagcgtatttcttcttcctcaccctcctcgaggaagagagagggcagctccggagccgcacgggcgcgagcgaggcaggcagtggctcctcccccctcctttcgatatcagctcatcgattcgtcctatcacacacatatcattaccgctcctcttcctctcctatgcttgtcctctaactcattggcagaagagaaaaaaaaagtccttgttgagttgttgtatcgggttctggtggtgactgttactggggtttccttgtccggttcttgattcgcgcaaggacagatttgccgtcctctcgggttccgccgtgcggtgctgaatccttcttccctgttcccttcccttacgtttggatcggggatagggatggaagt

SEQ ID NO: 6533 - DNA, 331 bp, Zea mays
  Clone ID: LIB3137-022-Q1-K1-E8
aattgggttagacaccatattattttgtctttatttgagtacagaacgaagtaaggtctgtgacttataaatgtgctaataaccgtctatctaaatttatgcacttgaaatataccaactcgcatataatatataaattatctgaacgatgccacgccaaatgtgtacttccataggacgaaaagcaagttcctatcatcacaaactccaatcaaatttagcgatatgtcatgagagcactacaggtcaacattacagccttaaaggtaatgaccctcgtttactatttattataaatcaacttgattttactagttaaattttttgcact

SEQ ID NO: 6534 - DNA, 438 bp, Zea mays
  Clone ID: LIB3137-022-Q1-K1-E9
gcagaaggcattaccgacgctacgactatgtgagccttgctccaagccggggccgccctggggcagtcggacaagatcggcggccgggcgccctttgcctagctgacgtgcagtccgtcgtcgcaactcgcctgcatggcgttcggcgtcgacgccggcgccagcaggatcacgtgctccctgcaggacgtcgccagcaggtgcgtcagactccgagaagctcgccagcttcgcgctcgccagctatgcgctcctcggctggggcgcgagcgcggagggcacgcccaagaggctgacctacgacgagatccagagcaaaacgtacatggaggtgaagggcacgggcacggctaaccattgcccgaccatcgacggcagcgtggagtcagtcccgttcaaggccgtccagtaccagatgaagaagctgtgcctggagcc

SEQ ID NO: 6535 - DNA, 407 bp, Zea mays
  Clone ID: LIB3137-022-Q1-K1-F1
ggggtatctgcattgtcaaatttacaacatgtgcaatcaacacatgttactaccaacttgaaggagcagccctgcaaatcaactggtgggactggctgtcctgagctgcctactgtaaaagaggagaaaagcagcagttcaagccaatcgccgaacaacagccagtcaatatctagtgagccatcgaaggatgcaagaagttcaactgctgcttctggtggtgctagtaaaacttctggaagctcttcacggagccatcgaagggcaaacaatggtcttgtttcagggaacctgaaggaaccttctgtaggaagatctgtctcccttgatcgatcattgctgcaggataagtcatcccaaactggtacagcttctgaaaaaggaattgatatgccatctgatcatgg

SEQ ID NO: 6536 - DNA, 423 bp, Zea mays
  Clone ID: LIB3137-022-Q1-K1-F10
cgacgcgcaagccagtgccgcgcccagatctccgcgacagatcagtcgttcgtgcagctagctgcactgcacgcaatggccaccacggcgaccgaggcgaccaagacgactgcaccggcgcatgatcagcaggccaacggcaacggcaacggcgagcagaagacgcgccactccgaggtcggccacaagagcctgctcaagagcgacgacctctaccagtacatcctgtacacgagcgtgtacccgcgggagccggagagcatgaatgagctgttcgagatcaccgccaagcacccatggaacctgatgaccaccttcgcctacgagggccagttcctcaacatgctcatcaagctcatcggcgccaagaagaccatggagatcggcgtctacaccggctactcgtttcttgccatcgtgctc

SEQ ID NO: 6537 - DNA, 422 bp, Zea mays
  Clone ID: LIB3137-022-Q1-K1-F12
gaagctttcagccgagcaccatcttcacagtcagtagtagctaagcatatttctgtctcggagtgatttgcgctgagcgatcacttcatccagagcgagcggagctgagctgagctgagcgagcttgcgtcgttgcttgagagaccctgccatggcttcccaccaggacaaggctagctaccaggccggcgaaaccaaagcccgcaccgaggagaagaccgggcaggcggtgggggcgaccaaggacacggcgcatcacgccaaggaccgggcggcggacgcggcggggcacgcggcgggcaagggccaggacgccaaggaggccaccaagcagaaggcgtccgacaccggcagctacctgggcaagaagaccgacgaggccaagcacaaggcctgcgagacgactgaggccaccaagcaca

SEQ ID NO: 6538 - DNA, 405 bp, Zea mays
  Clone ID: LIB3137-022-Q1-K1-F2
cggacgcgtgggttgataatgaagagaagcaaactggcagcatctacgagcactgggatattcttccccctaagaaaatcaaggacccagaggctaagaagcctgaggactgggatgacaaggagtacattcctgaccctgaggacaagaagccagagggctatgatgatattcccaaggaaattcctgaccctgatgctaagaagcctgaggactgggacgatgaggaagatggtgaatggactgcccctaccattcccaacccagaatacaagggaccatggaaacaaaagaaaatcaagaacccgaactaccagggtaaatggaaggcacctatgattgacaacccagattttaaggatgatccatacatttacgccttcgacagcttgaagtacattggca

SEQ ID NO: 6539 - DNA, 404 bp, Zea mays
  Clone ID: LIB3137-022-Q1-K1-F4
cgactacccgtcccgccgcctcatcatcctcggctccatcaccggcaacaccaacacgctggccgggaacatcccgcccaaggccgggctgggcgacctccgcggcctcgcggcggggctgcgcggccagaacggctctgccatgatcgacggctccgagagcttcgacggcgccaaggcgtacaaggacagcaagatctgcaacatgctaacaatgcaggagctgcaccggcggtaccacgaggagacgggcatcacgttcgcgtcgctctacccggggtgcatcgccaccacggggctgttccgcgagcacatcccgctgttccggctgctcttcccgccgttccagaagttcgtcaccaagggcttcgtgtcggaggcggagtccggcaagaggctggcgc

SEQ ID NO: 6540 - DNA, 267 bp, Zea mays
  unsure (1)..(267): unsure at all n locations; Clone ID: LIB3137-022-Q1-K1-F5
tttatttacaaatttacaacatttgcttactacacacagacacnaccaacttggggggggccctctttcaaatcaactggccccacctacttgactgaactgcctactttaaaaaatgataaaagcatcatttcaagccaatctcctaacaacatccagtcaatatctaatgagccatctaaagatgcaataagatcaacttctgcttttggtggttctaataaaacttctttaagctcttcacctatccatttaatggcaaacaat

SEQ ID NO: 6541 - DNA, 197 bp, Zea mays
  Clone ID: LIB3137-022-Q1-K1-F6
gcgacggacatgttgtattggcttgtaatacaggacgtagtaagtgcacacactttctgtaagcgtgctttcccacttcccagtgttactactgtttgcattttctgtagttctttgggtcggtcggttaggacatgggagtggatcgttctatgctcatttgaggtagattagttatatgaagagaaagcatcgca

SEQ ID NO: 6542 - DNA, 189 bp, Zea mays
  unsure (1)..(189): unsure at all n locations; Clone ID: LIB3137-022-Q1-K1-F7
aaaaaccggccgacgcacgcgtccgtnacaaaatacactttatcatgcaattgtttttcaaaaacaccttaacaaacatctgcatgttctatacanaatgacatctcgtgatacaatattacaccaatacttgaataattaacatagtaaattctcaatcaacacttcataaaatgatgcactacatca

SEQ ID NO: 6543 - DNA, 402 bp, Zea mays
  Clone ID: LIB3137-022-Q1-K1-F8
acccggtctacgggccccagctcaaggccttgcgggagtcgaggaagttcgcgctcgcgggggccctcgtcggcgccgcccacctcggcggcgtcgcgctcaagtactccaaggcgccgcacggcgtcctgctggcgaccggcttcggcgcgatcaccggcgccgtgctgggatccgaggtggcggaccactggtaccagctctacgagatggacaagcagggggccaacctcaggttcatctactggtgggaggacaaggtctcaggccagaagagctgaaccacatcgagtgatgcctattctactgagcacaccagcgtgacaacaaaacattgacgtctctcatgccgagttcttagcttttctttcctagttttctctaataagtgtggaattggtt

SEQ ID NO: 6544 - DNA, 70 bp, Zea mays
  Clone ID: LIB3137-022-Q1-K1-F9
ataaaataaagcatgtttggtttttcaaattataagaaaaaataaaataattaacgagaaaagaaacggt

SEQ ID NO: 6545 - DNA, 382 bp, Zea mays
  Clone ID: LIB3137-022-Q1-K1-G10
acactctccaaactgaaaaatattaacagcttcacatcaggtgacatgctcatggggtataggaacgctgctcacctgctggtgttagctgctgctgctgcgtgctgcccgtgccaagtccggagcaacatcagccaaccaaccacctcctgcgctctccgtctcccattccgtgctcgctcagccactcgtagtttcggagtcaaccgccagcgcctggatccggtgaagccagcccagcccatggcctccggcaccgtaccaccgcagctggtcagccctgctggcgctcgccgtcctatccgtcgtctcattcacgcacctgtccctccccggctagtcccatccgctccctgaggaagctgctgctgctgctgctgca

SEQ ID NO: 6546 - DNA, 335 bp, Zea mays
  Clone ID: LIB3137-022-Q1-K1-G11
acattattctctctcatatatgatttaccattaactgcatggatcggtcgccaggggcgagcgtccgattcttcgtcaccgttgtctacatcataactttcactgtcaccactatcttcacgacagtccttccacaatctaattcttgatttttgtcgtcttcgtctaccacatccttataaaaaatactaagttcttctcttcatcaatactcaccttcatctcagcagcatacttcttagcagcttcacacatcttcgcaagctctaaaaaactgttttcaaatactaaccttcaaatctaaaagcttatcaaaacacagtgcacaatagcta

SEQ ID NO: 6547 - DNA, 407 bp, Zea mays
  Clone ID: LIB3137-022-Q1-K1-G2
ggtaggggttgcggattgggagcaaaggaggagagggagtgctgggccgccgccggctgcgaacgcggaggaggcagcttccaccaatcagtgcaccctcatcctcaaaggctgttccaacagcatggaaaaaatctacgccatcaaaactcctcataagaaaagaaaatcacagtatgagctgagcaatccaaagttgccgccacttaaatgcaagtttggcaaaaggttatcttgccacagcgttgagtctgcaaccacagaaagtttgggatacgattgcattttcatgaacaagacctctgggacggacatggtcagcatacccgaagtattggactcctgtgagagcactataagactatttggtgggtgcatcgaactagtggactcaaaaactggaattc

SEQ ID NO: 6548 - DNA, 407 bp, Zea mays
  Clone ID: LIB3137-022-Q1-K1-G3
gggttttcgtaggtacatttgggcgtgttttggaatgctgggaccgtgaaacacgtgaatatgttgccataaaagttgttcgcagtatccgcaagtaccgtgatgctgcaatgattgagatagatgtgctcaatcgccttgcagaaaatgagaaatacagatctctctgtgttcaaatacagagatggtttgactatcgtaatcatatatgcattgtttttgagaagcttgggccaagcttgtatgattttctaaagagaaatagataccgacctttccctgtggaacttgtgcgggagtttggacggcaactgttggaatctgtagcatatatgcatgacttgaggcttatccacactgatctgaagccagaaaacatactacttgtgtcttctgagtatataaaa

SEQ ID NO: 6549 - DNA, 403 bp, Zea mays
  Clone ID: LIB3137-022-Q1-K1-G5
ggccaggcgacttcatactgctcgcctcgccgtctttcccccaatctgttgctcctgcgggctgcgggcgatcgccgtaccccggccgccgcagggaaccccctcgccatggccttgcaggggaagaagctcatcaacaaccccgacgatgtggtgacggagttcatcgaagggttggtggagacttacccgggtctgcagtacctcgacgggttccctcagattaaggtcgttcttcgtgctgatgtcgagcgcggttcctatgacaaagttgcagtcatctcgggtggtggaagtggccatgaaccttcccatgctggatttgttgggccagggatgttgacagctgctgtttctggagatgttttcgcctctccacctgttgattctattttagctgcta

SEQ ID NO: 6550 - DNA, 405 bp, Zea mays
  Clone ID: LIB3137-022-Q1-K1-G7
gaggaaaaccctgaattcccaagctgtgatgcctactttgaagctatccagtccaagaagaagttgccactgactttgcaagaatcactaactgctgcctttgctcagattccagtctcatccttccctgaggttccagctggtcgagtaattgaaattcctggtgatacttctgttattgatgctgtaaggactctctctgaacagaacataagggcagcaccagtactgaatccagaacctggggctcctactgattggcaggggaggtaccttggtgtcatcgattactcggcaatcatcctttgggtactagaaaatgctgagcttgctgctgttgcactctcggctgcatcggcaactgctgctggagttggcatgggtgctgttggtgctgttggggtg

SEQ ID NO: 6551 - DNA, 433 bp, Zea mays
  Clone ID: LIB3137-022-Q1-K1-G9
ggcttgtaagaggccatcaagatcctggaggagctaccggcgaccgcctgccgtagcagccgggcgcgcttcgtcagcttggggacggacagggcagcggcagagggcatcagcagattcagcaagctgccgcgcgagtccctccccccggtgcacacgttcgggctcggcgaggcgcacgaccccagggagctgttgcatatcgccagggaatcccagggcacctactcattcgtggacgaccagaacacggacggcatcaccggcgccatcgacgtctgcctcagcgggctcaagaacgtggtcgccgtcggcgcgcgcgtacgtcttgagacgcccgtctggagcggggtcaccatcgagaggatccagtcggggggatacacatacagcaggactggctccatcaccaccagagactacaagacgtacg

SEQ ID NO: 6552 - DNA, 409 bp, Zea mays
  Clone ID: LIB3137-022-Q1-K1-H1
ctgccatatagcaactggggtggtaggagacaaaggctcatttacattgatgttcccaggcaaagaagccactcttgagctttggaagtcttcagccgaattttgtgccatgaggtcactgtctataatatctcttgctcaactcatgattaaattatctcgttcttgtacaaattctagcagtgctttggcagcattttatacaaggcattttgctgaaaaggttccagatataaagcctccatccctacagcttttggtgagcttttggcaacacccttcggaacatgtgcgaatggctgcacgttccttgttccactgtgcagctccccgttctattccacaaccactacgagtaaacaaaaataaagtggtcaatgcccccttgtcttcatcagataatatgaat

SEQ ID NO: 6553 - DNA, 393 bp, Zea mays
  unsure (1)..(393): unsure at all n locations; Clone ID: LIB3137-022-Q1-K1-H11
cccacgcgtcgcgagtaggaagctaggangaaatcaaagcaacttagttgttggccgagagaagcaaccatgagagctcaggggtcgttactcgtgacactggctgttatcgtcgtcgtccttgcagctctgccactcagcaaagggacagacgaggaaggaggaggaggggaggcaggcctcggtcggaactccgccgcctgaacgagctgcgggccatgctgcaacaagggcgggttctgctacctgtctgacccgccgtagtgccaatgcctggacttctctacagtctgctgccatccagagtgcatgcagttcatcacgtacaccgtcgactgtggcgtacacatcccggccgtgcacgcctaccgctgcgcctacatcctctttaac

SEQ ID NO: 6554 - DNA, 409 bp, Zea mays
  Clone ID: LIB3137-022-Q1-K1-H2
ctcgtgtctgccctgctcatactgcttgccctcgccgtatcgtccacccgcaacgcacaggaggattccatggccaacaacaccgggacgttggtgggcggcatccaggacgtgccggggagcgagaacgaccttcacctccaggagctcgcccgcttcgccgtcgatgagcacaacaagaaggccaatgctcttctggggttcgagaagcttgtgaaggccaagacacaagtggttgctggcacgatgtactatctcactattgaagtgaaggatggcgaagtcaagaagctctacgaagctaaggtctgggagaagccatgggagaacctcaaggggctgcaggaattcaagcctgttgaagagggtgctagcgcctaaggatgtctccttctccatgtgcgagcct

SEQ ID NO: 6555 - DNA, 408 bp, Zea mays
  Clone ID: LIB3137-022-Q1-K1-H3
cacgattcctgggacattttcatcgaggcaagtcacactcgatactgttgagatattttctactgatgaatggtttggcaaaccaacagtcgttttcgggtgcaatggagagaataaaacagatttgccagatgtgagggaggtgcacgctatatacctttaagggtgaagaatcatggcagagcttccagaaaagaaatgcaagcgatgtggtttgtatgaggaggacacaattacacctgatgatgtctttgatgaatgggagatgtgttcgagtgatttcaaaggtgggaaatacacccggtttaaggaaggccagttcaatgcaacattcctatgtccaaactgcactgcctcaactggacatggaaaccgtgaacctagtgaagatttggaaactaagaagac

SEQ ID NO: 6556 - DNA, 406 bp, Zea mays
  Clone ID: LIB3137-022-Q1-K1-H4
ctcgtggcggtaatggtaacggtaaccatgtccagaagagacacacgcggcgatacgccgacgggtagaccaatctacccaacactttatggttcaacatgctgtgtttgcattgtcgcgcatctttgagcaatgagcaagattgggttgctcctccctcccggaggcactgctgaaccatacatggaggaaggagactcgggtcatgggcaccctttaccgtgagaagcgttgtagcctacaccaccaacatttctctttcttttacttcttcccaggtgtactatgaacttcagtgcacgtgcagcggaccttttatattatctgcactttgctggggttaagggggctaggcctttgatttattggtcgccgcttattgtaacttgtgaattcgcttgagttc

SEQ ID NO: 6557 - DNA, 256 bp, Zea mays
  Clone ID: LIB3137-022-Q1-K1-H5
ctggcacatcttcaatatagcaacaatgatttcattgttgctagccaccactcgcacgaggagtctatcttgactacactcacattcaaaacaaacacacagtggcgtgattccatatctatgactacctgtacaactaccttgacctgaaaaccaaatagctgatgatacttaccttatcttcctgcctgagactctttctcaccatgcaccaccggacctgccagttctccaatctgaaactgactaacactac

SEQ ID NO: 6558 - DNA, 403 bp, Zea mays
  Clone ID: LIB3137-022-Q1-K1-H6
cggacgcgtgggcaagaaagcaagaaagataagactgtagctagccaccgcgcgcacgaggagtctagctagactacactcacattcaaaacaaacacacagcggcgtgctgcgtgatctctgaccgcgtcgacaactacggtgaccgcagcaccaagcagccgatggcggccaccgtatcttcctgcctgagcctcgtccccaccgtgcaccaccgggccggcgggttccccgctgtggcactgacgaacacgcttcagcgccgtcgtcgttctcgccgctatctcgtcgtcgtcgcctcggcgacgagagccgaacaggaggccgcccctgtgacgatcgaggacgtggacctcagctctcatcaggcggcgcccgacgatggggagctcgccgcgcggtg

SEQ ID NO: 6559 - DNA, 351 bp, Zea mays
  Clone ID: LIB3137-022-Q1-K1-H7
gaagctctttggattctctattgcgcgaagtgttgagagtatggacaacgcattgggtcgttgttgttaaggaataaaaattgccaaaattctaattcatcgtgttggagacaatggacagcagcttgtttatcacaaactgcccatggatattgctgaacgacatgttctacttttggatccggtgcttggtacaggcaactcagtaatccaagcaattgaccttcttataagaaaaggagttactgacgatcggatcatttttctcaatctcatctcggatcctgaaaggattcagtgtatctgcaaacgaaatccttcgcttgagattgttacatctgaaattgatta

SEQ ID NO: 6560 - DNA, 390 bp, Zea mays
  Clone ID: LIB3137-022-Q1-K1-H8
gtcgaccaaggtgcaagcagctccaggtggcgactcttcactcggttatctttttagtgggagcaaagatggcaagtgatgtacacctgctgttagtgttcgccatgatcatgggagaaggtttctgcttaacaaaggaaaaagggaaaagaatcttgtattcccatgagtaaatatcaaactgctcatggtatctatgttgttgggattgcttgtatgtgtgtacatgttcgtgtgtgtcgtgtgttgatccacagctactggtagcaagagcttctatccctgctgatggaattgtgcgcaatgccaatgttgacattatcgtgggtgatgctattatgttgtggtgtattattggatatgtttgctgtttaatacacattgttgtag

SEQ ID NO: 6561 - DNA, 427 bp, Zea mays
  unsure (1)..(427): unsure at all n locations; Clone ID: LIB3137-022-Q1-K1-H9
tgaggatcctgcagttcggtgttggcggcgttgacctgtggccaccatgcagcgggacacgctagagccatgtactgcgccgatcatatcgaccttctggccgtgttattactgatgctgctgctgatgagcccaaccacacgcagcgacccatttagcctccgttggacctaggctgcatccactgactgagccatgccttgtagtgtgggaaggatgacgactgcattctaaacagtatgaatgaaaatcacgangacatatttactgtgctggtgtgaggcatgtatgttactgtcactcctggaccctatactgttactacacaattggtgtgcagatcttgcatacacagcctggactttcacacctacaccattttgcttatggaaaagatttttgatctgcaacattcaaattttaaccc

SEQ ID NO: 6562 - DNA, 249 bp, Zea mays
  Clone ID: LIB3137-023-Q1-K1-A1
cgttaggatttcccctgctcacctcgccttcgccgccgccttcctcctcgtcgtccggtcgtcggcgcctggcgctgctgccgcccgcccgatcttcgatggcaagccatccccctccgaggccaccgccactgcgaggtggctcgccgcccagaacacgtggggtgtcctcagcacaatatcaagtgacttaagtggagctccatttgggtattccttcttgtctcacttctgcaaacaagctgcata

SEQ ID NO: 6563 - DNA, 386 bp, Zea mays
  Clone ID: LIB3137-023-Q1-K1-A11
cgggattcgacgccacgcgtccgacgctccccgctagggttttgccagcatggtcgccgccgccgcccggaggctcctctccggccgcgcctcctcgtcctccgtctccgcgctcctccgtcacggcgctgtcccggagcagtcgctggtgttgcgcccggctgttgtcgcggcggcctcccgcctcggcttccagcgcgggatggcgcggcggcctggcggggacggctacgtctcgacgcggtctggcgcgggcggggaccgcgcgcccatggccacggagatggcgccgctgttccccgggtgcgactacgagcattggctcatcgtgatggacaagcccggcggggagggcgccagcaagcagcagatgattgactgctaca

SEQ ID NO: 6564 - DNA, 314 bp, Zea mays
  Clone ID: LIB3137-023-Q1-K1-A12
cccggcacaagcattaacgagatacacaatcattcggtaaagctgttgataaagggattggaagaactgaggatcctggagaaggggaaatccatccaatacaactacttgaacccaaccgcaataggccactcgttaggcatggatattcatgactccatgacactccccaaggacaagcccttggagcctggcgtcgtaataacgatcgagcccggcgtgtacatcccggcggccccggtcctgaacgagcgcgcgccgagcaggtaccgcggtatggggatccggatcgaggacgagatcctcatcaccga

SEQ ID NO: 6565 - DNA, 433 bp, Zea mays
  Clone ID: LIB3137-023-Q1-K1-A2
cggacgcgtgggctcgtatccgagtcgatctctgctccggtggcgattggagggcacgatcgcaatgacaggtgggtccggctgcctcgcgctcacagtgcaccgttggattctttccatggtctacatgccagtgagaaagtgcacggcgactctagagtaaatcccggtgctaccgacagcgtgagtgacgaatccagcatgcgcggatgccatggcggctcagcttgagaccaagctggcatatactatcttttgactggtgaactcgttgcatggcttgttctatgtttagcaatgtattgccatatagtaattaatttccagcctaggccccagaattaccctcttttaatctaacaactttgattccaattgcattaattgcattgcatgatgaacggacctttttaaccataagtaagttcctttt

SEQ ID NO: 6566 - DNA, 232 bp, Zea mays
  unsure (1)..(232): unsure at all n locations; Clone ID: LIB3137-023-Q1-K1-A4
cgccagtggacgtgcagacggaggaggcccttctgaagacggcgacgatgatccagcagtcgangactatggcggacggcaataagctgggcgacgcgcgggacaagctggcggaggcccagaacgcgctggaggacgtggtggcgcagtccgacccgctgctggacgccctcaggacggagctgcaggagctactgaagctgatgaagtcgcaggacgtgtacgagaaaca

SEQ ID NO: 6567 - DNA, 447 bp, Zea mays
  Clone ID: LIB3137-023-Q1-K1-A5
ctctcgtcttccagacgcctccaatctgggctcccagcggccagcgtctcggaaaagaggggcagcacggcacggcggcgatggcgaggaacgctccaataatatgctaacccgttctacccagtccaattagcagcctcccaaggagaaggagatccaatcctgcgggcgggcgtcccccgtatcccatccatcgatccgaatctcggaatctgcaggaccctgcggcgcggcttcttcgtggagaagaggttgctgccgaagccaccgccaggtagccatgtcgtcctccgtgctgagggctgctgccgacagggccattcgcaggcaggccctcacgctgactaacgccgtggcgtccatgatccggcagctactcagcctaaggcaacggccatacctgcggctgggtgtcaaagcgcgaggttgcaacggactctcctacac

SEQ ID NO: 6568 - DNA, 434 bp, Zea mays
  Clone ID: LIB3137-023-Q1-K1-A6
cctgaagtggccaaagacattcattgttgtatcacacgcaagggagtttttgaatacgggggtcaccgatatccttcatctgcatggtagaaaactacatgcttacaaaggtgactatgacacatttgagaggacaagggaagagcaccttaagaatcagcagaaagcctttgaaacaaatgagaaggccagacagcacatgcagacattcattgacaagtttcggtacaatgcaaagagagcatcacttgttcaatcaagaatcaaggcattggagcgaatggaacatgttgatgcagttgtcagcgatccaaactataaatttgaatttccgaccccagatgaccgccctgggccaccaatcatcagcttcagtgatgcctcatttggttaccctggagggcctaccttgtttaaaaatttgaattttggta

SEQ ID NO: 6569 - DNA, 246 bp, Zea mays
  Clone ID: LIB3137-023-Q1-K1-A7
ccttgatattccaaacaatttaaccattagtaacaacccaagggagaatttctataagtgtacacactatatacatcatgtactacaaaaaaaactacatgcttaccaagacgaatatgacacattaaacaggacaagggaacagcaccttaagaatcatccaaaagcctttgaaacaaatgataactccatacaacacatgcatacattcattgactctgtgttgtacaatgcaaaaagagcatc

SEQ ID NO: 6570 - DNA, 417 bp, Zea mays
  Clone ID: LIB3137-023-Q1-K1-A8
gggtgatctgaaggaggaggaggcggcggctctccaaactttagcgacatggcaatgcgggtggcggctgcggccacgttcgtgcggcgcctggcgccggcgcgcccaccagtacgcatcctggcggcggcatctacggcggaagcggaggcagtgacgtgcgggcgcggggacaagaaaaccaagcgcgggaagcggttcaagggctccttcggcaacgcacggcccaagcgggagaagaagattgagcgcatcaaggaccgcgtcgaggtgccccgctccaccaacctgaccggtctactttaagcttatctgagatggagactccccccacattcctttttcatccttggggaacccgcgcgcactggggttgagagggtcaccttctacaaccaggaagacttcgttaccaac

SEQ ID NO: 6571 - DNA, 53 bp, Zea mays
  Clone ID: LIB3137-023-Q1-K1-A9
cttgtacaatctcttgttttttcataccctatcaaccggatacgcccgcaggc

SEQ ID NO: 6572 - DNA, 226 bp, Zea mays
  Clone ID: LIB3137-023-Q1-K1-B1
agaaaaagaagcaactgcagaaatgggcattttgttttcttctttcgcaatctctgtaagaagatactctgatttttgcttgggtcatcctataagttgtggatccttttggttagagtcaactttgttgtgccagtggattatacggatgagtaagctgattccaggttccctgtgaagcataagtgctctttctaacgaatgaataaagctcctttctctgtgt

SEQ ID NO: 6573 - DNA, 247 bp, Zea mays
  Clone ID: LIB3137-023-Q1-K1-B10
ccggaccgaccgactcgtccgaaacgtcccctgtcccgctaggatacaccttaaagcctcccccataaccacatatcagagaggagctcatgatgttctgcttccttcaccacgaccactacgttcagaacctctcggcacactgcatatacactcacccacttcaatactttaagcgcatccgaccatgcttactgcctctccgaccgaaactgcaacgtggtgctagacaaagacataccacgct

SEQ ID NO: 6574 - DNA, 437 bp, Zea mays
  unsure (1)..(437): unsure at all n locations; Clone ID: LIB3137-023-Q1-K1-B11
cgcttgccctgttcgcatcttcgcgcgtggcgcacaccgctccagctctccttcgacgggcacggccgagccgccttcgtcttggccgcagcggtgcgcgctctccatggcgtcctaattagcctagccgcaacgccgcgcccgtgcctgcggcatggatgaaccccttcttggcaatggtcttaagaccagcgggaaaagagagagcctggtagtggccgaggtcagaaaacagatgtaccttgctgggccactcatcgctgcatggatcctacagaacattgtccagatgatatctatcatgtttgtcggtcaccttggtgagcttgccctctccagtgcctccatcgccacctcctttgcaggcgttactggcttcagcttattgtctggcatggcgagcagcttggacacactgtgtgnngcaatcgtcgggc

SEQ ID NO: 6575 - DNA, 248 bp, Zea mays
  Clone ID: LIB3137-023-Q1-K1-B3
gcttcatggccttgataaggttttggaaggtggtgcagttgtcatgactctcaaagatcaggtgttcttgccaatggggatatcaatgaacacgctgacatgcttgagaacattgagattggtgagcagaaacaaagagatgaagcttataaggcttcaaagaagaaaggaacttatgatgacaagttcaacaatgattcatcgtcaaaaaagtcgatactgtcacattatgatgaccaaatggaaga

SEQ ID NO: 6576 - DNA, 415 bp, Zea mays
  Clone ID: LIB3137-023-Q1-K1-B4
cggacgcgtgggcgacactggaaagcagaataccatacaggcaatgacaggttgtgcgagggcttgtgtacttgtgtgagaggctgccgcggacgtgtggaacttagcgggtgttgtcatagttcataaacacttcgtggagaaccaatctagcaagctagtagcctaaaagtggagatagccgatgaggtcttaagatgcaactgaagcaaaagatgctactacatcaaggagcagctcaaccactcatttgatggcatagtccattgaatgaaggcttaaatccacctgacccaattcaagggggttggttcagaaccattacctggaattaaattccacttaataataagatgacatttccggtgccaccccaaagccagttcattcaaccaattagtccgattgaagccat

SEQ ID NO: 6577 - DNA, 227 bp, Zea mays
  unsure (1)..(227): unsure at all n locations; Clone ID: LIB3137-023-Q1-K1-B5
gcatggccacgacacagagctgtcagagcaagagcagcgccttgcagcaaggctgctgggggcttcccggccgccgtagcggtcgacgaggagcacggccaccacagccaccagctgaagggaggagcgcaggaggaggctgagaacgacaataataagccggagctccggcgtggcccctggacggtagacgaggacctcaccctcgtcaactacatcgncgacaa

SEQ ID NO: 6578 - DNA, 420 bp, Zea mays
  Clone ID: LIB3137-023-Q1-K1-B6
tgcatacacaacacagagcatcagaagcagctgcgatctgatcgacatggctgccgccgcgatggctatcacctcccgcgcgctcgtcggcaagccggcggctggcacgagggacgtcttcggcgagggccgcatcaccatgcgcaagaccgccgccaagcccaagccggcggcctccggcagcccctggtacggtgccgaccgcgtcctgtacctgggcccgctgtccggctcacctccgagctacctgaccggcgagttccccggcgactacgggtgggacaccgcggggctgtcggcggacccggagaccttcgccaagaaccgcgagctggaggtgatccactgccggtgggccatgctcggtgcgctcgggtgcgtgttcccggagctgctcgcccgcaacggcgtcaagttcgg

SEQ ID NO: 6579 - DNA, 441 bp, Zea mays
  Clone ID: LIB3137-023-Q1-K1-B7
gtgggaactggttgttgtttcaataggcaagcactttatggttatgggcctccatctgtgcccgcacttccaaagtcttcgatttgttcctggtgttgctgctgctgtcccaagaaaaaggttgaaagaagtgagagggaaatcaacagagactctcggcgagaagacctcgagtctgccatttttaaccttcgcgaaattgacaactacgatgagtacgagaggtccatgctcatctctcagatgagcttcgagaagtcttttgggctgtcctcggtctttattgaatcgacccttatggagaatgggggcgtccctgaatctgcaaacccatctaccctaattaaagaagccattcatgtcattagctgtggatatgaagagaaaactgaatggggaaaagagattggctggatctatggttcagttacagaggatatt

SEQ ID NO: 6580 - DNA, 431 bp, Zea mays
  Clone ID: LIB3137-023-Q1-K1-B8
ccaaaagtgagccttgacttctactcacgtgtgatgggcatgtcggtgctgaaaaggttggcttttgaagagatgaaattcagttcgtattttctaggttacgaggatgtgaccttagcccctgatgatcatatcaagcggactgaatggacttttaggcaaaaagctactcttgagctcacccacaactggggcacggaaaatgaccctgaattcaaaggttaccataatgggaactcagaccctcgtggttttggtcatataggaataactgtggatgatgtccacaaggcatgtgaacgctttgaacgtcttggggtttagtttgtgaagaaacctgatgatggaaaaatcaaaggcatcgctttcatcaaagatcctgatggttactggatcgaaatatttgaccaaaccattgggaccgtaacttc

SEQ ID NO: 6581 - DNA, 226 bp, Zea mays
  Clone ID: LIB3137-023-Q1-K1-C10
acgattgcttcctgcctcatgacactcctgcttgtcttgctactgatagtcttcgcttctgcgcacatctttaacgacctctagaacgatctactataactgaggccactttgtgtacaaaaacatactgggagccaaccagcatctgtttctgaacagcttaccatatccatgtacctctcattctacttggacttatctctctgtatctagcttaacatgccac

SEQ ID NO: 6582 - DNA, 380 bp, Zea mays
  unsure (1)..(380): unsure at all n locations; Clone ID: LIB3137-023-Q1-K1-C11
cgtgccgtcncctcgcctatccgatctgctacctcctcccgtctcgcacgttccttcccgactccgcagcgtagcctctccgcggcgcgatccacatccaggtttttcagcatgggcctggtgaaggaaggcatctacatggaggagggaacccttgagatcggcatggagtacaggactgtatctggtgttgctgggcctctggtcatattggataaagtaaagggcccaaagtaccaagaaattgtaaacatccgacttgtagatggcaccaatcgccgtggtcaagtcctggaagtagatggcgaataagctgttgtgcacgtctttgaacgaacttctggaatatacaacagatacacaaccgtgcagtttacatg

SEQ ID NO: 6583 - DNA, 294 bp, Zea mays
  unsure (1)..(294): unsure at all n locations; Clone ID: LIB3137-023-Q1-K1-C12
gtggccaancaaatctaccatgcgacgacttgcgatgcgagcatgacacataccctttagctcgtgcttgccgccgtgggcggggcgtcccggacccgcatcgtggtgcttgccgtccctggtgagtccatgagacgtgtgtcactgtcatccggccgttcagcgcagagcccatccggccatcccgttcgtacctaaccggcaccttcttctgcggatcaatccggcaaagccagcgcgcgcgatgcgccgacggtgggacagctgcttctcgggcggcgacgtccgcgtggg

SEQ ID NO: 6584 - DNA, 407 bp, Zea mays
  unsure (1)..(407): unsure at all n locations; Clone ID: LIB3137-023-Q1-K1-C2
cgcgcgcgggggagcgataaaccctagtcttcgccgtcgtcgcaggaggacccgcgatgtcgcacttcgggaggtcaggcccgccggacatccgcgacaccttctcgctcctcgtcctcaacatcagcttccgcaccacggccgacgacctcttcccgctcttcgagcgctacggcaaggtcgtcgacgtcttcatcccgagggaccggangaccgggggactccaaggggtttcccgttccgtccggtccaggtcccccaccaagccccaaaaggctataaatcgctccaatgcccggattttgattggaaaaacatcattgtgccatttgcaaaagaccggccccatgcttaacccatgaaaggttaaagagggggttgggaaatcacaagaccgatcaagaagc

SEQ ID NO: 6585 - DNA, 445 bp, Zea mays
  Clone ID: LIB3137-023-Q1-K1-C3
caggtggaggaggcgctggcggcggtgctgtccgcggcggcgggccacgcggagccgcacgcggtgccgctgcagggcgcgctcgggctcgtcctcgcggaggacgtctgcgcgcccgatccgctccctcccttccgcgcctccatcaaggacggatacgccgtcgtggcctccgatgggccaggggagtatcctgtggtcacggagtcgagggcgggcgacgacgccctcggcgtggtcgtcgtccccggcacggtcgcctacgtcaccaccggagggccggttcccgatggcgccgatgccgtcgtgcaggtggaggacaccgagcagctccctggcggaacggatgggtccaagagggttaggattcttgggcgggcctcccaaggacaggacatccgcagtgtgggatgtgacataaagaaggattcgattgtgctcaagt

SEQ ID NO: 6586 - DNA, 434 bp, Zea mays
  Clone ID: LIB3137-023-Q1-K1-C4
ccatattcacctgcacaactgttgcccgtgaagttggaccctaatgaaggaactttacacgtgtgtagttcgtgcaaatctaaaggaagacccaaaggtgaccggatctgcacatgctctttttgtcaaagggttttacataaaagaacctgggaaattaaatctgactccaagttgcaatcatagtgtcattactatcgatggaaatactgatattgagttgttctggaatgctaaagatttactcaaaatcaatcgtgttgacacaaaataaaaccatgggggtcttaatccaattggttaccgggttgaagcgcttaaaaagctatcgttcttttacaagggtactatcgttctttctggcactggtcaaactgaggaagttgaagtcaactaccatacaagagaagaagcagaatcaccattatcattgg

SEQ ID NO: 6587 - DNA, 442 bp, Zea mays
  Clone ID: LIB3137-023-Q1-K1-C5
cggacgcgtggggcatctcagcaaggttctttcaaagttgggaggtggaaaattaactgggtgtcaacccaaaagtgggagaacccgttgatgggatggacatctactggggatccatatgctaatgtcggtgaagcaggacttacattcaacagtgcggagtcagcaaaagcatttgctgaaaaacatggatggaattatgtggtacggaaacggcatacacctcttctgaagcctaaggcctacgctgagaacttcaagtggaaaggccccccgaaggcggagcaagcataagacctccagcagcatgtgaccctgacactggaatgatgttattttcctcctgagctctagagtctagacctcttgtccgtgagcctggcattgggacggtgttgttttcttcctggacagccttttctttcaacagtgtccgtggtga

SEQ ID NO: 6588 - DNA, 435 bp, Zea mays
  Clone ID: LIB3137-023-Q1-K1-C6
ctcagttccacatattgttactcctcgtcttcagaggaggccgacgaggaatgagtgggggatgacggcgtactactcgtgctcctatgaaaggtcacggaaaggaagaattccagccatggaggacgaggcggacggccgccgacaatccttcgtgctgcgctccctcgtgcgcgcgggcctaaagcgcgaattcgccttacccatcgactcgcaggctcgcctttcgtcctcatacgcacccctgggccgcacccgccgctcataccgcatcctcaacccatcggccgcttcgaccccctccgtcgacggcgccggcgtctcgacatacttctcctcaacccccgacacaaagccaaaagccaagcgcccgggcccaccagatcctgccccttccactacctttcctcctacaccagactatgcccctgcccc

SEQ ID NO: 6589 - DNA, 165 bp, Zea mays
  Clone ID: LIB3137-023-Q1-K1-C7
cttggaccattcaatcctgactagaaggttttcttggctggcaacttgcttgctggtgaggtatgatggcgatgcaatcggcaaatcaaggagacgggggatacctacgatgctagtcaagtgcactgagttgcaaaaagcactctgatatataatgccaatgtt

SEQ ID NO: 6590 - DNA, 163 bp, Zea mays
  Clone ID: LIB3137-023-Q1-K1-C8
agagcttccagggtgttttggatggcacttattatgacctccctgagcagtcatccggcgtggtcaatggcatagaggaagtcattcctaacgctgagaaaattcccaagtagtttttgtaataagaggctttttggctgtaccatccttgacaaatttccat

SEQ ID NO: 6591 - DNA, 419 bp, Zea mays
  Clone ID: LIB3137-023-Q1-K1-D11
cggacgcgtgggataacattcaaagcacgcagggtatgcagatacagacataacaaaagcgtactctctccataccaattatacaacaacaccacaatacatctatctctcgtgcacatagcaaatgacaatgtcgtccggctcagaatggcgtcagcgcacagcgtcacggcctagaccataatctccagcgtccaccgatatagctcctgctccggcacgggcaggtcgacggacacgaggccggtgtcggcatcgtagctgaactccacttccgccgagtccaatagacacctcgccggctcccgcgagcagtaagcgccgaaccgaccgcacccgcgaaccctgagagccatggccttgccgccgacattgctgatcacgtcgcactcctcacggcgcccccagcgttgaacata

SEQ ID NO: 6592 - DNA, 346 bp, Zea mays
  Clone ID: LIB3137-023-Q1-K1-D12
gcatagctagcaccacaacctatcgtccttgtatatatagtactactaggctgtggtcggtgatggcgtgtccgagccaaggaagaagacagcagaagctagcaaacaacatgagtggtgccatggacatggtgcgagccgcgtgacccaaacaaactacatacgcctgcctagctaggagagagcagacattgagagctcagaagcgtgcgtgcacacgtaaggatcgatgtgctgaggaggaaaagagaaggagatcgaagggattattaaagttctgtcacgtctttttgctgccggctatcgatcatgtggagcctggtgcggcgatggcgatgggggcggc

SEQ ID NO: 6593 - DNA, 280 bp, Zea mays
  Clone ID: LIB3137-023-Q1-K1-D2
gctgaagctggtattcttgcaatggaggcactgcataagcaggtcatgccgtttctactgggaagaacaaaggatgaagttttatctgatcttccaaagaagataatccaggatagatattgtgatctcagtctattgcagctcaaactttatgacaaattttccagctccaatgcaaaagacgagatttcaactatagtaaaagcaaatgaactggaggaatctgcacctcaaccaaaggcaactcggcatgtgtttcaggcattgcagtacctattaa

SEQ ID NO: 6594 - DNA, 424 bp, Zea mays
  Clone ID: LIB3137-023-Q1-K1-D3
cgctgcttctgctgctgctcgcgccgctcgccgcggcggcggacatgtcgatcgtctccgacggcgagcggagcgaggaggaggcgcggcggatgtacgccgagtggatggcggcgcacggccggacctacaacgccgtcggcgaggaggagcgcaggttcgaggtgttcagggacaacctccgctacgtcgacgcccacaacgccgccgccgacgcggccgtccactctttccgcctcggcttaaaccgtttggccaacctaacaaccaacaagaccgggccaactaactttgccttaagaaccagccggaaaaggagaagaagcttcgttaccggtacctggcccgcgacaaccaagacctgccggagttcgtcgactggcgggccaagggcgccgtcgcggagatcaaggaccaaggcaac

SEQ ID NO: 6595 - DNA, 428 bp, Zea mays
  Clone ID: LIB3137-023-Q1-K1-D4
cgagaacacgatcgagcacacaagcacgaagactcgtttaggagaaaccacaaaccaccagggcgtgaaagcatcatggagtacggtcagcaggggcagcacggccacggcgccacgggccatgtcgaccagtacggcaacccagtcggcggcgtcgagcacggcaccggcggcatgaggcacggcacgggaaccggcggcatgggccagctgggtgagcacggcggcgctggcatgggtggcgggcagttccagcctgcgagggaggagcacaaaaccggcggcatcctgcatcgttccggaagttccagttccacttcgtcgaaggacaacggcttggccggaaggaggaaaaaggaattaaaggaaaaaacaaaggaaaacttgcccgaaggcacaagggccaacaagacgccacggggaacaac

SEQ ID NO: 6596 - DNA, 423 bp, Zea mays
  Clone ID: LIB3137-023-Q1-K1-D5
ggctgacattgttactcacccaaccaattttactttcgcacgtcctaccacttctggccgcggcctaactgaacatggccttactgcaactattaatgctctgctgcctagtcgggcactattccaactaataaagaatcacaccatctatgctgtatcgattaccataccgcttcttcttcgttttatgctccttgcgctgatctgaaatctttgacttcccaccatttatagtcctcatcattgccatcctcaatgacagcaccattattaatatctccaacgacaaagtaaaaccatctacacaaccagacaacttgaagttacctgacatttttccaactggagtaattattggtggatatctgaccatgaacactgtcattatcttctgccctgcatacaacactgacttcttcccac

SEQ ID NO: 6597 - DNA, 416 bp, Zea mays
  Clone ID: LIB3137-023-Q1-K1-D6
actaagcagggcttcgcgctccggtgctgaatgatcaagtaaaattcgcaggaacaatgggcttaacctgttgcaagaatcgatatgatttatcctaaaagaaggtgttaagatgatgggacatggctttcaaaactttcagctgttgcctgctggtagccaagacacactgaatccgaaggaaggcgttgaagggtagctgctagtgattttgtgatataaagagtactggggcaggtagcatcggcattgttagcggatttagagtcttgatatgtatatctgtctactgctttatcagtaatgctgcttaatccctcactatctcgtaaggatatttctataaatagactgaacttggtgtatatatatatatatatttatatatatatctatatatatatatatttatatat

SEQ ID NO: 6598 - DNA, 401 bp, Zea mays
  Clone ID: LIB3137-023-Q1-K1-D7
gcaccggaacaagttccggtccaatttggatgccttttcaaggaggatgaccctgagttggcaaccttggacactgtcactgagctcactatcaaaccatcgtcgaaagaaaccattgagatccccgtcaccgagaactccgcgattgtatgggaactccgggtgctcggttggtaggtgagctacagcgccgagttcacccctgacaccgagggtgggtacactgtcattatacagaaaacaaggaacgtgcccgcttaccaagaacccatcattgaaggaagcttcaaaggatgccaacccagcaaggttgggctaacttgtaacaacccttcattcaaaaagaagaagcttctttaccgaacaaaaggcaagaacattaaccaatgaatgaatgaatg

SEQ ID NO: 6599 - DNA, 204 bp, Zea mays
  Clone ID: LIB3137-023-Q1-K1-D8
gcgcgacatcctctactactccggggtcgttgccaaggcctacagcagcctccaccgcagacgcccttcgtcacgcccccacggccgactatacaaccgcgtcgccgtgaaagagccgttcatgtactaccaccccaaccacacctacgcgtccaccacgggctacgccaactctggcggaggcacccgagacccctacatgct

SEQ ID NO: 6600 - DNA, 302 bp, Zea mays
  Clone ID: LIB3137-023-Q1-K1-D9
aaagcctttcattattcataatatgccactttcgagcaggtaattgcacctgaatacttgctgcctttttgccaagaaaggatgcatatcaccatccttttgcactgcatacatatcttctgtgaagaccagtgtatcccaatccaaaagagagggagcgaacttgcccactgcgcacggcattactcaacccagcagacctcatgtcgttcagtgatcctacaacaagcctttgcttccaactattctagtgccatacatccatgacagcgcttagctgtagcgctacacccgcttatgca

SEQ ID NO: 6601 - DNA, 198 bp, Zea mays
  Clone ID: LIB3137-023-Q1-K1-E1
ctagtccccacagcgcaagggttgccgttgtcaccggcgggaacaaagggatcgggctggaggtgtgcaggcagctggccagcaacggcatcaccgtcgtcctgacagccagagaccaaaagcggggcgccgcccccgtaaaagaacttgcggacgccggccttttcggcgtcgtttttcattaactggaggtcaccg

SEQ ID NO: 6602 - DNA, 298 bp, Zea mays
  Clone ID: LIB3137-023-Q1-K1-E10
gggagacagggaaagctctcttcctccttttcctcctctcgaattccgtctcttgtcccgagcgtgctcgcccgctttcgcggctttttgagaggggaaagaggaggcggaggatagggatggggagggacgagaggttcccgttgtgggaggccgcgctcggcaccggagtcgccgccgtcttcgtcgctggactcgtcggtgtctacctttccatgccggactccgactacagctatgtgaagttgccacgtaatctcgaggaactacaaatcctcactggccacctagagaacta

SEQ ID NO: 6603 - DNA, 332 bp, Zea mays
  Clone ID: LIB3137-023-Q1-K1-E11
gcgtctagaagactatcagaaggggacatcaaataaaaaagaaaaaaaagtcttaattgctttctttttatctctgtcgtgtcattcccttaatcttagatctctgacttacaagttataacaaaagaaataaacaacacatataaatatttgtaagaaaatatatatatgatcatgggttttcttcacaaactatttgacgaaacgtttgccgttccagcaccggaaactattcttacgaagctctcaaagtacaactcgtgcttctgcagaagcttcgtccggtcaacattatcataacatgttcctataattctcagcatcaccattgt

SEQ ID NO: 6604 - DNA, 433 bp, Zea mays
  Clone ID: LIB3137-023-Q1-K1-E2
atttttacagaatggtttcttctctgaactgatcgacttcaagggtgttgggttgcaagtggcgtataatttcctgttatccagctagctctagcatcaatcatttacccctatgagatttagatgaggttgcagctacagaaatagtggtggcttgcatgctattatgaatagcatgctgaagaagctagcaaagaaggatgaagaagtggttgttgcatctggcatcccatgtacaacaatcagaactggttctctacaaagcgctcccgggggcgagagagggttcaattttactgaacaaccaagggaagaaaacgcaaagaggatgctgctgccatatgtgtggaagctttgaatagcattccccaaaagacactcctttttgagagggattgccaatggacattttgggcagcgtgtgaccaaactg

SEQ ID NO: 6605 - DNA, 131 bp, Zea mays
  Clone ID: LIB3137-023-Q1-K1-E3
cttactacataatccccatccttgtcaacatactaatcctaacattacagctttgcattctgcttattacttacctgaatttacatagcattcacatttatcttttactcataccaattttaaataattta

SEQ ID NO: 6606 - DNA, 140 bp, Zea mays
  unsure (1)..(140): unsure at all n locations; Clone ID: LIB3137-023-Q1-K1-E4
cacccgttcagtgacgtataacacggaagctgacctgaatcctgctggtgccgctggtacgcnagcccacacgatcgacgtctcaggttttgcgttcaatagctctattttgtgggatcctgagcggtggggacggccaa

SEQ ID NO: 6607 - DNA, 355 bp, Zea mays
  unsure (1)..(355): unsure at all n locations; Clone ID: LIB3137-023-Q1-K1-E5
aaaaaaaaaaaaaaaaaaaaaaaaaaaaaattaaaaaaaaaaaaagtnggcagaaggggaggtttgatgcaaccatctgatgccaagcaacatccagatgcagccgagggcagtacagaaccactcgctgatgtacctggaagcgatggtgcagctcaaggttcaatgcaacatggaacttcggctcctcataccgaaataaaagcgatggtcaggaacatactgttcaaggacatcgttgacaaggagcacgatgctgagatggcttatgtggatgaagtgatcaatggcatctttaacgctactgacagcatggtcggcggcggccgcggtgatgcttccggtctaatcgcga

SEQ ID NO: 6608 - DNA, 383 bp, Zea mays
  Clone ID: LIB3137-023-Q1-K1-E6
ctcagcagctcctgctgttgctgtctccactgaggcggatagttatggtcaggctaggggaaacctagttgctggcagcaacttggaaggaacaattaaatccattcttgaaatgggtggcgggacatgggatagagacactgtactacgtgctctgcgggctgcgtacaacaatccagagcgtgctgttgagtacttatattctgggattcctgaacaaatggaggttcctgcaccgcctacgagttcccaaccagttgaccctgttcaggcggtacaaccagctcaagctggaccaaatgctaaccctctcgacctctttccccaatctcttccgaataattccgctaatgccaacacaagaaatcttgatgttttgcgta

SEQ ID NO: 6609 - DNA, 182 bp, Zea mays
  Clone ID: LIB3137-023-Q1-K1-E7
tttgaaacatctccaccatgaagatagccttgggtaagaaatctaaggttaagaagcatgcagtgtttgtatcaactataccatgcctaccatttggagcggcgtgtgacaactatgaggttgaaactgaggtaaaatcacatgcatacacacactgtcctgtaacatacccagttgaaact

SEQ ID NO: 6610 - DNA, 448 bp, Zea mays
  Clone ID: LIB3137-023-Q1-K1-F1
ggagaaagaaattcttgaccgttatcttgatgtagttttgaagggaaacaaagatggcctagataaattacggctgaggatagaggatcctcctcggagaaagcacatggtgtatctgggaggtgcagtgcttgctgggatcatgaaggatgcaccggagttctggataaccaggcaggagtaccaggaagaaggtgtagcgtgcctaaagaagtgcgggcagtcataagtcttgccacatatcattcacagaagaaatggaagttgcattttttaagaaaaagctctgtgtttgtgtttggtattgggggggggttttattagttcttaattttcttttgggttattccctgttttgtttttgttttaattatatttgttctttgtttttttaattattttttttttttttcattatttctttttttttttattttttttttttttt

SEQ ID NO: 6611 - DNA, 405 bp, Zea mays
  Clone ID: LIB3137-023-Q1-K1-F10
ccactcaggagcgaggaaagagggagagaggagggatagatccccgggttccacgcctcgacaaccatccgacccgatcccgaccagctctgagatcgcgatggcggacggccgctgctgcaccttcctggagatcctcttcgccatcatactcccgcccctcggcgtcttcctccgattcggctgctgcagaatagagttctgcatctgcctgctgctcacaatccttggctacgtccccggaatcatctacgcgatctatgtccttgttgctctcgactctgaccagcacgagagggaatactacacccttgcttgaacatctggttgtgccaggcgggcctgcacagttgagtcgaaatcagtattttttttctcatgaggattgtctgacatggcataagc

SEQ ID NO: 6612 - DNA, 339 bp, Zea mays
  unsure (1)..(339): unsure at all n locations; Clone ID: LIB3137-023-Q1-K1-F11
ccggggcntggcccgatatcaccttctggttagctattgtggcaccggtgtttccaagagtactatgtcatgacgcatccggtgcagcgtagagctctggaggagcacatggaggtcttcgccgatggggacaccgtggtgccgacgttcctgttgcagtgcgagcgcttcgctagctgcgcgtcttagcacaataacgtgtgcgactcggtgtctttcgtcatcggctcccaggatgcgtcgcgactgtaccacccggtttcgggactcgcgggttagcccgctgcacgacctactagcagtattagcttcatacattacaccgtcgttgacgttaac

SEQ ID NO: 6613 - DNA, 437 bp, Zea mays
  Clone ID: LIB3137-023-Q1-K1-F2
aaaaaaaaaaaaaaaaaaaaaaaaaaaaaattataaaaaaaaaaaaaaaaaaaaaaaaaaaagaaaaaattagggcgggggctgtcgttcttccaagcttacgctcccttacacgcgcctgcatcgttctactttttttatacctaaacttaattcaatttcactggccgtccatctacaacgctgggaaagccaaaaccttgcccatcccaatctaaatccccttcatgcacatttccctttcttccgttgacgtaaaaaggaacagacccgtccccattgccattactaacacatcctcaatcttaatggggaatggcactccccctgtaccttaacatcaacccctgtggttgttacttttcacccccaccgttaccctttcacttgccatagccctacctccctttcctttcttttttttcctttcctttatg

SEQ ID NO: 6614 - DNA, 248 bp, Zea mays
  unsure (1)..(248): unsure at all n locations; Clone ID: LIB3137-023-Q1-K1-F3
cttcctcggtccaccttttttttcccggccctctatctccttagctgccaagaacacgctttgcnatcgtctcgtgctagcgtggtagtctggaagcgtctctttttttttcttcttcctgttcgatccagttctacccgtccaatccaatccaagctcctcccttcaccccaaagggacgagagagagagagagaggtcctctatggccgggcctgcttgccaccctcgtcacggcagccggccggc

SEQ ID NO: 6615 - DNA, 355 bp, Zea mays
  Clone ID: LIB3137-023-Q1-K1-F4
ctcacagctcgcagcacctgcaccacttgacaaccagccagctagctaaccaaccggcggaggcaagaacaagcaagagacaacttgccccgtccaggcagcatgtgcaactccaacgtcaagtccgcgggcgtcgcccagatcgacggccgcccggtgctgcagccggcgggcaaccgcgtggcggcgccggacgccgcccgcccgctcaagaagtccctgcacaagtccttctccatggccgccttctacgacaacaatgccaccgtgcccgccggtcccgcccttgccagacaaccgtgcgggggccgcgccggcttcttttgtggcttctaagaagcccggcccgggcccg

SEQ ID NO: 6616 - DNA, 254 bp, Zea mays
  Clone ID: LIB3137-023-Q1-K1-F5
gtacagaggtctggcgaaaggagatccaaagaagccagagacgctggagctggcgatgaaggactacccgtacgcggtggacgggctcgacatgtgggcggcgatcaagaagtgggtggctgactactgcgccatctactacgccgacgacggcgcggtggcgagggacagcgagctgcaggggtggtggagcgaggtcaggaacgtggggcacggcgacctggcggacgcgccgtggtggccggcgattgact

SEQ ID NO: 6617 - DNA, 347 bp, Zea mays
  Clone ID: LIB3137-023-Q1-K1-F6
ttccatttccccaagccctacacgagataatgagagagaggggggagcacaggagcactgtgcgaaagagggaggtcgagggagacagcacatgctgcagcagaggccagaagcattagaagcggcagttgtaaccaagtggcatcagaagatagagccagccatccgtctatccatctatctagctctacaggtataaatcctcgcgcatcgatagggggcgaggggaggaccgggaaccggaggggatttctcgggggtggagtggcggccaggacctctgattgggctccagtgcgcgatctttgaacgcagatttggtgcccgcattctgccatggatttggt

SEQ ID NO: 6618 - DNA, 325 bp, Zea mays
  Clone ID: LIB3137-023-Q1-K1-F7
ctgagatcgcgaggccgaggcttgtcccgtctccgctccgctccgcccacccacggttgggggaggacaattctttgctatctagccttcctcaaaagtaaaaagggtaaatgggatcagaaggaccttcagttgtcactgtccatgttactggatttaagaagttccatggggttgctgagaacccaactgagaaaattgtgaccaatcttaaatctttcttggaaaagcgagggttgccaaaaaatcttgtcctcggaagctgcacagttctcgaaacagcaggggagggggcacttgccacattatataaggttttagagtc

SEQ ID NO: 6619 - DNA, 439 bp, Zea mays
  Clone ID: LIB3137-023-Q1-K1-F8
cccacgcgtccggcgaggagggcaggaagaccgaacaccgagccgtgcgggggctcggggcgggaacgggacaggaccccaaaatctcacatccttcctgcccgcccgcccgtgcccgtcgacgcgtcgttcttgccggtcgcgccccacctgcgacctctactcctgcagggggatcggatacgccacaggctgagcgatggtgctgtgggtcttccgctacggatccctcatctggaaccccggctttgactttgacgacaaaatccttggcttcatcaagggctacaagcgcacctttaatcttgcttgcattgaccacagaggcacaccggagcattcggccaggacctgcacgcttggaaccgaccaccaggccatattctggggaattgcatattgtgtcaagggtggtccagaaaaagagcttaaagcaatc

SEQ ID NO: 6620 - DNA, 402 bp, Zea mays
  Clone ID: LIB3137-023-Q1-K1-F9
ttcagaaagcacacaacttattctttacattacctagacgcatggcctttgatgttcgagaatcgtaatgtatacaactactcaatgccttcagtttgttggtaaaatcaactctccaaatccatattgctatcgcagcacaactcaaaacactcctgtgcacatacatagttcaccacaggcatattacaccttgtctatttccaactcataaacatcgataaggaagcagggagccatgtctggatcaaaaagtggaaaccctttactcacttagggtctagagctgctaaccaagtgcatcttataacaacacgctaagtcatgtcactgcgtgcataacatgatcagtcttattaaaggacattgacaaatagtccacaatatatcgtggccttaacc

SEQ ID NO: 6621 - DNA, 361 bp, Zea mays
  unsure (1)..(361): unsure at all n locations; Clone ID: LIB3137-023-Q1-K1-G1
ctatgtgggaactgtaatggtgctggcttcttgggtggatttctgagcactttcgatgaggctgcgcaatagtcatcggtttaatttatgtttaagttacattgagggacccattatatatgtatcgtgttccagggacacataatcatattatataaaataatatttttaatgaanaaaaaaaaaaaaaaaaaaaaaaaaaaaaaaaaaaaaaaaaaaaaaaannaaaaaaaaaaaaaaaaaaaaaaaaaaaaaaaaaaaaaaaaaaaaaaaaaaaaaaaaaaaaagggggggcccttttaaaggatccaagtttacttccccgggcttgcaaagtaaaaattttttttttggggcccca

SEQ ID NO: 6622 - DNA, 395 bp, Zea mays
  Clone ID: LIB3137-023-Q1-K1-G10
cttggactcccaactgatgagactcttgtttcccagattaaggaagggttcgaaagcgggaaggatcttgttgtgactgtgcagtctgcgatgggggaggagcacatctgcgcgttgaaggatgttggccccaagtaacttccttggctttggagacggaaccctactgtatctcaacttaaatcggaaaagaagtgtatcaccaaaggattgctaccgagacattcacctggcttgagctggcttttgctatagcgtgcaaggggttgctgggtgtcgtacctacctgacttatcattatctgtggttacattctggaccctgtattttctatgctttcatgtctctctactttctagtattaattatcaataagttggtttggaatggttgaa

SEQ ID NO: 6623 - DNA, 448 bp, Zea mays
  Clone ID: LIB3137-023-Q1-K1-G12
aaaacccggcccgacccacgcgtccggctagcaatacatcgctagctcacttgatttacatattgcatcggcataaaaactgaaggtaccatggcccacttgatctcttctgcaatcgcaggcgcgggcaacttggtcgctgatggaatcagtggtgtcactggcgtagcgtcgcaggttgtagaaggcgtagaggacactttaggcagtatcgtagaagcaatcgaccaaggagtcaaggatgaggaccaactggatttgcccaagtacgtgtgtttcaagggagataatggtctgtacctgagtgctcgaacagttgaaggccacccctacctgcagtttgcatcggaagacattggcgacccaagtgtgaggttcatcacctacaaccacaaggtgaacggcaaacgggtggtgcgcttcaagtcgaaccatctcggcaagttct

SEQ ID NO: 6624 - DNA, 405 bp, Zea mays
  Clone ID: LIB3137-023-Q1-K1-G2
cgatcgtgtcctacggggagcgcagcgacgaggaggcgcgggggatgtacgcggagtggatggcggcgcacggccggacctacaacgccgtctgcgaggaggagcggcggtaccaggtgttccgggacaacctccgctacatcgacgcgcacaacgccgccgccgacgcgggcgtccactccttccgcctcggcctcaaccgcttcgccgacctcaccaacgacgagtaccgcgccacctacctcggcgccaggaccaggccgcaaagggagaggaagctcggcgccaggtaccacgcccgccacaacgaagacctgcccgagtccgtcgactggagggccaagggcgccgtcgccgaagtcaaagaccaaggcaacttccggagctggtgggctttcttaacaa

SEQ ID NO: 6625 - DNA, 428 bp, Zea mays
  Clone ID: LIB3137-021-Q1-K1-G2
gagcagcagaggcagcgacacgatcgcgagcgcacgcacgtaagcacgttgtcggaagctgaagttagaagaagcaccagtgcctgatcgatggcggcccaggctctcctctccggccggcagctgctgggccgccccgtgcagtcggccgtctctaggtcgtcggcgaggaaggcgcccttcgtcgtcagggccagctccagccctccagccaagcaaggtgccgacaggcagctgtggttcgcgtccaagcagtccctctcctacctcgatggcacgctgcccggcgactatggcttcgacccgctgggcctctcggacccggagggcaccgggggcttcatcgagcccaagtggctggcctacggcgaggtgatcaacggccgctacgccatgcttggcgcggtgggcgccatcgcccggagatc

SEQ ID NO: 6626 - DNA, 447 bp, Zea mays
  Clone ID: LIB3137-019-Q1-K1-F7
gtctgctgctatgaagggtgagtggaagctaccgtcgaaggaagaactgggtgtgagactgggagaaaaagagctacttcgcgcgtagaatggaacggttgcgcagtactaaaatatggaggcttctattgtacccatcctactaggaaattatgagccagttgatgaggcatgaattatttcacgacttggccgcggttagtgtgaaaaggcgacgctgctatatatggtcatcacccttggtttgtccgttcgccagatatcacgattatcatatttatcggttgtaatataagcttcttgtattagcatatggtttaatattttttttcagatgggatgaggtcctgcgtgatatcctatctgtaaataggaaggcactagcagatctcgacaaatgtacaactggttttttttttttttgagaaactttgaataagatttatc

SEQ ID NO: 6627 - DNA, 445 bp, Zea mays
  Clone ID: LIB3137-019-Q1-K1-F8
tggcgatgccttcatctttctaagaggtgatagtggggagcttcgtgtaggagtcaggcgggccatgaggcagcaagcaaatgttccgtcttcagtaatatcaagccacagcatgcatcttggtgttcttgctacagcatggcatgctgttaacactgggaccatgtttactgtctactacaagcctaggacaagtccagctgactttgttgttccctgtgatcgctatatggaatcactgaaacgaaattaccctatagggatgagatttaaaatgaggtttgaaggtgaagaggctccagaacaaaggttcactgggaccattgttggaaatgtgcgatcctgatcaagctggatgggctgaatctaaatggcgttacctcaaggtgaggtgggatgaagcttcctccattccacgtcctgaaagggtttctccctgacaaat

SEQ ID NO: 6628 - DNA, 424 bp, Zea mays
  Clone ID: LIB3137-019-Q1-K1-F9
catagattttagcatgtgttcaatcctctagtgtgctcgtcacagaacacattctagagcacgaccgtgcaaacgacagcctgtaggaaaccgtcatggctgccggcggtgccgaccaaagggggaataatgctgcgacgactacttttgtggtgccagcggtggcgctgagcttggggaagccgatgccgcgggtgggcttcggcacggcaacggcgacgctggtccaagctgatggccgcgccggcgtgactgatgctatcctccgcgccctggacgctgggtaccgccactttgacaccgtcgcagtctacaacacggatgcctcgctcggggacgcggtcgttgaagccgtgcgcgccgggactgtcgtctcccgtgacgatctctacgtcacgtccaagctctggatcaccgactcgca

SEQ ID NO: 6629 - DNA, 449 bp, Zea mays
  unsure (1)..(449): unsure at all n locations; Clone ID: LIB3137-019-Q1-K1-G1
gggcgaccgccgccaccttccccaggtcttctctgcgcccgtcgccggtgacgatcacccaggagggtcggaacattgctgacattcacctgtaccacagtagttcagtagagtagctgtcggactcggaacacacatgccggcgatggcaactgctcctgtgaaattttctgtggctacgaactccccctgtgtccagcctagcttgcccctgaggcgtacacctgccaccatctccttcccctgtcgtccatggtcagccgcaatgacctcatgtactggattgttgaggcgctctgacgtggttgcagctgcggggcaccacaagttgatgggatctttgaccactaacgagggactcangtttggggtggttgtggcgcggttcaatgaggttgtgacaaatttgttactacagggtgccctggaaactttcgagcgatactctg

SEQ ID NO: 6630 - DNA, 419 bp, Zea mays
  Clone ID: LIB3137-019-Q1-K1-G11
cgagaacacgatcgagcacacaagctcgaatactcgtttaggagaaaccacaaacgagcaagccgtgaaagcatcatggagtacggtcagcaggggcagcacggccacggcgccacgggccatgtcgaccagtacggcaacccagtcggcggcgtcgagcacggcaccggcggcatgaggcacggcacgggaaccggcggcatgggccagctgggtgagcacggcggcgctggcatgggtggcggtcagttccagcctgcgagggaggagcacaagaccggcggcatcctgcatcgctccggcagctccagctccagctcgtcggaggacgacggcatgggcggaaggaggaagaagggaatcaaggagaagatcaaggagaagctgcccggaggccacatggacgaccagcacgccac

SEQ ID NO: 6631 - DNA, 445 bp, Zea mays
  Clone ID: LIB3137-019-Q1-K1-G12
cggcttcatcatcactccactagccagtcatctactggcctacagctagccgcctggtctgctctcatcccatcccatctcatctccgacaagcgaagcagagcactggcatgagcatggaccgcatggcgcggcgttccgtgtccttgctcctcgctctggctctcctggccgccgcggcgtcggcggactcgtggctgtacgagaagttcacgacggagggcaacgtgcgcgcggactacaacgcgcaggggcagcaggtgacgtctctgatcctgacgcagcagtccggcggcgccttcagctcgcggcagaagtacctgtacggtgagttcagcatccagatgaggctgatcccgggcaactccgcgggcaccgtgacctccttctacctgtcgtcgggcgacgggcccgggcacgacgagatcgacatggagttcatggg

SEQ ID NO: 6632 - DNA, 443 bp, Zea mays
  Clone ID: LIB3137-019-Q1-K1-G2
gtcgtagtggtctctgcacatgcaacgcttttgatccttcttctccggcgacgattctttcgccggcgccggcggcagccgtgacggctccgcgtccgccgtgcacaagctctccaccaacaccagcggcagcatttccttcaggctctacaccaaaacctccccctcggtgacagcagcctcagccaccaattcgtcagctccgactccagttgccccggcatctgcaccagcggcaggggacgaagaagaagaagaaggcccctctctcgacctcctccgccgccagctcgccgcgggcgactaccggcaggcggacgagaccacgcgggcgctgatcatcgagctcgccggcgagcccgcgaggcgccgagggtacgtcttcttctccgaggcccagttcatcccggccgaggacctcgccgccatcgacgggctctgga

SEQ ID NO: 6633 - DNA, 446 bp, Zea mays
  unsure (1)..(446): unsure at all n locations; Clone ID: LIB3137-019-Q1-K1-G4
gagccagagggtaaaacggaatantctattcccagtagtgataaacaaaacaaagaatcttgtctggcttcgtgcggtgtgcctgccatttccaggcccagctgttcattctcgaggctccttctcttgtagttcgtcgtccttgcgcagcacatcgagaggctgaggggagaggggtccatggagctgggaaagcccctttcggcgcacagatgtagctacaccgctacctacacccactgttccataggcttctcccctcgggtcgtccgtaccagctggatccgcgcggcggctgagggcggcgacggcggggcagaccggcgacggagaggtgccagcttcgccgccgatgggcccagggtcgtcgaggtcgccgctgccccggtggctactagcggaggcgccgncggagcagccgggagcgcgtggttcgagcacgggac

SEQ ID NO: 6634 - DNA, 419 bp, Zea mays
  Clone ID: LIB3137-019-Q1-K1-G5
ggagtgcgacgcgtgcctcggcggattccatctgcgatgcgtgcgaccgccgcttcggagggtgcgtgaaggtgattgggcgtgcccttactgctaggccgagcgcgccggtaaggtggtcgagcggcccatgccgcctgaggggaagcgcgtcgtgaggaccgccaaggaaaaactcctttccagcgacctgtgggctgcacgcatcgagagtttatggagggagcctgatgggacgttctgggcaaaggtcaggtggtacattatccctgaagagactgcagcatgaaggcagctgcataacttgagaagagagctgtatcgtaccaatgatcttgcagacattgagatggaaacaatcctagacattgtctatatgtgcccatagacttaggatgctacaacgagggatgatgatt

SEQ ID NO: 6635 - DNA, 414 bp, Zea mays
  unsure (1)..(414): unsure at all n locations; Clone ID: LIB3137-019-Q1-K1-G6
caaagctccaactacgactagaaccgccactcctctaaatctccaaggattttctgcggcgagccgcttcgtgacgtgacccaatgggagaggcctctccgtcgatcgccaaggacgtcaccgagttgatcgggaacacgccgctggtgtacctcaacaaggtgaccgatgggtgcgtcggccgcgtcgccgccaagctcgagtccatggagccctgctccagcgtcaaggataggattggctacagcatgatcacggacgcagaggagaaagggctgattactccaggcgtgagtgttctgattgaaccaactagcggcaacacatgcattggactggcctttatggctgctgncaagggctacaaacttacactcacaatgcctgccctcatgagcatggagagggagatca

SEQ ID NO: 6636 - DNA, 446 bp, Zea mays
  Clone ID: LIB3137-019-Q1-K1-G7
gcagcttatcgcatcccatagcggcgccgcgccaagcacaacccccacccgccacaggcgggggcgcatgtgagcggtcgccgcggccgggagaccagaggaggggaggactacgtgcatttcgctgtgccgccgccgcggggttcgtgcgcgagcgacatccggcggggcggggcggggggcctgagatggaggctagcgcggggctggtggccggctcgcataaccggaacgagctggtggtgatccgccgcgaccgctagtcgggagccgcgggcggcggcgcggcgcgccgggcggaggcgccgtgccagatatgcggcgacgaggtcggggtgggcttcgacggggagcccttcgtggcgtgcaacgagtgcgccttccccgtctgccgcgcctgctacgagtacgagcgccgcgagggctcgcatgcgtgcccgcagtgc

SEQ ID NO: 6637 - DNA, 451 bp, Zea mays
  Clone ID: LIB3137-019-Q1-K1-G8
ctctgtcctcctcttcctactgtaaaccacctcgtccctatccgcggcaaccgttcaccgcgccgcgaggcctgctgatccgaccgaccttccaccgtcatggctcccctgcgccgcgcgtctcgcctccttcgatcagccgtctgccggctgaggtctccagcgccggctcgggccttctccagcgccgcggcgaccgagacgggtgccgtgatcgccgccgctgccgtggcggtggccagctccgggctcgggctgtggctgaaaccgccgtcgcttgccgactccggcgaggcgcccggcgaccagatctcggtcgcctgtgccggcgccacggaagcgcgggaagagaaggggtggttcctgttcgcaaactcatttcgtagaagggtcttcttcaactacgagaagaggatacggcttctcagtcctcctgagaagatttttgagt

SEQ ID NO: 6638 - DNA, 292 bp, Zea mays
  unsure (1)..(292): unsure at all n locations; Clone ID: LIB3137-019-Q1-K1-G9
cgcgtccgctcctacttcatgncatcttcactctctatttcaagctcaccccaaccacttcctgggaccgacagtttttccatgcttgcctgcctcttctctacagttgtagaacgacaagccgctaattcatgggacgcttggacaactatacatgtgattcaacagtgaacgcggtcaaacgtgctcaattaaacatgctaatgccatttcacatgatcctaactcaaacgactcccttctgcaactaaatcaagaaatcgagctactgagtcagctgccacatccaaac

SEQ ID NO: 6639 - DNA, 424 bp, Zea mays
  Clone ID: LIB3137-019-Q1-K1-H1
tctttgccaccaccgcgaacacctggcaatgtgcggccccgccccgtcggccacctcccagaggtggtcaagcggcctcctttcttactgagctcacccaccacccgccacgcccccgactcccacgaactcctccgcctacccacccctaccctacttctctcgcccgccggacgcatctcggggctctgctccccggttctcggggccggtggatgcgaccgcgtccccgcccccgaaatcagctgcccggcgtcctcatagcgttcccgggatctaggccctgagcaatggcagcggcggtggcgccgccgctctgcacctggctcgtcgccgcctgtctctccgcggcctgcggcgatggcgagaaggagaatgaacgcatgcaccgcggtggcggcgtatggggtttcttcggctcgcg

SEQ ID NO: 6640 - DNA, 384 bp, Zea mays
  Clone ID: LIB3137-019-Q1-K1-H10
gcgccataggctactgaagcaaagaaagtcctataataattcaagatcggctgaagccctgggcaggcatgatacacatcttgaggatgagcgcaatgaccaacatcgtacgcgaggtgaacagcaggatggcctctcacggtctcgactgcatgatagaataagactacctggggagacagcgtttgacagtcttgggtcacggtcagaggagtgggatagagggtctagagccagattgtcgccaccaaaatcctcagatcttcgagggaggcttcatgaaaggctaaagggtagattgcgtgaggagataccgggtagcagtgcaaaaggtttggcagtgaaggcaagtagcagtgaggatactgaatcactgaactttgc

SEQ ID NO: 6641 - DNA, 290 bp, Zea mays
  Clone ID: LIB3137-019-Q1-K1-H11
aaccagctgctctcactcatcatcatcaccttctactccaacaaggagatcttcggccgcgagcttatctccaactcttccgatgcgctggacaagatcaggttcgagagtctcactgacaagagcaagctcgatgcgcagcctgagcttttcatccaccttgtcccagacaaggccacgaacacgctctccatcatcgacagcggcatctgcatgaccaagtccgaccttgtcaacaacctcggtaccatcgccaggtccgggacgaaggagttcatggaagcccttgc

SEQ ID NO: 6642 - DNA, 439 bp, Zea mays
  unsure (1)..(439): unsure at all n locations; Clone ID: LIB3137-019-Q1-K1-H12
ggagtgtctctcctctctttcagcttagtccctgccccctctctttttcttacatgcaggtgctcgcagctcctctcttttttcttgtttctttctttcgatctgcgagccgtccaggtccagtactctcctttccgtgaaggaactcttgcagccggcccctctggtttcctcgaattcttgttccccggtccctcctcctgtccccgcgtacatccgtccgtccgaggagcacaccgtccccacccccatgtttacccaccagttcctctgacggccgccgtgctccgatgaaactgagcgtgctccgtattcggccgttccacttctttttcgtcggcttcctctactggttctacctcttcttatgaacgcattggccctcttcaacttctgatccttcggccggnctctctctctctctctctctctctcttaa

SEQ ID NO: 6643 - DNA, 451 bp, Zea mays
  Clone ID: LIB3137-019-Q1-K1-H2
atgaaggacaacttaaggtggctggttttggatcactgagtttgagtaaagtttctgaagaggaagtgcaaatggctcagccagttacaaaatttgacaatgtatacatcgctcccgaggtctacaaaaacgaaccatttgacagaagtgtagatgtatttgcatttggtctcattctttatgagatgattgaaggagctcctgcttttcacccaaagccacaagaggaagcagctaagatgatttgcttagaggggctgagaccaccattcaagaataaaccgaaatactaccccagtgatgtgaaagagttgatacaagaatgctgggatccgatgccttccgtcaggccaacattcgcggagataattgtgcgcctgaacaagatacatgcgaactgtgctaagcagggtagctggagagacaccttcaagcttccatggaaacaaac

SEQ ID NO: 6644 - DNA, 450 bp, Zea mays
  unsure (1)..(450): unsure at all n locations; Clone ID: LIB3137-019-Q1-K1-H3
cggacgcgtgggtgcctggcaagtggcaaactcgagctgtctagtcctcggttcgcgaatcgtnacggagaggcagacggcaggactcgcttcaagctcctcatctcgcgcagggggggtcgcctgagatcacagcgacaatggtgaaggcagttgctgtcctcgccggcactgatgtcaagggcaccatcttcttttcacaggagggggatggtccgaccaccgtgactggaagtatctctggcctcaagccagggctccatgggttccatgtgcacgcgcttggcgacaccaccaacggctgcatgtcgactgggccacacttcaatcctgttggcaaggagcatggcgcaccggaagatgaggaccgccatgccggtgatcttgggaatgtgacagcgggagaagatggtgttgttaatgtcaatattactgacagccagatacctc

SEQ ID NO: 6645 - DNA, 436 bp, Zea mays
  Clone ID: LIB3137-019-Q1-K1-H4
cggacagggaccttggcgacaagatcgaggaaggtctgggtccccatgggctcggcatcgtgaccggtgccgatgtacctgagtttccagagctaaaaaaaaggctgctgcgcttggcaccaaggattgcaaaccttcctgaagaggtgaagaaacagcttgaagatccagatagcagatataactttgggtggagtcatgggaaggagaaactcgagtccgggaaacttgacacatttaaaggttccttttatgcgaaccctgttttggatgtccctactactgatgatgtgcttgtaagtaggtatccatcatattgccgaccaaatatatggccaaacgataatcttcctgagcttgagatagcatttaaagatcttgggaagctgatgatggaaagtgggttgatggtggctcatcattgtgatcgctatgt

SEQ ID NO: 6646 - DNA, 396 bp, Zea mays
  Clone ID: LIB3137-019-Q1-K1-H5
ccaggctccagctagctgcaagctcatccgtctctgtcgatcagcaagaggccggggtcagaggagtggcggcgacgtcgcggctggcgctggccctcctgctggccgccttggtggcggcgtggcagctgccggcggcggcggtggcggccaactacacggtgggcgacgagaaggggtggaacccggacgtggactacacggcgtgggtgaagaagcacaagccgttctacaagggagactggctcatcttcgagtaccagaacgggcggtcggacgtggtgcacgtggacgaggtcggctacgacaactgcgacaaggccaacgcgctgagcagctacagcaagggacacacctacgccttccagctcaaggacgccaaggactactacttca

SEQ ID NO: 6647 - DNA, 415 bp, Zea mays
  Clone ID: LIB3137-019-Q1-K1-H6
cgtacgcatgctggtttctatctattgcaaaagtccatttaaactcatggcggattcccatctgggggaaggctaagatttgcttctatgtgatggaccatcctgctgcagagtcggtcgaatcagttagcagtggtggagaaattgagatcgagaagttacctcttcatgaggttgagatcaggagaagggaattgctccctgtattcaagcagttcctatattctgagcgacattctagtgataggaacgttgcaaatggaaggagtaatgcaaatggaggttttcagaatgtcttgtccgtcatcaatgatgtacaatatggctctgtaaaggataatggtgaatatgaaaccaaatcggtggctcctttgtctgggttttacactgatacgagggaaacggttaacacaaa

SEQ ID NO: 6648 - DNA, 433 bp, Zea mays
  Clone ID: LIB3137-019-Q1-K1-H7
ctatgcgtggcggtgtatgccctgactgccctttcagggtacctcttgtttggcgaggatgcggagtccgacgtgctcaccaacttcgacaaggatctcgggataagattcagctctctgctcaactacattgtcaggatagggtatgtcatccacctggtcctcgtcttcccagttgtccacttctcgctgaggcagacagtggaggcgctgatcttcggggagctggcagcccctagcaggaagagaacactcacattgacagtggtgcttctagcgctcatctaccttggctcgacaatgatacccaacatctggatggccttcaagttcaccggagctaccacagggctggcgttgggtttcatgttcccggccctggtggcattgaagctggacaaggaagggagtcgcttgggacatggggagaagc

SEQ ID NO: 6649 - DNA, 450 bp, Zea mays
  Clone ID: LIB3137-019-Q1-K1-H8
ctgaagagcaaattaggcaaatgattgctgatgttgacaaagatggcagtggagcgatcgaggacgaggagtttgagcacatgatgactgccaaaatcggagagagggatagtaaagaggagctttcaaaagcattccgcattattgatcaagatggaaatggaaagatttctaacattgatatccagaggattgccaaagagctgggtgtaaatctcaccctcgatgagatccaagacatggtgcaagaggctgatagaaatggtgacggtgaaatagactttgacgagttcatcaggatgatgaggaggaccagctttggctactaggtgtatttatctgcgagtgcttgacacttccagtttgtttatgactaccgtgcgtgtgttaatcaactggtgtggttgctatgaacaatgtgctctggtttcgcttttatatataatttta

SEQ ID NO: 6650 - DNA, 414 bp, Zea mays
  unsure (1)..(414): unsure at all n locations; Clone ID: LIB3137-019-Q1-K1-H9
gcgtgccgtaagatggggatattacattctctttcgcaggggggccgcgggcgaggggatgggcgcagtctaagtctcgcagggcgtcntcntccggacgaggtccaggtccgcggcgtcgaccggcggcggtgtcgcgaaggtcgctccgccgaggaggaagaaggcgctgctgcccgccgcgaacgagacggcgtcgggggagcctgttgccgtgggcggtggtggtggggacggcggaagctgctgctacatccacctgcggagccgcatgctgttcatggcagcacctcatcatcaaccgtcggcggctccgacgcccgctgatgctgctggtgcggcacagcatggcggtgtggtggcgctcgcggctggcctctcgcgttgctccagcacggcgtcgtcggtggacgt

SEQ ID NO: 6651 - DNA, 198 bp, Zea mays
  Clone ID: LIB3137-020-Q1-K1-A1
atcgtatgcttgcttgttttccgaacaaattttatgctatcaaatatagtgatctgagtggggggccgttaaaaaaaaaaaaaaaaaaaaaaaaaaaatgaaaaaaaaaaaaaaaaaaaaaaaaaaaaattataaaaaggccggcctttttaaagattcaaatttaatttacgcttttttgcaactttatattttttt

SEQ ID NO: 6652 - DNA, 418 bp, Zea mays
  unsure (1)..(418): unsure at all n locations; Clone ID: LIB3137-020-Q1-K1-A10
ggggaggctcgtgacaggtgttctcaggaagagtctaaccaatttcagctgaataaactaggggatgggatttcagtgctggaaaaaacgctctcggggctccaacagtcagtaggattctgccataacgatctgcagtatggaaatattatgatatatgaagagaccagacaagtcaccttgatagactatgaatatgcgagttttaacccagtcgcattcgacattgctaatcacttctgtgagatggctgctgattaccatacatcaacaccacatgtgttggattntacgaaatatcctgacacttgggagcagagaagattcgttgaggcataccttagctctgcaggtaaaaagccaacggatggggaagttgaagaactgctagggttgatagcaaagtacactcttgcga

SEQ ID NO: 6653 - DNA, 442 bp, Zea mays
  unsure (1)..(442): unsure at all n locations; Clone ID: LIB3137-020-Q1-K1-A11
gngaggtcatgccggggcagtgggagttccaggtcggccctgccgtcggcgtctcggccggcgaccagctctgggtggctcgctacattcttgagaggatcaccgagatcgccggcgtggttgtctccttcgaccccaagccaattccgggggactggaatggcgctggtgcacacaccaactacagcaccaagtcgatgaggagcgacggcgggtacgaggtgatcaagaaggcgatcggcaagctgggcctccggcaccgggagcacatcgccgcgtacggngacggcaacgagcgccgcctcaccggccgccacgagaccgccgacatcaataccttcgtctggggcgtcgcgaaccgcggggcgtccgtgcgggtgggccgcgacaccgagaaggaaggcaaaggctacttcgaggaccggaggccggcgtccaacat

SEQ ID NO: 6654 - DNA, 449 bp, Zea mays
  Clone ID: LIB3137-020-Q1-K1-A12
cccagatgctcctggagcacggcgagcgcatcctgtcggcggcgacggccgtgttcacgggggcccccggcgtgaagatctcggtgaaggtggccggcatccactggcactacggcacccggtcccacgcggcggagctgacggcggggtactacaacacccggtcgcacgacgggtacgcgcccatcgcgcgcatgctggcgcgccacggcgccgtgctcaacttcacttgcgtggagatgcgcgaccacgagcagccgcaggacgcgcagtgccgccccgaggcgctggtgcagcaggtggccgccgcggcgcgggaggccggcgtgggcctggccggcgagaacgcgctgccgcgctacgacgacacggcgcacgaccaggtggtggccacggccgccgacagggccgccgaggaccgcatggtggccttcacgtacctgcgcatg

SEQ ID NO: 6655 - DNA, 299 bp, Zea mays
  Clone ID: LIB3137-020-Q1-K1-A2
acccacgcgtccggagccacatcacgtcgcccctggctggtccacatgtcagtgaaacttgactgctgcagcgtgtcgccggcaggagcgagtggcctgctgccagactgcccagatggattttccggatgcgcaagcacatgtattcacagtcacaggcagcacagtctcgccacgtgggaccagtctgtgagcgagcagtgatgggacttggaagaggctgaggccttgttcgtttatgtcggattgcacccggaatccgtccagctaatcaaagtttatataaattagagaagcca

SEQ ID NO: 6656 - DNA, 412 bp, Zea mays
  Clone ID: LIB3137-020-Q1-K1-A4
gccggcagttcagccgcggcttcggttccgccgttccggagatggggtccggcatgagcagggcccggcggcgccgcttcggcctggaggcgtcgcgggggatgctgcccctgctggctctgcaggtgctcatcgagtacggccgcgcgggggcctcccgcccgcccgtcacggccgcgctgctcgccgccaactcactcgtctacctccgccccggcgcgctcgacggggtcctgccctcgctcgcgcgcgtctccttcaaccctcagctcatcatcgagtatggcgacttgacgcgctttttcctgtcacccttctaccacttgagtgaaagtcacctcttctacaacatgacgtcgctgctgtggaagggcattcatctcgagacatcaatgggtagtgccgagtttgc

SEQ ID NO: 6657 - DNA, 399 bp, Zea mays
  Clone ID: LIB3137-020-Q1-K1-A5
ctggaaatgatgagaactccgaaggtgggctgcttttcagctgggcaatgcaacagcttaggaatcacctcgctactcttcaagttatgttaccaagcataacagaaggtgggtctctgtccaacattcttgaacaatgcatgtattgtgcaatgggccttggcttacttggattggatttccgtggcctccttccgccaatctttgaggacgcggttctaaatttattctcaaagaatatgagtatggcggttgaaaattttcaggttgttttggattcgcaccgctgcgttccgatgccatctgttggctttgtagcaaatggtgttgtcgatgacacttctgatgatgtgactccaccttcttgtttaatggaacatccacctcttgcaatgtttg

SEQ ID NO: 6658 - DNA, 70 bp, Zea mays
  Clone ID: LIB3137-020-Q1-K1-A7
atcgtatgcttgcttgtttcccgaacaaatcaaatgctatcaaatatagtgatctgagtgatgagcaggg

SEQ ID NO: 6659 - DNA, 412 bp, Zea mays
  Clone ID: LIB3137-020-Q1-K1-A9
attgaggaggatgaattctccctcgacgagctcatgggcgacagctcctcagcaaacgatgagttgtgattctgatgattcttggactgatctgcgtgtcgattagccagactgtaaatctgaggaactctgttttgaaaaatcattccttgagtgtcataattttccaggctatggatgctagaatggattaaggagaactgatgtgatagacattttctttaacgtttttttttatccctgaagtaaagtcagtttggacgtatatgttgaacaagtggtctccgctttagaacatgctcttctgcttacactggaatattggatagacagacccaaacttccagtcctactcccagaggacagaagacgaaacatactggagtagtggagcactgcaggcttttggatg

SEQ ID NO: 6660 - DNA, 456 bp, Zea mays
  Clone ID: LIB3137-020-Q1-K1-B11
attctcagccgccgccaatcccttcccgtgctccgcaaccgctgagtgagaagaagagatgggcggcgagggcgatggcccggctatcggcatcgatctcggcacgacgtactcttgcgtcggcgtgtggcagcacgaccgcgtcgagatcattgccaacgaccagggtaaccgcaccacgccctcgtacgtcgccttcaccgactccgagcgcctcatcggagatgcggccaagaaccaggtcgccatgaaccccatcaacaccgtctttgatgccaagcgtctcatcggcaggaggttcagtgatgcgtctgtccagagtgatatcaagttgtggcccttcaaggtcatttctgggcctggtgagaagccaatgattgttgtccagcacaagggtgaggagaagcagtttgcagctgaagagatctcctctatggttcttatcaagatgcgtga

SEQ ID NO: 6661 - DNA, 318 bp, Zea mays
  unsure (1)..(318): unsure at all n locations; Clone ID: LIB3137-020-Q1-K1-B12
ggcctaaggttcttaaaataccattaattgttggtggaagttttgggcctgggaatgagggaatgtccggacgtgcatataccccaaactttttatttctttggccaactgctaggatatctgttatgggtggcatccaggcagctggagttctcgctcaaatagaaaagaacaacaaaaggagacaaggagtggagtggagcaaggacgaggaagaagccttcaaagccaaagtcgtggaggcttacgacagagaaggaagcccgtactactccactgctaggctatgggacgacggngtcatcgaccctgctgaca

SEQ ID NO: 6662 - DNA, 427 bp, Zea mays
  Clone ID: LIB3137-020-Q1-K1-B2
cttctcctccccctccggttcgggttcgggttcgtgaggttctccggggttcgggttcgtgggtgagcggatcgagatggcggcgtcggatgttgagtaccgctgcttcgtcggcggcctcgcctgggccacggacgaccactccctccacaacgccttcagcacctacggcgaggtcctcgagtccaagattatcctcgatcgggagacgcagaggtcccgcggcttcggcttcgtcaccttctccacggaggaggcgatgcggaacgccatcgagggcatgaacggcaaggagctggacggccgcaacatcaccgtcaacgaggcccagtcccgcggcggccgtggaggcggcggcggcggctaccgtggtggccgtggaggcggcggctaccgcggtggcgggcgccgtgatggcggcggcggc

SEQ ID NO: 6663 - DNA, 414 bp, Zea mays
  Clone ID: LIB3137-020-Q1-K1-B3
gtagagaagggcaagctttatgctgcaatttgcgctgcaccagcaatgactctaggaacttggggtttgctcaatggcttaaaggcaacatgttatccttcgttcattgataaacttccttcagaggtacatgctgtggaatcaagagtgcagattgatgggaagtgtatgaccagtcgtggaccgggaacagccatggagtattctgttattttggttgagcaactatatggaaaggaaaaagctaaagaagttgctgggccaatggttatgcgtcctcagcatggtgtggaattctctatgaaagaggtgaattcaactagttggaatgttggtggaacaccaaatattctagtaccgatcgctaatgggacagaggagatggaagcaactatgataattgacattttgcgt

SEQ ID NO: 6664 - DNA, 419 bp, Zea mays
  Clone ID: LIB3137-020-Q1-K1-B5
ccgccgttttgcctcgccgttctgccgcgccatcgcatcgtccgcgctccttctcgtcgttgttcccccggtacggctcgacggcgggcgtgggcgctggagttgcggctccgaggccgaggcgccgggtggtgcgttgggtgcgctcggttcgggagatcccggactttgctgctcgcgcggtcagacagggagcgccggaggaggaggaggctgttcaagtgcaagctgtgctgaactaagggttctggcttcggactctgtgtacgcgccgcggcaggagggagctggagatgtacgggccgccgtcccgaggcggcgggggagccggcgctgccggagagcagccgaaggtttaccaagtttggcatggaagcaacgagtttttcttgcaaggccggttcatatttggacctgat

SEQ ID NO: 6665 - DNA, 428 bp, Zea mays
  Clone ID: LIB3137-020-Q1-K1-B6
accgaattccctgcgattcctctcccctcgcctcctcgtctccccctaggggatcggcggagaggaatcgcaaagagggccgtctcatccgagttaaggaagccatggagcacaaggaggctgggtgccaggcccccgagggacccatcctctgcatcaataactgtggcttcttcggcagcgcggcgaccatgaacatgtgctccaagtgccacaaggagatgataacgaagcaggatcaggccaagctggctgcctcctctatcgacagcatcgtgaacggcagcgacgccgtcatggagccggttgttgctggcagcaacacggtagtagcttgtgcccaagttgagttgcaaacaatgaacgtgcagcaacccgctgatgttgccggacccagcgagggggtggcggcgatctccaaagggggg

SEQ ID NO: 6666 - DNA, 404 bp, Zea mays
  Clone ID: LIB3137-020-Q1-K1-B7
aattgacaaagtggggcctgatggtgttctctcaattgaatcctcctcgtcttttgagaccgctgttggagttgaagaaggaatggagattgaccgcggttatatttccccacaatttgtgacaaacctcgagaaatcaattgtggagtttgagaattgtaaggttcttattactgatcagaagatcacaagcataaaggaaattcttccaattttggagaagaccacacagctgagagcccctctgttcattattgctgaggacattactggtgaagctttggcaactcttgttgttaacaagcttcgaggaattctcaatgttgcagcgattaaggctccaagttttggtgagcggcggaaggctgtactttaagacattgccatcgtcacaagtgctgagt

SEQ ID NO: 6667 - DNA, 464 bp, Zea mays
  Clone ID: LIB3137-020-Q1-K1-B8
gcaagcagcaacagcctgcagccggcagtcctcgcctccgcctcctccaccctgaccgtcagcagaggaggacgaggatgtcgggatccaaggtgtacaccctcgaggaggtggctaagcacaacaccaaggacgactgctggctcgtcatcggcggcaaggtgtacaatgtgaccaagtttctggaggatcaccctggaggcgatgatgttctgctgtcttccactgccaaggatgctaccgatgatttcgaagatgtggggcacagcagcactgcccgtgcaatgatggacgagtacttagtgggtgagattgatgcagccacgatacccaccaaggtgaagtacacgccccccaagcagccgcactacaaccaggacaagacccaggagttcgtcatcaagatcctccagtttttggtccccctcgcaatactgggtctggccgtcgctgtaaggatgtac

SEQ ID NO: 6668 - DNA, 206 bp, Zea mays
  unsure (1)..(206): unsure at all n locations; Clone ID: LIB3137-020-Q1-K1-C1
gccggacgccgccnncananagcggccgncaggaaccccagcaagcaacccagccgcccanngccggcaangcncgcagcgcnagcnncnngcgcccaacacacggcnccgaccaagaacagcaaggacggcanggcgcncgaagcagcgnacgacaacccgcacgncgccgnncgccagagcacgcccacacaagcagcagcaag

SEQ ID NO: 6669 - DNA, 304 bp, Zea mays
  unsure (1)..(304): unsure at all n locations; Clone ID: LIB3137-020-Q1-K1-C10
aatcggttcaaaagaatcctttgggcaaccgaacccgtgtgaccgcccgtcccgccggcaatgccgatgggccaacccgtcccagccccgcttcgcagccatgtcgccgtcggagccgacgcgggaggagagcgtgtacatggccaagcttgcggagcangcggagcggtacgaggagatggtcgagttcatggagcgcgtcgcgcgctacgccggggccgccggcggcggggaccagctctcggtggaggaacgcaacctgctgtccggtccctacaaaaacgttatcggcgcccgcagggcc

SEQ ID NO: 6670 - DNA, 446 bp, Zea mays
  Clone ID: LIB3137-020-Q1-K1-C11
cggacgcgtgggagctgttcccagtggagcatcaactggtgtatatgaagctctggagttgagggatggtggctctgactatttggggaagggtgtctccaaggctgtgaacaatgtgaattctgttattggacctgctctgattggcaaggaccctacagcacagactgagattgataacttcatggttcaacaacttgatgggaccaaaaatgagtggggatggtgcaagcaaaagcttggtgctaatgcgattctggctgtgtcattagctgtttgcaaagctggggctagcatcaagaggattcctttataccagcacattgccaacctagctgggaacaagcagttagtgttgcctgtccctgcattcaatgtcatcaacggtggttcccatgctggaaacaagcttgctatgcaggagtttatgatccttcctactggag

SEQ ID NO: 6671 - DNA, 392 bp, Zea mays
  unsure (1)..(392): unsure at all n locations; Clone ID: LIB3137-020-Q1-K1-C12
atggagccagtacggcggggcggggggctcgccaacctcggggataagcccgtgtaccgcgagaaggttccagattttgggatgaagattaggaggacgtacggatcggtgagaagagatctgaccaaccgggtgtacgcgaccgacgaggcgaggagctacgccatctctaaggcggaggatctggagcaagagctggactccagcttccncatcttcatcaagcccatgactcagtcccatgtcaccgggggcttctggctgggccttccgattcatttctgccggaagtacctgcccaagcgtgacgagatgatcaccctggtggatgaggatgatgacgagtccgacacgctgtacctcgcaatgaagcggnggctcagtgctggatg

SEQ ID NO: 6672 - DNA, 455 bp, Zea mays
  Clone ID: LIB3137-020-Q1-K1-C2
cttcaaggtcccgctttctaacaagattccttcctttctctatccgataaccctggcctgcgccgacgacgtcaacgaatccgtcatgtccatgttcaacaagatcttccgtaagcccatagagcacgccaactccattgccttggccacactcgacaagttaaatgagactcttgatatgctggacaagaaagagaaggtgctggacaaaaaagcagccgctgagcttgagagagccaaggagttctccaaagctaagaataaaagagcggctatccaatccttgaagaggaaaaaactttatgaacaacaaattgagcaactcggaaattttcagttgagaattcatgatcagatgatcatgttagaagcagctaaagctacaacagagactgctgatgcgttgagaactggagctgcagctatgaaagcaatgcataaagcaacaaacattg

SEQ ID NO: 6673 - DNA, 451 bp, Zea mays
  unsure (1)..(451): unsure at all n locations; Clone ID: LIB3137-020-Q1-K1-C3
aagagaatgagaagacaaaagctgagaacaaggctgctaagaaagtatccgctagggtttcgtgggaaaacacaaagaaagcaaacatanaagctgaactgaagaagattgaggaacaactggaaaagaagaaggctgaatatgcagagaagatgaagaacaaggttgcaatgatacacaaggaagccgaagagaagcgagcgatggtggaggcaaaacgcggtgaggaggtcctgaaggccgaggagatggctgccaagtaccgggccaccggccacgctcctaagaagctcatcggttgcttcggagcctaagaagccttccaagtcagaccgagcggaaagtgaaaaacgtcagccagtgattgcttggtcctctcgctctatcaagtgtgtagtgtgtcttcgaaaagtttgaaagcctactgctgctgctgtatatactgatatcg

SEQ ID NO: 6674 - DNA, 447 bp, Zea mays
  Clone ID: LIB3137-020-Q1-K1-C4
cggacgcgtgggctcatacagcggcagagcgagagccgagaggcgagccgcattgcgaaaccgggcgagccgcagtgctgcaaccgcccaccgcgcacgcgccggggaggcgccgcccgccaccctacgcgcgagcccagcagcgggaggaggaggcgagattccaaagggaaaaaaaggcggcgggagcaaaaggggaggcgaggtgtggaggggggaaaagcggcagtgggcagctgggagggagtccagagtccagtccagtccagtccaaaccagccggaccacggccgacgcggcagggcagctgtgactggctggaaggcaagtgtgctcggcaagcgacgcacgccacgccaccgacaccggcaccggcacccccgcccgcggtgatcggacccgcgcgccagatccgacaccccggcccgaatcgcggcggactccagc

SEQ ID NO: 6675 - DNA, 443 bp, Zea mays
  unsure (1)..(443): unsure at all n locations; Clone ID: LIB3137-020-Q1-K1-C6
agcaactgcaaagcagcaagctctactcttcttctgtactgaacgtgtgactagatgacagtgagcgtgaaccatggcggacgagtacggccgcagcggctacggcaggtccggcgccggcgacgactacgacagcggctacaacagcaagtccggcactgatgactacggccgtggcgaaggtggctacaacaagtcgggcggcgatgacgactacggccgcagcggcggcgatgggtacggcaggtccggcggcgacgactacggccgtggcaccggcggtggtggctacaacaagtccggcggcggcgacgactacngccgcagcggcggcgatgggtatggaaagtccggcggcgacgactacggccgtggcaccggcggcggcgggtacaacaagtccggcaacgacggctacgacagcgggtacaacagatcgggca

SEQ ID NO: 6676 - DNA, 387 bp, Zea mays
  unsure (1)..(387): unsure at all n locations; Clone ID: LIB3137-020-Q1-K1-C7
aagggagcgacgttttataaccacgaataaattttaatattagcaatcgaccgtgttcaggtgatgatgaataattacatctgtagttggcctgatatgggattgtagccggacgccgccttcatatagcggccgtcaggaaccccagcaagcaacccagccgcccattgccggcattgctcgcagcgctagcttcttgcgctcatcactcgtctccgaccaagatcagcaaggacggcatggctctcgaagcagcgtacgactacctgcacgtcgccgtcgtccagtgcacgcccacacaagcagcagcagtcctcggcgtcctcctcctcctcgccatncggctagccgcggcggcgaagaactcgtccgcgacgtcccccaaat

SEQ ID NO: 6677 - DNA, 453 bp, Zea mays
  Clone ID: LIB3137-020-Q1-K1-C9
agctgcctgaggcgggctcctcgtataccagagcttctgcgctgctgaagacgctgttgcgacctcgcccaaatctgttttccactgctttgacggcgagaacgtggagagtgctcctcctcctatgaagaaggactacaaactagctaatcttctctgctgggaggaggaagcggatgccatggaggagaaggcgggagtgcttgatgagtaagacgggcttctggtgtcgatttgcttctgagttgtttattttatatcgtcgcaatttcgtggttgtcgtttggttattctgtgaagcagccaagccaggctattgttatgaaaatttgtcgtctgtaagcatgtgaacttccgatgttgccacatgctggatcagtctgaataaagtagtatgcagctctaggtggtcagctgcgtctaccacaatgagcatgtacgtatggagaaata

SEQ ID NO: 6678 - DNA, 463 bp, Zea mays
  Clone ID: LIB3137-020-Q1-K1-D1
gtccggaaaagcccttatttttactgttgactatggttctacttctgacatatagcaaggcacaaacgactacgtgtaaaaaactcgggctgcacgaataattcagcccccagcattatattaagaaaaatactttctcacgcacgtcgagaaaaccccggaatccctgccaaacccatacacagtgtcaccgtagcccatgtgagaacacgacatcgaccgggaccaggccttagacatgtgctttggcgtgggacgaggacatttttttaaccacaacctaaaattcgctcccacgcggagtcgaactcaggacctgagaagtgctactcaaaccacctaagcaactcagctagaggccctttcgcaacaacagctacttatcacttaccatgttggcatgttgtgtatgcatgttattccctttcttatgtgtcatcttttaattattccctcccctatc

SEQ ID NO: 6679 - DNA, 357 bp, Zea mays
  Clone ID: LIB3137-020-Q1-K1-D10
tttttaagaaaaaggaaaatcaagcccctgcatatgctcttggtgaaattgatgaagccgctccaggagctgaaaatgaaaaggctagtattgtaaatcaacagaagttggaaaagaaatttggccagtcttcagtttttgttgcatccacacttcttgagaacggtggaaccctgaagagtgccagtccagcttctcttctgaaggaagctatacatgtcatcagctgtggatatgaagacaaaacaggctggggaaaagatattggttggatttatggatcagtcacagaagatattcttactgggtttaagatgcactgccatggttggcggtcaatttactgcatacctaaac

SEQ ID NO: 6680 - DNA, 453 bp, Zea mays
  unsure (1)..(453): unsure at all n locations; Clone ID: LIB3137-020-Q1-K1-D11
gcggacggacggacccantgaggcnagcacggnctctcaccggcgatggcgacnagggcatggggggggcggggcggtgggcctttaaccttcagctgctgcctttccgctcctgctcgcccacgaagtcggtctccccagcgcagcgctcggcgtcgatggggctccggctgcgcagcggccggccgtgcgtggggaagttcgtgtgccgccgcgccaagaacgcgggatacgaggactacaagttcccggaccccatcccggagttcgccgagcaggagacgagcaagttcagggagcacatggcgtggcggctggagcagaagaaagaggactacttcggggaccatgtcgaggagatcgttgacgtctgcaccgagatcttggggacattcctggagaacgattaccgtggaccagggacgctcctggttcacccgttcctggacatga

SEQ ID NO: 6681 - DNA, 445 bp, Zea mays
  Clone ID: LIB3137-020-Q1-K1-D2
gcgcatttttggaggtccgccacctccttcttggcctgccgtcaatggaaggtcccagatctccgctccccattactccggtccccattacagcgctcgagtcagtgggagttccgccatttttggaaggtccaccacctcctcctcggcccgcggcaaaaatggcgtgggacatccgccacctcacctcctccaattctcgcgctcgcgcctgatatggaacgtccatcggagggactcgggcgtcgaggccatggcggagccgcaccccttctcccccctgcctcgcgcgcggcggccgagatggtgctgagcgcctgagcctgccctcctacgggctcactggcacgctctccatggccatcgaattccagagctgcgattcccgaggccatggagcagcaaacaatatcaattgccaaagctgccattacaatagtactca

SEQ ID NO: 6682 - DNA, 438 bp, Zea mays
  unsure (1)..(438): unsure at all n locations; Clone ID: LIB3137-020-Q1-K1-D3
ccccattcccacctcnctcttctctctgctccnccgcctccttcttgaggcagccgagccatagatcgccgtgtccgactcnnaagaacaccacttcnaatctaaggccgactccggagcgtccaagacctaccctcatcaggctggcaccgtccgtaataactgcttcatcgtcatcaagaaccgcccctgcaaggttgtggaggtttctacctcaaatactgttaatcatggccatgccaaatgccactttgttgccatagacatattcaactgtaaaaagctctaagatattgttccttcgtcacacaactgtgatattccacatttgaaccgtactgagtaccatctgattgatatatcataggatggatttgtgagccttcttacttcagatggcaacactaatgatcatcttatactcccaactgatgaaac

SEQ ID NO: 6683 - DNA, 378 bp, Zea mays
  Clone ID: LIB3137-020-Q1-K1-D4
cggacgcgtgggcggacgcgtgggctgacgcgtgggcggacgcgtggggcgagtgagtgaagaccagccgtattgtcccgaccccgaccgatcctcgcctgctgcagccatggcgacctccgcggcgctctctaccgccgccaatcccacccagctctgccggtcccgcgcttcgctgggcaagccggtgaaggggcttggcctgagcatgggccgcgagcgcgcccagcggagcattgtgtgccaggcggcgagcagcatctccgccgaccgcgtccccgacatggagaagcggaagctgatgaacctcctcctcctcggcgccatctcgttgcccaccgtcggcatggtcgtcccctacggcgccttcttcgtccc

SEQ ID NO: 6684 - DNA, 391 bp, Zea mays
  unsure (1)..(391): unsure at all n locations; Clone ID: LIB3137-020-Q1-K1-D5
cttaaaggataccgattcctgtttccattttttgaagaaggcatctntcagcgtctagcggatctttggcttgagtcagaaatcacatcancttctggtagcatgtcaaccacctcagatgcgtcatcgtcatcttcaacatcttcatcatctaaaaatggctcaaagactgacatttaaaaaagactctttgagttcttcaagtaccaaattgaaacacattcttctgtcgcttatggaaatgggtttcgagcaggcatgcgagccattgagcggtactgcttgagaaacacccttcatcatatcaagatgacggggtctttttcatgcttaagctgctttttttttaccttggctttggatatgggtatacatatctttttttgaaaac

SEQ ID NO: 6685 - DNA, 452 bp, Zea mays
  Clone ID: LIB3137-020-Q1-K1-D6
cctacactcccggcggcggcggcggcggcgcatcagcggcagcagcatccgaagatggtgaagttcctcaagcccggcaaggccgttatcctcctccagggccgcttcgccggcaggaaggcagttatcgtgcgcgtgttcgaggagggcacccgcgaccgcccctatggccactgcctcgtcgcaggcctcgccaagtacccaaagaaggtgatccgcaaggactccgccaagaagactgcgaagaagtcgcgcgtcaagtgcttcatcaagctcgtcaacttcactcacctcatgcccacccgctacaccctcgacgtcgatttcaaggatgtcgccaccggtgggcccgacgcactctctacccacgacaagaaggtcgccgcctgcaagacggccaaagcgcgccttgaggagaagttcaagaccggcaagaacaggtggttctttac

SEQ ID NO: 6686 - DNA, 455 bp, Zea mays
  Clone ID: LIB3137-020-Q1-K1-D7
gaaaagcccttattttttctgttgtctatggcctagtttctgagatatagcaaggcagaagcgactacgtataaaaaactcgacctgcaggggtaagtcagccccgagcattatattaagaaaaatactttctcacgcaggtcgagaaaaccccggaatccctgccaaacccatacacagtgtcaccgtagcccatgtgagaacacgacatcgaccgggaccaggccttagacatgtgctttggcgtgggacgaggacatttttttaaccacaacctaaaattcgctcccacgcggagtcgaactcaggacctgagaagtgctactcaaaccacctaagcaactcagctagaggccctttcgcaacaacagctacttatcacttaccatgttggcatggtgtggttggcatgtaatccctttcttatgtgcatcctttaattattccctccccta

SEQ ID NO: 6687 - DNA, 448 bp, Zea mays
  unsure (1)..(448): unsure at all n locations; Clone ID: LIB3137-020-Q1-K1-D8
cggacgcgtgggtccccatccgcacctctctccatctccctgctcctccgcctccttcttgagccagccaagccagggatcgccatgtcggactcggaggagcaccacttcgaatcgaaggccgacgccggagcgtccaagacctacccgcagcaggctggcaccgtccgtaagaacggcttcatcgtcatcaagaaccgcccctgcaaggttgtggaggtttctacctcaaagactggtaagcatggccatgccaaatgccactttgttgccatagacatattcaacgggaaaaagctcgaagatattgttccttcgtcacacaactgtgatattccacatgtgaaccgtactgagtaccagctgattgatatatcagaagatggatntgtgagccttcttacttcagatggcaacactaaagatgatcttagactcccaactgatg

SEQ ID NO: 6688 - DNA, 436 bp, Zea mays
  Clone ID: LIB3137-020-Q1-K1-D9
gatttttcctgacgcggtgtctgctcccacttcccctcctctcccccaggtggcggcagcggcggcggggtagcatttgtgctacgagggcttttgcaatggcggcttcggggttcggcggcggcgaggcgttccggctctcggccgcaccaggggccggcttactgaagctgcacaagggcgacatcaccctctggtccgtcgactgcgccaccgacgccatcgttaatgctgctaatgagcgaatgttaggtggcggaggtgttgatggagctatacatcaagctgctggaccagagctagtgcaagcatgccggaaagttccagaggtcaaaccaggagtcccgtgtcctactggagaagctaggattactcctgcttttgagcttcctgcctcctgggtgattcacacttgtggccctatatatgatttgga

SEQ ID NO: 6689 - DNA, 423 bp, Zea mays
  unsure (1)..(423): unsure at all n locations; Clone ID: LIB3137-020-Q1-K1-E1
gcggactnccttaccgcgcgctctttttcacttccatctatcctnnaancctgcggctctggacacaaccacaccggcccccgtcaaccaatcnccatctctcctggactcctgctctccacgcaacgacgggcagccccgcctcagctcctcaccctcctcgacaactctccctccggccggtcggcccccacgactccccggggcccgtcgtccgcacgggcacggtctgcacggtggtggtagcagagccagagcagccgaggaggcacatctactcctggctccggacctccctcggcctcaacccctctggagtctggattctgccatttcataccatctccgcttcgccacttccagcgcgctggccctggagcggaggcaagaagggtgactacaangaacttttcctcatggcac

SEQ ID NO: 6690 - DNA, 446 bp, Zea mays
  Clone ID: LIB3137-020-Q1-K1-E11
gaattattggcctgcgcttccttgtaatcttagcgagtgccaagaaccactgtttgactttgttggtgccctctcaatcaatggagctaagactgcaaaagtgaattatgaggctagtggttgggtcagtcatcaagtcacagacttatgggcaaaaacatcaccagatgctggtgatcctgtatgggctctatggccaatgggtgggccttggcttgcaactcatctctgggagcattactgttttactttggacaaacattttttagagaaaacagcgtatccactattggaaggatcagctaggtttttgttggattggttaattgaaggacacaggggatatttggagaccaatccttctacatctccagaacattattttattgctccagatggtaaggaggcctgtgtgagctactcaacaactatggacatctcaatta

SEQ ID NO: 6691 - DNA, 452 bp, Zea mays
  Clone ID: LIB3137-020-Q1-K1-E2
gagagagagagagcgcatagtccatcatgaagggtggcaagaaggaagtggccggggcgggggtggccatactgctggttctgcagctcatggcagctccaccgacggccatggccgcccgctcgccgcacggagccgtgccggatggctccctcgccacgacgcccaaggtgacgatgctgtcggccacgctgtgctacacgggggagacatgcaaatacattggctgcctcactcctgcttgctcctgcaactatagtgatcgtctatgctacatcatatttactcctgttgcttgaggccattccgcgaagccacaactcttacatgcatgcgccggccgacgacgacgctgcctctcgtgagcttctgttcaagtgatgcatgtttcaaggcatccatggatgctttatgtatatgatatgcgtattattaattagccgtgtcaggga

SEQ ID NO: 6692 - DNA, 364 bp, Zea mays
  Clone ID: LIB3137-020-Q1-K1-E3
aaaaaagaaaagtggtgcaggatggtttgaatctttgtgcatgattaatgctgaggcagtaatatgggaaaagcttatccatgttctgccgcgcgcaccccgccccgcatccgccccgcacatcccgcccgcatcccgccgtcgtgccgcgctccttccatcctccgccctcatcccaccgccctccttccattttgagctttgacggtgcggatccccaacgctcccttccatcctcgcggatcccccaccctcgaatcccacgctccctcccgcgcttcctccatgctcccttccatcccacgggcccgatccgattcagcttctgtctcactcatctcgcccggcctccatggaaagatct

SEQ ID NO: 6693 - DNA, 435 bp, Zea mays
  unsure (1)..(435): unsure at all n locations; Clone ID: LIB3137-020-Q1-K1-E6
gtccgaggacatcgccgccatcgtcaccacgctgaacgccagctgcgacgccccggtcagggcccgcctctcggcgctgctggccgccnaggggagggacagcgtccggtgcgtcttcaccgacgtcagctggaacgccgtgctgacggcgtccagcgacctcggcgtgcccgcgctcggcatgatgacggccagcgccgcctcgttacgcgactacatggcgtaccgcaccttgatcgacaagggctacctgccggtgaaaggtgagtccatctccgtctccatccaatcgtcgtcggcgaggttattagcagagggagactagattagatttgcttatcatcacatacctgcagaggagcgcaaggaggatcccgtacccgagctaccctcgtaccgcgtcaaagacctgctccgggtcgacacgtccgacct

SEQ ID NO: 6694 - DNA, 425 bp, Zea mays
  Clone ID: LIB3137-020-Q1-K1-E7
accgagacagcggacttccgtaccgcgcgccttcgccaccgccatctatcctggaagcctggtgctctgcacgcaaccacgccggcccccgtcaaccggtcgccatctctcctggactcctgctctccacgcaacgacgggcagccccgcctcagctcctcaccctcctcgacaactctccctccggccggtcggcccccacgactccccggggcccgtcgtccgcacgggcacgggctgcacggtggtgggagcagagccagagcagccgaggaggcacatctactccgggctccggacctccctcggcctcaacccctctggagtctggattctgccatttcataccatctccgcttcgccactgccagcgcgctggccctggagcggaagcaagaggggtgactacaaggagcttttcgtca

SEQ ID NO: 6695 - DNA, 392 bp, Zea mays
  unsure (1)..(392): unsure at all n locations; Clone ID: LIB3137-020-Q1-K1-E8
gacgaggcgccgacgccatcgcccggtgcatcttccggtaagggaaagaaggtagcggaagaggaggaggacaagaaggttgcagcgacgccgcanccggtcgcaaaagctcaggtggtgggatggccaccaatccgaagctaccgcaagaacacgatgtctaccacccagctgaagggcagcaaggaggatgctgaggccaagcaggaccaggggttcctgtacgtcaaggtcagcatggatggcgcgccgtacctcaggaagattgacctcaagacttacaagaactacaaggacctgtcgactgcgcttgaaaagatgttcagtggcttcagtactggcaaggatggcttatctgaatacccgaaggatggtgaatatgttctgactta

SEQ ID NO: 6696 - DNA, 412 bp, Zea mays
  Clone ID: LIB3137-020-Q1-K1-E9
gtcaggactcaggacgtcaggtcacacccgtttagccaacgcctccaccgctccacggcgacggcggctcctccacggctccagctccaggccccagctcaccctccccctcccctcgaggcggaccgcccccacgtcgccggcgatcgaatcggcggccgtagcctcgcgcttccggcgtcggagagtgcgcccgtccggcggaggagatggcgctgcggcacctcgtcacgggccagaacaactgcgtgccggacggcgcctcgtcgtccaaccccctcaacgccctcgccaacgccttcctcggccagtcctccaaggcgcagtcaataaaagaacttcctggttctgttaatgtcccatctacatctgactttaacgtgtctgctcccttgtcaaacatccctggttc

SEQ ID NO: 6697 - DNA, 445 bp, Zea mays
  Clone ID: LIB3137-020-Q1-K1-F1
ggtgtcggaaacagttcattactgttcctgctaatctagactgaagtctctgttgggggggggctgcgacgaagagattggcctgttcctgtacaggggccgcgttgacgaggagaccataagatcgctccaggggaaggaaaccgggctgcgcgaccacggtgagctgatcaagctgcgcgtggttccgtacagcgagctctggcggtcgaccggcgacgcgaaagcactctccgcgatagccctgtacgagatggccaagagggaaggcctgctgccgcagccgacgccgtcggccaacttgtgaagacctgctagcactgcggcgtttggaccgacgcctaggcgagataggcgtctaggcattggaccaccgtctcgtctacgcggcgcccttaaaacagtggtggccgtcatgcctgtaaaaatggaagaggaacgtcac

SEQ ID NO: 6698 - DNA, 456 bp, Zea mays
  Clone ID: LIB3137-020-Q1-K1-F11
gaaaaatatccccaaaccctagctcccgatctcgatggcgaaccctcgcgtcttcttcgacgtgaccgtgggcggcgccccggcgggccggatcgtgatggagctgtacgccaacgaggtgcccaagaccgcggagaacttccgcgcgctgtgcacgggcgagaagggcgtgggcaagtccgggaagccgctccactacaagggctccaccttccaccgcgtcatccccgagttcatgtgccagggcggcgacttcacccgcggcaacggcaccggcggcgagtccatctacggcgagaagttccccgacgagaagttcgtgcgcaagcacaccgcccccggtgtgctctccatggccaacgccgggcccaacaccaacggctcccagttcttcatctgcaccgtcgcgaccccttggctcgacggcaagcacgtcgtcttcggccaggtcgtcga

SEQ ID NO: 6699 - DNA, 448 bp, Zea mays
  Clone ID: LIB3137-020-Q1-K1-F2
aagaggaccagcatgcaaacacaaccaaagatgaagtttctaaagagattgtagagggttcggatataaatctgcagaaaataacaaggcctgaagaaaaatctaatgagctagaaactcaaattaccgaaccagtttgtgacagtcaggcaattttggcccatgaaaaggaaatatctgaagaaaactttccaacagcagtcgaaattcaggctgatggtccaaacatgcagatcaaccaagataagcaagatgaagctgctgacatcgaaactgaaatgaagccagaaaaattaggggaatctaattttcaggaacaccaggacaatggtactgagcaaaagtctcctaaagagactgatgaaggagaccagcaacttgtggccaagaaagagattctgacccaagaaatggatgtgcatgagacagttgaaagacctcagcaagc

SEQ ID NO: 6700 - DNA, 437 bp, Zea mays
  Clone ID: LIB3137-020-Q1-K1-F3
cggacgcgtgggctcatcctctcccacgcatgtcacaatcgccatgaccgacagaggccccggcgccgcctcaagcaagcgtcactgtgacctctccctcgacgatcccacgccgtcggccaagctccagcggtgctccgagccgtcagaaccaacgccggcggggaaaccgaacggcggcgcggcgacaggagaggagagcgagatgatggccggcgcacggaaccctagggcgcagaggtacctggtcgccgtggagtacattggcacccgcttctccggctcacagaagcagcccaaccagcgcaccgtcactggggtcctcgaggaggcatatcaccgatttattgggcagccagcttcaataatcttttctagccgaacggatgcatgtgttcatgctatatcaaatgtttgtcatgttgatgttgagcgga

SEQ ID NO: 6701 - DNA, 446 bp, Zea mays
  Clone ID: LIB3137-020-Q1-K1-F4
cggacgcctgttgaactcacgaagtaagcattactactgctatagaaagcagtaggagggtgtagtctgctgtgtctaggcgcctagctatatgcctatatagtaaacggtatccagcatggacgagtacatctaccagtcgctcttcctctccgtccttgctgtggcactgctgcagctggtgaagatggccctcaagccgaggccacggctgccgccagggccttggaagctgcccgtcatcggcagcatgcaccacctcgtgaacgtgctgccgcaccgggcgctgcgggacctggcggacgtccacggcccgctcatgatgctgcagctcggccagacgccgctcgtcgtcgcctcttccaaggagacggcgcgcgccgtgctcaggacgcacgacaccaacttcgccacacgccccaagctcctcgccggcgagatcgtcg

SEQ ID NO: 6702 - DNA, 449 bp, Zea mays
  Clone ID: LIB3137-020-Q1-K1-F5
attgccaccaaaccggccgatggatcgatgataaactatgtcgaaggtgacatgtgcagtgggattccacctgctcaaactgtcgtgctaaagcttgtgctgcaccacctgaccgatgaggagtgcgtcaagctcctggctcaatgccggaaggcgattccttcacggaaggatggcgggaaagttataatcggtgatattatgattgaccactctgggcctatgctggaaactcacctactgatggacatcggcatgatgaccatgacaaaaggacggcagagagatgaaaaagaatggagcgagctcttcaccaaagcagggttcagcgaatacaagatcctgaaggaatttggagctcgtgttgccttctaagtctatccgtgagattgcacctggactatacatatatatttacatacatatatgtatgtgtgtgggtgccttgc

SEQ ID NO: 6703 - DNA, 458 bp, Zea mays
  unsure (1)..(458): unsure at all n locations; Clone ID: LIB3137-020-Q1-K1-F6
cgacccacgcgtgccaccatgacattatcgcaactgtttctattttacacgccaacactgacnccatgaagcctggtatactttttactcgtctgccctactatcttactacagacgttcaatcctcttaaatccaccatgatgctattcagtactcacttcctccagacaatttttccttcaacctctagaaattatctctgaaagatctgaatcgttactatactacctccaactccaaacattaccctaccaaggatacttctagcttaaactccaatgtaattatcattaactacaatcgtcatattggaaattactatcccacagatattaacttacacaccttacacattacatacaagcatactaacctcattaccaacatttactacccataccccaatgacctgtaaaagaaccccaaattttttacaaactctaatctctatattttt

SEQ ID NO: 6704 - DNA, 389 bp, Zea mays
  Clone ID: LIB3137-020-Q1-K1-F7
attttctgtagtaattacctgatacatgcatgtttttactttctttgtatccctagtttgcagataagcacactgtaatagaaaagagaagaatataattactaaggaacacaggaacaaccaaaaaattgatctggagcacttaaggcaacgcccggaccaagaaagccatcatcgtttggtggtttgttgtgaaaggggaggcaacatcaatttgatctggagcacttaaggcacgacctccctcaatccttgtatataactaagtacatatagctacactactttcagtttttctcatgattcctaaacttgcagttggagacgatgacgatccaccatgccaaaatctttccctctctgaccacgcactgacgatgcaacaatag

SEQ ID NO: 6705 - DNA, 397 bp, Zea mays
  Clone ID: LIB3137-020-Q1-K1-F8
cagtccttcttcgtaacccttcaaaccgacgaatttgagcaactgcacccagagcgcgatcgattgccggggaagaagcaacttgttgcgagcctcctctatggcgagctccgaccatggttccaccaccgcccccaaggacgtgcctggcagctacggcctgccgctggtgggcgccgtgcgcgaccgcctcgacttctactacttccaggggcaggacaagtacttcgagtcccgcgtggagcgctacggctccaccgtggtgcgcatgaacgtgccgccgggccccttcatggcgcgcgaccccggggtgggtgcggtcctggacgccaagagctttcccgtgctcttcgacatggacaaagtggagaagaaagacctgttcacgggcacctac

SEQ ID NO: 6706 - DNA, 287 bp, Zea mays
  unsure (1)..(287): unsure at all n locations; Clone ID: LIB3137-020-Q1-K1-F9
ggcgaccacgcgtccgattcggcgaccaccggagcgcggaggaggcactatgcgtccatctagagacgatggccgccgggggctgcttnccctccttctggttcttgaataaaccgcttgaaaggaaagtggcccttcttacttggggggccacccgcattggggaaggccttcgttgcctttttattgaacaccgggcccaaggcttgattgcgggacatccaggatgaggccgggcagaaattgcccaaccccttggaaggtaacccccagggccccattttctt

SEQ ID NO: 6707 - DNA, 454 bp, Zea mays
  unsure (1)..(454): unsure at all n locations; Clone ID: LIB3137-020-Q1-K1-G10
gcgcaagcgcaaagcancttcctttcgcctgctgacaaggactagtcgagcggcgagcgaggaggcggaggagtggccgcggccggggcgtgagctacggnggcgggcagagctcgctgagctacctcttcggcggcggcggcgacgaggccgccgcggcgcccgccaagccggccgcggcggcgcctgcgcctgcgcctgcgccggtgccggcggcagcagacggcgagaagctcaaggggatcccggccggcgtccgcggcaaccagagccagaccaacaactacttccgggcgcaggggcagaactgcggcaacttcctcacggaccgcccgtcgaccaaggtgcacgccgcgccgggcggcggctcgtcgcttggctacctcttcggcggcggacctcccgggagcaagtgatgtgatgggcaccttctccgcccagacttttcggagca

SEQ ID NO: 6708 - DNA, 467 bp, Zea mays
  Clone ID: LIB3137-020-Q1-K1-G11
ccacgcgtccgaatgatggctcacattgaggtccttaggaataagggccactcttactcaaagataattaaggagagcgctgatcgagtccgtggactcgttgaacccgttcatgcatgctcgccgtgtggccttcatggtcgataactgctccacaactgctcgtttgggatctaggaaatgggcaccacgcttcgattacatcttgacccaacaggcgtttgtgactgttgacaagaaagcaccgatcaaccaagacctcatcagcaacttcatgtctgaccctgtccacggtgccatcgaagtctgcgctcagctgaggcccactgttgacatctcagtgaccgctgatgcagatttcgtgcgcccagagcttcgacagtcttcataagcttgtatggatccgcagtgtgactgcaatggctagcttgtaagaacttaatatgcctgggcttttgaactcttaa

SEQ ID NO: 6709 - DNA, 350 bp, Zea mays
  unsure (1)..(350): unsure at all n locations; Clone ID: LIB3137-020-Q1-K1-G12
gcaaggactacacggaccctcccccggcgccgctgatcgacgcggcggagctggggtcctggtcgctgtaccgcgccgtgatcgccgagttcatcgccacgctgctgttcctgtacatcacggtggccaccgtgatcgggtacaagcaccagacggacgcgtcggcgtcgggcgccgacgcggcgtgcggcggcgtgggcgtgctgggcatcgcctgggccttcggcggcatgatcttcgtcctcgtctactgcaccgccggcatctcggggggccacatcaaccccggcgtcaccttcggcctcttcctggcgcgcaaggtctncctggtgcgcgcgctgctctacatc

SEQ ID NO: 6710 - DNA, 435 bp, Zea mays
  Clone ID: LIB3137-020-Q1-K1-G2
cggacgcgtggcatcgactagcccttccgccctcttccttgcaaacgaaacaaaagagaacgggggcgacagcgagtgagatcgcgacggtggtcgtaataagcgcggggcacatgggctcgggcatcgcccagctcgccgccgacggcggctgtgccgtacttctcctcgacgccgaccccactgccctctcccgtgccgtcgtctgcatctccgcctccctacggcgcctcgccgccaagggccagctctaccaggccgcgtgcgaggactcaataaagcagataaggtgcgtctccgtcgtgcaggatctcagggacgcggatcttgtgatcgaggccgtcgtggagaacgaagacgtcaagaagaagctattcgtggagctggataacgtcacgaagccctcggccatcctcgcgtccaacacgagctcca

SEQ ID NO: 6711 - DNA, 435 bp, Zea mays
  Clone ID: LIB3137-020-Q1-K1-G3
cggacgcgtgggcgctcacgccggctacaagtttccgccagagttaggtacatcaggtgctgggccggcagccgtggaagggatggaggacctcgcgagttcgcgtggcggcgggggatgcggtggtcttgatgcgcacatcgaacagctcatggagtgccgcccgctcccagagacggaggttaaaacactgtgtgagaaggccaaggagatattaatggaggaaagcaatgttcagccagttaaaagccctgtgacgatttgtggtgatattcatggccaattccatgatcttttagaacttttccggattggtgggaagtgtccagatacaaattatttgtttatgggtgattatgtggatcgtggctattactctgttgagacagtaacgcttttagttgcacttaaggtgcggtacccgcaacgcattac

SEQ ID NO: 6712 - DNA, 419 bp, Zea mays
  unsure (1)..(419): unsure at all n locations; Clone ID: LIB3137-020-Q1-K1-G4
gggggccgacccacgcgtgcnaanaacatgatttgtgcctctgactctcgctttgggcgttacctcaccgcctcggccatgtggcgcattaagatgagcaccaacgacgttnaccagcagatgatcaacgtccagaacaagaactcgtcctacttcgtggagtgcatccccaacaacgtcaagtccagcgtgtgtgacatcccgcccaggggcctgtccatggcgtccaccttcatcggcaactcgacctccatccaggagatgttccggagggtgagcgaacagttcactgccatgttcaggaggaaggctttcttgcactggtacacgggcgagggcatggactatatggagttcaccgaagccgagagcaacatgaacgacctcgtgtcggagtaccagcagtaccaggatgcgac

SEQ ID NO: 6713 - DNA, 392 bp, Zea mays
  Clone ID: LIB3137-020-Q1-K1-G5
ggacaggtggaagggcctggcctacgacatctcggacgaccagcaggacatcacgaggggggggggcctcgtcgacaacctcttccaggcgcctatgggggacggcacccacgtcgccgtgctcagctcctacgactacatcagccagggccaaaagtcttacaacttcgacaacatgatggatggcttctacatagccaagggcttcatggacaagctcgtcgtccacctctccaagaacttcatgaccctgccaaacatcaaggttcccctcatcctgggtatctggggaggcaaaggccagggaaaatcgttccaatgcgagctggtcttcgccaagatgggcatcacccccatcatgatgagcgccggcgagctggagagcggcaacg

SEQ ID NO: 6714 - DNA, 453 bp, Zea mays
  unsure (1)..(453): unsure at all n locations; Clone ID: LIB3137-020-Q1-K1-G6
gcgcctcaacatcaacggctgggagattatgatttccatcggctttctggcggcaacgggagtagtggtggcgaacgagctgggagcctntagcgcgaggagggccaagttcgccatctacaacgtggtggccacctcctccatcatcgggtccgtgctgttcgtgctgttcctcctcttccgcggaggcctcgcctacatattcaccgacagccaggcggtggcggacgcagtcgccggcctctcgcccctgctggccttctccatactgctcaacagcgtccagccagtgctgtcaggcgtcgctgtcggcgcgggctggcagagcgtcgtcgcctacgttaacatcacttcgtactacctcatcggcatccctcttggagccgtgctgggctacgcgctggggcttcatgtgaagggcatctggatcggcatgctgctcggaacgcttgt

SEQ ID NO: 6715 - DNA, 101 bp, Zea mays
  Clone ID: LIB3137-020-Q1-K1-G7
gtctgggccgagaaatccgattttccctttcccggaacccaaccccggtcgaaaaaagagagggcttggggggcggaaatgcagcccttcgggccgggggg

SEQ ID NO: 6716 - DNA, 450 bp, Zea mays
  Clone ID: LIB3137-020-Q1-K1-G9
gaggcaggttaaatgtcttgggaaatgttgtgaggaagcccttgcgacagatatttagcgaggtcaggggtggcaccaagcctgtcaatgaaggcgaggggttgtatacagggactggtgatgtcaagtaccatcttggaacttcatatgataggcctaccaggggtgggaaacatatccatctgtcactggttgcaaacccgagtcatttggaagcagttgatcctgttgttgctgggaaaacaagagcgaagcagtactattctaatgaccgtgacaggaccaagaatttgggagtgttgctgcatggtgatggtagtttctcagggcagggcgttgtgtatgagacgctgcatctcagtgcccttgaaaactacaccactggtgggacaatacatatcgtggtcaataatcaggttgctttcactactgatccaaggtcagggagat

SEQ ID NO: 6717 - DNA, 433 bp, Zea mays
  unsure (1)..(433): unsure at all n locations; Clone ID: LIB3137-020-Q1-K1-H1
gcgccgttatcnaatatttgtcatccgttttctcttttataaactaaaacacgataaaggaagaggtaaagaacggagagagtagtggtcctttactttcatgcagctagaattctaacgccctcctgcatccttgtgcagagaatggcgcggtgatgattcagtttggccatcagatgcctgattacgactccccggctacccagtcaaccagtgagacgagccatcaagaagcgtctggaatgagcgaagggagcctcaacgagcataataatgaccattcaggcaaccttgatgggtactcgaagagtgacgaaaacaagatgatgtcagcgttatcccttggcaatccggaaacagcttacgcacataatccgaaacctgaccgtactcagtcctttgtcatatcatacccattatgcccatccatact

SEQ ID NO: 6718 - DNA, 448 bp, Zea mays
  Clone ID: LIB3137-020-Q1-K1-H10
cgcggtccgctcgtccgcaatatgcaaggcagatggacggcaagcgactcggcacaagcaaacagggccggggcaaggaggagaagcaccgcgaccaggacccttgttcgccgccgccgcctctgatctccgcgaggttgtcaggattcaatatgtcgaccagcacattcgctacttcctgcacgctggtgggcaatgttagaacaacgcaggcctcccagacagcggtgaagagcccttcgtctctaagcttcttcagccaagttacgaaggttccaagcctgaagacctccaagaaactggatgtctccgccatggctgtatacaaggggaagcttggcgggcctgaaagtgaagagcacgagtttgatgcttcaaaccacgcctacattcttgacccaaccgaaactggccgtggggaggtggcatactcgggccgggctggggc

SEQ ID NO: 6719 - DNA, 399 bp, Zea mays
  unsure (1)..(399): unsure at all n locations; Clone ID: LIB3137-020-Q1-K1-H11
cgccgttccgaccgancgaggnggcgcaaagcagaggaaaagcccaggccgcaaccctcgggggcactgaggtcctcgtccctgccgcaccctcctcttcaactccagccgctttcatcgccaatcagaggtccaccaccaccaccaccacatctcttcgcatccaaccgccccgtaggatcacaggaaacggggatggcgagcggcggggcggtgagggaagggggctcggcggccgaactgcaagcggcggtggcccgggcgcgggcggcggcggggcacttctgggcgtcctggtgccaggcgtccaagcagaaggacgaagtcttcgcgcacctcgccggcgacttcccccacgcggccttccttcgggttgaagctgaagaacaacctgaaata

SEQ ID NO: 6720 - DNA, 384 bp, Zea mays
  Clone ID: LIB3137-020-Q1-K1-H12
cccaccgacccacgcgtggcgtcttactccctaacaccatacgctctacccttatttccccatctctcttcttctgcttcttgttccccatccagaggaggaaggaacaataataagcaggaggcctctcccccccagcccagccaccccgtagcgactactgatgacggaagaggatgagcgcgtccaggttcataaagtgcgtcactgtcggcgacggcaccttcggcaagacctgcatgcttcatttctacacctgcaacaccttccccaccgactatgtaccacagtgtttgacaactttcatcctaactttctggttgatggtaacactttcaacctcggccttttttacactttatgttaagaggatacaacatactt

SEQ ID NO: 6721 - DNA, 449 bp, Zea mays
  Clone ID: LIB3137-020-Q1-K1-H2
caccggtccaccgcgcgtccccgttttcggcggtagggcagaacagaacaccggagggggagggggagcgcggcgcgtcggcggcgctgtgggggcacgcgcacctcccactgctggcgcgcgccgggtccaaggagtcggtcgagtacatcctgcaggcgctctggcgcacgcgccgcacgggcctcgacgccgccgaccgcaccgtcgcccgcgacgccctccagctctcctccgacgccgagctcgaccctctgctggtgtgcctgaggatactgatcagacggtgcgtcaacgaggacttcgccaaggacgacatccccaagctcttccccgaggaggtgccccccgagctgcagaagctgcttaccttgctgctgcagaagttccagccggagtggcaggcggatgccgccaaggatcaggaagccgcgctgcactccagcgcg

SEQ ID NO: 6722 - DNA, 418 bp, Zea mays
  Clone ID: LIB3137-020-Q1-K1-H4
tcccgttccctccctctccccgcgagccgccagaggcaatttctccctcgattcgaccccggttcgtccgcccgcgaccgggattccctccgccaagcgcggatctgaacgctgcgctccgtgtcgccgctcgaatccgccatgaaggggggcaaatccaatgcagcaggcaggagcttaggagaggagacgccgacggaagattgcggggcggacaccatgcagcggaagcttatggatttgccaggtcccagatggaagaagggcaaggactgcaagggctttgcagcactggcagcagccaatcccatgtccagcatagttgcggagctccaggcttcactgcgggactcggaagccgtggcgattctagccgcgcacgccagggacgcgatcctcgaggtcggcccacgccaag

SEQ ID NO: 6723 - DNA, 439 bp, Zea mays
  unsure (1)..(439): unsure at all n locations; Clone ID: LIB3137-020-Q1-K1-H5
cgccgttccnaccgatcgatgtggctcaaattaaaggattagcccaggccgcaaccctcgcgaacactgaagtactcgaccgtgacggatcattatgtaacacaccttcacccatcacgtcaagaaataaagtagctatcatagctatttcagtagtggttcctgtgccagcactaattgtactacttcttacatatttcatccggtggcacaaaagaaaacctattgttcaaccagtacccacacatggctcaacaagagatccagaacctgataatgcttcaagaatcaaaaaaagttatggctacaacctgaatataactgagaatcgtcagctcacatacaaagagctcgagaagttcactaataacttcaagaacttcataagacaaggaagttttgggcccgtctactatggccacttggaacatgacactga

SEQ ID NO: 6724 - DNA, 325 bp, Zea mays
  unsure (1)..(325): unsure at all n locations; Clone ID: LIB3137-020-Q1-K1-H8
cacattcgagaaacaacgatcgaagcacaacaagccacttgaagactctnngtttaggaggaaaaccanncaaaccacgcaagcgcnngtgcaagtctatcatggaggtacgnnngtcagcaggggcccagcgcggcccacgnngcgccacgggctcaaatgtcgaccagtnnacggcaacccaagtcggcnnggcgtcgagcaacggcnnaccggcggcatgagggcacggcacgggaaccaaccggcggcatgggccagctgggtgagcacggcggcgctggcatgggtggcgggcagttccagcctgcgagggaggagcaca

SEQ ID NO: 6725 - DNA, 444 bp, Zea mays
  unsure (1)..(444): unsure at all n locations; Clone ID: LIB3137-021-Q1-K1-A1
aggtcatctcattctttactgcctgcctgaggtacgatggggctctgaacgtatatgttagcgagttccacaccaaacttgtaccctacccgacgatccacattcatgctttgttcgtacgctccagccatctgttgtgagaaggcctaccacgagcacctatctgtggctgagatcacctacagtgcctgtgagtcatcttccatgatggccatgtgcgactcaagcgatggtatgtacatggcctgctgtctcatgtaccgtggcgatgtagtccccaaggatgttaatgctgctgtggccaccatcaagaccaaacgcaccattcagttcgtggattggtgcccgactggcttcaagtgcggcatcaactaccagcctactagcgttgtgcctggtggcgacctggccaaggtgcancgtgccgtgtgcatgatctccaac

SEQ ID NO: 6726 - DNA, 356 bp, Zea mays
  Clone ID: LIB3137-021-Q1-K1-A10
cagtaggaagctaggaggaaatcaaagcaacaaagttgctggccgagagaagcaaccatgagacctcaggcgtcgttactcgtcacactggctgttatcgtcgtcgtccttgcagctctgccactcagcaaagggacggaggaggaaggaggaggaggggaggcagtcgccgccgtggacgccgccgccggaacgagctcgtggccatgctgcaacaagtgcggtttctgctacctgtctgacccgccgcagtgccaatgcctggacttctcgacggtcgggtgccacccagagtgcaagcagtgcatcaggtacaccgccgacggtggcgtcgacattccgcccgtgcacgccta

SEQ ID NO: 6727 - DNA, 397 bp, Zea mays
  Clone ID: LIB3137-021-Q1-K1-A12
gcgaccacgcgtccgcagacgcatgctgtttcgtatacacttcaacgaagacttgaaccgagacacgcatgcacgaggacctggggcgaccgtactcacggctgttgccgaaatccacggcagactgtgcaggatatcctccatcatcagaagctacacgcagattatttcttatttgctgagtgcctgacacgaggggtcgctttgctgttagcgacccgtgtgtccagcgacgacagtcgaggccgatgctggtagggcgaccatccggcgcgcccttgcgtcgctgaaacgaaggcatctcgccgaggaaagggcgcacaggcatgacatagaggcgctaacccgtcccttatactgccacgctttggagtgtaaggagaacgctcaaaagcat

SEQ ID NO: 6728 - DNA, 278 bp, Zea mays
  Clone ID: LIB3137-021-Q1-K1-A2
gaaactatcgcactataccggtccacacaaagccgccagagcgccgcgccaccatgtaccgggttttccttcaaaccttatacatggatttcaacgataccgacgacgacttctattcctttccaaccgcctgcaccttcatgtgctagaccccgcggcaacatcttcctgaccagctgaaccggcacatcatgaatgttccgcgcccaagcatcccgttatcccccgtactggagcaatggaatcaagaaggccatacctccaagaagctcgacatc

SEQ ID NO: 6729 - DNA, 449 bp, Zea mays
  unsure (1)..(449): unsure at all n locations; Clone ID: LIB3137-021-Q1-K1-A3
aggtcatctcattctttactgcctgcctgaggtacgatggggctctgaacgtatatgttagcgagttccacaccaaacttgtaccctacccgacgatccacattcatgctgggttcgtacgctccagccatctgttgtgagaaggcctaccacgagcagctatctgtggctgagatcacctacagtgcctgtgagtgatcttccatgatggccatgtgcgactcaagcgatggtatgtacatggcctgctgtctcatgtaccgtggcgatgtggtccccaaggatgcgaatgctgctgtggccaccatcaagaccaaacgcaccattcagttcgtggattggtgcccgactggcttcaagtgcggcatcaactaccagcctactagcgttgtgcctggtggcgacctggccaaggtgcancgtgccgtgtgcatgatctccaactccac

SEQ ID NO: 6730 - DNA, 399 bp, Zea mays
  unsure (1)..(399): unsure at all n locations; Clone ID: LIB3137-021-Q1-K1-A4
gctcgccaacactccgatacgcagggatgcataggcgtcggcaggaggagctcatgtcgaacaccaatagcgttagccaccaccagtagccacagcagtcatggggtcggtgccgccggcagagggggacaggcgccagccccagcagcagccacacgtggtgatgatcccgtacccggcgcaggggccagggccatgtcacgccgatgctgcagctggccaagctactccacacacgcggattccacgtcaccttcgtcaacaacgagttcaaccaccgtcgccacctgcgcgcgcgggggccgggcgcgctccacggcgcgccggggttccgcttcaccgccattgacgacggccttnncgccttcgacgccgacgccacccaggacgttcccaagc

SEQ ID NO: 6731 - DNA, 444 bp, Zea mays; identical to SEQ ID NO: 6725
  unsure (1)..(444): unsure at all n locations; Clone ID: LIB3137-021-Q1-K1-A5

SEQ ID NO: 6732 - DNA, 399 bp, Zea mays
  Clone ID: LIB3137-021-Q1-K1-A6
tgtgagctccacacaaaagagagaaccggttgcgagctaggagctagccatggacggacgcggcgcggtctcaccgtggagcgtgctatgcggggcggcggctgtgctgctcctgtggttggcgtcgcaggtgctggaatgggcctggtgggcgccccggctcgtgaaccgtgcgctgacggcgcagggactgatgggcacccggtaccgcctcctttgcggcgacctcatcgaggagcaacgtctccgcgcggcggccctggcaaggtccgtacccgtggatcggccacacaacttcctccctcgcgtcgcgcctttccttcaccgtgtcctccaagagcacggaaagctctcgtttacatggttcgggccgaccccaagagttctaatcaccgatcc

SEQ ID NO: 6733 - DNA, 442 bp, Zea mays
  unsure (1)..(442): unsure at all n locations; Clone ID: LIB3137-021-Q1-K1-A7
ctccctccctctctgcctgaccagctaggatcagcggaagcagcaatggtgatggcgtcgtcgagcgggctgaggagctgcagcgccgtgggcgtgcccagcctgctggcgccgtcgtcccggtccggccgcctggcgccgttctgcgccaacgccaccacctctggccgcgtcaccatgtccgcggagtggatgcccggccagccacgccctgcccacctcgacggctcctctgccggggacttcggcttcgatccgctgggcctcgcgaccgtgccggagaacttcgagcggttcaaggagtcagaggtgtaccactgccgctgggccatgcttgccgtccccgggatcctggtgccggaagctctgggcctgggcaactgggtgaaggcgcangagtgggcggccgtccccggcgggcaggccacgtacctgggcgccc

SEQ ID NO: 6734 - DNA, 398 bp, Zea mays
  Clone ID: LIB3137-021-Q1-K1-A8
cccggagattgaggagctcctgtacagccaaaccgagaacacggagcacaagttcgttctgaacgacaggaacaagccaatcatcttctccatggctcgtctcgaccgtgtgaagaacttgactgggctggtggagctgtacggccggaacaagcggctgcaggagctggtgaacctcgtggtcgtctgcggcgaccatggcaacccttccaaggacaaggaggagcaggccgagttcaagaagatgtttgacctcatcgagcagtacaacctgaacgggcacatccgctggatctccgcccagatgaaccgcgtccgcaacggcgagctgtaccgctacatctgcgacaccaagggcgccttcgtgcagcctgctttctacgaggctttcgggctga

SEQ ID NO: 6735 - DNA, 456 bp, Zea mays
  Clone ID: LIB3137-021-Q1-K1-A9
cggacgcgtggggactactacttcgacagtgaaactgccaacagccattttgtcaacttatgcgaaggcaaaatctagggcaaagaaggacgcagaaagcaaagctaaccaggagaaagcaacagaggaggcttctggttctacctcaagcaaggcggctaaagctcaagagaaggatgctgatgtcatgcaggttgataatgccactgaaaagaaagctcctgaaccagaagcaacgtatcaactcctgacgaacccagctcgggtgatccctgcacaggagaagttcatcaagtttcttgaaaacagccgatacgtccctgtgaaaccagcgccttctggattcatcctcctccgagaccttcagcccactgaggccgaggaccttgcactgaccgatgctcccacagcagttggaggaagcaccggcaacactgccacagctgcaagccaaca

SEQ ID NO: 6736 - DNA, 430 bp, Zea mays
  Clone ID: LIB3137-021-Q1-K1-B1
cggggaaccacaacttcgagctgctcaggaagctcgtgctccccgacggctccgtgctacgcgcgcagcttcccggccggcccacacgcgactgcctcttctccgacccggcgcgcgacggcgagagtttgctcaagatttggaacctgaacaagtgcggtggcgtggtgggtgtgttcaactgccagggagccgggtggtgccgcgtgaccaagcggacgcgcgtgcacgacgcgtcgccgggcacgctgaccggcaccgtgcgtgccgacgacgtcgacgccatagcgcgcgtcgctggtgacggcggcgggtgggacggcgagaccgtggtgtatgcgcaccgcacgcgggagctagtgcgactgccccggggcgtcgcgctgcctgtgacgctaggcccgctccagtatgaggtgttccatgtgtg

SEQ ID NO: 6737 - DNA, 398 bp, Zea mays
  Clone ID: LIB3137-021-Q1-K1-B10
cttcgttcattcttgtccactcgaggactgcccgtttgacgactgctcgatcagtgtgctagctagctagctagagcaagagaacggctgtaagcgaggagatcgatcgagatggctttcctcaacatggagcagcagacctgggccttcacctttggtatcttaggtaacatagtctcactgatggtgtttctttcaccgctgccgacgttctaccgcgtgtaccgcaacaagtcgacggaggggttccagtcgacgccgtacgtggtgacgctcttcagctgcatgctgtggatcttgtacgccctgctcaagcccggcgccgagctgctggtcaccatcaacggcgtgggctgcgtcgtcgagaccgtgtacctggccatgtacctggtgtacgc

SEQ ID NO: 6738 - DNA, 436 bp, Zea mays
  Clone ID: LIB3137-021-Q1-K1-B11
gatgatccctggtgtccttggtttccggtccggcggggtcccccccccctcttgcctctggcaagaagagtaagcagagatggcttgccctgcgcaatccatgctcttcggcagcggctgcattctcctgaggggcaaacctcgggctttctcctcccacgtgcgagggggcatcatcggcggtggctgcagcagcaggccgttccagctaacctgcaacgctttctcttccccgtctcctccctcgccggcgccggcgcaggaagaccccgactgcaacgacgaggagtgcgccccggagaaggaggtactgctgctcctctttccgccctggacttggcgtgcctccctcgttgcgcagccgtagattgtttacgccagcacaggacagcaaaagcagagagtgtgtgggattgaagcagcaacgagaacgaga

SEQ ID NO: 6739 - DNA, 385 bp, Zea mays
  Clone ID: LIB3137-021-Q1-K1-B12
gatgatccatgcgttctttgtttcccacccttcggtgttcgcccgcacgactaccgtctgtgaagaggagtaagcacaaatggcttgcccttctcaatccattctatccgccagcgtctgcatactactgagcagcaagcctcgggcttcctccttccacttgcgagggagcatcatctcactgttgctgtaacatcaagccctgccaactaaccagcaactcttcctcttccccatctcctctctcgccgacgcctacacagtaagaccccaacttcaacaactagaagcgctccatgtagaaccaggtactgaatctccactttcatccctttacttgacttaactacctaggctcacatccatagaccgaatactccagcac

SEQ ID NO: 6740 - DNA, 434 bp, Zea mays
  Clone ID: LIB3137-021-Q1-K1-B2
ccgcgatggaggctctccacgaggagatgcccttcgacctcgacttccacccgtcgtctccgctcgtcgtcacctccatcatcaccggagagctctgcctgttccgctacggcccggagtcgcagcctgagaggttacttttgttaaaagcccacaaggagtcatgcagagctgttcgttttgtggactcaggaaaagtgattttgtcagggtcagctgattgctcagttcttgcctcagatgtagaatcgggcaaggccattgcccgcttggaggatgcacatgagaatgccataaaccgccttgtctgtcttactgaatctacaattgccacaggtgatgatgaaggctgcattaaggtatgggatacccgggagcgatcttgctgcaacagttttgaagtccacgatgattacatttcagatatgacctat

SEQ ID NO: 6741 - DNA, 409 bp, Zea mays
  Clone ID: LIB3137-021-Q1-K1-B3
tcggcataacacacacagtttgattttgtctctttttctccaacatgttaccgctctcgccatgtcgattatcaagtcatctttcacgccctccccacctctccccatttctctcgatatttcccaactactttctccgaccaactttcccaaagtataccactctccctgtctcttcttaatcaacccctattccctcaaattactttacaattccgtcctgtccaccacattcatgtcatctccgattctctcaatgtgtccttcattctccgtctgaaccacctcaacgtgcttctccttcactaggtgctggcgactcgctccaatgtgtaccttttgaatgacctttccccttactttgacctcctttccctcttttcttttctttcttttctcagtcttccct

SEQ ID NO: 6742 - DNA, 444 bp, Zea mays
  unsure (1)..(444): unsure at all n locations; Clone ID: LIB3137-021-Q1-K1-B5
gctgaagaaggcggcttgccctgcgcccctgctcgtcgccttggtgccgcgcgcgccatggccaagagcaagtcgtccgccaaggccggccccccgctcctcggcaagtacgagctcggccacctcctcggccggggcaacttcgccaaggtataccacgcgcgctgcctcggcggaggcgaccccgtggccgtgaaggtgctggacaaggccgggctggccgccacgggcatggcgtcgcggctcctgcgcgaggtgtccgccatgcgccgcctgagccaccccaacgtgctccgcctccacgaggtgctggcgacgcgctccaaggtgtacctcgtgatggagctggccccgggcggngacctcctgtcccggctggcgtcgctgccgtcgcgcaggctccccgagcacgcggcgcggcgcgtgttcctccagctggcgtcg

SEQ ID NO: 6743 - DNA, 440 bp, Zea mays
  Clone ID: LIB3137-021-Q1-K1-B6
cacagtcatccacactaacgaacgaactcttgctccgatcacgagctagctgaggtcgacgatggcggctgtgctgaacagcaggaagacgccgcaggtggtggccgtgctggtggtggtggcgctgctggcttcgtccgcgtcggcggcgatcacctgcgggcaggtggggtcgtcgctggcgccgtgcatcccgtacgcgacggggagggccagcgcgctccccgcgtcgtgctgcagcggcgtcaagagcctcaacagcgcggcgcggaccagcgcggaccgccaggcggcgtgccgctgcctcaagagcctcgccaacagcgtcaagagcgtcaacatgggcaccgtcgccaccatccccggcaagtgcggcgtctccgtcggattccccatcagcatgtccaccgactgcaacaagatcagctaagttacgacga

SEQ ID NO: 6744 - DNA, 333 bp, Zea mays
  Clone ID: LIB3137-021-Q1-K1-B7
ccagcacacagtggagctagctagctagtataggtcaatcaccaaaatggcgaggcagctggttgtgcttgctctgcttttcgtgatcgccggtgtggcgcatggcgcgggggagtgcgggagagcctccgccgacagggtggcgctaaggatggcgccatgcatctcggctgccgacgacccgcagtccacgccgaccagcagctgctgctccgctgtgcacaccatcgggcagagccccagctgcctgtgcgccgtcatgctgtccggcaccgccagggctgccgggatcaagccggaggtcgccattaccattcccaagcgctgcaacat

SEQ ID NO: 6745 - DNA, 405 bp, Zea mays
  Clone ID: LIB3137-021-Q1-K1-B8
cacaaacaaacatccacattcattggtggtccatcaaattggtagtgattggtctgatcgtttgtttcccaatttctagatatttagcataaacatttgctcgacacaagttttttttgccaactggtccttttttttttgccatgtagggacccatattctaaaggagttacattaagatccctcaaaatttctgatttgccggatccaccaactatggtcaaggccagcagccgtgaggatgcccaaccaatgactgaatcatctaatgctgaggtgaacacatcaagtgctgtggctgctggagagtctgagtcccatgaaattggatcgccgaagagtctaaaagatgctatcaaactcaaacataaaagaaagaagaagaaaagtgacaggagttagttt

SEQ ID NO: 6746 - DNA, 312 bp, Zea mays
  unsure (1)..(312): unsure at all n locations; Clone ID: LIB3137-021-Q1-K1-B9
ggagacggacccgtccacaatatcaccaccctccctcccgtttctattttatcctttttccccccnccaggcggtccagaagacagccatacttaaaacgcacactccccctcaccaacacaatctcaaactttaccatcccactaccacgcaccctcacaacaataaccccaccagcatcctaaatctgcccgcacgtactcctctgaccatccatattcgccccaaccccgttcgcatattcatcgacacctttataaatacaccccacatagtctgacaatccaatctataaaacgaataactccgaca

SEQ ID NO: 6747 - DNA, 424 bp, Zea mays
  unsure (1)..(424): unsure at all n locations; Clone ID: LIB3137-021-Q1-K1-C1
ggagctatctcggttcttgccactggtgtcacaaccacgatcttggacagagctggccggagaatcctcctcattatttcttcttctgggatgaccctaagccttctggcagttgttgttgtattttgcatcaaggataacattgcacaagactctgacttgtacaacatcttaagaatagtgtccttggttggtgtcgtggcttatgtcactgccttctccttcggtatgggttccattccatggatcataatgtctgagatccttccggttagcatcaagtgtgtggcaggaagcttcgcgacccttgccaactggttgacgtcctttggaataacaatgacagcaaatttgcttctgaactggagcgctgcaggtacatttgcctnctacatgacggtgagtgctttgactctcgtcttcg

SEQ ID NO: 6748 - DNA, 362 bp, Zea mays
  Clone ID: LIB3137-021-Q1-K1-C11
acggacgcgtgcgcagacgcatcaccctactcgccgtctctcgtttagctttgattcctacctcctcgcctaggggtctggggctattttatcggcggactggaatcgcatagaggcccgtctcatccgatttaaggaagccatggaccacaaggaggctgggttccaggcccacgaggtacccatcctctgcatcaataactgtggcttcttcggcagcgcggcgaccatgaacatgtgctccaagttccacacggagatgataacgaatcatgatcaggccaagctggctgccttctctatcgacagcatcatgaacggcagctacgccgtcatggtaccagttgttgcttgcatcaaca

SEQ ID NO: 6749 - DNA, 435 bp, Zea mays
  Clone ID: LIB3137-021-Q1-K1-C2
cgatggcgaaccctcgcgtcttcttcgacatgaccgtcggcggcgccccggcgggccggggcgtgatggagctgtacgccaacgaggtgcccaagaccgcggagaacttccgcgcgctgtgcacgggcgagaagggcgtgggcaagtccgggaagccgctccactacaagggctccaccttccaccgcgtcatccccgagttcatgtgccagggcggcgacttcacccgcggcaacggcaccggcggcgagtccatctacggcgagaagttccccgacgagaagttcgtgcgcaagcacaccgcccccggtgtgctctccatggccaacgccgggcccaacaccaacggctcccagttcttcatctgcaccgtcgcgaccccttggctcgacggcaagcacgtcgtcttcggccaggtcgtcgagggcatggacg

SEQ ID NO: 6750 - DNA, 419 bp, Zea mays
  unsure (1)..(419): unsure at all n locations; Clone ID: LIB3137-021-Q1-K1-C3
gcgacgtggtgatgatgtacgggacacggcgctgctggagccatccaagcagcccaagcgagcgactctctccgtcaaggtgagcctagcccagatgcttcgtggcatgatcatcatggacgtggtcaccctggaggaggcacacatcgcagattcgtagtacacagctctaaggtatcataattcctggattccaaatctgagacggatgttgatgttgactataacagcttgtactcaaagcagggctttctacagggtgaggtgctcgtttcgttgtggctagagtaacttgcgtactctatctcatcgtttttaatttatttagttttcacaacaactgttttgtgatatgtgctatcacttgatacttagattcatgctattagagattcatacctcangtttgcaagatgtat

SEQ ID NO: 6751 - DNA, 414 bp, Zea mays
  Clone ID: LIB3137-021-Q1-K1-C4
cctggttggatcccttcggacttccgcagattcccgcgcgggggtgtttgatttggatgagaggagcgcggcggcgggatggggaccccttcgcagggctcggcggccgtgacggcggcccgggtcgacctctgcgcgctcgacctcatgcctgtctttgccaaggagatgatcgccggcggcgtcgccggcgccttctccaaaaccgccatcgcgccgctcgagcgcgtcaagatattgctgcagaccagaacaaatgagtttgggtctcttggagttctcaaatcattgaagaaactgagacaacttgatggagtcatggggttttacaaaggaaatggtgccagtgtgatgagaattgttccttatgctgcattacatttcatggcatatgagcggtaccggtgttggatt

SEQ ID NO: 6752 - DNA, 207 bp, Zea mays
  Clone ID: LIB3137-021-Q1-K1-C5
gatcgggtcaggtcagtgctccgtgttgcgttttcttaagaacacgaaaaaaaaagagcggagagtttctttcgggtcctctttttctttgattgtcgaaaggccgctcctttaggagatttgcgcgcttctcgtcgagattagccgccggttctcggatcgatctgtttgcggtggatgaattctgaggtccagaatagagttgta

SEQ ID NO: 6753 - DNA, 437 bp, Zea mays
  Clone ID: LIB3137-021-Q1-K1-C6
ggcctgtcacaggaagggctggtgatgtgcttgctgctgccaacacagcagcagaagtcgcaatgcggcttgtgagacctgggaagaaaaataaggatgttactgaagcaattcagaaagttgctgctgcttatgattgcaaaattgtggaaggtgttcttagccatcaactgaaacaatttgtgattgatggtaacaaagttgtgctcagtgtctccaatgctgatacaaaggttgatgatgctgaatttgaagaaaatgaagtatatgcaatcgatattgtcaccagcactggggaggggaagcccaagttattggatgagaaacagaccaccatctacaaaagggccgtagacaagaattatcacttgaagatgaaagcgtcaaggtttattttcagtgagatcagccagaagttcccaatcatgccttttact

SEQ ID NO: 6754 - DNA, 328 bp, Zea mays
  Clone ID: LIB3137-021-Q1-K1-C7
ctcgtcgtcataatcttccgttcgacaacttctcgctcctcactgcaaaaatggccctgaggcgagtttgtaggtcaccgttgccctccaataaaaactcggataaattgacgaaccctacgttcgagaaatggccgaagcacatctgcataattggctcgtcgcctctctagaaggacctgcacctgagtcttcaagagccacaacgtcttgctcatttagttctagcatctcatactcaagcgaaagcctatcgacccttagacgctcatgcaggacagccgctccattcacatgcacaacgttaccaaccggttggagatgcttt

SEQ ID NO: 6755 - DNA, 403 bp, Zea mays
  Clone ID: LIB3137-021-Q1-K1-C8
cgccatcttccgctgcgtgccggctgcgtttgcgtaggcacatcctgctgcggccctgggacctccgcctccgcgcgccccactccatcgccgacctctcccgctcctccagctcctctagttccgccccgacccgggcccagcctctgggctccaggccggagaacggcggcggcttccgctcggtggagaaggacccgatcaagctgcgggagcgctacgtcgagtggctctaccagcacaaggagctcggcctcttcttcgacgtcagccggatggggttcacggaggacttcctgcgccagatggagccgcggatgcagctggccttcgccgccattgcgggagctcgagaagggcgccatctccaacccggtctaggctcgcatggttggccactact

SEQ ID NO: 6756 - DNA, 320 bp, Zea mays
  Clone ID: LIB3137-021-Q1-K1-C9
gggcgaccgacgcgtgcggaattcttccacacccattgacactaatagtttagcctttatcggcaccttcgtgagcggggttccggggtgcaatcacctgctggagcgcggctgccgtcccgcggtgttcgaggccagcgccgtcatgggcaccttgtggacgcgcgtgccgcacagcacggcgctgcagacgccgcggcctatataccagtactccgacttcccatggccacacaccgtcacctaagtgttctccgaccaccgacaggtcatgttctacctggacacctactcgcgccacttctgcatgctggactgca

SEQ ID NO: 6757 - DNA, 384 bp, Zea mays
  Clone ID: LIB3137-021-Q1-K1-D1
ctcgcagctccaaagcattgaagcaaagaaccctgcaactgcaacaagccctgacgcttaagtacatcggccggcactcgatcggcagcagatcaaagatggcggcggaggagggggagaaggcgaagagcggcggcggcgggcagcagatgacggtggtgcgggggctggacgtggcgcggtacatggggcggtggtacgagatcgcgtcgttcccgtccttcttccagccgcgggacggccgcgacacgcgcgccacctaccggctgctggaggacggcgccacggtgcacgtgctcaacgagacgtggagcaagggcaagcgcgactacatcgagggcacggcctacaaggccgaccccggcagcgacgaggccaagctca

SEQ ID NO: 6758 - DNA, 423 bp, Zea mays
  Clone ID: LIB3137-021-Q1-K1-D10
gacgagagccgcttcacgcacgccgactagttgagctttacgccgaacttccgctccagccgttcggggagcttcttcaggaacaggacgcggctgctctgccgctagtgcggtggccacactggctatgcctactaagactagggtcccgccctgcgctacgaggggcacagcagatgacctgtacatgagctccagctccagggtgaagcatgcacgtcccctcggacgaagtatgttatcaacatcagcgcgctgccgccgttatcagacgactctggtgctctcctctacccgtgatggcgatctggattctcagcttgcgccatgtgtaaattaaggcatagtgggtgtcttcagttacttcccgagcagaaccctgttggtgtattgcacgtcacaagtgacatcatgttcatattt

SEQ ID NO: 6759 - DNA, 452 bp, Zea mays
  Clone ID: LIB3137-021-Q1-K1-D11
gcaacaatggccgcctccctcccgaccaccgtcgcgcgcctcgcggccccggccttcgccggccggtcgcccaaggctccctccgccaccgccctcccgcgtgccgccgccttccctgcaatcgccgtcgcggcggcgcccctgcgcccgcgccgcgcgccgaggccggtggcggcccgggccgggggcgaggagagggagacgatactgctccccgggtgcgactacaaccactggctgatcgtcatggagttccccaaggaccccgcgcccacccgcgagcagatgatcgacacctacctcaacacactcgccaccgtcctcggcagcatggaggaagccaagaagaacatgtacgccttcagcacgaccacctacaccgggttccagtgcaccgtggacgaggagacgtcggagaagttcaagggtctgcctggtgtgctgtgggtgct

SEQ ID NO: 6760 - DNA, 453 bp, Zea mays
  unsure (1)..(453): unsure at all n locations; Clone ID: LIB3137-021-Q1-K1-D12
gggncgacccacgccgtgcgcggagatncacaagaagatacaggactcgtgcttcctcgactgccgcccgacccatggcggacgccggctctggcggcgcggccacgtcgtctacccctccccgctccgccgaggacatcttcaaggactaccgcgcccgccggtccgccatcctccgcgccctcactcacgaggtcgaggacttctacgcgcagtgcgatccagacaaggagaacctgtgcctgtacggctacgcgaacgaggcgtgggaggtggcgctgccggcagaggaggtgcccacggagctgccggagcctgcgctggggatcaacttcgcgcgcgacggaatgaaccgccgcgactggcttgcgctcgtcgccgtccactccgactcgtggctcctctccgtcgccttttactatgccgctcggcttaatcgtaatgaccggaagc

SEQ ID NO: 6761 - DNA, 383 bp, Zea mays
  Clone ID: LIB3137-021-Q1-K1-D2
ccaagcttccctttcgttcctcctcgccccagcgacgcggcctcccgtagaccgagcaaggcaacccaccactgagaggcacgcagaggagcaggaagccggagaccaagatgtcgtcggtgttcagcggcgatgagacggcccccttcttcggtttcctcggcgccgccgccgccctcgtcttctcatgcatgggcgcagcgtacgggaccgcgaagagcggcgtcggcgtggcgtcgatgggtgtgatgcggccggagctcgtcatgaagtccatcgtgcccgtggtcatggctggtgtgctcggtatctacgggctcatcatcgccgtcatcatcagcactgggatcaaccccaaggccaagccctactacctttttgat

SEQ ID NO: 6762 - DNA, 350 bp, Zea mays
  Clone ID: LIB3137-021-Q1-K1-D3
gctgcagctgcgacggatactgagcgagaagccccccctccctacctgctttcttcgacgagaagctccgccccactccatggattcgatctgggaggcgaggagctgaggccaggacagggggaggagctgctggggggcacggacaggatagcgcggctaagcggtaaccgcggcagccatcatctggagacgaggcggaagcggaggcgatggcggcgtcttgaggaggtgggccgtcctgctctgcgtcggcagcttctgcctggggctgctcttcaccaacagaatgtggacgctgcctgaggcaagtgagattgctaggcactatgcgaatggggaggaaggca

SEQ ID NO: 6763 - DNA, 297 bp, Zea mays
  Clone ID: LIB3137-021-Q1-K1-D5
gggaggttaatgaaaattctggtctgacatccacaacatgcacggagaggttggctctgggagatgtcactgcgctcattcggatccacatcaaagatggaggtggacgaaggcgacaaagctactagctgatgctgaccgcagcacatgacggcggtgctggggcttgacgtggcgccgtacatggtgcggcggtacgagatcgcgtcgttcccgtccttcttccaggcgggggaccgtcgtgacacgcgcgccacctaccggctgctggaggaccgtgccaccgtgcacgtgctc

SEQ ID NO: 6764 - DNA, 399 bp, Zea mays
  Clone ID: LIB3137-021-Q1-K1-D6
gcagcacactcagctatccagcaaaagagatcgagaggcaggagtcatggccaccgtgggcgccgccgtggtgaccaccatcgttgcccgcgccgcgatcgccaggcccaatgctctagggctgcctgcgctgagggcgaggagtgagagggtgcggtgcagctacgccaaggacgccaagaacgcggccccagtcagcaccaagggcgcaggcgcgtcgctgctcgccgcagcgggcgcggtgaccgcgtcggcggggcccgcgctggcgctcgtggacgagcgcatgtccacggagggcaccgggctcagcctcgggctcagcaacaacctgctggggtggatcctcctgggggtcttcggcctcatctggtccctctacaccatctacacctttga

SEQ ID NO: 6765 - DNA, 394 bp, Zea mays
  Clone ID: LIB3137-021-Q1-K1-D7
gacgacttgtttcattgattcttgaagagtatcgagcttcttttgcaccacaaggtctaggatgtcttgcaactgctgatcaagctgcggctgcagctcaagctgcaagtgcggcaagaagtaccctaacctggaggagacgagcaccgtcacgcaggccaccgtcctcctcggcgtggccctcaagaagaaggcctgccccaacttcttcgaggcctgcttttagtccggcgaggcacgccacgcctgccgctgcagttacacgctcatgtgcgacccctgcaactgctgattacatcaatcgacgaccatggatatgattatcatctatatagctggcgctggctgcagaaccataataagcgaggacgagctcactgtcaatacataagta

SEQ ID NO: 6766 - DNA, 429 bp, Zea mays
  Clone ID: LIB3137-021-Q1-K1-D8
agctgactagcatctgtgtaatcggtgaccgctcttgacttgttagctccccgctcccgcggtagctaaagctagctaggtgggtggtagcaccaccatggcctcgcccaagcattctcatcgccatcatcgtgcggcggcgacgaagcatcgtcggccgctggcgctgcggcgtgcgatgctgcattcgtgcgtgtgcttcctggtgggtctcgtgaccggcctggccccttccgactggacggacgccgcctcgcgcgcggccgtgcacgcgaacggcgcggccacggcgcaggtgttccgcgcgctgcacgccatgaaccagacggcggcggcgggggcactgggccagctgctggcgctgcagcactaccagcagcagccagtggtggagaaggagaaggagaaggagaagcctctggatctggt

SEQ ID NO: 6767 - DNA, 429 bp, Zea mays
  Clone ID: LIB3137-021-Q1-K1-D9
ggcgacccacgcgtgcgctcattgaccctacggcaagctcatactagtgaatctttaacacgacctcaagtgacatttgttcaggggctgactagaggggagctcaaaatggctacgccagactggccttgacgtttgccttgctcatagatactatggacagcggccctaacactctactgcaagattgaaacgcatctttcatattagtgatgacaacccttatcctatactccagatcgatccaacactaccgaagcaaatccatcattgcaaatcgcatgcccttaatgtaacaactcccgcaaattatcctcatgtactgcaccgccagatacaccgtgacttcactaagcctctcattgtgatatgctcaaagaaccttcttcccacaagtactgccaatggaacctatctgaattttatcat

SEQ ID NO: 6768 - DNA, 434 bp, Zea mays
  Clone ID: LIB3137-021-Q1-K1-E1
gttctccctccctctctgcctgaccagctaggatcagcggaagcagcaatggtgatggcgtcgtcgagcgggctgaggagctgcagcgccgtgggcgtgcccagcctgctggcgccgtcgtcccggtccggccgcctggcgccgttctgcgccaacgccaccacctctggccgcgtcaccatgtccgcggagtggatgcccggccagccacgccctgcccaccttgacggctcctctcccggggacttcggcttcgatccgctgggcctcgcgaccgtgccggagaacttcgagcggttcaaggagtcagaggtgtaccactgccgctgggccatgcttgccgtccccgggatcctggtgccggaagctctgggcctgggcaactgggtgaaggcgcatgagtgggcggccgtccccggcgggcaggccacgta

SEQ ID NO: 6769 - DNA, 464 bp, Zea mays
  Clone ID: LIB3137-021-Q1-K1-E12
gcgtgcgggcgaagctcgactccaagaggaccaatcttaccccgtttactgccaaggttaaggctgcgtgcaagggatggtacaagaccatggtctcggacagcgactacaccgagtttgagaacttctcaaagtggctcggcgtgactcagtgagcggcaagggtagttaagttttgagtagctcagcttatgttgagaggaaagaggatccatcaaatctgttttatcctgcatcatcataacaagttgctacaagtcttgcatgttcgtgttgtttgtgcatttccgcgagaacatagtatttttatattcgaaccagttgtctgaactgtgcttggatttgtgcactgatgcttggctcaacctttctgtatcacgaatgagctggtccttgctgaaaatggtttacagaaaaagaaaacatgaatacttcgttcatgaaaagatgaaatttagaaagat

SEQ ID NO: 6770 - DNA, 410 bp, Zea mays
  Clone ID: LIB3137-021-Q1-K1-E2
gtacaacgcctccgccgctccttccattagctcagacatggttctcggcctctacacctgggccgacatcgacgccgacggagcaccccgcctcgaggttgccgatggcgaggagttcgtccgtgtcgatcgcgttgtcgagcttgccctcggtccccgggtgctgaaggcccctggaaccctttacctcaccaccaggagggtgatttgggtcagcgatggcggcgagggctacgctgtggacttcgttgccatctcgctccacgccgtgtcgcgtgatcccgaggcgtatccatacccctgcatctacacacagatcgagacggaagctatttctgacgaggagtctgatgtgtcagattctgaaacaaatggagaactcgagctctcaaaagttatggaaatgcgca

SEQ ID NO: 6771 - DNA, 302 bp, Zea mays
  Clone ID: LIB3137-021-Q1-K1-E3
cgcaggaccctggtggctgtgtatttcgattctcatagcttctcttttgataaggaatccggaggaacataagcatatcccttaggaagacgttgattctgtgtagaagcttgatctaatgtcataacgagctctttttgaaacatttctctctgatgcataattatcttcttatcagttgtcttcttgtcttcatcttctagtttctctgcaccaatagtaggtctctgtgtaatttgcttaccacttcgatgtcctctgatactcattcttgcgtttgaatgatatcaatgatcgatatc

SEQ ID NO: 6772 - DNA, 443 bp, Zea mays
  Clone ID: LIB3137-021-Q1-K1-E4
caagcagaccccagcagaagaagcgaagtcgtcgccggagcaggaggaagagcgagcagcaagatgtcgtggcaggcgtacgtcgatgaccacctgctgtgcgacatcgaaggccagcacctcagcgccgccgccatcgtcggccacgacggcagcgtctgggcacagtccgagaacttccccgagttaaagcctgaggaggttgctgggatgataaaggactttgatgaacctggaactcttgcaccaactggtctttttgttggaggtacgaagtacatggtgatccaaggtgaacctggagttgtcatccgaggaaagaagggcactggaggcattactatcaagaaaactggcatgtccttgattatcggtatctatgatgagccaatgacttcagggcaatgcaatatggtggtggagaggctcggcgattacctgat

SEQ ID NO: 6773 - DNA, 437 bp, Zea mays
  Clone ID: LIB3137-021-Q1-K1-E5
gctaactacccccacgctggctcgccaccgccgccgcagcaggcgtgggaatctgggcggcgccccgcggagaagaggaggcagcgcgctctccgtccgccatggcgggctcttccgaccccgacaagctcatgagcaaagccgacaaactaacaaaattgagttttacaagatggaatgctgattggaaaagcgctacctccttgtatgagcaagctgcaattgcgtataggttcagaaaggacaatgagaaagcaaaagatgcttttgagaaggcctcaaaaggacaggaaatgatctcctcaccatgggacgctgctaagcatatggaatctgctgctgctttagcaaaggagcttgggcgctggaatgaagtatctgatttctatcacagagcttcagaattataccgtgaatgtggaaggccacaacctgca

SEQ ID NO: 6774 - DNA, 434 bp, Zea mays
  unsure (1)..(434): unsure at all n locations; Clone ID: LIB3137-021-Q1-K1-E7
cacccactctactactcgaagttactaccagcagcttgcttcaacagtagaagagagcgagaggatggcgtcaccgaagccctcgtcggcggccctgctcctcctggcggcggcggccgtgctggcgctggcgcgcgcggacctgacgcacgacaactgcgtgaagaacaagaaggtgacggtgcagaacctgtgcagccacgacgtgacgctgacgctggagccgctggccaacagcccgccgctgttcgcgggcacctacacgctgcacccgcgcagccacgccgagttccccgtgtgctggtggacggggcgcctgcgcgcgcccgacgccgcccaggtggagttccacgtcggcgtcgacggcggctccttctacctggcccccaacgcgcagccgggccagcgcgtnccggtcttcgtcaccccgcacg

SEQ ID NO: 6775 - DNA, 445 bp, Zea mays
  Clone ID: LIB3137-021-Q1-K1-E8
gtctcgtccacccgtcgtcctcctagctcctctactcgccagtcgccatgggcaagatgaagatcggaatcaacggcttcggaaggatcggcaggctcgtggccagggtcgccctccagagcgaggatgtcgagctcgtcgccgtcaacgaccccttcatcaccacggactacatgacctacatgttcaagtacgacaccgtccacggccactggaagcacagcgacatcacactcaaggactccaagacccttctcttcggtgacaagccggtcaccgtctttggcatcaggaaccctgaggaaatcccgtggggtgaggctggcgctgagtatgtcgtggagtccaccggcgtcttcactgacaaggacaaggctgctgcacatctcaagggtggtgccaagaaggttgttatctctgccccaagcaaagatgcacccatgtt

SEQ ID NO: 6776 - DNA, 328 bp, Zea mays
  Clone ID: LIB3137-021-Q1-K1-E9
ggcgacccacacgtgcgaacgtgaacaccactactgttaccaaccagttggacgtttacacaactatcatcttcctaggtgcgcgggtagactttgatatggccttagctagaacgatcctcaacaatgccataaatgcacgagcgcagactctggataacccggtgctcgccgcaaccctgaagacagatcccaaacttcactcgatgatctcaacctttgcagccgactctgccgtctcatgcgagtcaaaccgcctagatgttgcctagtttgatcgctacgcccgcaatatactctaatcatggcaagacctccacgactttaa

SEQ ID NO: 6777 - DNA, 429 bp, Zea mays
  Clone ID: LIB3137-021-Q1-K1-F1
ctcgccgtcgccaaccatcgccgcctcgcgtccggacccgccgttcctccgaggaaatgggtgcactgcaaccctcattttcaccagcaatgactttgaagagtagctgcagcgccctgaagttcccaaaaactgcactgttatctggttttggtggcattccacgccttcaagatgcgcaagacaggaacactagcgtcgcttatttgatccccaaggctgcttcagtgactgaccagtcaatagcagagccaccaaaaaccaagcaaaataggcacacagtcgacccaacagctccagaatttctgccactcccatcttttgaagaatgctttccaaggagtaccaaagaatcaagtgaaatcatccacgaggaatcaggtcatgtcctcaaggttccattccggagagtccatttgactggagatc

SEQ ID NO: 6778 - DNA, 458 bp, Zea mays
  Clone ID: LIB3137-021-Q1-K1-F10
gcggagagtgggcgactggcgacgcggtctccctgccccccaattcccaacggccggcggcgcgacaccgggatccggatcccatcgcctgcccggagcctcgattcgggcgcggcggggacgacgattcgaccgcgtcggtaaccaggcaggggaaaggaggggatgagcttccaggacctggaggcgggccacgtccgtggggcgccgcccggcggcggccggaggagcggccgggcggggggcgccggcgccggcgccggcgcgtcgcatgccgtggcgtcgggcgtcttccagatcaacaccgccgtcgccacgttccagcgccttgtcaacacgctcggcacgcccaaggacacccccgacctccgcgacaggatacataaaacacggcaacacataacacagctagtgaaggatacatcagacaagcttaaacaagccagcgaggcggatca

SEQ ID NO: 6779 - DNA, 329 bp, Zea mays
  Clone ID: LIB3137-021-Q1-K1-F11
cgaccgacgcgtgcagacttctactccacttcttaccaattctacttcatcttatggttacataaaattttgtgggggggcggtggcgacttcttatgtgtagtacctaatcttcatccgccggcttgcctgggccaccagcaacgagtcgctgtagaatgccttcgcctcctactgcgagatcctcaactccaaggtcatcaccgaccggaagacggcgaggtctcgctgcttcggattctttaccttctcctgcgataactccattctcgacgctatcgagaacatgaactgcaaggatcttgacagtcgtaacattacctgtaacc

SEQ ID NO: 6780 - DNA, 416 bp, Zea mays
  Clone ID: LIB3137-021-Q1-K1-F12
agcgagctgaggagagatggaagcgcagaacggctacagcccgcttcttgccggggacgacgactaggcggcggcggcggcgatccacgccaccggcgccggtgatgaaggcgacgacgtcaagctcaggctgctcgggtacaagcagcagctcaagcgcgacctctcgtaagttctttacccttaccatccctgctcgatcgatcagctctcgcgcctctgttcgtcggaacaaacacaacatggtccgcgctgtctctgcatgttactcgcatcgcgcagggtggtagccaacttctccgtgagcttctccatcgtgtcggtggtaacgggcgtgacgacgctgttcgggacgggcctccagttcggcgggccggcgacgatggtgtacggctggcccatcgccggcgccttca

SEQ ID NO: 6781 - DNA, 407 bp, Zea mays
  Clone ID: LIB3137-021-Q1-K1-F2
cccacaccccccgagctgagcttagctccactccagctccaatcacagtcgtgaccagagcgcgagagctagctagagggccgtgaaaatgccgatcaataggatcgccctggggagccaccaggaggtgtaccacccgggcgccctcaaggcggcgttcgctgagttcatctccaccctcatcttcgtcttcgccggccagggctccggcatggccttcagcaagctgaccggcggcggcccgacgaccccggcgggcctgatcgcggcggcggtggcgcacgcgttcgcgctgttcgtggcggtgtcggtgggcgcgaacatctccggcgggcacgtgaacccggccgtgaccttcggcgccttcgtgggcggcaacatcaccctgttccgggggctcctgtact

SEQ ID NO: 6782 - DNA, 176 bp, Zea mays
  Clone ID: LIB3137-021-Q1-K1-F3
gtcgcggtagccggctgttgcggaggatgtatcaggcaggccatggcgtcttcatcggcgagcccttctgccgtcctcgagattcacaatgatcttgaggtccaggccaacgcccttatcaagatccataaagacattgtcaagaaccaccaggtcctgtatgcatttcatcatta

SEQ ID NO: 6783 - DNA, 433 bp, Zea mays
  Clone ID: LIB3137-021-Q1-K1-F4
cggacgcgtgggcgcgagtggggctccaagcccggcagcggcggcgccgcctccgcgcagggtgaggccatcgaccggcgggagcgcctccgccgcctggccctggagaccatcgacctcgccaaggacccctatttcatgcgcaaccacctcggcagctacgagtgcaagctgtgcctgacgctgcacaacaatgaggggaactacctggcccacacgcaggggaagcggcaccagaccaacctcgccaagcgcgccgtccgcgaggccaaggacgcacccgcgcagcctcagcccaacaagcgcaagcttgccccccgcaagtctgttaagattggcagacctgggtataaagtaaccaaacaatatgatcctgagatgaagcaacactcgtttctttttgaaattggttacccggaaatcgaagatattg

SEQ ID NO: 6784 - DNA, 312 bp, Zea mays
  Clone ID: LIB3137-021-Q1-K1-F5
ctctcgctcacccagaatacttttatctcttctactcgccagtatccatgcgcacgactgagagctgaatcaaccgattcggaaggatctgcactctcttatccagggtcgccctccagagctagcacttccagctcctcaccttcaacgacccctttatcaccacatactacatgacctacatgttcacgttcgacaccgttcactgacactggaagcacaaccacatgacactcaacgactcctagacccttctcttcacagacaagccggtcaccgtctttggcataaagaaccctgattatataccgt

SEQ ID NO: 6785 - DNA, 401 bp, Zea mays
  Clone ID: LIB3137-021-Q1-K1-F6
agtgaggacacaaggactgcgaccaagcttagtgacgacgacgcgacaatcaagtccgtggctccggcggtagactctgatatggctttagctcgtctgtgcctcaacagggccatcgatggccgcgcgcaggctctggctaggccggcgctcgccgcaaccccggcgacagatcccaaacttcactcgcttctctcaacctcggcagccgactctgccgcctcaggcgaggcaaaccgcctagatgtcgccgtgtctgagcgctccgcccccaatcgccgctgggcatggcgagaccttcgcgacttcaccccgttcagcctcgtggacagtctcgggagcgcgctgtcacaggtgtcggagaccctgtgccgaccgctggagcgcctggcgccgtcgcg

SEQ ID NO: 6786 - DNA, 440 bp, Zea mays
  Clone ID: LIB3137-021-Q1-K1-F7
cagcacatgcagacattcattgacaagttttggtacaatgcaaagagagcatcacttgtgcaatcaagaatcaaggcattggagcgaatggaacatgttgatgcagttgtcagcgatccagactataaatttgaatttccgaccccagatgaccgccctgggccaccaatcatcagcttcagtgatgcctcatttggttaccctggagggcctaccttgtttaaaaatttgaattttggtatcgacctggacagccgcatagcaatggttggtcctaatggcattggcaagtccactatactgaaactaatttctggggatctgcagccaacttctggaacagtatttcgctctcccaaggttcgcatggctgtattcaatcagcatcatgttgatggccttgatttgacggtgaatccccttttgtacatgatgaagtg

SEQ ID NO: 6787 - DNA, 434 bp, Zea mays
  Clone ID: LIB3137-021-Q1-K1-F8
cagggaaggaggccagaatcccccgtcgacgcgcacgcgccgtcgcgcagagctccgcgtgcgcatcggccaccgcccacctgcgccggccgccggcggcgtggatggggaagctcgccgccctgaagcgggaagcggtcggggtggactaggtgctcggcgaattcctagtttagactttagaagcagtaggtggaggtgatgcggggcggagcgatgaaggctctgcggcgatccagcacctcctcgccgccgtcttccccgcattttcattcgtggatccaccgccggtacctcctcgttacctcgtcggcgacgtcctctttgtctgcatcggcgaattcggccgcggagggttcggattcagcgtcagcgtcagtggtggcagcttcctcgtcgccctcgttggatccttcgtctccgaacatggaccg

SEQ ID NO: 6788 - DNA, 369 bp, Zea mays
  Clone ID: LIB3137-021-Q1-K1-F9
gcgaccgacacgtgcaaaattgcacacaactgcttctccctaccagtttatcctcaacaccactataatctccctagcgccgctggtcgactctgatatggctttagctcacatgaacctcaacatggccatgaatccccgcgcgcatgctctggcaaacccggtgctcgccgcaatcccgaaaacagatcccaaacttcacttgcttctattaaccttcgcagccgactctgccctctcattcgaggcaaaccgccgagatatcttctagtctgagcgctgcaaccccaatatactctgctcatggcaagacctccacgacttcaccacgttcagcctcatggacaatctccagagcgcgctatcata

SEQ ID NO: 6789 - DNA, 420 bp, Zea mays
  Clone ID: LIB3137-021-Q1-K1-G1
actcgctcctgctgctcctccgcctcctcctccgctacccgcgccgcgctgcccctaccggggatgggcccgccgcggcggcgcggctctacgagggccgggtccggcacgcgcgacggcgcccggcggcgcacaccttcgaatacaccgcgcgctacgccctcgtcgacctcgaccgactgccgctccccggccacctctccgccgacgatgcccgccgcgtcgcctccacctccggccccgtgcgcctcttgacggtacccgagagcgtggggtacgagcagaacccgctgagcatttactactgctacgattctgcaggacaggggcaagatggagagctcagaacgtgcattgccgaggtcacaaacaccccctgggcagagagagtgatgtttaccttccaaccgggctctgatc

SEQ ID NO: 6790 - DNA, 331 bp, Zea mays
  Clone ID: LIB3137-021-Q1-K1-G10
cactgtccaccggtactagttgatcttatgcacgctaagaccccacatagcgctgggcagctattcgtaggcgtgttccttagcctggtccatggccacatcgtccgcgcgcattatcagttcaagaagaaggacgcggaccgcatgctgctcgagacctatcgaagaccggatcgtcatcttgtcccactatatcttgaaacgttcataaagcgcatacagaccttttttgctagcatgcctctcgttgatttatacgtcaagtggcttaacaacagggtgcactccatcccagtgatggcgccgatcaacacggctttttcatacttgt

SEQ ID NO: 6791 - DNA, 346 bp, Zea mays
  unsure (1)..(346): unsure at all n locations; Clone ID: LIB3137-021-Q1-K1-G11
acgcgtgcgccaattgtcacttgctcttcctccaacaagtttatcattgccggncgtaatccctctttaggccgtgtattatcatggcggtgagaacaccaccaccacacctgttccaccataaaaggacgagatcatgatggcacctcgccccggtcggtacggagtacccaagtcacagatgccactgtactgaggtaggttcacggccagaacgagtactaccagttcatgaggagaagcacataagcacaagcgcacctcgggaggccgaaccatctcaccggctccttcgactctacgagaaaacgatgcaaaaatgaccctgagcacgcgcaccgtcaca

SEQ ID NO: 6792 - DNA, 352 bp, Zea mays
  Clone ID: LIB3137-021-Q1-K1-G12
accatctccaacgcagcaagcagacacagggacaggcaggcagcgagtgcaaccgcgagagcgatcagcgatgggctccttcttctcgaccttagtgacgccccctccgcccgccgccgacgacccgaactgcgccgtggtggccgcgcactccaaggccacctacgacgagcagtgggcggcccacaagagcagcagcaagttgatggtgatcgacttctcggcgtcctggtgcgggccctgccgcttcatcgagccggccttcaaggagctggcctcccgcttaaccgatgccatcttcgtcaaggtcagacgtcaacaagctcgcggaggtcgcaaggacatggaaggt

SEQ ID NO: 6793 - DNA, 419 bp, Zea mays
  Clone ID: LIB3137-019-Q1-K1-F6
gcgagagcgagagcaaagagctgaccggaacataccagctagcgctagggataacgcacaggcacggccatggcgacgcccggagagcagccggcggaggtcgtgtccgtcgagatgcccgcacccgacgggtggaccaagaagtttactcccttgagaggggggagatctgagattgtttttgtttcaccaactggcgaggaaattaagaacaagaggcaattaagtcagtacctaaaggcacaccctggaggccctgctgtttcagagtttgattggggaactggtgataccccaaggcgttctgctcgtattagcgagaaagtcaaggtatttgatagcccatagggcgagaagatcccgaagcgcagcatgaactccagtggtaggaagggtaagcaggggaagaatgaaacccc

SEQ ID NO: 6794 - DNA, 147 bp, Zea mays
  Clone ID: LIB3137-017-Q1-K1-G10
gatgggtggattcaccggccatgggtccaattattttaaggtaccggttgatttaaacgcggggctttcacccggttggatgtgaggatattatgtggtccctttttcgggggatgggttatttcattcatggctatcatattcgtc

SEQ ID NO: 6795 - DNA, 229 bp, Zea mays
  Clone ID: LIB3137-017-Q1-K1-G11
cggacgcgtgggcggacgcgtgggcggacgtgtgggcggacgcgtgggctgtattagcagggaacctctcaatgaaataactaagcatgttcaatgtcctctttttattagagagagacagggagaaaacgcggaatttgtgagacgtgtgcaattgtgcatgcagtttacgtgatcaataaagttacatggaaattattttatccacgtgcgatgcaagtggagctta

SEQ ID NO: 6796 - DNA, 455 bp, Zea mays
  unsure (1)..(455): unsure at all n locations; Clone ID: LIB3137-017-Q1-K1-G12
ccggttttcggaattacccgggctcgacgccacgccgtctcgagtcctagagtctgnnagagccgacggagggaaacgtattaagcggccatggcgatgaagcggccggggcgcatcgacccacacctgccacccgaggaggcggcacgggtggaggccgaggttcggagctacttcgacagcgtcgcgccgaggcgcccggccaagccgccgcgcagcgacccgtcggtggacaccttcgcggaacccgccgccgtcgacgccggggaccacgacttgccggagctccgcaagctgcgcgacctcgaggcgaagccccagaagctggtgttggacggagggggaggggacgtggatggcggggaggattacgtggagacgcgatactacgatggcctcataggcatcgacaagcagcatcacacgactgggacaggctttatcaaagtggagag

SEQ ID NO: 6797 - DNA, 374 bp, Zea mays
  unsure (1)..(374): unsure at all n locations; Clone ID: LIB3137-017-Q1-K1-G2
ggaagaagcgctccttgcccaccgcggttgtctcctttcggcctttccncttctcgatcgagctcgggtccttcggcgacgtgcggatttttcgtccctcccgatgcttcgcctgtatctgatccggggtgcgtggattgactaccggtgttgatttggcgaggcaatcggcggggagggagggggtattaatttcgatcgctgcgccgccgattcccccggtccttaggttcattgtgaagctgaggtgagtgtataggcataaagagagcatgaacactgttagtggtacaaagcgtgcaccaaagagacagtcgcaagatgggtctggtgataaactagtggtgatcgtggaagcaagcttcccggggggt

SEQ ID NO: 6798 - DNA, 376 bp, Zea mays
  unsure (1)..(376): unsure at all n locations; Clone ID: LIB3137-017-Q1-K1-G4
ctccgatgggccaccagctatgaccgccgnctctttcccctccgctactgctcctacccagcgccggatgcaaaggcaagatgttcggtctcgcgccgaagaagagcgacaacaccaagtactacgagatcctcggggtgcccaagtcggcgtcccaggacgatctcaagaaggcctaccgcaaggctgctatcaagaaccaccccgacaagggcggtgaccccgagaagttcaaggagctcgcacaagcctatgaagttttgagtgatccagagaaacgtgagatttatgatcagtatggtgaagatgcccttaaggaaggaatgggcggtggaggatcccatgttgatccatttgacatcttctcatcattttt

SEQ ID NO: 6799 - DNA, 381 bp, Zea mays
  Clone ID: LIB3137-017-Q1-K1-G5
agaaaatctaagaaactgaaatccaacagggtattttccctttcggctgctgcgaaactgcagccaaccaaggagtggaggagtaggagtagcggcagtcaaagcgtggcgggcggacgggcgggcaagctggaacccattggatcggtggtatcaaggaatcggaagagggacccggctctcccctccccaccccgcgtcccacgtcggttcccctaatctgcgtccgcggcgtgatatgagacggttctgtaattgctgatcggcgtgatgaattttaggccaatagttcttatcttcctcctgctcgtgctcattgtcacatcacagtttgagtggaagcagcatattggtgaggctgaggcgaatccaacagctaca

SEQ ID NO: 6800 - DNA, 407 bp, Zea mays
  Clone ID: LIB3137-017-Q1-K1-G6
atctacgagtccggtattctccgtctcccgtttgtttccactcgtcctcctgcttgactgcgtcccaccaatgagtggatgtgtgcgcgctccgacactcaaagcctcgaagccgcactcgccgaccaactagaatccattgcatcggcactctcacagcataggaagaagtaccatactgtgcgcttcccaccacgcgtgcaacgtcatttcccctaatctgcgtacgcggcgagatatgataccattctgaaattgctgatcggtgtgatgaattataggccaatacttcttatcttactcctgctcgtgctcattgtcacatcacattttgagtggaagcagcatattggtgaggcttaagctaatccaacagctacacgaatgaggcaacaagcgcttggaag

SEQ ID NO: 6801 - DNA, 288 bp, Zea mays
  Clone ID: LIB3137-017-Q1-K1-G7
gtaatagcactgataaattatacaaacgcaatactttacaccccagctccgcagaaacacggcactattcctacgggtacgggcgcacttacctgccatccacataatcatcctgaatttgcactgcaacacttacctatccaaactctattaataactgatactatgattcaccacgctgacatttatacaaatcaaacgctcctccgcctacttaaatattttaagaaaaatattatcacactacacataatttcctcaatgcatgtatcaaactaacacctgaag

SEQ ID NO: 6802 - DNA, 303 bp, Zea mays
  Clone ID: LIB3137-017-Q1-K1-G8
atcacgaatgtggaacctcaacaaagcccggttcacctcactactctgcatctcggcgttggcgtcgtcgccatggccatgcacggcagccggtcagctgggcggcaagcccctggtcaccgccgtcaccaaggacgcgtccacctccctctacacggcgccgctcaaggacggccacccgctcgtcctcgacctcactagcccggtcatctcgctggccacgtgcgcctcctcctccaagaacaacaacggcacgctcaccgtcacgctatccgccaacgccaccgacggccagaacccgct

SEQ ID NO: 6803 - DNA, 157 bp, Zea mays
  Clone ID: LIB3137-017-Q1-K1-G9
gcagggaggtcggctaggggggcagggcgatcgttcaccggccctggcgggggctcgggaggggaacgttacagggccgcaaaatatcacatccttcctgaccgtgggcccgtgccagtcgacgcttgcatcttgtggggagagcgccatcatccga

SEQ ID NO: 6804 - DNA, 337 bp, Zea mays
  Clone ID: LIB3137-017-Q1-K1-H1
accggccggaatccggtcgaccacgcgtcctttttttttagcctataccaggcatacatttttttctatatgagagaaacggacatgtttgacgtacaacacacaagcaaagtccagtgatacaagcaagaggccgtcgtgcacgtacatatttattctagcggattcgattattattccaacaacgcaacacaacatagttgcatggcataatggcattcgttcatgcacttgactcgcacggtctcgttgacgacgtcttcatcagctagggcagcgtgtaatctccgcacttgtagccgacggggcggtcggccatgttgcagcgcttggggat

SEQ ID NO: 6805 - DNA, 429 bp, Zea mays
  unsure (1)..(429): unsure at all n locations; Clone ID: LIB3137-017-Q1-K1-H10
ctccttcccggtctcctccgcccgttgccttcgtcccctccatctccggctgcgtcgccggcgagcccgacaccgcgaatcggatccgccgacaaggcgagagggaaaagatggggcttacgttcaccaagctgttcagccggctgttcgccaagaaggagatgcggatcctgatggtgggactcgacgccgccggaaagaccaccatcctctacaagctgaagctaggcgagatcgtcaccaccatccccaccatcggattcaatgttgaaactgtggagtacaagaacatcagcttcactgtctgggatgtcgggggccaggacaagatcaggccactgtggaggcattacttccagaacacccagggtctcatctttgntgtggacagcaatgatagggaccgtgttgttgaagcaagggatgagc

SEQ ID NO: 6806 - DNA, 345 bp, Zea mays
  unsure (1)..(345): unsure at all n locations; Clone ID: LIB3137-017-Q1-K1-H11
atcctttcctgactaatactcccgaaacagttcttctacatatctccgacagctacncaggcgaaccttacagcgggaactgggtccccctactatctcacatataaaagaacagacttacacacacccatctcatcagcctggtatacaccataaatgtcatggccatactgaaggcatgatcaaacatcttaccaaaccataagcactctctacaatacttgagataatcgatatatctaccaaccatcttatcatcgatatacttatacaaactgtggaccacaatatcatgccctctattgctcattacgtaaactgccacgacaagatcatgctactttc

SEQ ID NO: 6807 - DNA, 431 bp, Zea mays
  unsure (1)..(431): unsure at all n locations; Clone ID: LIB3137-017-Q1-K1-H12
cgaaaacccaaatccaaacgtcgccgcaaactgcgcgatccccaggcccaaagcgccgccggtcatgagcttcctcgccgggcgcctcgccgccaaggagggcgcgtacttcctccaggagtcaaagactgccgtcggccgcctcgcggagaagctcccgccctccgcttcggcgcccgggggtgcgtcggcgcagccctcccccgacgtgctaccggagatcctccgccactccgtgcccatcaaggggacgccgcccccggccgaagcctccctctccgcgtcctcccgctgggccctcccgccgggcggcggcgaggctgcgggcttgcaccccgacgcgctcaacccgctccgctcctacgtctcgctgccggaggccaccttcggccccaaaagatggcagcttncgaacgaacaacctaactact

SEQ ID NO: 6808 - DNA, 366 bp, Zea mays
  unsure (1)..(366): unsure at all n locations; Clone ID: LIB3137-017-Q1-K1-H2
ggaagacagagaaggaaactgcagtgaagtcgccggcgccgccgcgacaggaggaaggagcaggcagcggcaggggaggcccggcgatctcttctgttgcgtgcggcgagggagtaaaaggagccgcgacaggatgcactcctttgggcaccgcgccaacgcggtggcaacgttcgcggtcaccatactggccgcgatttgcttcgccgccttcttctccgacaacttcaacaccccgacacccactgcctncgttaagatcttgaatctaaactggttccagaaggaggccaacggcaacgacgaggttagcatgacgctgaacatttcggccgacctttcgtctcttttcacgtggaacacaaa

SEQ ID NO: 6809 - DNA, 324 bp, Zea mays
  Clone ID: LIB3137-017-Q1-K1-H4
ggaaggagtacccgcccgacctcacgctccctgacctcaagagcgggctcttcagcaccgacgagttccgcatgtacagcttgaagttgaagccctgctcgcgcgcctactcccacgactggaccgagtgccccttcgtgcaccccggcgagaacgcgcgccgccgcgacccgcgccgcttctcctacagctgcgtcccctgcccggagttccgcaagggcggcgcctgccgcaagggcgacaactgcgagtacgcgcacggcgtcttcgagtgctggctccacccggcgcagtaccggacgcgcctctgcaaggacgaggtcg

SEQ ID NO: 6810 - DNA, 314 bp, Zea mays
  Clone ID: LIB3137-017-Q1-K1-H5
gcagccaccaaaggagcataagaggtacaactccattaagctgacatatgagcagaggaaggccagcctcattgaaaggctcaaccaactcaactcctccggtggtgctgatgacgacgatgaggacgacgagtaaagtttagtgccatcgaagtggtgctatctcaatccagcgatcagcaattgtgtactgtcttatgcggggacctgtagtactgcaataggcatttttgtttaagttttgcgaggtgaacaaaactgtttctgttagtttcgagcttgagctctcaatgtttactctttacattgaaatg

SEQ ID NO: 6811 - DNA, 278 bp, Zea mays
  Clone ID: LIB3137-017-Q1-K1-H6
gtaagacatacagggcaaatgcagccaaatattcggtgccggctccccacgagcgcggagcggcaacctcattggaggactggcgctctcttctcttgcaggcggccaggtaggataaggagccacgacagcatgcagtacagtgcgcaccgcaccaacccggtcgcgaccacagcggttaatatactggctacacatagcttggacgtctactttttcgacaacagcatcagcccgacacccactgccttatcaaagatcgtgaaattaaaacggat

SEQ ID NO: 6812 - DNA, 384 bp, Zea mays
  Clone ID: LIB3137-017-Q1-K1-H7
caaggtcctgcaggcaatgcagctcatgacataaaaccgcgtcagacacatcccggtgatcgacggcacggggatgctggggatggtctccatcggcgacgtcgtgcgcgcggtggtggccgagcacagggaggagctgaaccggctcaatgactacatccagggaggctactaggacggcgtgtgcagcgacgaccccctccgatcccgccagtcagtgaagtccgcctttgaaatccaataactcggaacaatgatgatgacgaaataggccgtgttttcttggacaatgatgttaagttcggcaaggttttcctttctctttttttattctactgcgtggtctatgtgtatattgccaaaggcatgcgtgagccatgcgcc

SEQ ID NO: 6813 - DNA, 400 bp, Zea mays
  unsure (1)..(400): unsure at all n locations; Clone ID: LIB3137-017-Q1-K1-H8
gtcaagcatatactggtccattgtgacatttgtgggtagaattgcaattgaaaattcactggctgataagctggacagtgtgcggcagtacatacacgagaagctccctaaaagtttgaaggaataccgcaatttatatgttgtacaacaccgcataggcgggagactgatttttcccgaatctctaaggtttttgccattgtacatcctgcctatatgcaaatctcttgctcttcgcggaggctatgcacatgtttctcttgacaaacgatgcgctgctgctttatgcatgatgatattgcctgtaaaaaggccgctcaattttatctatccttctctgnacagagttgaataaggactcacaatggaaccaaacatggttgatgatgtttcattgaaa

SEQ ID NO: 6814 - DNA, 329 bp, Zea mays
  Clone ID: LIB3137-017-Q1-K1-H9
ctctgatctaaactacttttgaggacggactcaattccgcatcacacacatcccgttcatgggcgatattcagaggctgggggtgctctccatcctcgacgtcgttctcacaatggtggccgaacacagggaggaacttaacctactaaatgactacatccagagacgctactattacgacttgtgcagcgactaccccctgcgattccggcagttagtgaaatcctcctttgaaattcaataactttgaacaattattattactaaataagccgcgttttcttggacaattaatttaacttccggaaggaaggcctttcaattttatt

SEQ ID NO: 6815 - DNA, 270 bp, Zea mays
  Clone ID: LIB3137-018-Q1-K1-A1
gaggatgtcaagactccatcactgggctggatgattggattcatgttcgttgttagcttccttgggccgtttagtcttgttgcactacgcaaggttatggtaattgattacaagctgacttataccagtgggacagccacggctatgttgataaatagtttccacacaactacttgagctgagcttgcagacaagcaagtcaagtgtcttgggaagtacttgagcattagttttatatggaactgctttaaatggttcttcaagcgcgtt

SEQ ID NO: 6816 - DNA, 437 bp, Zea mays
  Clone ID: LIB3137-018-Q1-K1-A10
accgccgtcgccgcccagccgcagtaaggattaaggagcaggaagatgccggcggggcacgggctgcggtcgcggacccgcgacctgttcgcgcggcccttccgcaagaaggggtacatcccgctcaccacgtacctgcgcacctacaagatcggcgactacgtcgacgtcaaggttaacggcgccgtgcacaagggcatgccgcacaagttctaccacggccgcaccgggagcgtctggaacgtcaccaagcgcgccatcggcgtcgagatcaacaagcaggttaatggccgcatcatcaggaagcggatccatgtccgtgtggagcatgtgcagccctcccgttgcacagaggagttccgcctgaggaaagccaagaatgaccagctcaaggcggatgccaagctccgcggtgaggtgatcagcaccaagaggca

SEQ ID NO: 6817 - DNA, 443 bp, Zea mays
  Clone ID: LIB3137-018-Q1-K1-A11
cacgttcctttccccaactccccagcgcctcttcgcgccgcgatccagatccaggttgttgagcatgggtctggtgaaggaaggcgtcgacatggaggagggaaccctagagatcggcatggagtacaggactgtatctggtgtggccgggcctctggttatcttggataaagtaaagggcccaaagtaccaagaaattgtaaacatccgacttggagatggcaccactcgccgtggtcaagtccttgaagttgatggagaaaaagctgttgtgcaggtttttgaaggaacttctggaatagacaacaaatacacaaccgtgcagtttacaggcgaggttttgaaaactcctgtctcactcgatatgcttgggcgcatttttaatggttctggaaaacctattgacaatggccccccgatattaccttgagcctacttggata

SEQ ID NO: 6818 - DNA, 432 bp, Zea mays
  unsure (1)..(432): unsure at all n locations; Clone ID: LIB3137-018-Q1-K1-A12
ccagtttctgggtcgtagcaggaaacagggttatgtactccatgttgacgtgtttggagaaggccagcaaagcttttatttgcgttgggccttatttgagttgagcctagccatgagttccacgctctctcctcttcctctacagcactttgttagtccacaacgcgtgctactgctgcagcaacaaggcaacagacgaaatgatgaattcttctgcttgcgtctggccgaatggcgtccatgaaatgagatcgctgcaagaatttgcactgattttttttatctctctccaccaccacggactgaggattgaggagacgccaccctgatgcttatcttcttccagttcgtatacagtaacctgaacctgaaactngctgcagcttagaacatgaagctgaacactgccgacagtttatgccccctttgaac

SEQ ID NO: 6819 - DNA, 317 bp, Zea mays
  Clone ID: LIB3137-018-Q1-K1-A2
agcctctccttcccggtctcctccgcccgtttccttcgtcccctccatctccggctgcgtggccggcgagcccgacaccgcgaatcggatccgccgacaaggcgagagggaaaagatggggcttacgttcaccaagctgttcagccggctgttcgccaagaaggagatgcggatcctgatggtgggactcgacgccgccggaaagaccaccatcctctacaagctgaagctaggcgagatcgtcaccaccatccccaccatcggattcaatgttgaaactgtggagtacaagaacatcagcttcactgtctgggatg

SEQ ID NO: 6820 - DNA, 331 bp, Zea mays
  Clone ID: LIB3137-018-Q1-K1-A3
cggacgcgtgggcggacgcgtgggttgatgttttcctcctcaccattgaggaaggaatctgtgaggtcaaggccacagctggtgacacccatcttggtggtgaggactttgacaacaggatggtcaaccacttcgtccaggagttcaagaggaagaacaagaaggatatcactggcaaccccagggctctccggaggctgaagaccgcttgtgagagggcgaagaggactctgtcttccactgctcagaccacaattgagattgactcgctgtatgagggcatcgacttctactccactatcacccgtgccaggtttgaggagctcaacat

SEQ ID NO: 6821 - DNA, 435 bp, Zea mays
  Clone ID: LIB3137-018-Q1-K1-A5
atcgaggtcgtcaagtgctccctcctcggcttcgtcctctccaacctgctgctcgtgctcggcacgtccctcttctgcggcggcgtcgtcaacctcggctccgaccagccgtacgacaggacccaagcggacgtcagcacgggcctcctcatcctcggcgtgctgtgccagtcgctgccgctcatgctgcgctacgcggtgggcgccggcgagcactccgtcgccgcggccaccacggtgctcgacctctcccgcgcctgcagcgtcgtcatgctgctcgcctacgtcgcctacctcttcttccagctcaagacgcacgcgcagctgttcgagccgcatgaggtggacgacggctgcgaggcggaagaggacgagcaggccgtcatcggcttcgccagcggcttcttctggcttgccttcaacaccgtgctcatc

SEQ ID NO: 6822 - DNA, 444 bp, Zea mays
  Clone ID: LIB3137-018-Q1-K1-A6
cttcctacttgccattctcccatccagcacttcagggcgtctcctcctcctccctcccgcggttatcgccgcctccatttccaggacgcgtcgaattcctccatctaccgcgccggccgccgaggcccgagggggaggaggatgctgggcgccgcgaggaggcagcttggatccggtcccatgctgggacaggttttgcgaaggctccgcccggcggcggcggctgaggtggcgaggggctactccgctgcggcgaaggagatgactgtccgtgatgcattgaactctgcactggatgaagagatgtctgctgatccttctgtttttctgatgggagaagaggttggagagtatcaaggtgcatacaagatttctaagggcttgcttgacaagtatggtcccgatagggttcttgacacacctatcacagaggctggctttact

SEQ ID NO: 6823 - DNA, 362 bp, Zea mays
  Clone ID: LIB3137-018-Q1-K1-A7
gcttctcgaccccccatcccctccctgacatgtccgacaacgcgaatgccgctgctgcgcgtgctaggccggagtcgtcgcaggaggaggaggaggactggaaggaggccgagggggacgtctccgaagtcgaccgcgccgtcaccaatggcgcctgcgtggggggcgtgcccacatacaggccgatccgggtctacgccgacggcatctactacctcttccacttcggccacgccaagtcgctggagcaagccaagaagtcgtttccaaacacatatcttcttgttggatgctgcaatgatgagttgacacataaattcaaaggaagaactgttatgactgaggatgagcgatatgagtca

SEQ ID NO: 6824 - DNA, 381 bp, Zea mays
  Clone ID: LIB3137-018-Q1-K1-A8
acttttcgactcccccatctcctccctgactttgtttacaacgctaatgccgcatcttcgcgtgctattccagagtcatcggaggatgattaataggactggaaggagtcctagggggacttcgccaaagtcttccgcgccgccaccaatggcgcctgctaatggggcttgcccacatacaggccgatcctcatctactcctacaccatctacgacatgttccacttaggccacgccaagtcgctgtagcaggccaagaagtcgtttccaaacacatatcttcttgaaggatgctgcaattatgacttgacacatatattcaaaggaagaactgttatgactgaagatgagcgagatgattcacttaaacattgcaaagta

SEQ ID NO: 6825 - DNA, 434 bp, Zea mays
  Clone ID: LIB3137-018-Q1-K1-B1
gcaacttggaaggaccctcatcttccaatgctgctaatgtagtatctcaagtaggaagagagctccccccagatgcgtctttgaaggcaacaaatatagattcaagtttcagcaaatttagccacatggagcgctactggagaactccctacccgtccagaccaattcctagagcccctgaagggacgtcttcatcaactcctgttgctgctagtacagctgttccagcctccgaagctaacctgactgcatatactagcacattcttgagccagcgagctgataccccatcattgcctccgaaaggtgatcctcctccatcagaggatgatgatctggaactgactgtcgctccaccatcccaacagaatatgaccaatatgttcttccaaaatgcggtaggcgtgattcaagtcatctaagctaattttttt

SEQ ID NO: 6826 - DNA, 440 bp, Zea mays
  Clone ID: LIB3137-018-Q1-K1-B10
cccttctcccccctcatctactccccctttttttgttcctgtgcctgtgcattggctggcgagggggtccacttgtccttcaggcctggagctcaccatggctgtcccgggcctcagctcctcctctggctcagaggggtttggatgcaacaacaacaacgggagcgggaacgggatcaacatgagggacctggacatgaaccatccggcgagcggcggcgaggaggacgagttcccaatggggagcgtgaaggatgaggaggacgagcgcggcggcgccggcggtccgcaccgcgccaagaatctccggctgtgcaaggagcagtcccgcctcctggaggagagcttccgcctcaaccacaccctcacaccgaagcaaaaggaggccttggctgtcaagctcaagctgcggcccatgcaggtggaggtctggttccaga

SEQ ID NO: 6827 - DNA, 442 bp, Zea mays
  Clone ID: LIB3137-018-Q1-K1-B11
atttatatgaaaaatcaagatctcccgggaggttttttgacctagtttatcatgaaaatgcccgtgttctactgcatgatgagagcatataccgatttgaatgttgctcaagtccgacaaggttgtctattcagctgatggaatatggtcacgaaaagccagaagttaccgcagtatcaattgatccaaatttttcttcgtatctttttggcgagtatttatgtagtacgtcagacaagaaattatctgaaggcgtctaccttgcaaggaataagcggaaatattcagataatgatgaaccttcagattttttgaaggcaatggatggtatcaaagttgtgaatggtctcgaatgcaagatatcctgcaagacctctaaggtctcgtatgtcctagacactgaagatttcttgtcccggcttcggaagagaggaaaattttg

SEQ ID NO: 6828 - DNA, 437 bp, Zea mays
  Clone ID: LIB3137-018-Q1-K1-B12
gcagatcttcgtgaagactcttactggcaattcgatcacccttgaggtggagtcctcagacaccattgacaacgtcaaggccaagatccaggacaaggagggcattccaccggaccagcagcggctgatcttcgccggcaagcagctggaggatggtcgcaccttggctgactacaacatccagaaggagagcaccctccacttggtgctccgcctcaggggtggcatgcacatctttgtgaagacattgactggcaagaccatcaccttggaggtggagtcgtctgacacaatcgataatgtcaaagccaagatccaggacaaggagggcattccaccggaccagcagcgcctgatctttgctggcaagcagctggaggatggccgtaccctcgccgactacaacatccagaaggagagcaccctccacctggtgc

SEQ ID NO: 6829 - DNA, 433 bp, Zea mays
  Clone ID: LIB3137-018-Q1-K1-B2
cggacgcgtgggtgggtgtcaaggatccaatttctgcagcattgtcaattgtcaggggagggcttacacctattgatgttttttctgttgaatggattcaaagtgggactatgcattatggtacaaccgtatcatattttggttttgttagcgatgttcttgagctctcagagaagtatcagaagcattttggtcctttacgatactttgtagctggttttctcaaattcctgtgtttgccaaagtacagttttgaattggaatatcttccagtatcagatgttaatggcgccgagcataaaattttggtaggacaagaaaaggttgacgcgtctgatctatatgatgatgtaattcggagatcaagagcagaatgtttaccacgcgcctcaagttatctagcattgattcaataatgtctacaggcatcatg

SEQ ID NO: 6830 - DNA, 218 bp, Zea mays
  unsure (1)..(218): unsure at all n locations; Clone ID: LIB3137-018-Q1-K1-B4
cccttttctccccccaactacgacacaatcctcttttcctgacccagaccacacnatagaagagcatttcaaagggccttgagaccctcccctaaccaaggctagcctaaacctcagctccatctcttcttcagatgcttttcaacactacatcaacaactaaatcgacaaccttaccaacactaacaactacccactcaaccacgaaatcaactgtt

SEQ ID NO: 6831 - DNA, 430 bp, Zea mays
  Clone ID: LIB3137-018-Q1-K1-B5
gcggcggcagtgggcggactcggaggagcctttgcggcggacgcggcgcagcagcagcagggggcagcaggggaggccgcggcggctcgggtgcggcccgtggaaacgctgcttcgcgcggcaccgctggggctctgcgtggccgccatgaccgtcatgctacgtaaccagcagagcaacgagtatggcgccgtcgcctactccgacctgggaggcttcaagtacctcgtctacgccaacggcctctgcgccgcctactcgctggtatccgcgttctacactgccgtgccgaggcctgccaccgtgtcgcgctcctggctcgtcttcctcctcgaccaggtgttcacgtacctgatcctggcggcgggcgcagcggcggcggagctgctgtacctcgcctacaacagtgacaaggaggtgacgtggagtg

SEQ ID NO: 6832 - DNA, 441 bp, Zea mays
  Clone ID: LIB3137-018-Q1-K1-B6
aggaacctgacattgagaagagtcacccattctctcggagaagaggaagacgatacaataggtggaacagtcttccctggttcaggtagctgtgaattatcatgtccacaggatggtggcatcgcagtctacgaggggcctgagatggtgtcaccagagagccaaactgatgctcggaaagaaaacatccattcagatgtcgctgagacagatgaatgcaccaagactcagaaggccgctctagcaggcacagagggagaaaattctgctgaagattctggtgtgccggtgtctgagatggacaaatgcaacgagatgccgaaggatgctccgacacttacagcagcaggtgcaaatcctgctgaagacgaagcttccctgaaagacctctctgtgcagacagagaacaaggcttcttctgcctccccagctcctgatgat

SEQ ID NO: 6833 - DNA, 385 bp, Zea mays
  unsure (1)..(385): unsure at all n locations; Clone ID: LIB3137-018-Q1-K1-B8
cgacggcgtgcccgtctcgtcgagctcattttccatgccttcctcagcctccgcgagaggaggacgagggctcctcttgccggcggctgctgcggcggttgtggtgctaatattgggtgcagtggcgccagcggcgggttgttatccgcgcgtgttcagcttcggggactcgctggccgacacggggaactacccgttcgtctacggcaacgactctgggtctggcggggccgcgctccggccaccctacggcgagaccttcttccaccgcgccaccgggcgcgcctncaatgggcgcctcgtggtcgacttcatcgcggacacgctgggcctcccgttcgtgcgaccgtatctgagcggacggagcgcggaggacttcgcgtgc

SEQ ID NO: 6834 - DNA, 357 bp, Zea mays
  Clone ID: LIB3137-018-Q1-K1-B9
cgctctccgctccgttggccccatggagtctgtcgcgtccgccgcgatcgccaccacctggggctctctcccgctcccctggtcttctgccccggtccaccgccggcgccgtgccgccttcctccccgttgccgcctccaagcgtcacgacgacgacaaggaggccgcgaaagggtctagctcggaaccacggcgcgagcctaccagcctcgcgccgtacggactctccatctcgccactctccaaggacgcggccatggtgctggtggtgagcgctgccacggggagcggctggacgacgggatcggggatggaaggcccgccgactgcgagcaaagccggtggggctggcatgcc

SEQ ID NO: 6835 - DNA, 345 bp, Zea mays
  Clone ID: LIB3137-018-Q1-K1-C1
gttggcttctcctcccccaccggttcgtgtttatgttcctggttcgtgggcgagagggaagagatggcggcgtcggacgttgagtaccgttgcttcgttggcggcctcgcctgtgccaccgacgaccactccctcaacaacgccttcagcacctacggcgaggtcctcgagtcgaagatcatcctgcatcgggagacgcagaggtcccgcggcttcggcttcgtcaccttctccacggaggacgcgatgcgcagcgccatcgagggcatgaacggcaaggagctcgacggccgcaacatcaccgttaacgaggcccagtcccgcggcggccgtggaggcggcggt

SEQ ID NO: 6836 - DNA, 443 bp, Zea mays
  Clone ID: LIB3137-018-Q1-K1-C10
attaatcgttgccctttcagttcgccatcgttagccgaccagcatgagctccacaggcggcgacgatggcgccaagaagtctgggccggaagtggttgggctcagcctggaagaagccaagagggtgatcctttgcgacaaacccgacgccgacatcgtcgtgctgcccgtcggcacgccggtgaccatggatttccgccccatccgcgtccgcatcttcgtcgacaccgtcgcggatgcaccccacatcggctgaggtttaaatctacaaaatgaatagctcgatcggacatgccatgcgtacctgtatccgtcgccgaataatggatgcgtgtgtgcttcgttccaataaattgctaataaaaataatggcatcgtcggtatgcatgaataaaatgtatcagaatgttcatcctttcacgattggatatatgaacatgtgc

SEQ ID NO: 6837 - DNA, 414 bp, Zea mays
  Clone ID: LIB3137-018-Q1-K1-C11
gtgggttggcttctcctccccctccggttttttttcgggtccgtgaggttttccgtggttgggcttcgtgggtgagcgcatcgagatggcggcgtcggatgttgagtaccgctgcttcgtcggcggcctcgcctgggccacggacgaccactccctccacaacgccttcatgacctacggcgaggtcctcgagtccaagattatcctcgatcgggagacgcagaggtcccgcggcttcggcttcgtcaccttctccacggaggaggcgatgcggaacgccatcgagggcatgaacggcaaggagctggacggccgcaacatcaccgtcaacgaggcccagtcccgcggcggccgtggaggcggcggcggcggctacggtggtggccgtggaggcggctgctacggcggtggcgg

SEQ ID NO: 6838 - DNA, 410 bp, Zea mays
  Clone ID: LIB3137-018-Q1-K1-C12
gctactgacggttgctctagatccgttcattttggtggttttgtgaggtcgaaagcggcgagcgaattagaagatgctggacaagctgtgggacgacgtggtggccgggcctcgcccggagacgggcctcgagaagctccgcatggccaccaccgcccgcccgctcgtcatcaacaaagacgcggacggcggcagctacaagcgggcgcagtcgatgccgtcgaccccgacgacgccggtgacgccgtcgtcgtcgtcgtcgtcgacgacgccgcgcggcgccggcaacgtgtggcgcagcgtcttccacccggggagcaacctggccaccaagggcatgggcgccaacctcttcgaccggccgcagcccaactcccccaccgtctacgactggctctacagcgacgaga

SEQ ID NO: 6839 - DNA, 301 bp, Zea mays
  Clone ID: LIB3137-018-Q1-K1-C2
cggggacggctgcgtcctcgggtaatgcggtttgcgggccgttgcggcctcggggcaacggcggcggaggctgtggacgacggcggtggtctcggggcgcggaccacagcggcctcggcctgcgacgaggtggcctgagctcagcggcgccggccaagggcagggagcgaggcgacctgcgcaaggggcggcctctggcgtgggcggcgctggcccaaggcggtgaggtcccggcggcgctggccaagggcgaggaggcggcggcgctggccaggggcgaggaagcggcgtcgtccaccgc

SEQ ID NO: 6840 - DNA, 430 bp, Zea mays
  Clone ID: LIB3137-018-Q1-K1-C3
ccacgcgtccgaccgagatatacagcctatttatttgttaccttatgctggaaagctgtggcggctctctttatccttctagggattttcctgatactaaacagcgctgcgcaggatacctgcgaagcaatggaccagtgggcccagcaccctcaggcagagacagctctgagcagcatccttccgtgtgtggatgagagcacgaccaaccgaacgctgtaccagagcaaagaggtggtggtgaggctcgtggggatagtgaacagagctatctccgctctttcaaatcgaaggccgcatcacaagcacccaggacagttcatgccttacctgtgctcgccctacgactcaaacctcaacgaccgaccgtgcaagtatatggaggccacgtttgaaaacgcgacgacagcatggttgaactacacgtgca

SEQ ID NO: 6841 - DNA, 290 bp, Zea mays
  Clone ID: LIB3137-018-Q1-K1-C4
ctcaatttcgcttacattataaaaacgcctatgtattgaccacgacgtcagataatggctcgcgacctctggcctgcggaacggccgacttgaaaccctgaaagggccaacacaaaacacaaactgatggaacttcgcgacaacatcaaggacataaacgagctcgagacccggatgctggctatgatgcaccccgtaatgaccatcatactcctgatgtagtaggagaccacgccgcaagctcaagatcattctagagaacgtgatcaccatcaccgtcacctactccg

SEQ ID NO: 6842 - DNA, 243 bp, Zea mays
  Clone ID: LIB3137-018-Q1-K1-C5
cggggcgtggaccgtgtacgtcacaagcctctcgctcgggcgactcgccatgctgtacacgggctccaccaacgcctgcgtgcagatgcagagcctggccgtgcccgtcgactacgccgacccggtggtcaccaactggacacaagcacgatggcgactacgagctgtacccgcccacgaacatcgggcccaaggactctgcgaaccccaccacgcatctggatcgacccctgggacggcagc

SEQ ID NO: 6843 - DNA, 427 bp, Zea mays
  Clone ID: LIB3137-018-Q1-K1-C6
gcagcagccgtgcctgtgcacgtacgcgcgctaccccaagctgcagcgctacgtcagctcggccaacggcaagaacgccatggccgcgtgcaaggtgcccgtgccgtcgtgctaattaaaacttctgttagcgccgccgccgcgcgtacgtacgtggcgtgaggcgtacctgtgtcggtagcagcgtggcccactggacagggacagagtgtgacgtcgctcttttatgtttccgaacgtacgtacttggatcgcgcatgccgcccgtgtatgcgtgttccgttgtggtgttgctgtactcgatctgcttgctgcctgtgtgtatctaccgagctcttcggacagatacgcgtgcgtatgaataaatgatgtaataatggcgtgtgcatccgctatatatatgcatatctacacatatgtttttact

SEQ ID NO: 6844 - DNA, 366 bp, Zea mays
  Clone ID: LIB3137-018-Q1-K1-C7
cggactcgtgggcggactcgtgggtttggattttctaaccttcaactcattcatggctggggacaggtcaaatggagatgttggatctatctcctttgtggtcttctcttacctggtcctcgttctgctgttctactgcctgcgccgattcgagacaactccaccagagtcgcctagccgggtgcacataaaaatggccgtgtgggtactcaccacgatgctcactgctgcgttctcatacaaggtggcagcaattatgccactcccggtgcacgtgctggtgtgggcaatgtcaggagcaactgtgttcggtggtttttatgctttcttcatccaccatgaaataaccgcccatctggaaccccc

SEQ ID NO: 6845 - DNA, 431 bp, Zea mays
  Clone ID: LIB3137-018-Q1-K1-C8
ctatgaggctatcacaaaaggcaacccaatgtggaaccagctaactgtcccagaagcatcgctctactcatgggattccaaatccacttacattcatgagcccccttactttaaggacatgaccatgtccccacctggcccctctacagtgaaagatgcctactgcttgctgaacttcggggacagcattactacagatcacatttcacctgcaggaagcatacacaaagacagtcctgctgccaagtatttgatggagcgtggcgtggaccggaaggacttcaactcatatggtagccgtcgtggtaatgatgaagtaatggcaaggcgaacgtttgcaaacattaggatcgtgaacaagtctttgaacggagaagtcggacccaataccattcatgttcctactgtggagaagctttctgtttttgatg

SEQ ID NO: 6846 - DNA, 399 bp, Zea mays
  Clone ID: LIB3137-018-Q1-K1-C9
gccgagatcagatcggaggcgagcgccacctccgaccggaggaagaggacgacacgatgctgcgggttgcggggagaaggctctcgtcttccctctcctggcgccccgccgcggcggtagccaggggccccctcgccggcgctggcgtccccgaccgggacgacgactcggctcgcggacggagccagccgcggttctccatcgactcccccttctttgtcgcttccaggggtttctcttctactgaaacagttgtcccaaggaaccaagatgctggcctagctgacctcccagcaactgtggctgctgtgaagaatcctaaccctaaggtggtttatgatgagtacaaccatgaaagatatcctcctggagatcccagcaagcgtgcctttgcatact

SEQ ID NO: 6847 - DNA, 389 bp, Zea mays
  Clone ID: LIB3137-018-Q1-K1-D1
tgccgatccaataaaactcctgccattgtcctatctctttctcctccattccccactgcatgcgcgctaccttggcgacgactggttgaccgccgctgccgctctagagcaggtgcccactgcccaggtcttcttctggcccttcgccggcgacaagcacaaccagggtgattcaagtactctgctttcaccaatatgtctgacggtcaggaaactgacaagaacattgagatttggaagatcaagaagttgatcaaggcattggaatctgctagaggcaatggcaccagcatgatctctctgattatgccaccacgtgaccaaatttcccgtgtgaccaagatgttgggtgatgaatatggtactgcttcaaatattaagagtagagt

SEQ ID NO: 6848 - DNA, 424 bp, Zea mays
  unsure (1)..(424): unsure at all n locations; Clone ID: LIB3137-018-Q1-K1-D10
tgcgttcctccgtagtatgtatcatgagcacttgattatataagaacgccnaaagcaccgagcgaattataagatgctggacgaggctttaaactacgtggtggccgggcctcgcccggagacgggcctcgagaagctccgcaaggccaccaccgcccgcccgctcgtcatcaacaaagacgcggacggctgcagctacaagcggtcgcattcgatgccgtcgaccccgacgacgccggtgacgccgtcgtcgtcgtcgtcgtcgacgacgccgcgcggcgccggcaacgtgtggcgcatcgtcttccacccggggagcaacctgtccaccaagggcatgggcgccaacctcttcgaccggccgtagcccaactcccccaccgtctacgactgtctctacagcgacgagaccaggagcaaccac

SEQ ID NO: 6849 - DNA, 438 bp, Zea mays
  Clone ID: LIB3137-018-Q1-K1-D11
cacatccgcatggcctcccgggtcacgaggctgctcctgcaccgccgcctcaccaccgcagcggaagcctccgcgcgccgcgcgccgcaggctccctgtgccggcgccgctgtctccaaggatgttgttaaggctgaagcttcatctttgaaaaattcaaggtggtacattactaggtcaaacacttcaggtcctttgactactcgttatgagtgccgcaaagtatttccttgttctgtaaggccatctgcatcttactctacacaagcttcagaccagaagggaaaacaggaagggaaagacttgtcaaatgtagaacacccctttgatgatattacctacaatatacctgagaagccagtgacatttactgaaggtgcttcttatagtctggtaatactcgccgggctcggaattgcaggactggctggatatgct

SEQ ID NO: 6850 - DNA, 433 bp, Zea mays
  Clone ID: LIB3137-018-Q1-K1-D12
gtctcgctcttggctgccctactcgtgctgcttgccctcgccgccgtatcctccacgcgcggggcacaagaggagtccgtggctgacaacgccgggatgttggcgggcggcatcaaggacgtgccggcgaacgagaacgacctccagctccaggagctcgcgcgcttcgccgtcaatgagcacaacaaaaaggccaatgctcttctggggttcgagaagcttgtgaaggccaagacacaagtggttgctggcacgatgtactatctcactattgaagcgaaggatggcgaagtcaagaagctctatgaagctaaggtctgggagaagccatgggagaacttcaagcagcttcaagaattcaagcctgttgaagagggtgctagcgcctaaggatcttgcgtctccctgtgcaatttgctgcctgaagcgcaaa

SEQ ID NO: 6851 - DNA, 406 bp, Zea mays
  Clone ID: LIB3137-018-Q1-K1-D2
cctcagctcccatatcctttcccctacctcttcagcatctcccgtctccgtcgtctcgtctgcgctcctcacctcgccagccatgggcaagatcaagatcggaatcaacggtttcggaaggatcggcaggctcgtggccagggtcgccctgcagagcgaggatgtcgagctcgtcgccgtcaacgaccccttcatcaccacggattacatgacctacatgttcaagtacgacaccgtgcacggccaatggaagcacagcgacatcgccctcaaggactccaagacgcttctcttcggcgagaagccggtcaccgtcttcggcatcaggaaccccgaggagatcccgtggggtgaggctggtgctgagtatgtcgtggagtccacaggtgtcttcactgacaaggac

SEQ ID NO: 6852 - DNA, 334 bp, Zea mays
  Clone ID: LIB3137-018-Q1-K1-D3
ggcttctcctccccctcttaccaagacctcttcgggttagggttccttagggttttgtggaggggcgatggcggcggctgatgtggagtaccgatgcttcgtctgcgggcttgcctgagccaccagcaacgagtcgctggagaatgccttcgcctcctacagcgagatcctcgactccaaggtcatcaccgaccgagagacggtgaggtctcgcggcttcggcttcgctaccttctgctccgagaactccatgctcgacgctatcgagaacatgaacggcaaggagctcgacggccgtaacatcaccgttaaccatgcccagtcccgtggcggt

SEQ ID NO: 6853 - DNA, 443 bp, Zea mays
  Clone ID: LIB3137-018-Q1-K1-D4
ggatattcgggtgtccctactatcgttcctgttgaagggatacattcgttggccccacaacaaatggcaaagttggttcttcaggtccattttcatcaccatatcttgcctctaaagctgtctgtgttttgcaatgggaaaagacatccagcaaaacttcatcctgacattgcttatttcgttcgtccactacccatggacctaaatactttcctatgcaaggaaaaccaattgaggggaatgtttgagtatgcgaggaggtgcgctttcaaagatcatcttcagaagctaggtcacgaggacagtgcagagcacatcgataagaaccttcaggtggcccagagtgttgcttcaaaaatactgagcaatgctaatattcaccttgtctcaatggatatgccagtaaccttcagtgtcgatgacgcctctggcttgtgttggag

SEQ ID NO: 6854 - DNA, 434 bp, Zea mays
  Clone ID: LIB3137-018-Q1-K1-D5
gtgcctgcagcggtacttggtgtctcagtgtctaaccgactattgtaaagtagaaaggtaggctgtgtaggccaggaaagttttgtggaatcacctacgagttcgtttgctgtaaatcgatgcgtaataaattctagcgtatcctgccttgtcgaccattttaccttcaccttctgggagacagagacatactgaatctgacctaaccccaccagtaagatcaagagctaactctgaactttaggatcccatttggttacgaggcatatccctgtatataattgtcacggaggttcttatcctttagcagttagtcttctatctgtatcgtaattgatgagcaacatcggttttatgatgatgtgatggagaagcaaaggtgtaatacagcaataagtgtacatgtattgctggaacatgtatagatcaaacct

SEQ ID NO: 6855 - DNA, 362 bp, Zea mays
  unsure (1)..(362): unsure at all n locations; Clone ID: LIB3137-018-Q1-K1-D6
cacatccgcttggctgccctactcaagatgttggttcttccgccgnatcctccacgcgcggcgcacatnatgaggccgtgggtgacaacgcctccatgttgccgcgccgctgtctacaagtgccggcgaacgagaacgacctccagctccaggagctcgcgcgcttcgccgtctatgagcacaacttaaaggcctttgctcttctggggttcgagaagcttgtgaaggccaagacacaagtggttgctggcacgatgtactatctcactattgaagcgaacgatggcgacgtcaagaagctctatgaagctaacgtctgggagaagccatgggagaacttcaagcagcttcaggaattcaag

SEQ ID NO: 6856 - DNA, 170 bp, Zea mays
  Clone ID: LIB3137-018-Q1-K1-D7
tcggtcgacccagcgtcggggtgcggccatggttgccttgccttcactcacacactgcaaatgcgcaccctgctgatggtctccttcctgtgatagagtcaatgcatcgcaccactacctcttcctgtctaacaaacagcacccaaactatcaacaaccggacagaagga

SEQ ID NO: 6857 - DNA, 407 bp, Zea mays
  Clone ID: LIB3137-018-Q1-K1-D8
agagaagcaaagcaagcaacaccggctgccttctcgcaggtcagtacaatgagaggatcgaggttctgcggcggagatctccggtggtggatgttggccatcttcttcctctgcacactaattgctgccgcggaggagcgcgtcgtcacccatctccccggcttccagggaccactccccttccagctccgaactgggtctgctctgcatgtggctctgagccgttaacctcttcgatttctatcagcgtgtttagctatggctcaccggccggcgggcgtacaggtacgtggaggtggacgaggacaatggcgttcgcctcttctactactccaccctctccgagggctcctcagccgacgacccggtcatgctctggctcagcggcggccccggatgcacttcct

SEQ ID NO: 6858 - DNA, 359 bp, Zea mays
  Clone ID: LIB3137-018-Q1-K1-D9
actagttctagatcgcgacggccgcccttttttttttttttttttttttttcaggtagtgggcttgccagcatctcttcattgcagaaaaaaaaaatggattacatccaggaacgcagcaacactacgacccacagcgacagagacgtatcaccctaagcattccccagctacgaagaggcgcctagcctccgaagccgtagagggtgcggccctggcgcttgagcgcgtagacgacatccatggcggtgacggtcttgcggcgcgcgtgctcggtgtaggtgacggcgtcgcgtatgacgttctcgaggaagatcttgagcacgccgcgggtctcctcgtagatgagccccgagatgc

SEQ ID NO: 6859 - DNA, 382 bp, Zea mays
  Clone ID: LIB3137-018-Q1-K1-E1
cggacgcgtgggcggcgttccgtaagatggtttagtacatgcgcaagcgcatgggggccgcgggcgatggggtggccgcagtcgaagtctcgcaggtcgtcggcgtccggacgaggtccaggtccgcggcggcgaccggcggcggtgtcgcgaaggtcgctccgccgaggaggaagaaggcgctgctgcccgccgcgaacgtgacgacgtcgggggagcctggtgccgtgggcgctggtggtggggacggcggaagctgctgctacatccacctgcggagccgcatgctgttcatggcagcacctcagcagcaaccgtcggcggctctgacgccggtggaggctgctggtgcggcacatcatggcggggtggtggcgctcgc

SEQ ID NO: 6860 - DNA, 439 bp, Zea mays
  Clone ID: LIB3137-018-Q1-K1-E10
cccgcgtcaaacaaatctagggttccaagcgttcgaataccttcctccgcctgccgatctcgccgcatctctcgggctaagacgattcgaggcacgagcgaagatgccgcagcggcattcgaaaaacaacaacgacctcgccttcttcacgtacgaggagaagcggaagctcgggtacggcacgcagcgggagcgcctgggaaaggactccatcaagcccttcgacgcctgctgcctctgcctcaagccgctcatcggcccgctctgctgccccaagggccacacattctgtaaggagtgcatcctcgagtgcctcctctcccagaagaaggacatcaagcgcaagctagcagcacatgaggcccagaaaaagcaggagaaagaagaggaggaagagaagctaattctgcagaaggctaaggagttggatgcccttgat

SEQ ID NO: 6861 - DNA, 395 bp, Zea mays
  unsure (1)..(395): unsure at all n locations; Clone ID: LIB3137-018-Q1-K1-E11
cggacgcgngggntntttttttttttttttctttttttttttttttttttttttggcttcgagaatccagcccgcatttttttagttcccaatacagttacattacaacacaacaggtgcagctactttagaaatgtgcactctacagataacacacccaagcgtggaccatcgccacatgagcaaaaacatcagaaagaaaaattaaacaccgccaccgccagagtaacccgatatgcttcctaccgtgttcttgcagggtgcaagagatatacattacaatggcagtgcgttctccatcagttatcttgcccttgagggtcgcccttccgtttcgtggtgcctctgggctgagacgatttgttgcctcttgacaagtgcctatcctccggctt

SEQ ID NO: 6862 - DNA, 436 bp, Zea mays
  Clone ID: LIB3137-018-Q1-K1-E12
gccgcgcgcaacgcacgcgcgcgtgcagggtagtggagagcgtgggggagcacgtggagggcttcgcggcgggggacaccgtggtgccgacgttcctggggcagtgcgagcgctgcgccagctgcgcgtcggagcacagcaacgtgtgcgacgcggtgccgttcgtcatcggccccgggatgcggcgcgacggcaccacccggttccgggacgcgcgggggagcccgctgcacgacctcctcgccgtctccagcttcagcgagtacaccgtcgtggacgtgaaccaggtggtcaaggtcgaccccgccgtgccgcccaagctcgcctgcctcctcagctgcggcgccggcaccggagtaggagcagcgtggaggtctgccaaggtggagccagcatccactgttgcaatctttggcccttggatctgtcggtttgg

SEQ ID NO: 6863 - DNA, 286 bp, Zea mays
  Clone ID: LIB3137-018-Q1-K1-E2
cccggccttcgcgctcgtcaacagggtcacctgcgaggccatcaagcactcccagggcgagggccacccggtcaagctggtgccctacaaccccagctaccaggacgagtcggtgctgtggacggagagccgcgacgtcggccacggcttccgctgcgtccgcatggtgaacaacatctaccttaacttcgacgccttacacggcgacaaggaccacggctgcgtgcgcgaccgcaccaacatcgtgctgtggaagcggtgcgagggcgacaaccagcggtggaag

SEQ ID NO: 6864 - DNA, 256 bp, Zea mays
  Clone ID: LIB3137-018-Q1-K1-E3
cggcgtgtggacggggtccgccaccacgctttccgacggccgcctcgccatgctctacacgggctccaccaacgcctccgtgcaggtgcagtgcctggccgtgcccgccgacgacgccgacccgctgctcaccaactggaccaagtacgagggcaacccggtgctgtacccgccctcgggcatcgggcccaaggacttccgcgaccccaccacggcctgcatcgacccctcggacggcgcatggcgcgtcgtcatc

SEQ ID NO: 6865 - DNA, 427 bp, Zea mays
  Clone ID: LIB3137-018-Q1-K1-E4
gtggcgcacgagaccaatcctgagcgcccctctctcaatccccataaccccgacatacggggacaccataaccgagggatctgatgcctccgcagcagcgcctccttctcctcactcatcgctaccccaggagggcgcgccggcctatggcccaacgctcgccgatatcctcccaccgacatcactgcgagacgacaaggaagagaatgtggactaccttaacctaccgtgtcccgtgcccttcgaggagatccaacgcgaggctgtcatgtctctgaagcctgaactttttgaaggatcgaagcttgactacacaaaagggttcaatcaaaaccattgtcttagccacaggtaacatcattgcataatgtcagacccagggccagagactcccacatgagcgtggcctggggaaggaataaactga

SEQ ID NO: 6866 - DNA, 377 bp, Zea mays
  Clone ID: LIB3137-018-Q1-K1-E5
gtcccggtctgctcattctttcgcagtctgttgatatatatatgtatattcttttgcgtgggaaggactcctgtgtgttgcgtgaaaaaactggattccgcgtccgttaggacttaggagacctcatcgcgtaacagccttccaaaaaaaataaagagagcccgcttctcaaccagctgctgattaattggtgcagggctagcttgtaagaccgctcaactccagctttgcggccctccaactttccccaattcaagttcaatattggcgagcatgcgagtttgccctcttgcgtcatcgtccttgcgatcccctcgtgcctgtttctgcgtacgcctgccgtatacaacagttgcgccctgctctccggcaagcta

SEQ ID NO: 6867 - DNA, 387 bp, Zea mays
  Clone ID: LIB3137-018-Q1-K1-E6
tccaatctcgctgaaccaacacatgggcttttgttcgctgatgctcttcacaagccctagggggatagcaatagagcttgtgatggaaccagcttcatgcttgcgtgtattagatttgaacaagacagcagtggacgccatcccgaaattcattggtaacttggcacatttaacgtacctgaatcttgatggggctcacgtcacatacataccttctttcattggatttgtcataaactcgcagaccttgagccttcatgggttccaaaacttgcagagactttctatgtccatcatggcattgatagagcttagatgcctctgtgtatatagaacttacctaagccatgcaccaaagggtgatgtgctatcgacacatcctaatca

SEQ ID NO: 6868 - DNA, 371 bp, Zea mays
  unsure (1)..(371): unsure at all n locations; Clone ID: LIB3137-018-Q1-K1-E7
actaggatcgatctctcgacagcaaatagctagcaatggagaagtacaccaaagccctatggtcattgctcaccatgctggtgctggcacctctcctcgccatggccaccgacccagaccccctgcaggacttctgcgtcgccgacctcaacggcaagctgtcagtgaacgggtacccatgccagccgccgtcgtcggccggcgaccagttcctcttctcgaccaacatcgccacgggaggcgaccccctggccaacccgaacggctccaacgtgacggagctggacgtgtccgagtggcccggcgtgaacacgctgggcgcgtccatgaaccgcgtngacttcgcgcccggcgggaccaacccggcccac

SEQ ID NO: 6869 - DNA, 415 bp, Zea mays
  Clone ID: LIB3137-018-Q1-K1-E8
cgagacagtacttccaaggccttcatccaattggacagacatggagatagatgaatgcgaggagacgactatgcgtgatgtgaacaacatcgaggaagagatgcgcaggaagcaagctcacgctgcccaggaggcgtacgaggaggacgacgagatgccgggcggagcccagagagtgcagtgcgcgcaacagtaagcagactatcatcaaggcaattgggaggggtggtgcccttaaagcatgggagtgatctctggttttgctgtcgccgagctgggaaataggaagctgaatcgacctcgcaagcggtgaatgtatccttttttgctgcaacataaaaaatgctacccaggcatagctgggtaccttttaacttctgtttgtgggatttgctagagtgatggtttcgatata

SEQ ID NO: 6870 - DNA, 343 bp, Zea mays
  Clone ID: LIB3137-018-Q1-K1-E9
cggacgcgtgggctccattctcagccgccgcttatcccttcccgtgctccgcaaccgctgagtgagaacaagagatggccggcaagggcgatggcccggctatcggcatcgatctcggcacgacgtactcttgcgtcggcgtgtggcagcacgaccgcgtcgagatcattgccaacgaccagggtaaccgcaccacgccctcgtacgtcgccttcaccgactccgagcgcctcatcggagatgcggccaagaaccaggtcgccatgaaccccatcaacaccgtctttgatgccaagcgtctcatcggcaggaggttcattgatgcgtcttgccagagtgatat

SEQ ID NO: 6871 - DNA, 417 bp, Zea mays
  Clone ID: LIB3137-018-Q1-K1-F1
ggttcatctgcaatatatcagaacaagagcttcaccacgcagcagatgggtatgcagaagagaagacctacaactacatcagcagctcctacctatcccaataggatgtaccctagcccccgaccgtacacccagtatgggaattcagtaaaaactggtcttccctacgggagtaacggttatgattccaggatatatggtcgacgtggtcttggtaatggtatggataacaggtacaggcccagggcatgtagtggatactatggttatggcaatgagagtcaggatggaacaattgagttaaacagaggtcctagatctggccggttcaagaaccagaaattgtacggtcatactgtcactattgctgtgaaaaggcagtctctcccttctagtgaaaagcaaaatgatagtgct

SEQ ID NO: 6872 - DNA, 443 bp, Zea mays
  Clone ID: LIB3137-018-Q1-K1-F10
gcggagtccggattgcagttgcttcggccctttcggccgtcacatcagccacacgccgccgcgccgccagtcgccgcacgagggggcccgtgatgccgaagaagatgggtgtcaactccaaggcggaggcggcccgcgaccgccgctccgccgcggaggccgaccgccgcgaccgccaggagcgcgccaaggaggagcagtactgggccgaggctgagggccccaagtcccgcgctgcgcgccgccgggaggaggacgccgagaagcgcgccgaggccgcggctcgcaaggccgagaaccgccgcctcgccgaggcagaggccgccgccgtcgccgcttccgcatcggcgccgtccaaggccgccgcgcgcaaggcgtcccgcgttgccgctccgccccccaaggttaccgaagccgagctcgtgcgcctccgggaggaggag

SEQ ID NO: 6873 - DNA, 428 bp, Zea mays
  unsure (1)..(428): unsure at all n locations; Clone ID: LIB3137-018-Q1-K1-F11
cggacgcgtgggtccgctttcgtcgccgtctttactcgccaccatctccaccgcctcctcgcgacaagcatcccctcccatacccatggcaactgaccgtctcctccaccttctccgagcgccgacaggctctccggctgccgcggccaccacccgcgcggtttgttggggtcgtccacggacgcagcgcgtcgacgtcttgcagggtgcttcggggattcgccgcgcgtccgtgtcctgctcgagcactagctctggcgggcaggggggactaacatataaggatgcaggcgtggacatagacgccggcgccgagctcgtgcgccgcatcgccaggatggcacccgggattggcggcttcggcggtctcttcccctacaatgancgatatctccgtgctagcaccgatggggtggngacaaagctga

SEQ ID NO: 6874 - DNA, 348 bp, Zea mays
  Clone ID: LIB3137-018-Q1-K1-F12
cccacggaagcaaggcaaaagctcgtgctgttcgacatctcccctgtcgatccacgaccatgatgcagcagctgcgtcacagccagccgagcccgtgcctctgcggcctgcgggcggcacggcctatgctcgcgctcggcgcagcagcatcccgttcgcggcccgccggaaaactgcaaccgagcgcctgcctcggcctcggccatgtagccccagccgcggcgagaggacagccccgtccccgtgccgttgccgactcggcgctgggagcatcgcctacgagcgtgcatgtcggaggcaagctgctgctgcagaacttcgccgccgacagccagcagcggctcaagc

SEQ ID NO: 6875 - DNA, 433 bp, Zea mays
  Clone ID: LIB3137-018-Q1-K1-F2
cgactaaaaaccatctttggggcccttcgcttcgatttgcttcgcttctcggactaggttaggttgccttttcgattctcagaaaaagactggctctgcactcggataattttaaaatggatagtgcacagcagcccactggggaattgaacaattcgttcgatactcttatggtttctggaggtgaccagagtcgacagcctcaggatgctggcaatgaaacgagcttcacgaattggaaagacctccccatggagctgctcctgcgtatcatttcactagttggagatgacaggatagtcattgtggcctccggtgtatgcacaggatggcgtgacaccttggggtggggggttgcaaatctttcactatcatggtgccaggaccgcatgaattgactggtgatatcactggctcacaaattcacgaagct

SEQ ID NO: 6876 - DNA, 411 bp, Zea mays
  Clone ID: LIB3137-018-Q1-K1-F3
cacgccgaatccgccctctagtgactagtttacgtcagttgttgctccccccaccttctcgtcctgctcctgccctcggtttctgatcagcgaacatgggaacccgcggcgtcgccctgctgctcctcgcggcggtgctgctcctccaggcgctcctcctcgcgtcgtcggagggcctggtgcgggtcgcgctgaagaagctgcccgtcgaccagaacggccgcgtcgccgcgcgcctctccgccgaggagaggcagcgcctcctcctccgcggcgccaacgccctgggctcatgcggcgacgacgactccgacgtcatcgcgctcaagaactacatgaacgcgcagtactttggggagatcggcgtcggctcgccgcagcagaagttcaccgtcatcttcgacaccggca

SEQ ID NO: 6877 - DNA, 437 bp, Zea mays
  Clone ID: LIB3137-018-Q1-K1-F4
cggacgcgtgggcggacgcgtggggcccatttcatgtatataggctggctacctcatattgtgttgaggaacggatcatcaagaaagcttttggaaagttaaagctagagcatgtggtgataggcaaggggcagtttgaacaagaaagagcaaagcctaacgttttagaggagggggagctgctggcgctgcttagggacgagcaggacgaggaagatcggatgatccagaccgacatcagcgacgaagacctcttgaagctgatggaccggagcgacctgtccggaccacctggtgctgccgatgccgctccactgatcccgctgaaaggccctggctgggaggtcgtggtcccaaccaagagcggtggcggtatgctctcgtcgctcaccagctgagcgatgccggcaccatgtttggggtgcccattttgctag

SEQ ID NO: 6878 - DNA, 295 bp, Zea mays
  Clone ID: LIB3137-018-Q1-K1-F5
ccggcgtccggattgcagttgcttgcggcctcctgtcgtcacatctgcaacacctcctggggcctttttcggggcacgagggggcccctaatgcccaagaagatgggtgtcaactccaaggcggaggcggctccgtgtgcgccggtccgccgcggaggccgaccgtcgggaccgtcatcagcgccccaacgaagaccagtactgggccgatgctgagggccccaagtcccgcgcttcctgctcgagcactaactatggcgagcagcgcgcactaacatataatgatgcaggcgtg

SEQ ID NO: 6879 - DNA, 415 bp, Zea mays
  unsure (1)..(415): unsure at all n locations; Clone ID: LIB3137-018-Q1-K1-F6
cggacgcgtgggcaccataggctacaatcctttatcttctgcctccttcaggatttacagtgcacgcatagatagtgatggaactgccagttgaacatggactactcctggataacctcttggaccttgctcatgctccttttacacacacatccacctttgccaagggctggagtgttccaagtttggtgaagttcttaacacctgcgtctgggctccaagggtactgggatccttacccgatcgacatggagttccgaccgccatgtatggtcttgtcgaccattggcatctcaaagcctgggaagctagaagggaagagcacccagcaatgctccacgcaccttcaccagcttcacgtntgctttgccctcctctaggaacaaaactaggctgctgtaccggatgtcgctag

SEQ ID NO: 6880 - DNA, 371 bp, Zea mays
  Clone ID: LIB3137-018-Q1-K1-F7
gggttggcttctcctccccctccggttcggtttcgggttcgtgaggttctccggggttcgggttcgtgggtgagcggatcgagatggcggcgtcggatgttgagtaccgctgcttcgtcggcggcctcgcctgggccacggacgaccactccctccacaacgccttcagcacctacggcgaggtcctcgagtccaagattatcctcgatcgggagacgcagaggtcccgcggcttcggcttcgtcaccttctccacggaggaggcgatgcggaacgccatcgagggcatgaacggcaaggagctggacggccgcaacatcaccgtcaacgaggcccattcccgcggcggccgtggaggcggcggcggcggc

SEQ ID NO: 6881 - DNA, 366 bp, Zea mays
  Clone ID: LIB3137-018-Q1-K1-F8
cgcgccggcatcgccgagttcgtcgccacctttctcttcctctacatctccatcctcaccgtcatgggcgtctccaagtccacctccaagtgcgccaccgtcggcatccagggcatcgcctggtccttcggcggcatgatcttcgccctcgtctactgcaccgccggcatctccggcgggcacatcaacccggcggtgaccttcgggctgttcctggcgaggaagttgtccctcaccagggcggtgttttacatcatcatgcagtgcctgggcgccatctgcggcgcgggcgtcgtcaaggggttccagcaggggctgtacatgggcaacggcggcggcgccaacgtcgtggcgcccggctacacc

SEQ ID NO: 6882 - DNA, 427 bp, Zea mays
  Clone ID: LIB3137-018-Q1-K1-F9
cagctttgaccgccgcctcccttcccctcctctactgctcctccccaccccactcccccggaggagcggcggcggcggcggcgaggtcgtaccccacatcggcgagcggcggcggcaccgccggaggcaaaggcaagatgttcgggcgcgcgccgaagaagagcgacaacaccaagtactacgagatcctcggggtgcccaagtcggcgtcccaggacgatctcaagaaggcctaccgcaaggctgctatcaagaaccaccccgacaagggcggtgaccccgagaagttcaaggagctcgcacaagcctatgaggttttgagtgatccagagaaacgtgagatttatgatcagtatggtgaagatgcccttaaggaaggaatgggcggtggaggatcccatgttgatccatttgacatcttctcatc

SEQ ID NO: 6883 - DNA, 358 bp, Zea mays
  Clone ID: LIB3137-018-Q1-K1-G1
gtaccatcgtgtccttttcctcctacctccttcttggctggccctcttccccgtcttcctgcctcttccttcgtctctccgtttcaagccctaccgacaggcatttgcttctgctccagtgatcagccccctcccctcctggcctcctctccccccggccaaaaactgatctttttttttcggttctggtaccatagctattagtagtcgtagcggctaacttgcaagccgattgtctctagcacgcaagtgtttttccctcccctgagcttggtgggcgatcgagagttcgagacagtgtacacatacatactctgctcgtcagctgaggatcgatcgcttggtctccgtggtgcgt

SEQ ID NO: 6884 - DNA, 369 bp, Zea mays
  Clone ID: LIB3137-018-Q1-K1-G10
accagatatgttggctatggaaaaaagtattctcatcagaagatgggggatttcaaagtggtttggacaatgtgcagtacaaagccactggaatactacgctatgaacgtatctttggagatggctacgtgagtactggtggagctgagactacaaaagaatttgtggagaaactgaatcttaagcctgggcagaaggtgcttgatgttggatgtggaattgggggaggtgacttttatatggctgagaagtatggcacacatgttgttggtattgacctttccattaacatgataatgtttgcccttgagcgttccattgggtgtaagtgcttagttgagtttgaacgtgctgattgcgccacaaaga

SEQ ID NO: 6885 - DNA, 327 bp, Zea mays
  Clone ID: LIB3137-018-Q1-K1-G11
cgcgttcatctcgcccgtacgccgacgctttcgcctggctcgcaccgcccgccggcagtgcctcagtccagatcaagcctccctcttcccacatcgggtcctagttgggctaccgcagccctacgccaggtgccgagtccctcgccgatttcttcgccggcgaagagtgcccaccacatccgcccctgatggacaacgtcgagtctgcccctgactcgccggcgcaggcgccgccgtcatccgcctcttctgtccccaaggagcaatcgcaggtggagttggagctgaggctgcttcaggctcttgagtcctaccctccatcaaaac

SEQ ID NO: 6886 - DNA, 137 bp, Zea mays
  Clone ID: LIB3137-018-Q1-K1-G12
tctcacgccactgcgctgccctagaaccttttccgccgcccctctttaggattaccgtgggcccgatcgccccctggcacgcccgccccgatcgccccctggcacgcccgcccggatcctgcaccggaattccgtgt

SEQ ID NO: 6887 - DNA, 369 bp, Zea mays
  Clone ID: LIB3137-018-Q1-K1-G2
ggagcagcagcagcaggcggcgccgaggagttgcatcccactcagtgcttgcaaccatggcgaggggattgaagaagcacttgaagaggctcaatgcgcccaagcattggatgctcgacaagcttggcggagcttttgctcccaagccatcttctggacctcacaagtccagggagtgccttcctctgatcctcatcatcaggaacaggctcaagtatgctctgaactaccgtgaggtcatttctatcctgatgcaacgccatgtacttgttgatggcaaggtcaggaccgacaagacctaccctgctgggttcatggatgtcatttccatccctaagacaatggagaactacaggctgctttatgaca

SEQ ID NO: 6888 - DNA, 413 bp, Zea mays
  Clone ID: LIB3137-018-Q1-K1-G3
gctggcttttcctccccctcttaccaagtctttctagggttagggttccttagggttttggggaggggccatggccgccggtgatgtggaataccggtgcttcttctgcgggcttgcctgggccaccagcaacgagtcgctggagaatgccttcgcctcctacggcgagatcctcgactccaaggtcatcaccgaccgggagacggggaggtctcgcggcttcggcttcgttaccttctcctccgagaactccatgctcgacgctatcgagaacatgaacggcaaggagctcgacggccgtaacatcaccgttaaccaggcccagtcccgtggcggtggcggtggcggcggtggctacggcggcggtcgcggcggctgctgctatggtggcgggcgccgtgacggcggttatg

SEQ ID NO: 6889 - DNA, 305 bp, Zea mays
  Clone ID: LIB3137-018-Q1-K1-G4
gcctggcatcagcacacgtccacacctaactgcgccaattctaccatccattccaataatggaaggtaaccgaaagcagcagcggaggtcgcaagaacacttccctcctctccggatcaatcatcgatcagccaagcccctacaaaaaaaccatcgccacatgttggctaatcccacgacgcactgatatttttcttccttgattgtcttgctgctatttataatcgatctccagcttacagcgacgtccaggtccaggtctgagctcgaggcacaggactccctttataatttatccatccatg

SEQ ID NO: 6890 - DNA, 347 bp, Zea mays
  Clone ID: LIB3137-018-Q1-K1-G5
cggacgcgtgggggcggcgtggccccgcctttacgaggccgtgcttgaccccgcggggccggagccgttcgcgcgcgccaacgccggggtcaccgcctacgcctactacggcaaggaccaggacgccaaccgggtcatgctccgcgccatggcgggggtatccgagcccttcatgggtgccctcctcgacggctacggcgccgccggcgggtttcgcggcgtcgccacgctcgtagacgtcgggggaagctccggcgcctgcctcgagatgatcatgcgcagggtccccacaatcaccgagggcatgaacttcgacctccccgacgtcgtcgacgcatcgccggcca

SEQ ID NO: 6891 - DNA, 390 bp, Zea mays
  Clone ID: LIB3137-018-Q1-K1-G6
tttcatgccacatgcgctgcttgatagcgttttccggggcccgtctgcgtgcgtgcgatcgacgcagaggcgcgggcgctcgcaccaagccgatccgatggccttcatgcgctcccgctcaaatgcatcttctggcatgggagttgctcctaacattagggagacgtttgtcgagctccaaatgaagaagacattccgatatgttatcttcaaaatcgaagaaaagcaaaagcaggtagttgtggagaagacaggggccactactgaaagctatgatgattttctggcctctctcccagagaatgactgccgatatgcgctgtatgattttgattttgtcaccggcgagaatgtgcagaaaagcaagattttcttcattgcctgatcccc

SEQ ID NO: 6892 - DNA, 401 bp, Zea mays
  Clone ID: LIB3137-018-Q1-K1-G7
ctctcgagacagtacttccaccaaggccttctttcaagctgacagacatggagatagatgagggcgaggagacgactatgcatgatgtgaacaacatcgaggaagagatgcgcaggaagcaagctcacgctgcccaggaggcgtacgaggaggacgacgagatgccgggcggagcccagagagtgcagtgcgcgcaacagtaagcagactatcatcaaggcaattgggaggggtggtgcccttaaagcatgggagtgatctctggttttgctgtcgccgagctgggaaataggaagctgaatcgaccccacaaacagaagttaaaaggtacccagctatgcctgggtagcattttttatgttgcagcaaaaacccacgcgtgcgctggcttctcctccccc

SEQ ID NO: 6893 - DNA, 390 bp, Zea mays
  Clone ID: LIB3137-018-Q1-K1-G8
cgccaccttatctctaaccggagatcaaagatgtagccgttaacgatggcttccgacgagcgtcgcaaaggccgtcgagcccaggaagaagggcaacgtcaagtatgcctgcatatgtgccatcctggcctccatggcctctgtcatccttggctatgacattggggtgatgagtggagcggccatgtacatcaagaaggacctgaatatcacggacgtgcagctggagatcctgatcggcatcctcagtctctactcgctgttcggatccttcgctggcgcgcggacgtacgacaggatcgggcgccgcttgaccgtcgtgttcgccgctgtcatcttcttcgtgggctcgttgctcatgggtttcgccgtcaactacggcatgctcat

SEQ ID NO: 6894 - DNA, 411 bp, Zea mays
  Clone ID: LIB3137-018-Q1-K1-G9
caatcattaacgagagtgctctggcctctgtctagctatctcgtccggtcctgcatcagggcgtagatatagtggggatagttgtgttgttggtctggaaagaagagagggaaaaaaaaagatccatggcgacggaggaggccggccgtgccctggcgacgaaggcgaagctggtggcggcggtgctggtgctggagctgctcgtcgcgggcttccacgtcgtgtcgagggcggcgctcgacatgggcgtcagcaagatggcgttcctcgtctaccggaacgccgcagccctgctcgtggtcgcccccgtcgcctacttcctcgacaagaaagataggccgcccttcacgctacgcttgctgatggacttcttcttgctggctgcagtcggcgtaaccttcacacatgggc

SEQ ID NO: 6895 - DNA, 442 bp, Zea mays
  Clone ID: LIB3137-018-Q1-K1-H1
cccggacccgcgactatgtggtcgcgctcttttcgctcatgctcgtgcaccgcctccttggggatggcgacccgttcttccaccgcgagctcctccatggcacacggcggggtacccgcctgctgaacctctccgattttcgggacgaggcgcactctggatcgtggcatcactctgcctttgtgcgcacctatgcgctctaccttgaccagcgcctcgagttcttcctccatgatcgcaagcaggggttccttgacaggttccttgcttgaccacctacagcagctgcttgacaggttccttgcttgccgacccactggtggcgcaaagcaaagcaggatggtgctgcgtgcgctgtatcacattgtgagagaaagcttccagctctactctgatatctgcgaggtgctggcggtgctgctggacaggttccttgacatgg

SEQ ID NO: 6896 - DNA, 440 bp, Zea mays
  Clone ID: LIB3137-018-Q1-K1-H10
gtgaccttcttgtctgccctgatccgagatttgttacagttcgactggagggacttgagggcattcttaaagctgggcatcgtgacaagaccatgggtgcaacaggtgacactaatgtcttagctcagatgatcgatgaagcggaaggcctgcaaaagatctataacctacagatccacgataacaatgaaatctatgaaaaggctgtgaagcttcttgagacatactgtatggaggacgaagatgacgcaatggatactgccgaggaatctgctcctgatgtttttgactttaaccaaggtggcaaccctcctgatgctggtggtcagaacttgaactgatacagactttgatcgaaagggtgttaactccctcagcgatgggcttggcattgtcttgtcgtgacaaatgtattctggtcgactccacgtgggatataa

SEQ ID NO: 6897 - DNA, 387 bp, Zea mays
  Clone ID: LIB3137-018-Q1-K1-H11
gctggcttctcctccccctcttaccaagtcttcctcgggttagggttccttagggttttgtggaggggcgacggcggcggctgatgtggagtaccgttgcttcgtcggcgggcttgcctgggccaccagcaacgagtcgctggagaatgccttcgcctcctacggcgagatcctcgactccaaggtcatcaccgaccgggagacggggaggtcccgcggcttcggcttcgttaccttctcctccgagaactccatgctcgacgctatctagaacatgaacggcaaggagctcgacggccgtaacatcaccgttaaccatgcccagtcccgtggcggtggcggtggcggcggtggctacggcggccgtcgcggcggcggcggcgggta

SEQ ID NO: 6898 - DNA, 441 bp, Zea mays
  Clone ID: LIB3137-018-Q1-K1-H12
tcggctaggattggccaccagctttgaccgccgtcttccttcccctccgctactgctcctcctgagcccactcccccgcaggagcggcggcggcggcggcgaggtcgtaccccacatcggcgagcggcggcggcaccgccggaggcaaaggcaagatgttcgggcgcgcgccgaagaagagcgacaacaccaagtactacgagatcctcggggtgcccaagtcggcgtcccaggacgatctcaagaaggcctaccgcaaggctgctatcaagaaccaccccgacaagggcggtgaccccgagaagttcaaggagctcgcacaagcctatgaggttttgagtgatccagagaaacgtgagatttatgatcagtatggtgaagatgcccttatagaaggaatgggcggtggaggatcccatgttgatccatttgacatcttct

SEQ ID NO: 6899 - DNA, 437 bp, Zea mays
  Clone ID: LIB3137-018-Q1-K1-H2
gtcgtgtgcctggtcgaccagcgacctggcttgctagctctccagctgcgcgcgccatgggcaacccaacagctaccaagcatgctttcaagcgtattttgacgagcctgcttaagcctggcggtggtgaatacggcaagttcttcagccttccggcgctaaatgatccaaggatcgataagcttccctactctatacgtgttctcctggaatcagctatccgccattgtgataacttccaagttacagagagtgatgttgagaaaatcattgattgggagaacacatctccaaagctggctgagatacctttcaagccagcgagatgcattctaatggacaacactggagtcccagcagttgtagaccttgcagctatgcgtgatatgatgccaaagttgggatgtgatccctacaagattaatccattgattccc

SEQ ID NO: 6900 - DNA, 393 bp, Zea mays
  Clone ID: LIB3137-018-Q1-K1-H3
cggacgcgtggggacgccgcgaagctcgccttcttcgcgctcgccacctcggcgctcctcgtctcgggcgcgagcgcggagggcacgcccaagaggctgacctacgacgagatccagagcaaaacgtacatggaggtgaagggcacgggcacggcgaaccagtgcccgaccatcgacggcggcgtggagtcgttcccgttcaaggccggcaagtaccagatgaagaagctgtgcctggagccgacgtccttcaccgtcaaggcggagggcatcgccaagaacgccccgccagagttccagaagaccaagctcatgacccgcctcacgtacacgctggacgagatcgagggcccgctcgaggtcggctccgacggcacgctcaagttcgaggag

SEQ ID NO: 6901 - DNA, 353 bp, Zea mays
  Clone ID: LIB3137-018-Q1-K1-H4
acttcacctccgatcccgccaccactaccctctcctttcctttgacgtcccgatggcacctgtagatctaacccccaagcagcccaggaaggcctacggcggcgacggcggcgcctactacgagtggagccccgccgacctgcccatgctcggcgtcgcctccatcggcgcagccaagctctcgctcgccgccggcgggctcgcgctccccagctactccgactcagccaaggtcgcctacgtcctccaaggcacgggcacctgcggcatcgtcctcccagaggcgacgaaggagaaggtggtggccgtgaaggagggcgacgcgctggcgctgcccttcggcgtggtgacgt

SEQ ID NO: 6902 - DNA, 341 bp, Zea mays
  Clone ID: LIB3137-018-Q1-K1-H5
cagaaggagctctttgtcgcagccgagggcatgtacacgggccagttcgtctactgcggtggccgcgccaccctctccatcggcaacgtgctgcccctccgcggcatccctgagggtgccgtcgtctgcaacgtcgagcaccacgtcggtgaccgcggtgtcttcgccagggcctctggggactacgccattgtgatcagccacaaccctgacaacggcacatcgaggattaagctgccctctggcgccaagaagattgtccccagcagctgccgtgctatgattgggcaggttgctggtggaggcaggactgagaagccgatgctcaaggctgtaacgcg

SEQ ID NO: 6903 - DNA, 440 bp, Zea mays
  Clone ID: LIB3137-018-Q1-K1-H6
gctagcaatacatcgctagctcacttgatatacatattgcatcggcataaaaactgaattgaccatggcccacttgatctcttctgcaatcgcaggcgcgggcaacttggtcgctgatggaatcagtggtgtcactggcgtagcgtcgcaggttgtagaaggcgtagaggacactttaggcagtatcgtagaagcaatcgaccaaggagtcaaggatgaggaccaactggatttgcccaagtacgtgtgtttcaagggagataatggtctgtacctgagtgctcgaacagttgaaggccacccctacctgcagtttgcatcggaagacattggcgacccaagtgtgaggttcatcacctacaaccacaaggtgaacggcaaacgggtggtgcgcttcaagtcgaaccatctcggcaaggtctggaggcggagccccaact

SEQ ID NO: 6904 - DNA, 445 bp, Zea mays
  Clone ID: LIB3137-018-Q1-K1-H7
gacaactctataccgtgcgagaccccaagctccagcgcagcggcggcggccgcggcggcggcgaccatggctgtcggaaagaacaagaggatctccaagggaaagaagggcggcaagaaaaagaccgtcgaccctttctctaagaaggattggtatgacatcaaggcaccgtcggtgttcattgtgcgcaacatcgggaagactctcgtatacaggacacagggtaccaggattgcttctgagggtctgaagcacagagtctttgacgcttgcctagctgatcttcagggcgacgaggatcaagcttacaggaaaatcaggctccgtgctgaacatgtgcagggcaggaatgtgctcacaaacttttggtgtatgaattttaccactgataaattgacatccctagtgaagaagtggcagacattaatcgaatcccatgttgatg

SEQ ID NO: 6905 - DNA, 432 bp, Zea mays
  unsure (1)..(432): unsure at all n locations; Clone ID: LIB3137-018-Q1-K1-H8
agaagactgaagagaagggaagacatggccgtgacggcggaagcggcggcagagatggtggtggagcggcgggcgtacgcgcgggtggggctcctcggcaaccccagcgacgtgtacggcggcagggccctgtccttcgccatcgccgacttttccgccaccgtgcacctccgcccttcgcccgagctgctcatccagccgcatccgcaccacgacctcgtcgccttcccctctctccctcaactcgtgagccgcttgcaaagtgaaggatattatggaggcgtccggctgctgatggctatctgtaaagttttctacaactattgtgttcaaaataacatcagcttaaaagctgaaaatttcaccttatcatacgatactaatattcctcggcagtctgcgctgtctanttcgagcgcgattgtttgtgct

SEQ ID NO: 6906 - DNA, 277 bp, Zea mays
  unsure (1)..(277): unsure at all n locations; Clone ID: LIB3137-018-Q1-K1-H9
agcacgcctttcccgaccttttccttgagngtcctttgctcactatatatgcaggtacctcgccggtcatcgcgacacctggagtcacatacgtcgacaaggcgaactgtaacagctggatcttacaccaaccaagccattcatccaactgtacgaccagaaagaaattcacttcctgacggagggacttgacgccgctgaaaacaccaccatacactacaaacagaacctatgctacaactgctcaaacaacaccaccatattgactcaatgtata

SEQ ID NO: 6907 - DNA, 421 bp, Zea mays
  Clone ID: LIB3137-019-Q1-K1-A1
tgccctactagtacgggttctgagggagcatcgctcccaaatgggctgatcctggtgttgatgcttattccgctgctgctttgagggctagtccatatgcagttcctggtttgcgtgctagtgggtttacgggcagccaggttattctgccgcttgcacataccttagagcacgaggagttcttagaggttattaggcttgagggacacagcctctgccatgatgaagttgttctgtcacgagatatgtatcttctgcagctgtgcagtggcgtggatgaaaatgcagctggtgcatgtgcacagcttgtctttgcacccatcgatgaatcttttgctgacgatgcaccgctgctgccctcaggctttcgtgtcattccactagatgcaaagacggatccaccgtcaggcacacgcacgct

SEQ ID NO: 6908 - DNA, 441 bp, Zea mays
  Clone ID: LIB3137-019-Q1-K1-A10
gtacgtctcctggggctgattccagcgctcatctcctcctccgtactcgcacggtgctgcagtgctgcaactgtgcctagtcgctactcgctttcctgtgccgcctcgtccgtggtcgtctctctgcccagtctggtgtcctgctctccatgacggccggcctcgccgtgaaccagctccagcctctagcagccgcgacgctcgcctgcttcacgctcaaatcctgccagcatctcctagtcgcccctcgcgcagaatcaacgattgtcagacgtcacctccagttaaactctgtcctggccgagacgtccttgcgcatccctgtttcccctcgccgctgatcgtctcaacgtcgtcctccactaacccggctgtggcatccagttccctcgtcggtcgtcgcgccccttgctcggtctccagtttccatgttggttctta

SEQ ID NO: 6909 - DNA, 446 bp, Zea mays
  Clone ID: LIB3137-019-Q1-K1-A11
caccaaccctagacgatcctcctccgccatgatgcgggacggcgtgcctccgtcggtggccggctccggcggcgcggcgggcggcgacgggcccaggcgatgctcgcagtgcgggcaccacgggcacaacgcgcgaacctgcacggcgcggcccgtcaagctcttcggcgtgcgcatcggggacaagcccatccggaagagcgccagcatggggaacatcgcgcacctcgccgcggagggcagcggcggcagggaggaagggtacggctccgacggggagcgcccgcacaagaagcgaggtgaggcatggactgaagaggagcacaagaagtttctgcttgggttgaataagctagggaaaggcgattggcgtggtatatcccgtaaatatgttggttcaaggacacctactcaagtggctagccatgcgcaaaagtatttcaatc

SEQ ID NO: 6910 - DNA, 452 bp, Zea mays
  Clone ID: LIB3137-019-Q1-K1-A12
tttctcctccgacggcggtgcggctagctcaaccatggcggactccaaggccacctgggcggtcaccctccgcactcgcaagttcatgaccaaccgcctgctggcccgcaaacaatttgtgcttgaggttatccaccccggccgcgccaacgtctccaaggcggagttgaaggagaggcttgccaagatgtacgaggtgaaggaccccaacaccatcttcgtcttcaagttccgcacccacttcggtggaggcaagtccactggcttcggcctcatctacgataacctcgagtctgccaagaagttcgagcccaaataccgcctcatcaggaatggtcttgctactaaggttgagaagtcccgcaagcaaatgaaagagcggaagaacagggccaagaagatccgtggtgtcaagaagaccaaggccggtgatgccaagatgaagtaaacat

SEQ ID NO: 6911 - DNA, 453 bp, Zea mays
  Clone ID: LIB3137-019-Q1-K1-A2
acgcatagtccaaaccctaaccctagcacccccaactcgtcgccgggagatggccatggacgcggagcggcggcaagcggagctgatcgcgcagttctcctctcaagcggtggctctttcgtccgcgcagcagctcgccgctctggtgctcgaggccacctcccacccggccctcttcgccttctccgagctcctcgccctcccggccctctccatgctagctggcactcagtactcgtcttcactggacttgctccggctcttcgcctatggcaccttgaaggactataagaataattcaggatcccttccagcattgttgccggatcaggtccgaaagctaaagcaactcagtgtgctaactctggcagagtcaactaagatactaccatatgatcagctcatgcaagagttggatgtttccaacgtaagagaactcgaagattttctaat

SEQ ID NO: 6912 - DNA, 445 bp, Zea mays
  Clone ID: LIB3137-019-Q1-K1-A3
atccggtccgtgtaccgcctcgccgagacggacgccacggtggtggtgctgccgctgttcgaggtggacgggctcctctgcgccctgctgagctcgctggcttcgggcgcgtccgtggcgctgccggcggcggggcggttctcggcgtccacgttctgggccgacatgcgggcgtcgggcgccacctggtacacggcggtgccgacgatccaccagatcatcctggaccggcacgcgtcgcggccggaggcgtacccggcgctccgattcatccgcagctgcagcgcgtcgctggcgccggcgatcctggagcggctggaggcggcgttcagcgcgccggtgctggaggcgtacgcgatgacggaggcgtcgcacctgatgacgtcaaacccgctgccggaggacgggccacggaagcccgggtcagtggggcgcgcggtggggc

SEQ ID NO: 6913 - DNA, 393 bp, Zea mays
  unsure (1)..(393): unsure at all n locations; Clone ID: LIB3137-019-Q1-K1-A4
gttctagatcgcgagcggccgccctttntttttttttttttttttttttttttttttttttgtgttgttttttttttttttgggctgaaaacatggcccttccttttataattacatatttgtccaacgtaagtgtcagtgcatcccatgatggcatacatacatattttgcgtacatacacatcacatgactggttaattacatatgtccaacgtaagcctcagtgcaccccatgatggcatacatacatattttgcatacatacacacatcacatgactggagaatcattcaaagatctctcattttatccaaaatcaggaaccatgaatttttccttgttgtcgtcggtaagcacctccatccgtgacttctttaacaagcgccccccct

SEQ ID NO: 6914 - DNA, 383 bp, Zea mays
  Clone ID: LIB3137-019-Q1-K1-A5
cattatcatgatcactaaatatccttctctctgcgcggcggcgccgatcggggggctgcgtcctgggagtcatgaacggtgtacccggcgttcagcgcagagcccatccggccatcccgttcgtacctaaccggcaccttcttctgcggatcaatccggcaaagccagcgcgcgcgatgcgccggcggtggtgacagcctgctttctccgggcggcggacgttccgcgtgggcggggcgcgttccccccgaggagccggagccggaggtcttctccttcgccgagcccctccgtcgtggcccacagcggggattcggcggggagatactatggcgagggactgagctcgcgggcacgcgttcaagactgacctgtctgggggg

SEQ ID NO: 6915 - DNA, 441 bp, Zea mays
  Clone ID: LIB3137-019-Q1-K1-A6
ccaacttacaacctggataggctggtccttgaaaggtatccaacattcgttgatgctcttggggacgtgggatgactgccttacaatggtgcatctgtttgcggcattacctgctgttgacggtgaacgtgttgaggtcaaacgaatccataactgccgcaggttaagccatgaatggcaagcatacatatcccgaacccattctctgaggaagacatttatttccgtgaagggcatatattatcatgccgaagttcaaggacaaaagatcacctggctaactccgcatgctcttcagcaagtattaactgatgatgttgatttcaatgtgatgctttcttttctagaattctatgagactcttctaggatttgtgaacttcaaactctatcattcaataaatgtaaattatcctcctattctggatccacgtctggaagc

SEQ ID NO: 6916 - DNA, 449 bp, Zea mays
  Clone ID: LIB3137-019-Q1-K1-A7
cccacgcgtccgcatcaacctggtgttgaggctgggaaaaaggcagcaggagaaggggtggcccttcagaaaagggtgctgactgtattaaatgaggcaacctgcaaggacccttgtgagccattgactatagatgaaattgcagatcgctgccattgccctgaagataaacacaacgcttttcccccctctataacacatgcccaacgtttgcttcctcagattgagatgatctacaaaatagtccagcacatggctgctaacgacagagcaatcatagcagaaggcagctgtggctctcctcgcagcgttaaggtgtacctcggtgaatgcaatgtagacgaagacttgcaggccgcgtaggttccgagcctggatccgtgtaaaattgttggaataaatcaggcgcaacaagatagcgatgcaatgcatgggtgttggcggatcct

SEQ ID NO: 6917 - DNA, 447 bp, Zea mays
  unsure (1)..(447): unsure at all n locations; Clone ID: LIB3137-019-Q1-K1-A8
ccagctttgaccgccgcctcccttcccctccgctactgcgacctccccaccccagtgcccggcaggagcggcggcggcggcggcggcgaggtcgtaccccacatcggcgagcggcggcggcaccgccggaggcaaaggcaagatgttcgggcgcgcgccgaagaagagcgacaacaccaagtactacgagatcctcggggtgcccaagtcggcgtcccaggacgacctcaagaaggcctaccgcaaggctgctatcaagaaccaccccgacaagggcggtgaccccgagaagttcaaggagctcgcacaagcctatgaggttttgagtgatccagagaaacgtgagatttatgatcagtatggtgaagatgcccttaaggaaggaatgggcggtggaggatcccatgttgatccatttgacatcttctcatcattntttggaccctc

SEQ ID NO: 6918 - DNA, 114 bp, Zea mays
  Clone ID: LIB3137-019-Q1-K1-A9
tccctctcttcctctcttctttccccttctcaatttaatcctataccttcctttccaagacctgtctttttttctttccctcctctccttcttcatcttcatcccttctctccc

SEQ ID NO: 6919 - DNA, 350 bp, Zea mays
  unsure (1)..(350): unsure at all n locations; Clone ID: LIB3137-019-Q1-K1-B1
cgactactgcatcggcgactccaatggcgcctcggcggcgtgatgtggccggcggccggtgagaggagagcacagcacacacgcctggactggacctgctgggtggcttggtttggttggttggtgacgagtcgtaataagttgtgggcgcatgggcgccgcgctcgtgagtggcgtgcgccacgatgcatgcgtgtatggtgatgaactgaattggagccgtgcagcaagtcgaataatcgggagccacctcgcgtgatgtgtagtggctagtttttgtacatggacgtgttggatcttgatccatgttttgatctgatctttgagaaatggtaatccgcgttatcnaa

SEQ ID NO: 6920 - DNA, 444 bp, Zea mays
  Clone ID: LIB3137-019-Q1-K1-B10
actagttctagatcgcgacggccgcccttttttttttttttttttttttttcagggagtaggcttgccagcatctcttcattgcagaaaaaaaaaatggattacatccaggaacgcagcaacactacgacccacagcgacagagacgtatcaccctaagcattccccagctacgaagaggcgcctagcctccgaagccgtagagggtgcggccctggcgcttgagcgcgtagacgacatccatggcggtgacggtcttgcggcgcgcgtgctcggtgtaggtgacggcgtcgcgtatgacgttctcgaggaagatcttgagcacgccgcgggtctcctcgtagatgagccccgagatgcgcttcacgccgcccctccgagccagcctccggatcgccggcttggtgatgccctggatgttgtcgcggagcaccttccggtggcg

SEQ ID NO: 6921 - DNA, 449 bp, Zea mays
  Clone ID: LIB3137-019-Q1-K1-B12
gggcgaacatggctgcgtgctcctccgttccctgctccttccccgcgaagcctgacgctcggcgccgaagccccagcggcatcttaagctctcatctccctcggctccctgctacccagtttcgtcggcttcgatcactctctgccgccgcctcgccgccggcgagtcgcctccgcccacgagcctccgtgtccacgtcgcccgccccgtctaaggactacgagttcactgacgggaacggagaggtggagctgagactggacatccaaaagctcggcatagcgagttcaaaagatgttttcgttgatgtcgatgacacatccctactcatcagagccaagtctgacgggacactgaggactttgatgaacgtccaaacactgtttgataggattaagtcttccgagaccatatggttcatcgatgaggaccagttggtggtgaatctg

SEQ ID NO: 6922 - DNA, 448 bp, Zea mays
  unsure (1)..(448): unsure at all n locations; Clone ID: LIB3137-019-Q1-K1-B3
ggctaacgacccgacgagcatccgcgtggttagccgccggctggtgaaggcctccgacgcgtgccatgcagcctcatgtcatgtccctctccaacctcgacctctacgtctgcgactcacagctcggcacgctgtgcgtctaccccaacgccggcggcggcttcagcgcgcgcatccccagcctgttcgagtccctcttgccgtccttgctcaactacctctacccattcgccggccgcctcgtcaccaacccaagctccggcctccccgaactccactgccacaaccaaggcgcagagctcgtggtcggcgaggtcggcgtcgccctggggagcctcaactacggcgcgaccaaggattccttcaagaagatggtgctcccgttccccagggacgtccttctgtcggtgcagctgctctccttcgcgtgcggnggcttctccgtcat

SEQ ID NO: 6923 - DNA, 447 bp, Zea mays
  Clone ID: LIB3137-019-Q1-K1-B4
gtttcattcacatttggtcctgataaagtttctgaatttcttgagaagcatgatttggaccgtatgtgccgagcacatcaggttgtcgaagatggatacgagttttttgctagccgtcaactcgtaacaatattttcagcccctaactactgtggagaattcgacaacgctggtgccatgatgagtgtagatgatacattgatgtgctcgttccaaatattgaagcctgcaaggaagatgatgggtggttcaactaataacaaatctggcttcaagtcattcaggggatggtgacaacggcctgatggtgggcacgctgcgttcgacagggggtacatcttacagcggctgcaactaacaggcatatgcattttcgcggaaacctgcttgggccttggaagggcaaagcagatgtagaactgtgcatcttccatgttggattaacac

SEQ ID NO: 6924 - DNA, 445 bp, Zea mays
  unsure (1)..(445): unsure at all n locations; Clone ID: LIB3137-019-Q1-K1-B5
cagattcagatcagatcgtagcagccaaggattccgcgctccgggggtgccatgaagctggggctcgtctctccctgccttctcctcctcgccttctttgccaccgcggcgtacgcggcgtcggcgtcggcgtcgcgcgcggcggccgtcgtcaggggcgcgggcgccccgtcgcagtcggagttggagtcggacccggagaaccagtgcgtgtacacggtgtacgtgcggacggggtccatctggaagggcggcacggactcgaccatcggcgtgacgctgctgggccccgacggcacgggcatccggatccgggacctggcggggtggggcggcctcatgggcgccggccacgactactacgagcgcggcaacctggacatcttcagcggccggtgcccctgcatgagccaggcgccctgcgccatgaacctcacctncgacg

SEQ ID NO: 6925 - DNA, 441 bp, Zea mays
  Clone ID: LIB3137-019-Q1-K1-B6
gtttgtgcatcatcagtacttaatgtcgtcagcgccaacagttgatgaaggatctacatcgcgctcgacgcttatctggaggcatggtgggttcgtttcttaaccaggatgggatttctctggaccaagcgctcccagttaaccctaatcaggttcaagtcccagctccttcagcaccaaaaagttcagctgcctcttcttctgggtttgtccatccacagcagcgcagcagtatcacaaaaatctgttcgcacccaggttgtgcaaaaggagcgaggggttcatctgggcggtgcattgcgcacggtgggggcagaaggtgccagaaaggaggctgcagcaaaggagctgagggaaagaccatcttctgtaaagcccatggaggggggaagcggtgtgaacaccttggatgcaccaaaagtgcggaaagccggactgatt

SEQ ID NO: 6926 - DNA, 445 bp, Zea mays
  Clone ID: LIB3137-019-Q1-K1-B7
ctaaacttgagttatactcccacactggattattctgatctagctaaaatggtcaggcggggtgtgaaactccagcgtctctgggtactggattgcatttcggataagggtttgcaagtggtggcctccagttgcaaggacctacaagaactcagggtgtttccatcagaattttatgttcctggtgcttctgcagtgacagaggagggacttgttgcaatatcgtcaggctgcccaaaactgacctctttgctgtatttctgtcaccagatgaccaatgaagcgctaattactgtagctaataactgcccaaatttcatcagatttagactctgtatccttgagccaaagaagccagatgccatgacaggccagccgttagatgaaggctttggtgcgattgtccgtgagtgcaaagggctaagacgtctgtcaatatctggtc

SEQ ID NO: 6927 - DNA, 181 bp, Zea mays
  Clone ID: LIB3137-019-Q1-K1-B9
acccactcttcctccctctcttcctctctcctttcccttttcatattaatccaaaaccttcctctccaagaccggttcttatctcattcccccccctccctctttatcttcatcctcactcaccccattcccaatacttctatttttccattccaatatatactaatcacattttcattca

SEQ ID NO: 6928 - DNA, 447 bp, Zea mays
  Clone ID: LIB3137-019-Q1-K1-C1
ccgttcgcctcttctcctccctcctgccgggtccttaataaagagcagcatcgcaagaggtgggtagagcgagcgagaagaatgcaatggcggcggagagcttcctgttcacctcggagtccgtgaacgaggggcacccagacaagctgtgcgaccaggtgtcggacgcggtgctggacgcctgcctggcgcatgaccccgacagcaaggtggcctgcgagacctgcaccaagacgaacatggtgatggttttcggcgagatcaccacgaaggcgagcgtggactacgagaagatcgtgcgcgacacctgccgcgagatcgggttcacctccgacgatgtggggctcgacgccgaccgctgcaaggtgctggtgaacatcgagcagcagtcccccgacatcgcgcatggcgtgcacgggcacttcacgaagcggcccgaggagatcg

SEQ ID NO: 6929 - DNA, 426 bp, Zea mays
  Clone ID: LIB3137-019-Q1-K1-C10
ggggactatggacacggtggctccccgcctgagtcgctcctctacgcgatacgggcgcatgagcagcagtgctgcctccttcagtgggcccgtccggaagtggcgcaaggcctgggtgcccctcaccggcaccggcaccggcaccgccgggtccgggggagggagctcacgaggagacaacaaggtggttctgtttagatggacgccggtgaatggttgttcaggaggagggggaggcaccgacgggggcatggagctcgctgctgcgggggcctccacatgcaggcggcgctacgtcccggctgcaggggaggcgcaaagcaccaccaaaaagggcaccagcagcgagctcaacttgaacctcgagctggaagacccagacgacgacactgatgccgacatgagcaccgacgagccacgcgatgt

SEQ ID NO: 6930 - DNA, 346 bp, Zea mays
  Clone ID: LIB3137-019-Q1-K1-C11
atacggccacatacataaacaacaaaaagataagaaaagccccgctgccagcgacagaagaagaaggggtgccttctacttggttgcgttgagacttcctactgtatgcgtgcgtgcaatcgacgcagatgcacgggctctcgcactaccacgaccacaacccgatggctttcatgctctcccgctcaaatgcatcttctgacatgggagttgctcctaacattagggagacattcattgagcttcaaatgaagaaggcattccgatatgctatcattaaaatcgaagagaagcaaaagcacgtgcttgtggagaagacaagcgctactactgaaagctatgatga

SEQ ID NO: 6931 - DNA, 446 bp, Zea mays
  Clone ID: LIB3137-019-Q1-K1-C12
cgggcctcgcccggagacgggcctcgagaagctccgcaaggccaccaccgcccgcgcgctcggcatcaacaaagacgcggacggcggcagctacaagcgggcgcagtcgatgccgtcgaccccgacgacgccggtgacgccgtcgtcgtcgtcgtcgtcgacgacgccgcgcggcgccggcaacgtgtggcgcatcgtcttccacccggggagcaacctggccaccaagggcatgggcgccaacctcttcgaccggccgcagcccaactcccccaccgtctacgactggctctacagcgacgagaccaggagcaaccaccgctagatcgggcgagatggatggacagtgaagaggccatgtttgctggtccttgtggttatctaaaacgcacgcatgctctattatagctagtcatcactatatatatactcgtgtttgtgtattg

SEQ ID NO: 6932 - DNA, 454 bp, Zea mays
  Clone ID: LIB3137-019-Q1-K1-C2
aacatttctttgcacatatacagctgcttgtatacagaagtttttatttgatggagaggtagaaaaaaatgcaactgagttgaaaaatgttgtttcgtgcgctagttacatgcttgaacaaaagctgcttgaagcatggtgtgctgataagactgctgaagcattaagatgccagaagttgctggaggatgaagaggaagctgctcagaaaaggcaagccgaactgatggaaaggaagcggatgaagaaacttaggcagaaagaacagaggttaaaaaacctcaaggatgaggatgcgacagttcagtcacctgaaatcatggatgatgcgacatgttctactgccattcaaagtgtgaattccatttatgatcctgactgttttgagcaagaagaatcgcagtatcttcaatttccagcactaattactttggaaactgacaatgattttaat

SEQ ID NO: 6933 - DNA, 384 bp, Zea mays
  Clone ID: LIB3137-019-Q1-K1-C4
catgatcctgctggagggcgaccgggtggctcttcttttttacggttcggcagtgcagtacggcctgaccgcctcttccctggtgcagcgccacttcctcatattcaccgtctccgacgcgaggttctgcaagccgcttgaccacgccctgatcatgagcctgtccaagtcccacgaggtgctcatcaccgtggaggaaggctccatcggagggttcggctcgcacgtcgcccagttcatggcccttgacggccttcttgactgcaaactcaagtggctaccgctggtgcttcctgacaggtacatctaccatggatcgccggccgatcatcttgccgaggctgggctgacgccgtcacacatcgccgcgtcggtgttcaacat

SEQ ID NO: 6934 - DNA, 445 bp, Zea mays
  Clone ID: LIB3137-019-Q1-K1-C9
ccctctcttcctctctgctttccccttctcattttaatcctgtaccttccgtgccgcgacctgtccttctccctttccctccgctccttcttcatcttcatcccctctcgccccatgccccatactcctatttcccaggccaagaaaagggaggcagattggcgtgcggaggatggcgtccggatttgattccttcgcgtctttctccgtcaaggtcttcgtggatgaggcgattggagcggaatatggggagggcttcgaaacatttctaatggattgaccactcaaggttgatgtggatcatctgaatgaaaaatcgcatgagtgcttccttcaaaggatattgcatgctatgaagcctaatgatgcgtttgttctaattttttcgtgggacaatcttattgctgatacagactcgctaaagttgaatgcttgtagacaactt

SEQ ID NO: 6935 - DNA, 453 bp, Zea mays
  Clone ID: LIB3137-019-Q1-K1-D1
cgagaagatggcttccccctcgtacaggcttgcggcggcgatcaacggccccctctaccggcgaggttcctcgtcgtccggcagccgcgcccgccatccccacccgaggaggaagaggattaccggcgcttcgtcgacagcgatctctacgacctcccgtccgcgcccctcgggccactcgagggggcaccccggtcggaggtggccatcggcggcgcggactctgtcgccagccgcctcgacctctcgcgcctcgacgtgtccgccgcccttgatcagatctttcaccaatttggcttgccggctgggatgagtggggagtggaggctcctgaagtatgtggaggaagcagaatttggcccggatgctggcattaacacggtgtacattgtcggatctcttgagttgagattggatgatctgccagagtcatgtaaatggatgtccaaggag

SEQ ID NO: 6936 - DNA, 431 bp, Zea mays
  unsure (1)..(431): unsure at all n locations; Clone ID: LIB3137-019-Q1-K1-D10
cttgaagcaagtaaatatcanatggctgagtatcggatatctatttatgggaggaggaaaagcgaatgggaccaaatggcaagttggatagtgaacaatgaattatatagcgagaatgttgtttggttaattcagattcctcggatatacaatgtatacagggagatgggcacaatcaattctttccaaaacctccttgacaatatttttctccctctttatgaagtaactgttgacccagcttcacatcctcagctccatgttttcttaaaacaggttgttgggttggatttggtggatgatgaaagcaaacctgaaagacgcccaacaaaacacatgccaacacctgagcaatggactaatattttcaatccagcctatgcgtattatgtgtactattgctatgccaatctgtatacactgaacaagct

SEQ ID NO: 6937 - DNA, 433 bp, Zea mays
  Clone ID: LIB3137-019-Q1-K1-D11
gccctctccttgccaagtccgcaggagtcccgagccccctcctatgatcattgcgcgtggacgacgaggaggtcgaccaagggtacgggtacggcgccatgtcgtcggagctggagctctgcgtggcgcgcatcagggacctgagggcggagctggagttcgagcggcgcatgcggcgcaaggcggaggcgctgagcgaggcgctggccgcggagctggccgacgagcggcggcggggcgaggctgcggaggccgagtgccgggcgctgcgggaggaggccggcgccgcgcgcgcggaggcggagctcgccctggagggcgtcgaggaggagcggcggatgctgcgcgtcgccgagctgtggcgcgaggagcgggtgcagatgaagctcgccgacgccagtgccgcgctggacgagaagctgcgggagatcga

SEQ ID NO: 6938 - DNA, 440 bp, Zea mays
  Clone ID: LIB3137-019-Q1-K1-D12
cagccaaatcgggctatagatcaaacgctgcactgtagggagcgtgaagccagcggcgaagggaatccctagccgccacctccgtgttcgcgccctcccgcgtcgccgtcccggcggcgcgggccctggttagggcggggacggtggtaccaaccaggcggacgagcagccggagcggaaccagcggggtgaaatgctctgctgccgtgacgccgcaggcgagcccagtgattagcaggagcgctgcggcggcgaaggcggcggaggaggacaagaggcggttcttcgaggcggcggcgcgggggagcgggaaggggaacctggtgcccatgtgggagtgcatcgtgtcggaccatctcacccccgtgctcgcctaccgctgcctcgtccccgaggacaacgtcgacgcccccagcttcctcttcgagtccgtcgagcag

SEQ ID NO: 6939 - DNA, 451 bp, Zea mays
  Clone ID: LIB3137-019-Q1-K1-D2
cttgcccctaccgtggcggatgaagacaagacgcgcgcgcagaagcacacctgctcgggctggattaggaggacagcttcttcggccggcgacatggcggaggagaagggcgcgttgcagtcggcgagggagtgggtggtcgaccacaagctccgggccgtcgggacgctgtggctcagcggcatcgtcggctccatcgcctacaactggtccaagccgggcatgaagaccagcgtcaagatcatccacgccaggctgcatgctcaggctctcacgctggctgccttggctgggtccgcgctggtggagtactacgaccaccagcaagggtcaggatcgaaagttcaccaatatgcaaagcagttcctttcatctgatagcaatagcggccaacaaaaggagtagctagctagtgtccttgcgaagtgcaagcagcggagtgggcgttatt

SEQ ID NO: 6940 - DNA, 211 bp, Zea mays
  Clone ID: LIB3137-019-Q1-K1-D3
ctaggccgtgacgctgtgcgctgacgccattctgagccggacgacattgtcatttgctatgtgcacgagagatagatgtattgtggtgttgttgtataattggtatggagagagtatgcttttgttatgtctgtatctgcataccctgcgtgctttgaatgttatataatacttgatagataataaaggatggtgttcctgaatgttatat

SEQ ID NO: 6941 - DNA, 362 bp, Zea mays
  Clone ID: LIB3137-019-Q1-K1-D5
gcgctgacgcttgttctcgcctctcctctccttttctagttatccactcggagggccaccgctagactgcgtgtctttccggcgagggcctctctgtctaacatcatatacagggcagacaaagctgcgattttggggggggctgttggtccatcattagttgttggtggagataaaccacgtgaaggctggtgctctggtacatgttctccatgcactgatggcattttgccgtggtggaaagatggactgtctttcgcctttcttattcttatcgtcgtctttctgctctaccacctcggtcgttctctttgtggctctttttcctattttttacttgtatgattacctttttcactgtc

SEQ ID NO: 6942 - DNA, 444 bp, Zea mays
  Clone ID: LIB3137-019-Q1-K1-D6
gcgctcgcagcagaaaggttagttagctgacctccgcggggggtcgaaccgagactcttcgtcgggcgggcgcgcatggccagcccagcaggcgccggacgcgaaagcttgctcagctctgtgttcaccggcggcacgggccgtcccggcgatggaatccttcggtgtccctcctgcgcccgtggcggcgccggagaagaggaagaagccgctcgacctcaaggaccccgttcccgccgtcgccgccgccgtcgtcaacggcggcggcgccaccaaggcgtccccagcggcgaagtgggcggagaagaagaagctggtgggcggcgacgccggctacgtgctcgaggacgtgccgcacctcacggattacctgccccagcttccgacatacccgaaccccctccaagacaacccggcgtattcagtcgtcaagcagtacttcgt

SEQ ID NO: 6943 - DNA, 443 bp, Zea mays
  Clone ID: LIB3137-019-Q1-K1-D7
gcccaacatccgttctggtagcttcgccgactttgggcctcggaggtatatggagggcgagcacatccgaatagatgatctttccgcccatctcggctcgatgttggtctgccctctgcctagcgccttctacggggtctttgacggccatggcggcccggacgccgcagcctacatgaagaggcatgcgatgaggttcttgtttgaggaaagcgagttcccacaggcgtcgcaggtggatgaggtgtacctcgagtccgtggagagctgtgtccgcagagccttcctgcaggcggaccttgccctggctgatgatctggacatcagccggtcctctggaaccacggcgctcactgcattagtgtttggaaggcaactggtggtcgcgaacacgggggactgccgcgcggtgttgtgccggaaaggagtggcgatggagatgt

SEQ ID NO: 6944 - DNA, 444 bp, Zea mays
  Clone ID: LIB3137-019-Q1-K1-D8
agcaagatcaatccagaccacatcgagatgtatgccgagaggactgcgaaagggaatgtcggtgagcccgaaggattggtggagatcaaattcaggccaaaggaactggaagattgcatgctaaggcttgacccagaattgattggtctgaatactaggctgaaagagatgaagaaacaaaatgccagcatctcggaaatggagaccatacggaggagtatgactattcggatgaagcagttgatgcctatttatactcatgttgccacacgatttgccgaattgcatgacacctctgctagaatggccgccaaaggtgtgatcggtaaggttgttgattggaaagagtctcgggccttcttctacaggagattgcgaaggagagttgctgaggatgccctggccaaggaagttaaagaagctgctggcgagcagctttcccac

SEQ ID NO: 6945 - DNA, 217 bp, Zea mays
  Clone ID: LIB3137-019-Q1-K1-D9
gacccacgcgtcctctcataataacacatcacctttcccttccatttcaacacaaccccaaactccacaggacgagtctttttataactcctcccgctcattacaaaattcattacataatcatcccacaactaaaactattattaacctaaccataatctattctactaaaaacaaatttaaacccttcctcatttaataatttcttaaaattcat

SEQ ID NO: 6946 - DNA, 445 bp, Zea mays
  Clone ID: LIB3137-019-Q1-K1-E10
ctcatgaccatcgccggtggattcgtctgctccctcctattcctgctactcctcacggtttggtggaaactatcaagaagctagtggagatagaactgggtggggtgcagttgttgtagcacaacttgtagctcttattgtagccggcactgtccaccgtgtctgtatcacaacatgcttcctgttttccgctggactcctttacgaggttgacaagctctctggcatgatccttgcgaggagtgagtctaaggtgaggcggcactaagcacagaagcagcacagagagatgatacattgatatttttatgtaagatgacatattttgtatgtcaaactggagtgttggttcgcgttggccatcaggccttttctgctagccatataggggctctggattctggattactggtgcgtttgcaccgaggtcacactctgatgtttg

SEQ ID NO: 6947 - DNA, 436 bp, Zea mays
  Clone ID: LIB3137-019-Q1-K1-E11
caggaaaccaagatgctggcctagctgacatcccagcaactgtggctgctgtgaagaatccgaaccctaaggtggtttatgatgagtacaatcatgaaagatatcctcctggagatcccagcaagcgtgcatttgcttactttgtcctgagtggtgggaggttcatatatgcatcactgctgcgtctcctcgtattgaagtttgtcctgagcatgtcagcaagtaaggacgtgcttgcccttgcttcactcgaggtggacctctccagcattgagccagggaccacggtgactgtgaagtggcgcggaaagccagtcttcatcaggcgccggacggaggacgacatcaagcttgccaacagtgtggatgtggcatccctgcgccacccagagcaggatgcagagcgtgtgaagaatcccgagtggctggtggtcat

SEQ ID NO: 6948 - DNA, 422 bp, Zea mays
  Clone ID: LIB3137-019-Q1-K1-E12
cttagctccactccagctccaatcgctttcgtgaccagagcgcgagagctagctgggggggggtgaaaatgccgatcaataggatcgccctggggagccaccaggaggtgtaccacccgggcgccctcaaggcggcgttcgctgagttcatctccaccctcatcttcgtcttcgccggccagggctccggcatggccttcagcaagctgaccggcggcggcccgacgaccccggcgggcctgatcgcggcggcggtggcgcacgcgttcgcgctgttcgtggcggtgtctgtgggcgcgaacatctccggcgggcacgtgaaccctgccgtgaccttcggcgccttcgtgggcggcaacatcaccctgttccgggggctcctgtactgtgtggcgcagctgctgtggtccaccgtggcgtgc

SEQ ID NO: 6949 - DNA, 454 bp, Zea mays
  Clone ID: LIB3137-019-Q1-K1-E2
acgaaaccctcctgcctcgccgccgcttcctcatcctcccgccgcttagtcccggacccggagcaggcttcgtgaggacgggaattggactaagggggtaggatgccgccaaagaaagcggcgccatcgaaggcggagctggccaagaagcagaaggtcgtggaggacaagaccttcgggctgaagaacaagaataagagcaagaacgtccaaaagtacgtccagtccctgcaccaggccgtccagcccaagcctgactcgaccaagaccgccgccaagaagaagaaggaggaagagaaggcgcgcgagaaggagcttaatgatctgttcaaggttgccgtcagccagcccaaggtccctgctggtgttgatcccaagtcaatattgtgtgagttcttcaaggctggccagtgccagaagggttttaagtgcaaattctctcatgacctgaatg

SEQ ID NO: 6950 - DNA, 437 bp, Zea mays
  unsure (1)..(437): unsure at all n locations; Clone ID: LIB3137-019-Q1-K1-E3
gccaccgtttttcaagcgtctcacgacattgctctgatccacttgagaaggaaaaaagtgttagtctgtgttcaatgatcaaggataatgtcnnaaaacatcttacacaagtatgtcttccagtttactttaacgaaccattatcatctcttcaaaaatgctttgaggacttggaatattcttatttgttgcatcgtgcatatgaatgtggcctaaagggggacaatttgatgagaattcttaatgttgctgcatttgcggtttctgggtatgcttcctcggttgggcgcccctgcaaacctttcaatccattgttaggggaaacctatgaagctgattaccctgaaaatggaatccgtttcttttctgaaaaggttagtcatcatccaatggtcatggctcgtcattgtgaaggaaaagggtggaaattttgggga

SEQ ID NO: 6951 - DNA, 426 bp, Zea mays
  Clone ID: LIB3137-019-Q1-K1-E4
gtccagtacgaaatccaaggagctcagtggtcacgacatctttgccgatcacgaagatccgaagccggacaggtcaaggagatcagactatggcagctctgctgctcagtcaccagtgaaaaatgcaaatgtgagctccttctcgtttggagaggccgacattgacagcacagtgaaaacagcaaagaagaaagggtccagcaacttgtctactgatctgaacggcaagaccatgcccaagaaggattcagcgtctgcagagaaacagcctccgaaccgtgcgaggccgaaaggaatgagtggcagcagcaattttgcagacgggaaggcctcaacctcaacaaccggagatcatgaaggccgtcgtacccggcagcctcctggcggcgacagcagcattttgctgggctagcgtgcatatgaatc

SEQ ID NO: 6952 - DNA, 446 bp, Zea mays
  Clone ID: LIB3137-019-Q1-K1-E5
gagttccactccactctcccataatgaggataggggcaggggcgaacatggctgcgtgctcgtccgggccctgctctttccccgcgaagcctgaccctcaccgccgaagccccagcggcatcttaagctctcatctccctcggctccctgctacccagtttcgtcggcttcgatcactctctgccgccgcctcgccgccggcgagtcgcctccgcccacgagcctccgtgtccacgtcgcccgccccgtctaaggactacgagttcactgacgggaacggagaggtggagctgagactggacatccaaaagctcggcatagcgagttcaaaagatgttttcgttgatgtcgatgacacatccctactcatcagagccaagtctgacgggacactgaggactttgatgaacgtccaaacactgtttgatgggattaagtcttccgag

SEQ ID NO: 6953 - DNA, 446 bp, Zea mays
  unsure (1)..(446): unsure at all n locations; Clone ID: LIB3137-019-Q1-K1-E6
gcgccgaccacaccgttcctcctagcccanaatcttcccctcgccaggaggaagtttgttctttgaacagtttgtctagggaggagaatgtttacatggccaacttggctgagcaggctgaaaggtatgaggagatggttgagtatatggagaaggtggctaagactgtagatgtggaagagctcactgttgaggagcgtaaccttctgtctgttgcatacaagaatgtgattggggctcgccgcgcttcatggcgcattgtttcttccattgaacaaaaggaggagtcccgtaagaacgaatagcatgtgaaccttatcaaggaatatcgtggcaagatcgaggctgaactgagcaatatctgtgatggcatcttgaagctgcttgactcccacctagtgccttcttctactgctgctgaatcaaaggtcttctacctcaagatg

SEQ ID NO: 6954 - DNA, 449 bp, Zea mays
  Clone ID: LIB3137-019-Q1-K1-E7
gaaaaaagaggattgcctcctttgccccactgggttttctgccaacatggctgcaaggacaggcctggggagtattacctctcttttgtcccctggaagaaaacctgcagagcacgagagaattgccatcttctcagatgcgctgaaccatgcttcaatcattgatgggattcgccttttggagcggcagcaagaagcattagtgtttgtgtacaagcactgtgacatgtttcatctcgatttcctgctgtccagttgctcattggaaaagaaagttgttgtcacagatagcctgttcagcatggatggtgatttcgctccatttcctgaacttattaaattacgcagaaagtatggttttttgttggtcatcgatgatgctcatgggacacttgtttgcggtgagaatggtggtggtgcagctgagctgtttgaatgtgaaaaggaca

SEQ ID NO: 6955 - DNA, 438 bp, Zea mays
  Clone ID: LIB3137-019-Q1-K1-E8
ctcctcaccatttcccaaaccctacccatacccccgccgccgccgccatgccgcccgagctggacccgtcgcaggtggtggaggtcttcgtccgggtgacgggcggcgaggtcggcgcggcgtcgtccctggcgcccaagatcggcccgctcggtctctccccgaagaagatcggcgaggacattgccaaggagacggccaaggactggaatggcctgcgcgtcaccgtcaagctcactgtccagaaccgccaggccaaggtctccgtcgtcccctccgccgccgcgctcgtcatcaatgcgctcaatgagcccgagagggacaggaagaaggtcaagaacatcaagcacagcggcaacatcggcctcgacgacgtcgtcgacatcgccaggaccatgatgaacacgtccatggccaaggagttggccggcaccgtca

SEQ ID NO: 6956 - DNA, 354 bp, Zea mays
  Clone ID: LIB3137-019-Q1-K1-E9
ctaatcctctctcttatccaaaccattttctttctccttccaaaccctaagctcgcctggcctgtttttttacacctccgttcacctattgctaatttcttctaggtctacatgcattgcatcttttattatcgcgcctacttcaccaacgttcacaactttcactgttcttatcgctactacctgtagtgttccctcgctcttctctcttacctgctctcgttccttaccatcctctactgcgatttcgttctcattctcctcaccttctctctcaacaatctttatgtctattcctacatcaacatcctcaatggcatcgtcatccctttgtactagctctcactcaccctc

SEQ ID NO: 6957 - DNA, 256 bp, Zea mays
  Clone ID: LIB3137-019-Q1-K1-F1
cagaaggagctctctgtcgcagcccgaggcatgtacacgggccaattcgtctactgggggtggcggggcaaccctcttcaatgggaaacgtgcttgcccctccgcgggatcccctgaggggtggccgtcgtcttgcaacgtcgagcaccaacgtcgtgtgaaccgcggtggtcttcgccaggggcctctgggggactatcgccatttgtgatcaagccacataccctgacatacggcaacatcgagggattaaagc

SEQ ID NO: 6958 - DNA, 170 bp, Zea mays
  Clone ID: LIB3137-019-Q1-K1-F10
gtccggggacgcgtacgcgtggtgctagagactcttagtgcacaacctaccagcagcgcccacaggtaagggtaacgggctggggtctacagggcttggccgagcccactcctttggcggtggcaggatgagctgaattcttgagctcgtcgtcctcgtttccgccgcca

SEQ ID NO: 6959 - DNA, 437 bp, Zea mays
  Clone ID: LIB3137-019-Q1-K1-F11
gtaagatgcttccatacatcaccttatcagttacagttcctcacacacttagtttgggagaggagatgtggctagcagagctactctaagaggaaggagctgatataatccaaaccgagggtgggaaatgttctagcccgacaaagcctggagttcttggattgattgaaaaggcaacaccaacactcgccgcagcatactccatctctcgggctgttagtattccagtgatgtgctcgtcagggttaagctcggtgactgcaccaatggcagtaactgcaggagctgctggagttggagtcggttctgctattaacaaactcaacgacgttgtggcaatgatcgctgaggtgagaagcattgcgcaagcaatggatcttgcgccaagaatcgtgtccgaaaacttgagaacaattaattactagtggctaggaata

SEQ ID NO: 6960 - DNA, 437 bp, Zea mays
  Clone ID: LIB3137-019-Q1-K1-F12
cctccacctttgtactcttgtcctcatctccctttcccctccataggatgctgtcggggggggaacagtgactcagcggcagctcattgttggtgagctgcaggcctgctgcagctcagccacaccaatccactccactcctcgctgtcactgaagatataaagcatcctttgatggatcataaggcatggctctggagaaagaaatcagcagaaagggagttggagaaggagaaggttttgttattagagagatccttgcaagacttaaatgagcaactttcgtttgctcattccgagtgcgttgagaaggatgccattttagctaaacagtcaaaagtagctgaaaaagccatattacgttgggaaaaagctgaggccgaggcactagctatcaagacacaacttgatgatacattagatgaaaaaatggcaatg

SEQ ID NO: 6961 - DNA, 453 bp, Zea mays
  Clone ID: LIB3137-019-Q1-K1-F2
cggacgcgtgggcgcgctcaactccacgggccttgagctagggttttcttcgccgctacctggctaggaggcgtgcgtgcagccatggcgctggtgcatgcggtcatgggccttacccgggtcgttatcctcgtcggcgccggcgttgccggctccgtcgtcctccgcaacggccgcctcgccgagatcctcggcgagctccaggagatactcgacaaggggaagaaggtgaaggatggaggagggggagacggtgaaaccgatctcaacgaggctcttacctcgcaggtgcgtcgccttgccatggaggtccggcaacttggtaattcacgttcaataactgttctcaatggaggttctgcacaatcaggagtatcaggcctgatagtacctgcagcaactgtaggagcactgggttacggttatatgtggtggaaggggatctcgttctca

SEQ ID NO: 6962 - DNA, 451 bp, Zea mays
  unsure (1)..(451): unsure at all n locations; Clone ID: LIB3137-019-Q1-K1-F4
tgcgtgtgcaacggctaccacctgcgcgacccaccgcgagcgcccgcagctaagctagctgtcgctcgcgcgctctgggagaggagagatcaatggcgtcccgtggcagcatgacctgtagtcttcagctcgccgtcctcgtttccgccgccatcgcgctcgggttcggcgtccgggccggcgaggcgcagctgtccagcgagtactacggccagacgtgccccgtcgtgcaccgggtcgcgcggcgggtgctgaagaaggcgcacgaggccgacgtccgcatctacgccagcctcacccgcctccatttccacgactgcttcgtgcaaggctgcgacggctccatcctgctggacaacagctcgagcatcgtgtcggagaagttcgccacgcccaacaacaactcggcgcgcgggtaccncgtggtcgacgccgtcaaggcggcgctgga

SEQ ID NO: 6963 - DNA, 428 bp, Zea mays
  Clone ID: LIB3137-019-Q1-K1-F5
tgatggtctcttcccgtcactttacagagaattcatcagaagagctccgcatgaattcaagagttcgtgtctagaggccatcaaagatttatttccacacgactcaaatccgttttatgctggatttggaaatagagacacagacgagcttagctacctcaaggttggtattcctatgggcaagatcttcataataaaccccaagggtgaagtcgcagtgaaccgacgggtcgatacaaagtcgtacacatccttgcatgctcttgtccacgggatgttccctccaatattgtcgtcatctgagcaggaggactacaatgcttggaattactggaagatgccattgcctgatgttgatttgtgaggtacaagtcgagtctgcacaacagcactgcactaattttatgatgtgccgtagtgatcatgag

SEQ ID NO: 6964 - DNA, 340 bp, Zea mays
  Clone ID: LIB3137-017-Q1-K1-G1
gtaatgctgcagggcacttgctcacccttgttgagaagaacccccgtcgtatctttgagggtgaggcgcttcttcgccgcatgaaccgctatgggctgcttgctgagggtcagaacaagcttgattatgttcttgccctcaccgctgagaacttcctcgcaaggcggcttcaaacacttgtcttcaaggctggcatggccaagtccattcaccatgctcgtgtcttgatcaagcagcgtcacatcagggttggcaggcaaattgtcaacgtcccatcattcatggtgagggtggagtctgagaagcacattgacttttcactgtcaagcccattcggtgg

SEQ ID NO: 6965 - DNA, 384 bp, Zea mays
  Clone ID: LIB3137-015-Q1-K1-F4
cggacgcgtgggcgaccacaccgttcctccgtgcccattacagccccgcgccaggaggaagtgggggcgtttaacaatatgtcgagggaggagaatgtttacatggccaagttggctgagcaggctgaaaggtatgaggagatggttgagtatatggagaaggtggctaagactgtagatgtggaagagctcactgttgaggagcgtaaccttctgtctgttgcatacaagaatgtgattggggctcgccgcgcttcatggcgcattgtttcttccattgaacaaaaggaggagtcccgtaagaacgaagagcatgtgaaccttatcaaggaatatcgtggcaagatcgaggctgaactgaacaatatctgtgatggaatcttg

SEQ ID NO: 6966 - DNA, 415 bp, Zea mays
  Clone ID: LIB3137-015-Q1-K1-F5
cgcacccagcgatcagcgcagattccttccacgccccccctcctttccaggtcccctcgcccgcgctgtcagatctcgcgcgcctcccacaagggaaaccttgagccatgggcacagttgtggatgccgctccagcagttgtggctgaggtcactgagaacatgttgggtggcaagaaagttacagttgtatttgtcctaggtggtcctggaagtggaaaaggcacacagtgtgccaacatcgtggagcactttggattcacccatcttagtgctggagatcttctgcgtgcagagattaaatctggctctgagaacggaaccatgattgagaacatgataaaagagggaaagattgttccatcggaagtgactataaagcttttgcaggaagcaatgataaaaagtgaaaatga

SEQ ID NO: 6967 - DNA, 358 bp, Zea mays
  Clone ID: LIB3137-015-Q1-K1-F6
ctcgcggtccgacgacgcaaaaaggttttgccaggattatgggacatggagacgtgagctttataaggattctagaggaactcagacttcatctgaacctacttccagaaatctggaatcgaacaaaaaatcccaagtgcagcaaaaggttgtgaagaaattaccagtttcagatcttcgtggaaagttatctggtgtcgcgagccagcgccctcaacttagcagtactgttcaggtcccaaaacctgtaaaagaggttattaagagcaacaaacctgttcaaaagagagaccccgctccaactactgcccctcctgacatcaagaaacccagtgcacctgcacctgtaccagcacca

SEQ ID NO: 6968 - DNA, 337 bp, Zea mays
  Clone ID: LIB3137-015-Q1-K1-F7
gttcgttgccggctcgctccccagctccagcttgcagatcagatacatccattcacggaccggaaggtgagcgccgggaacgaaccatccgccctgctagctgcgatctgtagccttgcgtcgctttcgcgcctagatcgtcacgtcacctgtcacgatccgtgcggttctagatctgtggtttttccttcccctggtggtcgaatccttccatccaccagaccaccacgggacctcgtggggattccttttggtttttcctctgccgagagccaaaatcgaggggggaggggcttggttttgattggctcggtctcccgctgtctcgtgatctgat

SEQ ID NO: 6969 - DNA, 427 bp, Zea mays
  Clone ID: LIB3137-015-Q1-K1-F8
gggatccttcaacagataagtacaccagtgtttatatatgatgcaacaacggtaactgaagcagaggctctcaataaagagaggttgcaagctgaagttggattgcctgtggactcgagcatccctgttatactttttgtcgggcgtcttgaagaacagaaagggtctgacatactcattgcagccattccagagttcgtgggcgagaatgttcagataatcgttcttggcacgggaaagaagaaaatggaggaggaattaatgcagctggaagtgaaatatccaaacattgctagaggcatagcgaaattcaatgttccattggcacatatgatgtttgctgggtctgacttcattattgtcccaagtaggtttgagccatgtggtctcattcagttgcaagggatgagatatggagtgattccca

SEQ ID NO: 6970 - DNA, 352 bp, Zea mays
  Clone ID: LIB3137-015-Q1-K1-F9
cagaccatactgttcgttgctggcataatcttcctgttccagacgttattcgggacgcgggggccggtcgtgatgggcggctcgtacgtcttcgtcgggccgaccatctcgatcgtcttggctggacggtacagcaatgaagcagaccctcacgagaaattcctgcggacgatgagggggacgcaaggcgctctcctcgttgcgtcgacgattcacatcatacttgggttcagtggcctctggcgcaacgttgtcaaattactgagtccgctggcagctgttcctctggtatcactggtcgggttcgggctctacgagcttggctttccaggggtagcgaaatgcgtggaag

SEQ ID NO: 6971 - DNA, 365 bp, Zea mays
  Clone ID: LIB3137-015-Q1-K1-G11
accgggccgagcgacgcgtccgtcggcctccaacgcttccgtgagtgcttgcttaaccacggccgctgggccatcctcgcggccgtatgcactctctccggcgagtggatcaccggcctcacctgccaggacgccggcaaggtggagctggaggacgggtcctcctacctgggccagccgctgccgttctccatctcgacgctcatctgcatcgaggtgctcgagatcggctacatcgagttccatcgcaacgccgagctcgacccgcagaataggctgtaccccggcagctcctacttcgacccgctcggcctggcggccgacccttaaaagaaagagcggctgcacctggcggacatcaagca

SEQ ID NO: 6972 - DNA, 157 bp, Zea mays
  Clone ID: LIB3137-015-Q1-K1-G2
cccttccggtgaggccgaggagggcatggacaagttcgatttgtaggacaacctcgagttcatcctccagagcatccaggagctgatggaggacccgggggacaacaacgccttcggagacgccaaccagaacgagctcttcgccagcatcggtaac

SEQ ID NO: 6973 - DNA, 402 bp, Zea mays
  Clone ID: LIB3137-015-Q1-K1-G3
cccgagtgcaacgtcatcgaggaggagggcccttacgaggacctcgccggcgatagcggcctgtcccgccgctgccagatcatactcggcttcctcaccttcgtcctcctcttcaccgtcttctgcctcatcatctggggcgccgcccggccgtacgagcccgaggtcatcgtcaagagcttggtgatggacgacttctacgcgggtgaaggcacggaccacagcggcgttccaacaaaattggtcacaacaaactgttctctgcacatagctgtctacaaccctgccacaatgtttggaattcatgtcacttctggccccatccacctgatgtattcagagatcccaatagcagtcggtcaggttcggaggtattaccaaccgaggaagagccaccggatg

SEQ ID NO: 6974 - DNA, 404 bp, Zea mays
  Clone ID: LIB3137-015-Q1-K1-G4
atcgtacagggaggatgacatccacatgagcgttaagtacaatgcgcgggcaagcacaaccaacggaaacaagaagcttgatgctgcttaccaagaagctcattcaaagggatctgcatgccctatattcttgttcttgtcagagaatacaagtgggcagcttgttggtgttgctgaaatgactgacgccgttgattttgagaaaaccctagactattggcaacaggacaagtggaacggctgcttctctgttaagtggcacattgtcaaggacgtgcccaacaatattctcaagcacatcatcctggagaacaatgagaacaagcctgtcacaaacagtcgagacacttaagagatacgcctctgacaaagcctttaaatgctcaagatattcaaggatcatg

SEQ ID NO: 6975 - DNA, 339 bp, Zea mays
  Clone ID: LIB3137-015-Q1-K1-G5
atcgtacatggaggatgacatgcacatgagctttatttacaatgcgcgggcaatcacaaccagagcggagcaagaagcttgatgctgcttaccaaaaagcatagtcaaagggatctgcatgccctatattcttgttcttgtcagagaatacaactgggcagcttgctggtgttgctgaaatgactgacgccgttgattttgagaaaaccctagagtattggcaacaggacaagtggaacggctgcttctctgttaagtggcacattgtcaaggacgtgcccaacaatattctcaagcacatcatcctgtagaacaatgagaacgagccttgtacaaaca

SEQ ID NO: 6976 - DNA, 273 bp, Zea mays
  Clone ID: LIB3137-015-Q1-K1-G6
cacgatcgagcacacaagcacgaagactcgtttaggataaaccacaaaccaccaagccgtgcaagcatcatggagtacggtcagcaggggcagcgcggccacggcgccacgggccatgtcgaccagtacggcaacccagtcggcggcgtcgagcacggcaccggcggcatgaggcacggcacgggaaccaccggcggcatgggccagctgggtgagcacggcggcgctggcatgggtggcgggcagttccagcctgcgagggaggagcacaag

SEQ ID NO: 6977 - DNA, 399 bp, Zea mays
  Clone ID: LIB3137-015-Q1-K1-G7
gccacctcgccgtctcgcacgttcctttttttttctccccagcgcctctccgcgccgcgggggagatccaggttgttcagcatgggtctggtgaaggaaggcgtcgacatggaggagggaaccctagagatcggcatggagtacaggactgtatctggtgtggccgggcctctggtcatattggataaagtaaagggcccaaagtaccaagaaattgtaaacatccgacttggagatggcaccaatcgccgtggtcaagtcctggaagttgatggcgaaaaagctgttgtgcacgtctttgaaggaacttctggaatagacaacaaatacacaaccgtgcagtttacaggcgaggttttgaaaactcctgtctcacttgatatgcttgggcgcattttt

SEQ ID NO: 6978 - DNA, 223 bp, Zea mays
  unsure (1)..(223): unsure at all n locations; Clone ID: LIB3137-015-Q1-K1-G8
ccacaagactccgcggcgccgcagacangctcccgcttatccgaaccgctcgctgctggcgcgtccgcgcgcgtgttcgcgccatggccacacttcctatggcgtcccccgccgccgccatcccctcctacgccacccgccccctcgcctccccttcttcgcgttctcaccgccccctcgcctccccttcttcgcgttctcaccgacacctcacccgcttctt

SEQ ID NO: 6979 - DNA, 338 bp, Zea mays
  Clone ID: LIB3137-015-Q1-K1-H1
gccggacatggtggagttggtggtcagtgaggaataagttccaggacatgagaaagttgacgaagagatgatggggaggagatcaatcaacagctattctccctcggcaactctgaaagaggaccgcaccaaattgcgacggttgagtagcaggaggtgtgttagcactagtagcagggcctcatcgtccagtgatagggttggcaggcgacacagcttctcagctgagatggaggcacggcggtctagcttctcgagcttgaaggattcaaggagagctagtttctccattgatagagatggccggaggtggagcttctcaattgaacaggagcatc

SEQ ID NO: 6980 - DNA, 257 bp, Zea mays
  Clone ID: LIB3137-015-Q1-K1-H11
gtttcctgtttgcttctcgaacgaattcgcttttcgcgtcgccaacgacgtcggtgcagatgcagagctcacagtcacagttgcagaggctggcgacggtgttgcagtgcggagccgtctgggcagctgttgaggcgccggcggcgctggcggtgaccggcgaggaggacatcgacctgctagggatcctgccgccgctcgcggtgttcgccttcttctacttcctcgtcgctcctccggtgatcatgaactggatg

SEQ ID NO: 6981 - DNA, 301 bp, Zea mays
  Clone ID: LIB3137-015-Q1-K1-H12
cagtaatacattgccttcttacacagtactactttactgagtggttatttgaaaacaggttttcccaccagtaagcaagatggatcctgcaatctatggcccgccagaatcatcgatcacagaagcgcacatcactggacagctcaatgggctcacagtacaacaggcggtggacgaggcaaagctgttcatattggactaccatgatgtatatctgccattcctggaccggatcaatgcaatagaggggcggaaggcgtatgcaacccggacaatcttgtttcttaccaaagctggcaca

SEQ ID NO: 6982 - DNA, 406 bp, Zea mays
  Clone ID: LIB3137-015-Q1-K1-H2
gagcactcgcagcggttagagtcgcacttccattctattcctggccttcagatggttgcctgcgccactccttacaacgcaaagggcctgatgaaggcggccataaggagcgagaaccccgtggtgctgtttgagcacgtcctcttgtacaacctgaaggagaaaatccccgacgaggagtacatctgctgcctggaggaggcggagatggtgcggccaggtgagcacgtgaccatcctcacgtactcccgcatgaggtaccacgtgatgcaggctgccaagacgctggtgaacaaggggtacgaccccgaggtcatcgacatcaggtcgctgaagccgttcgacctgcacacgatcgggaactcgatcaagaagacccaccgcgtgctgatcgtggaggagtgca

SEQ ID NO: 6983 - DNA, 206 bp, Zea mays
  Clone ID: LIB3137-015-Q1-K1-H4
gcgaccgttcagtggccagcgttttaacagacatctatgtgtctgcgacaacaactaggtgcctgagcgacggcgtacagcacaacgcgcccgcatactactgaaggtgcgaggcctacatctgtatcataacaggcgacgagcatccagtctgcactgtacgatggacgcccctacgtgcacggcttccacggcctggaggagtc

SEQ ID NO: 6984 - DNA, 236 bp, Zea mays
  Clone ID: LIB3137-015-Q1-K1-H5
atcgttacgttagtcgtcttcccgcactaagttgcttttcactttcgacaaatacctggccggaccgggatttaacagccaaagcgacagaagctagcggctgtggcaatggccatacatgtctttcaacttgtgcttgctccaccagtccacctgtcgaatggacgcgcctacatcgaccttttacggatcctcgcgcagttcgcaatggttcacttcttatacttactagcagc

SEQ ID NO: 6985 - DNA, 249 bp, Zea mays
  Clone ID: LIB3137-015-Q1-K1-H6
gacgcgacgcatccggtctagcctaccctgcgctagctggctcttttttaattttgcagggaagttccagtttcaggtagagtgcaggcggagaaccaatgggggcggcgccgtcgtccgacgactcgtcacgcgccggagacggccgggctgtggcgagcagcgctgcctctggcactggcagcaacagccaccaggcccagtcgaagcgggcgccgccgcctcacaagttccacgagatagttgcgc

SEQ ID NO: 6986 - DNA, 305 bp, Zea mays
  Clone ID: LIB3137-015-Q1-K1-H7
ttgtgaatatgattattccgaagctgggagctggtagggatcgggtgttgtctgtatgctatctggcatgcctaatgtgatggcactggttagtacctgtttgtatggccttgtatagaatatatttcgtcgcatcagcttgagttgtggttgcgtgaacctaccatatatttcctcgcaaaagaataatgtgtcgttcaaaaaaaaaaaacaaacatgaccacctctcctgcaaatgcgacagcatgtaaaaatgctaccaactgcactgataaataacatcgaccaacaaccattaatattgg

SEQ ID NO: 6987 - DNA, 327 bp, Zea mays
  Clone ID: LIB3137-015-Q1-K1-H8
gaccgaaaatcaattttactgcaaatgtttctttttaatgagttagaagagctgaacacggaagcttttaacaggcaactgtgctttgaaacattgtgggaaatcaaagcatgcttgtgtggaaaacctggaagacaacggtcgtcacctgtctcctgatgaacatcaaaatgttagtccaaaacaaactacttgtaagaaattggaagtgtccccttcaatctccacaccaatttcttgggttaaaaaatgtgcttcagtgatattcaaacccttttcaaagaagaatgcttaatccaacaattacataccttcaaaattgggaaa

SEQ ID NO: 6988 - DNA, 390 bp, Zea mays
  unsure (1)..(390): unsure at all n locations; Clone ID: LIB3137-015-Q1-K1-H9
atcgcctcgccgccagcgcaactacagttctggccggcatctctttcacccccccctctggctgcgccgcttcgctcccccgtctcggggcctgcctcggatgctcccggcctcgcatccgctgctctacgcctgcgtcttccgcgacacccacctcgtcgccgagctcgaccacgcccactcccactcccagagcaccgccacctccgccgaccccgtcgcttccgacgccccctcccccgcccctgacgacgacctcccggcgctcgccgctgcgctcgtcgccgccgctccgccgcaccaccgncacctnacacacacagncgncgggcgtgcgcacgcgctgctcctgttcccgccgntcgcactcgccgccgtctcgcgggcgcc

SEQ ID NO: 6989 - DNA, 414 bp, Zea mays
  Clone ID: LIB3137-016-Q1-K1-A1
cgcaggtgtgggaaacatggttgctgtcggcgaacggcgttaacagccgcacctccgttcctccgggcgtgcctccgttcctccggctgcgcccccgctcctccgaccgcccccggtacctctggttgacctcgcccccattcctccggctccgcttcgtgttctccggcctcgcccctgttcatccaaccttcggttctagcccctcgtgaaggtaggccagcctgggtatgtagaatttggatgtcagtttccttatattccacatcggttgcattcgacccgtgcataagggtgtgcaaccagttcattggaacatggccccaaattttactacattagctcatttaggattggaggcatactgttttatcacttgcaggtcaattgttttccaagatattgattcacttc

SEQ ID NO: 6990 - DNA, 326 bp, Zea mays
  Clone ID: LIB3137-016-Q1-K1-A10
aaaaaaaagaagaattccccgaacacgaaaggtctacttaaccctgccgccgccgccgcgccatgggcgacgagctcgacgagctgatcggcttcctctccgaccgcaacccccacgtgcggggcgcggcggcggacatcgtgcgcgggctgacgggcggggaggacggcctccgggcgctcacggcgcgcgccgatcgcgcccttccggcgttgctccgcctgctggccttcgggggcggaagtggctcgggagaagccgcggcggactcgctcgtcaacctcagacaagacgcgggccttgcaacgcgccttgtggcgctcggg

SEQ ID NO: 6991 - DNA, 328 bp, Zea mays
  Clone ID: LIB3137-016-Q1-K1-A11
catctctctcccagctctttctaccgcttcttttcttttctagcggggaaaaagaaaagcaaggaagcagctgcacgcacgcacgcgcgtcgcctggccggccatggggttcccgtcggtgtgctactgcgtgatcctgccgcagccgctcatcctggtgctgcagctgctggacttcctgcggcacgccgtgctgctctgcctctcctcgctgggcctcgcggcgccgccggccgccgacgaccacccggcctacgcctacgcggcgccgccgccgtcaccggacctctgggcactgcagccgtcgtccctgcagcagcagcaggcg

SEQ ID NO: 6992 - DNA, 437 bp, Zea mays
  unsure (1)..(437): unsure at all n locations; Clone ID: LIB3137-016-Q1-K1-A12
gcgaagggaaaaaaagaagaagaagagcggctttggatcctcgcatttatcgctcgctccgatgcaccacaccaccatcggtccgtgtcactccatcgcacgcatcgccgccactccgctcggcccgacgcccgagaagcattcgaggaaggaaggaaggaaggagatccgattccaaccaagccgggagctgagagctcccccaccggccccgccgcacctgcagccgctcgcttcggcttcgctcaggctcagcagctgtgtgtgcgtctgcctgtggtgtggactccccctcacatggcgagggcggaggagagccgcaccccgcagctgtctccccattccaatgccaagtgttgatctctcagcaaggagggagaaagcagaaggaccggttntgatcttctgagcggntcatggttatggatcgcgcgggt

SEQ ID NO: 6993 - DNA, 302 bp, Zea mays
  Clone ID: LIB3137-016-Q1-K1-A2
gtgagtgaaacaagcaggacctacacttgctttattggtttaaagacaggtgcacatcagggggcaagggcccacgttgcaatgtttgttgttcttgccatgactttaagaagaaagcctgatgtactggtaaatgttatgccaaagataatgggaaacaataaatatctgggacaggaaaagctttccatcattgtctgggttattgctcaagcctctcaaggtgacctaaagtctggcatgttttgctgggctcattctctatttcccacattatgtgcgaagtcaagtgggaatcccct

SEQ ID NO: 6994 - DNA, 360 bp, Zea mays
  Clone ID: LIB3137-016-Q1-K1-A4
cggacgcgtgggcgcctacaaagatgtggagcttgacatcactctaggagatgattattttttcagtaggtacccgattgtggagaagaggttagcgcaggctggaatcagattggcgttggtacttaatcggatatttggtggaggtgaagctgatgatataccgctacaaatccttgtaatagctatgcttccgggcagccacgagtatcagccccggcgagcggcggcgatgcagaacctgctgtccggcgcgtcccacgagacgctcccggacagcttcatcttcccggccgagcagcgcccgccggcgtcggccgccgccgtcgcgctccccgtcatcgacctgtccgggccccg

SEQ ID NO: 6995 - DNA, 384 bp, Zea mays
  Clone ID: LIB3137-016-Q1-K1-A5
atcgatctgcaagtctcgctacgtagttttgttataaaaaaagcagccgcaatggcgagcagggccatggccctctgctccacggccttcgccggcaaggccgtgaacgtgccgtcgtcgtccgccttcggcgaggcccgcgtgacgatgcgcaagacggcggcgaaggccaagccagcggcggcgtccgggagcccgtggtacggccccgaccgcgtgctgtacctgggcccactgtccggcgagccgccgagctacctgacgggcgagttcccgggcgactacggctgggacaccgcggggctgtcggcggacccggagacgttcgccaagaaccgggagctggaggtgatccactcccgctgggccatgctgggcgcgctc

SEQ ID NO: 6996 - DNA, 391 bp, Zea mays
  Clone ID: LIB3137-016-Q1-K1-A6
agcttatctatgctgggggaaagagaacaggttggctccattaagaaccgcatgcccacctggtgtgcctcttgatttagtcagcaacttcgagatcaaatcctttgatggttgcgcgaatccacacttgggtcttgctgctatcgtagctgctggcatcgatgggctaagaagacaccttaagttgcctgagccaattgaatcaaacccttctgatcactcttcaaaactgaaaaggctaccgcagaacctgcaggaatctgtagaatcgctttctgcagataaggttttgcatgagttaattggtgataaacttgtcacaactgctatagcaatacggaaggctgagatcaatcactttgcgaagaatccgggtggccttaaaggatct

SEQ ID NO: 6997 - DNA, 390 bp, Zea mays
  Clone ID: LIB3137-016-Q1-K1-A7
gagcgcacccgtacgggcagcaacacaagcaagaaccacacctcctttcttcgcctgtgatcatgtcgtcttgctgcggcggcaagtgcgggtgcggctccagctgctcctgcggcagcggatgcaacggctgcggtatgtaccctgacgtggagaccgccgccaccagcagcgtcaagaccacggtcctcgccgcgccgaccaccaaggccagcgccggcggcttcgaggcggccaccgagggcggcggctgcgactgcaacacctgcaagtgcggcaccagctgcggctgctcctgctgcagctgcaactgagccggcccggctcggcgatggcgcacgagagtcgagaggacgacgacgaggaggcgtataataataaatataatag

SEQ ID NO: 6998 - DNA, 386 bp, Zea mays
  Clone ID: LIB3137-016-Q1-K1-A8
ggcgtgcactccctctctctgggacgactactgccgccgccgcagccgcccccacctacgccaggtgccgaggcattcgttggcctcttcgccggtgacgagaacctaccagacttggagcaagcctctcaacatgtcgtgggccgcaatcgagaatgatcctggtgtttttacggaactgttgcagcagatgcaactgaagggtcttcaagttgatgaactctactcacttgacctggatgctctcaatgatcttcagccaatatatgggctaatattgctatacaaatggcgacctccagaaaaggatgagcgtcctgtcatcaaggatgcaatcccaaaccttttctttgccaaccagataattaacaaagcctgcgcaaccc

SEQ ID NO: 6999 - DNA, 294 bp, Zea mays
  Clone ID: LIB3137-016-Q1-K1-A9
ccgggccgaccgacgcgtccgggcagcaacacaatcaatatccacacctcctttcttctcccgcaaaccgccccacctactgggggggcaaatgcaggggcgggggcagctgctcctgacgaaaaccaagcaaccgctgagcaatctacccagacgtggagaccgccgacaccagcagcatcaagaccacggtactcaacgcgccgaccaccaacgacagcaccggcggctacgaaacgaacaccgacgactgcagctgcgactgcaacaccagcaagagccgaaccagctgct

SEQ ID NO: 7000 - DNA, 386 bp, Zea mays
  Clone ID: LIB3137-016-Q1-K1-B1
ccgggacgcccacgcgggcggccaacgccaacactagatggcgatatattattttattgcttcttccaaatatagaacatccacgagggccttaagaaagcatgcaacgtcatgtgctcacatccatggccatccatgaataccgcaagcacacccaccctctttatttatgacatcatcacgccaagccacgcaaggcacccacacacatacatatatgtatgtaaatatatatatatatctcacggatagacttcgaaggcaacacgagctccaaattccttcaggatcttgtattcgctgaaccctgctttggtgaagagctcgctccattctttttcatctctctgccggccttttgtcatggtcatcatgccgatgtccat

SEQ ID NO: 7001 - DNA, 350 bp, Zea mays
  Clone ID: LIB3137-016-Q1-K1-B11
aaaagaaaagctgaaaatggactgccttcacaatagtgctgtgatggagttgatgagaggactgaaaaatcagcttaccgagcttataactgggttgggtgcacaagaccttggtccaatgagcttgggattgtcccacagcttgtctacgtataagctgaagttcagccctgagaaggttgatacaatgatcattcaagccattggattattggatgatcttgacaaggagcttaacacttatgccatgagagttcgtgaatggtatggctggcactttccagagctcaccaaaatagttacagataatatacagtatgccaaacgtgtgaagatgatgggcaacagag

SEQ ID NO: 7002 - DNA, 466 bp, Zea mays
  Clone ID: LIB3137-016-Q1-K1-B12
gcagagacaggcgtcttcgtactcgccttttttcgcgacccaaagcgttcccccttctcccattcttctctcatttctcaccaccgccgccgctaccccctttcgacaacaccatgagggagtgcatctcgatccacatcggccaggccggtatccaggtcggaaacgcgtgctgggagctgtactgcctcgagcatggcattcaggctgatggtcagatgcccggtgacaagaccattgggggaggtgatgatgctttcaacaccttcttcagtgagactggcgctgggaagcacgtcccccgtgctgtttttgttgaccttgagcccactgtcatcgatgaggtgaggactggcacctatcgccagctcttccatcctgagcagctcatcagtggcaaggaggatgcagccaacaacttcgctcgtggtcactacaccattggcaaggagattgttgacctgtg

SEQ ID NO: 7003 - DNA, 312 bp, Zea mays
  Clone ID: LIB3137-016-Q1-K1-B2
gcagcgtccggacaaaaaaaacaataaaatgaagaaaaaaaattttactttttattacaaaaataaaaaaaaccacgagggccttaaagaaagcatgcaacgggatgtgctcatatccatggccatacatgaataccgcaagcacacccaccctctttatttatgacatcatgacaccaagccacgcaaggcacccacacacatacatatatgtatgaaaatatatatatatatctcacggatagacttcgaaggcaacacgatcttcaaatttcttcaagatcttgtattcgctgaaccctgctttgatga

SEQ ID NO: 7004 - DNA, 294 bp, Zea mays
  unsure (1)..(294): unsure at all n locations; Clone ID: LIB3137-016-Q1-K1-B5
ttgatcactgagcacaaccactggngttttttttaatcctcncgcaanaacctaggcgactatttatatcggcggcgtgggtccacctcacttttaccaatggacgtcatgtgtgttcacagaacaatgatattcttgccttgcatctgcatgtaaacattgatatctttcagtcacatactctacctggtttcacccacaaacttactaaggataaactaaaaataaaaccataaaaagttactacaaaacaatcttcaagccaaacacctatttccatcatcatcacaaaca

SEQ ID NO: 7005 - DNA, 255 bp, Zea mays
  unsure (1)..(255): unsure at all n locations; Clone ID: LIB3137-016-Q1-K1-B6
aaaagatacgtgcggggtcgttactacaacggccccggggcgtatgctcnngacaagaaccccannacttcgtcggctggcgtcgaagggtgccactcggcatccccgcggctggcttccngagtcgcanggcccatcacgtacacttggtcaccgatgacaaaggaagggccccaacttgtgaacttggagaagcacatntgaagacatgcgatgtcctgattaccacccccattccacccagcttatgtcact

SEQ ID NO: 7006 - DNA, 429 bp, Zea mays
  unsure (1)..(429): unsure at all n locations; Clone ID: LIB3137-016-Q1-K1-B7
anacaccagggacangccccgcctcctctctcgagtcctgacgtgccccttttgctccggccccacttcctcgcaaaaccctaacccctcgatctcccaagatggcgtcgcagccgccgccccctgccgcagccgcggcatctggagctccgccgccggcacaagtggtgggcaacgccttcgtgcatcagtactacaacatcttgcaccagtcgccggagctcgtctaccgcttctaccaggaggccagctgcctcgggcgccccgccggcaccggtgccgacggcatggacacggtcaccaccatggacgcgattaacgacaagatcgtgtccatgggtatcgaccgggcggagatcaaggcggtggacgcgcangaatcgctctgtggcggcgtcagcgtgctcgtcatgggtcatcttacgggga

SEQ ID NO: 7007 - DNA, 374 bp, Zea mays
  unsure (1)..(374): unsure at all n locations; Clone ID: LIB3137-016-Q1-K1-B8
gtgacttctctctcctctcgatcgattgctttctccaccgaggcgggggaaagcgccgcccagatcgccgtangcaagcggcgatcactccagctttgagcataagtttctgcagggaggctcgtgaagtcagtagtcgtatctggcagtggcagcacagcgcaccatggaatggctgagctggagaacggtgtgttgtttatcagtgctgtgcaccgtgctgttcttgcgcccggtcgagggcattcgctttgtgatcgatagagaagagtgcttctcgcataacgtggagtatgagggggatactgtccatgtatccttcgtcgtcatcaaggctgacaccccgtggcattacagcgaagaaggcgttgatc

SEQ ID NO: 7008 - DNA, 378 bp, Zea mays
  Clone ID: LIB3137-016-Q1-K1-B9
ctggaaaccctagccgccatatctcacgattttctcgagcaccaagccgagggaaggtgaggagcgatggcgcgcggcgtggtgtcggcgaagggcggcgcggtcgcgggcaagaagaaggggtcggtttccttcacgatcgactgcaccaagccagtggaggacaagatcatggaggtcgcctcgctcgagaagttcctgcaggagcgcatcaaggtcgccggcggcaaggctggcaacctcggcgactccgtcaccatctctcgcgagaagaccaaggtcaccgtcacctctgacgggcccttcttcaagaggtacctgaagtacttgaccaagaagtacttgaagaagcacaacgtgcgggattggctacgcgtg

SEQ ID NO: 7009 - DNA, 409 bp, Zea mays
  unsure (1)..(409): unsure at all n locations; Clone ID: LIB3137-016-Q1-K1-C1
gccagctctcccagcacacgagcacatggcgttcaccttcctcctcgctgtcttcctgctcgtggctgcgtccgcagcggcgccggcgcggtcttgctcacctcgcgacctgcaggcgctgttgagcgtgaagcaggcgctagggaacccggcaacgctgtcgacgtggaccccagcgtcgcccgactgctgctcgtgggaccacctccggtgtaacgacgccggacgcgtgaacaacgtcttcatcgacggcgcggacgacgtgcgcgggcaaatcccgtcggcggtgggcgggctgacggagctcatgtcgctgaccctgttccggctggcggngctgacgggccccatcccggcctgcctggccgcgctgtccaacctgcaagttctgaccgntctccacaccaac

SEQ ID NO: 7010 - DNA, 435 bp, Zea mays
  Clone ID: LIB3137-016-Q1-K1-C10
cctcgctggcgtgccgcctcccctcgccattgccgcggggcgttccgccgctcgtgggacgccgcatcgagactcgagagctgttcgtgctgattcccgcggagccttgtggctgcgactctgcggcgtcgggtggggtggggaggttttgacgcccgtggggtttggatcgagggcccggagctgtgtctccgcaatgccgggctggtctggcggcgattgctagggttttctggtcggatttcggtggaagagctgaggttttgcttcgagtgcgggagctgcctgcaacccccccgcttgccttggcccgagctcggtgtttccgcagcaatgcctagccgattttagctcgctctggggttccgaagggcgaatgggctgtcgggcggttcgagattgcaaggagtcggtggctcggcccaatgtccgggg

SEQ ID NO: 7011 - DNA, 425 bp, Zea mays
  Clone ID: LIB3137-016-Q1-K1-C11
aaacaaaagtggctatgaatcactactgatgttatatagggaaaccgatctaagccaggagaaagttcgtgtgttaggttctttggcatcatcccctgaccatgatgttgtccgtgaagtattgaatttcatattgtcacctgaggtgaggaatcaggacgcaatatttttgctaagaggggtgagttcaggggcacacgaggtagcatggcaatggctgaaggaaaactgggattacatattgggagcctactctggaactctgctcacctatttcgtcaacataactgtctcgccactggccaccgatgaacatggtgacgaggcggaggagtttttcaagagcagaaccaaggcgaacatcgcgaggactgtgaggcagagcatcgagagggtgaggatcaatgcccaatgggtcaagaaca

SEQ ID NO: 7012 - DNA, 468 bp, Zea mays
  Clone ID: LIB3137-016-Q1-K1-C12
ccccaaacaaaaccctaggccaccattctgattaccaggcacaagcagagcagaagcagacatggccaccattccgaccaccgattctggcctcgtcctcagttcctccgctctcctccggaggactaggagggccgcctcatccgtcaccgccaggctgccagccgtcgcccgccgtcgcccgcagctcctcgtgcgtgcctccgccaaggagatcgcctttgaccagggctccagagccgcccttcaggccggcgtcgagaagctcgccgccgcggtcggcgtcaccctcggacccagaggaaggaatgttgtcttggatgagtttggaacccccaaagtggtcaatgatggagttaccattgcccgcgctattgagcttgctgatcccatggagaatgctggtgcttccttgattcgtgaagttgctagcaagacgaatgactcggctggtgatggaaccacaac

SEQ ID NO: 7013 - DNA, 366 bp, Zea mays
  Clone ID: LIB3137-016-Q1-K1-C2
gacgcaacacttacgtgccctacgcacgagattctcttaccgcatcggagggctcctggcctccgctgcgcccatggcgtcccaggcgccgccagagccagcaccggacgaggcgggtctggaaagcatggagggcctcgtactcgacacggtcatcttaagagccggcgcgcgccccgcagcggagctcggctgcgccagaacacgtcctgcgaccgacgttggcgaccactacctctggcgcaaattactgggcgaggaactggggctcgacgctcccgtcgatccagagggccgggctcttgcctacgtccatgatgcatataaactttgggtggagtcttttggcatgtaccctctacctat

SEQ ID NO: 7014 - DNA, 435 bp, Zea mays
  unsure (1)..(435): unsure at all n locations; Clone ID: LIB3137-016-Q1-K1-C3
gttaaaaaatacagcactgaagaacatcatgtttcttatccattatgaagacgaaagtactaggtacctttgtgtatgcccagtaaacaaggcactaaatatgatttgttgttgggttgagaatccaaattcagatgcattcaagcggcaccttccaaggatctatgattatatatggcttgctgaagatggcatgaagttaaaggtgtatgacggcacgcaagcatgggatacagcttttattgtcaaagcatattgctcgactgacctggttcatgagttttctccaacactcangaaggctcatgagttcataaaaagtttgcagatccctgaaaaccaacccgaccatgaaaattattaccgccatagatcaaagggttcatgggctcattcaacattaaacaatggatggtctgtatctgattctacagc

SEQ ID NO: 7015 - DNA, 255 bp, Zea mays
  unsure (1)..(255): unsure at all n locations; Clone ID: LIB3137-016-Q1-K1-C4
atgcgcccgacgcgcagacagacgacggctgctccttcggccgactcgccttccggcgccatcagctcggcaccttctgcctacgcggcattcacagcgctgggaccaggaccggcgcccgagctcgctggcacggtggcgacatcatcactcgccggcagaanacgtcgcagacgcaccggatcgagcctgagcccgccactcatcacaatactggcggccacgggcgcagcgctgctggtggagctgtacaca

SEQ ID NO: 7016 - DNA, 311 bp, Zea mays
  unsure (1)..(311): unsure at all n locations; Clone ID: LIB3137-016-Q1-K1-C5
ggctccaccgccggcgacgtggccgcggtggtggaccaggaggcgtgcatgtacgcgatgcagctggcgtcgtcgtccatcctgcccatgacgctgaagaacgccatcgagctgggcctgctggaggtgctgcaaaaggaggccggcggcggcaaggcggcgctggcgcccgaggaggtggtggcgcggatgcccgcggcgcccagcgaccccgccgccgncgcggccatggtggaccgcatgctccgcctgctcgcctcctacgacgtcgtccggtgccagatggaggaccgggacggccggtacgagcg

SEQ ID NO: 7017 - DNA, 428 bp, Zea mays
  Clone ID: LIB3137-016-Q1-K1-C6
gggaaacgtgggaagagtgggcttggggccttcacttatatcttgcccaagttcgccaatttgtcggggaccggttgggagttgaggtcgaaatggatggctgcaaagctccaattacaaccttcatagttgagccatttgtgccacatgaccaagagtactacctttcgattgtatctgaaaggcttggcaacaccattagtttctcagaatgtggaggtattgagatcgaggagaactgggacaaggttaagactatctttcttcccacagagaagcaaatgacacctgatgcatgtgctccattgattgccaccctgccattggaggtccgcacaaagataggtggtttcattagagctgtattttctggtttccaagacttggatttctcatttcttgagatgaacccattcaccttggtaaat

SEQ ID NO: 7018 - DNA, 422 bp, Zea mays
  Clone ID: LIB3137-016-Q1-K1-C7
gcggctacccctactccgagcgagcttttactttttccacggagacaccaaaatggggccggggaccgggaagcaggggaagtgccccgccaagacgctgtcctacaccaactacttcgccgaggcgctcatcgccgaggcggagcaggacagcaagatcgtggccatccacgcggccatgggcggcggcacggggctcaactacttcctccgccgcttcccgagccggtgcttcgacgtcgggatcgcggagcagcacgccgtcacgttcgcggccggcctggcctgcgagggcctcaagcccttctgcgccatctactcgtctttcctgcagcgcggctacgaccaggtcgtgcacgacgtccatctgcaaaagctaccggtgcggttcgccatggacagggccgggctggtcggcgcgg

SEQ ID NO: 7019 - DNA, 380 bp, Zea mays
  unsure (1)..(380): unsure at all n locations; Clone ID: LIB3137-016-Q1-K1-C8
gccgctctgcagccgagtcgagtcgaactagcgcgcgagcgagcgaggaagaagaagagctagctatactgctgcttcctcgcgcgcagcancagcagcaaacgaagaaagctccatctgcttgcgcacacacacacatacacacacacaccagctagctccatgggcggcagcgcggatgcgaacggcgcggggtcggtgcgggtgccggtgccgccggcgcggccgttcctggacacgttccgcgggaacctcaaggagaccttcttcccggacgacccgttccgcggggtggtgcgggagcgcggggccgggcggcggaccgtggccgcgctgcgctacttcttccccgtcctcgagtgggcgccggcctacgcgct

SEQ ID NO: 7020 - DNA, 440 bp, Zea mays
  Clone ID: LIB3137-016-Q1-K1-D1
accgtccttctcgacgccggccccattcattcttggtgggtttgaagaacgcgcagtccaaaagcgaaacagggggaaggggcgaggcagccaaacgaatcccagcacctgcctctcctttgcttgcgcacatctagcgatggcggcgggcggtgagttggcgtggggggaggagcccgtggcgcggcgccggcctaagaccaagatcgtctgcacgctcggcccggcgtcgcgatccgtcgagatgatctcgcgcctgctgcgcgccgggatgtgcgtcgcgcgcttcaacttctcccatggctcccacgagtaccaccaggagacgctcgacaacctgcacgccggcattgaactcaccgggatcctctgcgccggtatgctcgacaccaagggtccagagattagaactggatttttgaaagatgggaagcctattc

SEQ ID NO: 7021 - DNA, 384 bp, Zea mays
  Clone ID: LIB3137-016-Q1-K1-D10
cgatcccttcacaaagcgccgccgtcgcttcatctaacatggctccgaagaaggataaaggcccgcccccgtcgtcgaagcccggcaaatcccgcggtggcaaacaaaaaaagaagaagtggagcaagggaaaggttaagggaaaaggggacaacgccggggttgttgaacaagcttactaacacaaggttgtttttgaggtgcccaagtacaagcagatcacccccttcattctattcgagcgccttaagatcaatggcttcctggctcggagggctatcaaggacctgatggcgcgtggcctcatccggttggtctcggttcactcaagccagcagatctacaccagggcaacgaatacctaaggatgggattcccttgttt

SEQ ID NO: 7022 - DNA, 385 bp, Zea mays
  unsure (1)..(385): unsure at all n locations; Clone ID: LIB3137-016-Q1-K1-D12
ttcgtcgtcgtccccaggtttatctaanggtgaatgtaaaatccaacatagaaggacagtgtgaggtgtaaaggcagtgagcatggccagtagggctgggtctgataccttctctgacaccagtgacaggcactctgaatctggttctatgcagtctgttgatgatatcctaccacgtagggggattatgggtcttccgaagctctctattggtgaaatgggtcagaattttgctgaccctgagtttgtttgctttgactatgctgattcagaagagagattaagtgatatatctgatagtgtttttttcatgggtacagagactgatttttataaagcattatatgtgagtttattcttttttttgtgttggtatttttttttt

SEQ ID NO: 7023 - DNA, 155 bp, Zea mays
  Clone ID: LIB3137-016-Q1-K1-D2
gctctagatacgcagtgcccatacattcgtgtttgtcttcagaaccgcgctctacctagacgagacattgggatgcgatcatatcggcgcctaaactaggaaactactacttgctctgattgactaacatctcaagaacctccggatggacaatc

SEQ ID NO: 7024 - DNA, 277 bp, Zea mays
  unsure (1)..(277): unsure at all n locations; Clone ID: LIB3137-016-Q1-K1-D3
ggggaaccccgacccgctcggcgactgcccgttctcgcaaagggtgctgctcacgctggaggagaagaacgtgcnctacgaggtgaagctcgtcgacctcgataacaagcccgaatggttctgacgatcacccagacggaaggtgcctgtgttcaacggttggtgatgggcaaatgcattggctgattctgatgtaatcacccaaaccattgaggaggacgtcccaactccatctctggtcactcccgtagaatatgcatcagtgggatcaaagatt

SEQ ID NO: 7025 - DNA, 374 bp, Zea mays
  Clone ID: LIB3137-016-Q1-K1-D4
gctcaaacaaactgatgggccagaggaaaacatgtttggaaattcaactgtgggagagaacaccgagagaggctggagagaactcatattccagcggatacgcggagtgttcggttttgggatctaaagaatctaaagaggcgatttggcatgaagttagatttcaaatttttacggggtcagaccatgcacgtcatagcaatccatgttttattcacccatttgttttccatgtccttaaacacagaacactgcatatcgtggggggtttaaaaacatctgttattcgaacgctgcaatgttgcttgctcccgaaatgagtcgacgctgatctgggttggttatcttgttgcaatgattaagaatgtgtgtcg

SEQ ID NO: 7026 - DNA, 376 bp, Zea mays
  Clone ID: LIB3137-016-Q1-K1-D5
cgcgattccaatccacgcacgccatctccgactccttgtccgcctcgcgcaggacatatattcagtgatggaacacaaggaggccggctgccagcagccggagggcccaatcctatgcatcaataactgtggtttctttggaagcgctgccaccatgaacatgtgctccaagtgccacaaggagatgataatgaagcaggagcaggcccagttggctgcctcctccatcgatagcattgtcaatggcggtgataatgggaaaggacctgcaattgctgcaactgtaggtgtggcagttcctcaagtcgaggagaagactatcgtcgtgcagcctatgcatgtcgctgaaaccagcgaggctgctgctgttatcgcg

SEQ ID NO: 7027 - DNA, 381 bp, Zea mays
  Clone ID: LIB3137-016-Q1-K1-D6
ggctggcttctcctccccctcttaccaagtcctctttgggttagggttacttacggttttgtggaggggcgatggcggcggctgatgtggagtaccgttgcttcgtcggcgggcttgcctgggccaccagcaacgagtcgctggagaatgccttcgcctcctacggcgagatcctcgactccaaggtcatcaccgaccgggagacggggaggtctcgcggcttcggcttcgttaccttctcctccgagaactccatgctcgacgctatcgagaacatgaacggcaaggagctcgacggccgtaacatcaccgttaaccaggcccagtcccgtggcggtggcggtggcggcggtggctaccgcggcggtcgcggcggcggcg

SEQ ID NO: 7028 - DNA, 344 bp, Zea mays
  Clone ID: LIB3137-016-Q1-K1-D7
cggacgcgtgggtttttttttttttttttttttttttttttttttttttttttttttggtttgtttttttttttttggggacaggaagggccttttttgaaataatgaaattgaaaggctttgtttttccaaatgtcaatatacccattactttaaaagtacacgggattttaggcgcagtttataaagagacatttagcaaagtggcaaccaaaaacaactgttttttggggtccaactaacaacatggaaagggaacatcctccggtcctttagggttaaaacaaaccttggactcttttttttcacctgcaaaattggtctccacgtaataaatgaatgcc

SEQ ID NO: 7029 - DNA, 332 bp, Zea mays
  unsure (1)..(332): unsure at all n locations; Clone ID: LIB3137-016-Q1-K1-D8
gacgacttgtttcattgattcttgaagagatcgagcttcttttgcaccacaaggtcgaggatgtcttgcaactgcggatcaagctgcggctgcggctcaagctgcaagtgcggcaagaagtaccctgacctggaggagacgagcaccgccgcgcangccaccgtcgtcctcggcgtggccccggagaagaaggccgcgcccgagttcgtcgaggccgcggcggagtccggcgaggccgcccacgcctgcggctgcggtagcagctgcaagtgcgacccctgcaactgctgatcacatcgatcgacgaccatggatatgattattatctatct

SEQ ID NO: 7030 - DNA, 343 bp, Zea mays
  Clone ID: LIB3137-016-Q1-K1-D9
aactcctctaaacccttcctctccctccggcgccggcgccgacatggccgtccactacctcctccgccgcggggtctccggtggctcactgctccaccctatccacggtctcttcctcgcctccaaggagcttgggaggcgtccgtttggctctgcggcggcgggagacgcagcggccgagctgaggggcgcgcgggaggacgtcaggcagctgctcaaggccacctcctgccatcccatcctggttcgattaggttggcatgatgctggtacatatgacaagaacatttccgagtggcccaaaggtggtggagctaatggtagcttgagattcgaagtcgag

SEQ ID NO: 7031 - DNA, 408 bp, Zea mays
  unsure (1)..(408): unsure at all n locations; Clone ID: LIB3137-016-Q1-K1-E1
gcatcctccatgtccaggccgctctcttccttctgctttcaccggatcaggtccggcggcaccgcgtggaccgccgcgcctccatcgatatgcgccaacaaggacgacggcggcggcggcggcggcggagagagcaggtccctaaaggatggcaagcaaaaggacgagtgggaggaggctaacgagaagggcagcgcagaggccgtcgtcgtggggaggaaggtgatggtggcggcggcggacggcggcggcgaggaggcccgcacggcgctgcagtgggcgctgtcgcacgccgtccggccctgcgacacggtggtcctgctcgacgtcgccagcggcaagaaccgtacgtgcgtaagctgcgtgtgaccaataaccatctattntaagtcctgctggttacagtac

SEQ ID NO: 7032 - DNA, 389 bp, Zea mays
  Clone ID: LIB3137-016-Q1-K1-E10
gagctagctcacttgatatacatattgcttgtcataaaaactgaatttaccatggcccacttgatctcttctgcaatcgcaggcgcgggcaacttggtcgctgatggaatcagtggtgtcactggcgtagcgtcgcaggttgtagaaggcgtagaggacactttaggcagtatcgtagaagcaatcgaccaaggagtcaaggatgaggaccaactggatttgcccaagtacgtgtgtttcaagggagataacggtctgtacctgagtgctcgaacggttgaaggccatccctacctgcagtttgcatcggaagacattggcgacccaagtgtgaggttcatcacctacaaccacaaggtgaacggcaaacgggtggtgcgcttgaagtc

SEQ ID NO: 7033 - DNA, 409 bp, Zea mays
  Clone ID: LIB3137-016-Q1-K1-E11
cggacgcgtgggcggacgcgtgggcgcctgcttgcagccccttggcttcgttccatccggcttctcggcggcggcggagaggagggggatggcgcaccggctgctgcgggacgcgcaggcggacgggtgggagcggtcggacttccccatcatctgcgagtcatgcctcggcgacaacccctacgtccggatgttaagagctgaatatgacaaagaatgcaaaatttgtgcacgtccttttactgtattccggtggcgtcctgggcgagatgcaaggtacaagaagactgagatctgccagacatgttgcaagctaaagaatgtctgccaggtctgcctgctggatcttgaatatggtctgcctgttcaggtccgagatacagcactctctatcaattccaatgatgca

SEQ ID NO: 7034 - DNA, 409 bp, Zea mays
  Clone ID: LIB3137-016-Q1-K1-E12
gcctcgtcggcgcgcgctgtcctcatgtttctttcggcgcgcgctgtcctcatggtccccgtgcccaccgccacagctcgcggcggccggcgtgccgaagcactgcttccgacgcagcgccgacggctacctgtactgcgagggagtgagggtggaagacgcgatggcggctgccgagcgcagccccttctatctctacagcaagcttcagatcctccacaacttcgccccttctatctctacaacaacctccccgtgctacgcatcctgcgtgagcttggctgcggcgtcgtcctcgtcagcagcaacgagctccgactcgccctcgaggcgggattcgaccccgccaggtgcggctctcgttcctagatttttacttcctgggatgaactggtgtcattgagcaaat

SEQ ID NO: 7035 - DNA, 415 bp, Zea mays
  Clone ID: LIB3137-016-Q1-K1-E3
tttaagaatctctgttggacatgattcacgatttgttcacataaattgcagaacgcagtcactcatggaatcactgctgctggacacgatatcctacagtttggattggcttcaacacctgcaatgttcaacagtacacttacagaagatgagagaagtcatttacctgttgatggagccataatgataacagcaagccatctcccctacaatcggaatggtctcaagttttttacaagtgatggtgggctaaataaagctgatatcaaagatatcctggagcgtgcttccaaaatatatgaggaatctgcacataataacctgaaagaacagggggaagcttcgaagggagttgtcactaatgtggactacatgtcaatttatgcttctgatcttgtacaagcagttcgtaaat

SEQ ID NO: 7036 - DNA, 400 bp, Zea mays
  unsure (1)..(400): unsure at all n locations; Clone ID: LIB3137-016-Q1-K1-E4
ctccacacgtactgtacgtgtggagtgtaatgtagtttccatgcatgagtgaatccatgccatgttatgaatctagtccttcctttcttgtatcttccatgtgacgcggcgtgtgcgtcccctcatgtgtgatgatgccagatgaatactacaactaagacgttgttgtattcatcaggcatccaagaagctcaaagcaagcagatctaagctccaggcagcgtcgcgacagagtgagtgagtagcacgacaacaacaatggcttccctgaaggccgcgaagcccagcggagttgcggcgcanggcaaggagccggcgcccaagctcagcgagacggcgacgaagccgtcagccgcgaagagcggcggcgttaagaaggctgagcagaagccccgggaaa

SEQ ID NO: 7037 - DNA, 368 bp, Zea mays
  Clone ID: LIB3137-016-Q1-K1-E5
ggcttggtcctccttgtatcccgacctccttttcttatacccgtttccccgctagagttatcggtgctctgcagcgatggcgatcaagcggaccaaggcggagaagaagatcgcgtacgacaagaagctgtgcagcctgctcgatgagtacaccaaggtgctcatcgccctcgccgacaacgtcggctccaagcagctccaagacatccgccggggcctcaggggcgactcggtggtgctcatgggcaagaacacgctcatcaggcgctgcatcaaggtctacgccgagaagaccggcaaccacacctttgacccgctcatggacctgctcgtcggcaacgttggcctcatcttcaccaagggagacc

SEQ ID NO: 7038 - DNA, 395 bp, Zea mays
  Clone ID: LIB3137-016-Q1-K1-E6
caggattggagcagcacattgttctgccacgttattcctatttacaggattattttgatgacgttgcaaagtacatgaaagtaggtccaccattatactttgttgtgaaggacttcaattacagctctgcgtcggtggatacaaatcaaatatgttcaatcagccagtgtaattcaaattctcttttgaatgagatatcacgacaatcattatcccctgagactagttacattgctaaacctgctgcttcatggcttgatgacttcctaatttggatgtcccctgaagcatttggatgctgtagaaaatttgtgaatggaagttactgccctccagacgatcagcctccatgctgccaactcgatcaggtttcaagctcttgcatgacaagcaaa

SEQ ID NO: 7039 - DNA, 411 bp, Zea mays
  Clone ID: LIB3137-016-Q1-K1-E7
ctcgccttcccctcccatccctccgaaccgatttagcaaagctagagacgatgacgctgacgatcccggacgaggtgcgcgccaaggcggatgtgtacgtgggcgacgcggcggggcaggagaagacgcggctgctcctccaggagacgggcctcccgagcgggctgctcccgctgcgggacatcatcgagtgcggctacgtggaggagacgggcttcgtgtggctccggcagcgccgcaaggtggaccactacttcgccaaggccggccgccacgtgacgtacggcgccgaggtgtcggcggtggccgacaagggccggctcaagaagatcacgggcgtcaaggccaaggagatgctgctgtgggtcaccctgcacgagatctgcgtcgacgacccgcccacgggtaagc

SEQ ID NO: 7040 - DNA, 295 bp, Zea mays
  Clone ID: LIB3137-016-Q1-K1-E8
gcaggaggacggagagcgccggcgaggaggcatggatccagacaaggccggggaggcagcgaaggagccgacggaaacggaggctggagactccgtggatccccgcgaactattgtccagcgacgacgagatcgactacttcgtcgagcctgatttctacgaccccgacctatatgacgtcgatgagcggtgggtgagcagacagaggaaaagccgcgcaatctgacgccgtgcttaactgccccgcctgtttcactaccctgtgcttggattgccagaggcatgagaagtacgt

SEQ ID NO: 7041 - DNA, 379 bp, Zea mays
  Clone ID: LIB3137-016-Q1-K1-E9
aagaaccacagccaccgcgatggcgcagatctttgatggcaaggccatcgccgccgacgtccgccgcgaggtcgccgccgatgtggccgcgctctcgtcagcccacggactcgtgccggggctggccgtggtcatcgtggggagcaggaaggactcgcagacgtacgtgaacatgaagcgcaaggcgtgcgccgaggtcggcatctgctccatcgacgtcgacctcccggaggacatctccgagaccgcgctcgtcgccgaggttcatcgcctcaacgctgaccccgcagtgcacgggatccttgtccagcttccacttcctaagcatatcaacgaagagaagatactgagcgagatttccatcgagaaagatgtggat

SEQ ID NO: 7042 - DNA, 363 bp, Zea mays
  Clone ID: LIB3137-016-Q1-K1-F1
ccaaaaaccccagtcgcaagggggtggagcctttgagttatgggaagggtgtacagcagtgccgggggggtggacaaggcgtggcagcgcaatcttcatcttatcggcggcggcggcggcggcggggagaagaaggcgtgtcctgccgcggcgcccgcgctggggctgcagaagcataagtcgtggtcaccggacatcgagcgcgacgaggtgtgggagcgccggcgccgggacatgcgccgcggaggcacggcgcttcggcgcgcgcggagcgtcacggacgacgacctcgccgagctccgcgggtgcatcgatctggggttcggcttcgagcccgcggagtcggtgtgcgcggcgtgcggc

SEQ ID NO: 7043 - DNA, 414 bp, Zea mays
  Clone ID: LIB3137-016-Q1-K1-F10
gcaccgcacgcaacaagtacgcaggcagttgttcctcgagccgtcgccatggcgagcaagcagctcgtcctcgccggatgcctgctcctcctcctgcccaccgcctcggtcgccaccgacgtcgactactgcagtaagaaggactacccggtgaaggtgagcggggtgcacatcctgcccgatccggtcgaacccggcaagcccgccactttcaagatctccgcttctactgataaaaccatcgagaaggggaagctggtcatcgacgtaaagtatttcttcttctacgtgcactcggagacccgcgacatctgcggagagacttcctgcccagcgaccggcgacttcgtgctgtcccaccagcagacgctgccaagcttcactccgccgggctcctacacgatctacatgaag

SEQ ID NO: 7044 - DNA, 404 bp, Zea mays
  Clone ID: LIB3137-016-Q1-K1-F11
gttctagatcgcgagcggccgccctttttttttttttttgagaaaagaggcatatatcattgagcaccaaaaacttctttaggcatacttgaaaatccatacagagaccacaaaaactgacacaatgtttcaccatagtaccatccataccggaacacgtccttttaaccatctaataaatcacagcagagggatagataaaacaacaacaatactctaggtggccttgtcagccttggaggctgtggcagcagcctggcctctgagccttccagtcctcctagccgcaataagaccgaccttctggccagggggagcatcgcggcggacagtagaggcatgaccgatatgctggtggttacctcctccgtggggatgctccacggggttcatggccacaccac

SEQ ID NO: 7045 - DNA, 420 bp, Zea mays
  Clone ID: LIB3137-016-Q1-K1-F2
tggaaataggttttgaaaggccacattgcactatactttgctgtgtttcctaatgggacgacagggacctccctcaagctgtactggtgtactgctggaggttggcgggggactgggcgagagggacgccgggacgccgtgttcacggcgtgggaaaacaggctagctcaagttccggcttgcacagggaagacggctaggacatgctcttgatattctttcacgagcaccactctggagagagggtcttgactatcggcatggtacaggccatggaattggatcttatttgaatgtccatgaaggtcctcatctaattagcttcagaccttctgctcgaaatgtaccgctgcaagcatcaatgactgtgacagatgagcctggttattatgaagatggggccctgtgtataagattgga

SEQ ID NO: 7046 - DNA, 338 bp, Zea mays
  unsure (1)..(338): unsure at all n locations; Clone ID: LIB3137-016-Q1-K1-F3
accctgcttccgcgccaantgcttacgacgtttgacttttatgcgctgcggaaccgcaagagcgcggggcgcgcagaggcagtggcgcgcgcgcttgccgccgcgtcgtggatctgtctggacttgacagacatgctcctcgccgacgccgtgttcctggacgtcgccagacttctgccccggcgggcgccgagccccattgccggccccaccgacgaagtggacagcgacaatgaggaggccggctgcagcgtatgctaccccatggtgctcgggcaaatcaccatgtacaacgaacgggaggcgtacaaactttacattgaacagcatgcgggatg

SEQ ID NO: 7047 - DNA, 424 bp, Zea mays
  unsure (1)..(424): unsure at all n locations; Clone ID: LIB3137-016-Q1-K1-F4
gctgagctgagctgcgcccgttttagcgagctatgttatgtccgcgcgcgtgcgccggcgaggattggattggaaccgtcgcccgtcggtcgtcgatggggatccacctggtggcgttcgtggcggcgaggggcttcctgcaggtgttccaggtgtcggcgccgctgctgtggccgctcaacctctggctgccgctcgcgcgccacctgcccgaggcctgcgccgccttctacgacgccctcgtctcgcacgccgcccgcctgcgcgccaccgtccggcgccgccgccgcgacagcggggacgccctcgacgagtacctccgcagcgccatcatgctaaccctctccgactgagactcttgagccgagcgcgcggncaccggccagtgccaggcaacggccagtaccggaggcttgcgtgcaca

SEQ ID NO: 7048 - DNA, 412 bp, Zea mays
  unsure (1)..(412): unsure at all n locations; Clone ID: LIB3137-016-Q1-K1-F5
cgcacttgcagcgtcccgttcccgcacttctcttttttctcgtttcgccctgcacagcgcacgcaactgccaccggccaccgcgcaaactccattgcgcgcagatcaagaccgccacacccaccaccagcgcttcagcgggagacgtgacgactgacgagacgaagcctctccccacggcgcctccccctccacatggcctgggctcgccttgcctcccgctcccgtctgcgccccgcggcctccgccgccggccgatcccgacacgcctcaacaccggctccgccttcgccttcgtncccacctaccacacgcacggtacctgcgggcacctncgcgccaccgctccggcgtctactcctgcttccgcggcaccggtttgctgacgccacgccctcagcatcgaccgcgtg

SEQ ID NO: 7049 - DNA, 349 bp, Zea mays
  Clone ID: LIB3137-016-Q1-K1-F6
ttgggaaagagaaagaactccctacaacttgcacatttaagaagcataaaagaaacaagttaagaaacgcctgaaaggctgttattaatagcgtgaacaagcccattgaacacaatccacctgggaaggatgcttccaatagaatagctagagctcttgggaaggctgcagatatggctaactcaaataaagccaggaaggcacagaggatgcagtatgttccgacaatcactaatcatactcaagtttggtgggttcctaatgttgttgctgtacatgaaaaagaagggatagaggttgtccatctagcttctggacgtacaatatgcaagcttcatttaaatgaaag

SEQ ID NO: 7050 - DNA, 428 bp, Zea mays
  Clone ID: LIB3137-016-Q1-K1-F7
ccgttcgcctcttctcctccctcctgttgggtttctaataaagagcagcagcgcaagaggttggtagagcgagcgagaagaaggcaatggcggcggagagcttcctgttcacctcggagtccgtgaacgaggggcacccagacaagctgtgcgaccaggtgtcggacgcggtgctggacgcctgcctggctcatgaccccgacagcaaggtggcctgcgagacctgcaccaagacgaacatggtgatggttttcggcgacatcaccacgaatgcgagcgtggactacgagaagatcgtgcgcgacacctgccgcgagatcgggttcacctccgacgatgtggggctcgacgccgaccgctgcaaggtgctggtgaacatcgagcagcagtcccccgacatcgggcatggcgtgcacgggcacttgacg

SEQ ID NO: 7051 - DNA, 347 bp, Zea mays
  Clone ID: LIB3137-016-Q1-K1-G10
atttattttacggaaaacacaggaacttccttgtagtcagcccgcagacccacgagtgccatctcatagcaacgctagacatccctccatgcagctagctacttgggtagacgaagactgacagagcgccacacggtaaacgtatggacttggcctattcatatgataatttaacgagaaaggagcgaatcacagctagtgacgctgttctcaattccaaggttcgcaatatagcaagcgatttggcttattaaaatcacgcccatgatagataaattgttgcctgcaatctactgcctcaagctttgcaaaatatactgggcatacaggtccatggagtactgaat

SEQ ID NO: 7052 - DNA, 452 bp, Zea mays
  Clone ID: LIB3137-016-Q1-K1-G11
ctcctgcgcgccgccagtccggcttcttctgtctcctgcgcgccgccagccgtcagcccgtgaccgattggagatccttggaaacctgcgcgccgccagcccgtcaccgcttggagacccgctcagccgcgcttccctgcgcgccgccagccgtcgccgatccgtggccgcgtccgccgccgccagctctgaggtcgcgccgtcagccagcccgtctgccgtcgtgagcattgtttcaagtggttattacgcttcatggatatgtctcaagagcaagaacaagattttggcgtactgctgaagcaaggtgcagaagggagggtatttgcttcgacatttgtgggacgaaagtgtgtaatcaaagagcgttttcaaaaaagtaccgacacccattggtgggactcgacgtgactctaagcgctaaatgctgaggctcgggcatgacaaaagca

SEQ ID NO: 7053 - DNA, 350 bp, Zea mays
  unsure (1)..(350): unsure at all n locations; Clone ID: LIB3137-016-Q1-K1-G12
tttggtgtgagttctgatgttgtcaccgcaacaactacatcagaacgtagccattctcgacatcctaagaaatgcaggttcaagggatgttccaaaggtgcaagaggcgcatcaggattgtgtattgcccatggaggtgggcagagatgtcataaacctggatgccataaaggagccgagagcagctctgcatactgcaaagcccacggtggcggtcgtcggtgtgaggaacttggttgtaccaaaagcgcagaaggaaaaacagattattgcattgctcatggtggangcccgcgctgccaacantcctgctgtcctaaagctgcccggggtaagtctgggcggtgcat

SEQ ID NO: 7054 - DNA, 396 bp, Zea mays
  unsure (1)..(396): unsure at all n locations; Clone ID: LIB3137-016-Q1-K1-G2
gccgtctgccttctgcgcctccatttcggcctctgtcccttgcaagttcaatctcacctccaaccatgggtaaagagaagtcccacatcaacattgtggttattggccacgttgactctggcaagtcgaccaccacaggacacctgatctacaagcttggaggcattgacaagcgtgtgatcgagaggtttgagaaggaggctgctgaaatgaacaagcggtccttcaagtacgcatgggtgctcgacaagctcaaggctgagcgtgagagaggtatcaccattgatatcgctctgtggaagtttgagaccaccaagtactactgcacggtcattgatgcccctggacaccgtgacttcatcaagaacatgatcactggtacctcccangctgact

SEQ ID NO: 7055 - DNA, 353 bp, Zea mays
  Clone ID: LIB3137-016-Q1-K1-G3
gggccctgtccttctccttcggccgtgcccttcaggcgagcaccctcaaggcctgggctggcaaggtggagaacgtggagaaggctagagcggccttcctcgccaggtgcaaggccaactccgaggctaccctcggcacctacaagggtgatgctgccgccgacaccgagagccttcacgtcaaggactacaagtactgagttgcttctctttgcgatcccgttgttttggaactcctgcctgcgagtaggttgctgagtgttgtttgcttgttagagcttttatattcggacatgaaaaaaacatgcttcctatgtggatgatggttatctttatattcggatattaactac

SEQ ID NO: 7056 - DNA, 330 bp, Zea mays
  unsure (1)..(330): unsure at all n locations; Clone ID: LIB3137-016-Q1-K1-G5
cggcgaacacgctgctccgctcggctctgctttgctttactctgctctgctctgcggactttggtgggacaagacaagatccagatgcacaagccgaccgctccttgccacgcccgcgcaatcctctcaacagtcgacaccgccgatggcatcagccgcgcccgcgcccaagccaggggtcctcctcctgcgccgcacggacgcggacttcgccgccgcgctgcgggcgcgcttccgcgtncacgacctgcacgccttcggcgcgccgntcggggccttcctcgccgccgccgcggcggaaccggagcccccgcgcgccgcgctcgtgat

SEQ ID NO: 7057 - DNA, 361 bp, Zea mays
  Clone ID: LIB3137-016-Q1-K1-G6
gccaacgccaacactagatggcgatatattattttatagcttcttccaaatatagaagatccacgagagccttaagaaagcatccaacgtcatgtgctcacatccatggccatccatgaataccgcaagcacacccaccctctttatttatgacatcatcacgccaagccacgcaaggcacccacacacatacatatatgtatgtaaatatatatatatatctcacggatagacttcgaaggcaacacgagctccaaattccttcaggatcttgtattcgctgaaccctgctttggtgaagagctcgctccattctttttcatctctctgccgtccttttgtcatggtcatcatgccgatg

SEQ ID NO: 7058 - DNA, 425 bp, Zea mays
  Clone ID: LIB3137-016-Q1-K1-G7
gccgtctgccttctgcgcctccatttcggcctctgtcccttgcaagttcaatctcacctccaaccatgggtaaagagaagtcccacatcaacattgtggttattggccacgttgactctggcaagtcgaccaccacaggacacctgatctacaagcttggaggcattgacaagcgtgtgatcgagaggtttgagaaggaggctgctgaaatgaacaagcggtccttcaagtacgcatgggtgctcgacaagctcaaggctgagcgtgagagacgtatcaccattgatatcgctctgtggaagtttgagaccaccaagtactactgcacggtcattgatgcccctggacaccgtgacttcatcaagaacatgatcactggtacctcccaagctgactgtgctgtccttatcattgactccaccact

SEQ ID NO: 7059 - DNA, 383 bp, Zea mays
  unsure (1)..(383): unsure at all n locations; Clone ID: LIB3137-016-Q1-K1-G8
cacgcgtncgatagcccanagggcgagaagatcccgaagcgcaatttgaactccagtggtaagaagggtaagcgggggaagaagaaacccctgagaccgaagaagccaaagatgctgaaactggcaaggaggcagaggaggccccaagcgaagatgccgcaaaggagactgatgtggagatgaagcctgctgaagacgtgaagggggcctctgctgaaacacaagatgctgacatggctgatgctcctgcaccagcaccaatggaagaaggataagaaacaaactgaagaactggcagaagctattgcagctcctcctgtgccatcggaagagaagaaagatgtcaagccagctgagcctgaagctgcagcaagcaacccaac

SEQ ID NO: 7060 - DNA, 419 bp, Zea mays
  unsure (1)..(419): unsure at all n locations; Clone ID: LIB3137-016-Q1-K1-G9
gtgctacggcgataggtttattccggacagggcggcgatggatatggacatggcgcactacctgctcacgaagcccaggagggacaaggagaacgctgtggcagcgtccccatccaaggaggcgtaccggaagctgctcgccgagaagttgctcaacaaccggacacgcatccttgccttcaagaacaagccgcctgtgtctgagaacgtctcggcagccatcgcagcttcctcccaccatgccaagctggtcaagcagtgtcgacatattccccagtctgcagagaggattctggacgcaccagagcttgttgacgactactacctcaacctgcttgactgggggagcaacaacgtgctatccattgctctgggcgacacggtatacctgtgggatgcctncagtggatccacgtctg

SEQ ID NO: 7061 - DNA, 422 bp, Zea mays
  Clone ID: LIB3137-016-Q1-K1-H1
atcagaagcaggccatgtcgcagcagataaattgccaaacggcgctgttgaggtgcactctctacctaaagatgcttccgcatttgatatgttaccttcagctgagggaacagatgttgaagccccttccatgagtgctaatgcacaagggtcatcaacgccagatgccaatgaagatgacattgaaaaatatgcaaatttggaagagggcaatacagaaagcttgatatctcctggacaagtttctgcttctggtaaagatatacaatcagaatatactgaagttgtcagccatgtggatgaaggctcgatagagaaaacaaatgactttcagctcaatggccttccatttgagcacaaccaaaatctgaatggagacgtgtctacagcgacaacacaatttgatcatttgactctgcatg

SEQ ID NO: 7062 - DNA, 425 bp, Zea mays
  Clone ID: LIB3137-016-Q1-K1-H10
aagaaaccaaggtacctagttcaaagagtgcttatctaggaatacaatggagggcgctcgtgcgagcgcagcaaccggagccctgcagtccgttgtggcgaagctgcaagctctgctccgcgatgagtacaggcgcctcacgggaatgcgcggcaagatggagtggctcactggcgagctggttgccatgaaggccttcctcaccgacatgtccagggacgagactcctcctgatgaacaacgcaagctgtggatgaaggacgtgcgggagctctcctacgacatcgaagacagcctcgacgacttcttcgtgcagcatgccgccaagccagacggcatcatggagaagatggcgagcctgctggagaagaccaagagtcgccaccggataggcaaggagttcgacgccatcaagaggaaagtca

SEQ ID NO: 7063 - DNA, 353 bp, Zea mays
  unsure (1)..(353): unsure at all n locations; Clone ID: LIB3137-016-Q1-K1-H11
ccgaaacctttcttcgaacgcaaaaagataccttacccgacgtaccgcgagccggcgatgggcgacggtggcgatggacatctcgaagcccacgccggcagcgtccggtgacgaggcagcagcggcggcgaaggggaggagcggcggcgggggcgaggggctgcggcagtactacctgcagcacatccatgacctgcagctccagatccggcagaagacccataacctcaaccgcctcgaggcccagcgcaacgacctcaactcccgagttagaatgctcanggaagacgtgcagttgcttcaagagcctggctcatatgttggtgacgtggtgaacgtcatggggaaatcaa

SEQ ID NO: 7064 - DNA, 285 bp, Zea mays
  unsure (1)..(285): unsure at all n locations; Clone ID: LIB3137-016-Q1-K1-H12
acgattcgttccaactcctgagcactttcttcttgttcccgacaagccaatcgaagccgagatacggccatggactccaccggcaccggagcagggggtaaggggaagaagggagcggccgggcgcaaggtcggcgggccaaggaagaagtcggtgtcgaggtccgtgaaggccgggctccagttccccgtcggccgcatcgggcgctacttgaagaanggccgctacgcgcagcgtgtcggcaccggcgcccccgtctacctcgccgctgtcctcgaatacctc

SEQ ID NO: 7065 - DNA, 260 bp, Zea mays
  unsure (1)..(260): unsure at all n locations; Clone ID: LIB3137-016-Q1-K1-H3
accacactagtgtgatggcgaccaccggcggcggcaaggcggcactggtgctggggcggcttctgcttctgctgtgcgtgctcggccatggagctgcgcagcggtacaacgccatctggagcttcggcgactccatctccgacaccggcaacctctgcgtggggggcgggtgcccttcctggctcaccacgggngcagcgccctacggngagaccttcttcggccgccccaccggacgctgctccgacggccgcgtcatc

SEQ ID NO: 7066 - DNA, 403 bp, Zea mays
  unsure (1)..(403): unsure at all n locations; Clone ID: LIB3137-016-Q1-K1-H4
cttattgttatagatcctgcaaccgactcgcccatgtgattagccagagctgatttggtagtgccattgatcctcatcagttccttagctgaggctaaatagtacttctgcaacctgagtgccaaaaccatcatcggcacagagacgaacagaacttgccatgtaacaacaagggctttcgaggaagaagatcgtttctttgagaaaaattcggaacttgttgacaagaatgctgcttcatatttctataattttgcagcgactgaatggctgattcaacgcctggaaacaatgagtgctgcagntctttctttttcttgcttcatcatggctcttcttccttgaagaacttttaactctggctttataagaatggcgttgtcttatggtctgtccctaaaca

SEQ ID NO: 7067 - DNA, 375 bp, Zea mays
  unsure (1)..(375): unsure at all n locations; Clone ID: LIB3137-016-Q1-K1-H5
accggaccggaatggccggaccgacgcgtccggcagtgccgaacaatcgncgccatggctctctttatgatactccctaatgctcccggggcggtggcgccatgcggcggcggcgctcactgcgcggcgccacccggcgacgttgacggaagagtacgcgcgccggaactacgccgataacaactccgagtacaacacggtcatcggatcgctcgtcgctcaacgcaagccctaccttttgcgtgatgcttacgacgacatgatgcttgatggcgtgaagcctgagcgggaaacgttccacacactcatagtcggtaccatgaaaagcagccggctacaagatgcgctttacttncgtgatcagatgaaagaaat

SEQ ID NO: 7068 - DNA, 337 bp, Zea mays
  Clone ID: LIB3137-016-Q1-K1-H6
gcgtacgactcgtttcattgattcaggacagagatcgagctttttttgcaccacaaggtcgaggatgtcgtgcaactgcggatcaagctgcggctgcggctcaagctgcaagtgcggcaagaagtaccctgacctggaggagacgagcaccgccgcgcaagccaaccgtcgtcctcggcgtggccccggagaagaaggccgcgcccgacttcgtcgaggccgcggcggagtccggcgaagcccgccacgcctgcggctgcggtagcagctgcaagtgcgacccctgcaactgctgatcacatcgatcgacgaccatggatatgattattatctatct

SEQ ID NO: 7069 - DNA, 389 bp, Zea mays
  Clone ID: LIB3137-016-Q1-K1-H7
ggcacctcgccgtctcgcacgttcctttcccttactccccagcgcctctccgcgccgcgatcgagatccaggttgttcagcatgggtctggtgaaagaaggcgtcgacatggaagaaggaaccctagacatcggcatggagtacaagactgtatttggtgtggccgggccttttgtcatattggataaaggaaagggcccaaagtaccaagaaattgtgaacattcgacttggagatggcaccaatcgccgtgggcaaagactgtcagttgaaggctaataaactggtgtgccattcttttaaagaacttctggaatagacaacaaatactcaaccgtgcaggttacaggcgagggtttgaaaactcctgtctcacttgatatgcttgg

SEQ ID NO: 7070 - DNA, 410 bp, Zea mays
  Clone ID: LIB3137-016-Q1-K1-H8
agaagctaaggcgcgagtgataggagggttttggtttttagaagagcggggcaatggcgggtggacgtggctcgtcggcggcgaggctagcgctgctgctgctggtggtggtgacggcggccggcgccgtggcggggggcaaggtggtgcacgtggaggaggcgcaccggcggagcatgctggccaatggactcggctcggcccctcccatggggtggaacagctggaaccatttccagtgcgacggcaacggcgaggtggtcatcagggagaccgcggacgcgctcgtgtcgaccggactcgccgctctcggctacagatacgtcaacatcgatgattgctgggcagagccacaacgtgacgctaagggcaacctggtggccaacaccaagacgttcccgcacgggatc

SEQ ID NO: 7071 - DNA, 397 bp, Zea mays
  Clone ID: LIB3137-017-Q1-K1-A10
agctaaggagagtgtgatcaccaacagctattgctagtcccccttccttccatccatccatggcatgcgtcagcaccttccagagctgccccattgccagaagagcaaagatcaacacgaggtccaggggctgcagcagtagcgtggcgaaggggtcaccaccaccagccttccagttccagtgcagggcgtcgactttcgcggcggacaccagcctccggctcgagctggacgagaaccccgaggcgatcatctcgggggcgtggcccgggaactgctccctcctcagctacgacgacctccgcgcctacctcgagtcgcaggagacggcggcccaggcagacggtcagcagcgcggcgtggcgctcctgagcgagaccatgtccacacccgtgct

SEQ ID NO: 7072 - DNA, 220 bp, Zea mays
  Clone ID: LIB3137-017-Q1-K1-A11
cggacgcgtgggcggacttttgggcccggatcacttttgcacgcaacctcatctcgtcctccagatctattatgggcgtccggcttgacaccttgcctccccgagtgctcatcatgagctactttgtttctatttatcatgaaatccgtttgcttcatgttgtgcattcttatatttgattgctagattcttcataccctctttggatcctgtattgtgt

SEQ ID NO: 7073 - DNA, 335 bp, Zea mays
  Clone ID: LIB3137-017-Q1-K1-A12
cggacgcgtgggcaaaattccctcggcaggtggttattgtagacgctccctcatacctaccggccaatttaagcgggcaggggatccccacaaggcatcacatggaagcgaaaggtggcggtggcgcggcgtggcgcgggcgctggcgcggctagctaggccggctcgtgtgcgtgcgcgaggagacagccacagccatacagggatgctgtctgcttcgtgaccgtgctggtggtggtgggctgcagtctgcagctcgtatcacacgcccacagtgcaagaaggagggagtgtaagaaaatagaggaagttgtttttaaaggcaacagcgagtc

SEQ ID NO: 7074 - DNA, 347 bp, Zea mays
  Clone ID: LIB3137-017-Q1-K1-A3
agaaaacatgctaatctgcggccaatgattattgttctgtgaagattaaactagttgctgctccactttatgttctgaccacacagacccttgacaaggaccaaggtatttcagttctcactgatgcagtcaaggcttgtacagcacagattgaaaaatacacaggaaagttagtagtgaaggaaccaccaacagctgttagcgagcgggaagacaagctattcctcgaacagattgattccctaatggaacaaaacgcagaagtcgatggttacgcggacagtgaagaggaggaagatacaggaatgggcaacagtgatcttacaaattctggcgtcactgcttac

SEQ ID NO: 7075 - DNA, 288 bp, Zea mays
  Clone ID: LIB3137-017-Q1-K1-A5
gctcttttgctaaggcatcatgacactttgttttgtgaggtctgagaccactgggtgccatactgtaccagagactgtgatggccctcatctaaggactggaggggtggaagggctgctagtttcaacatcattcccagcagcactggagctgctaaagctgttggcaaagtgcttcctgtcctcaatggaaagctgactggaatgtctttccgtgtcccaactgtcgatgtttctgttggtgatctaactgttaggcttgagaagtctgccacctatgatgagatca

SEQ ID NO: 7076 - DNA, 365 bp, Zea mays
  Clone ID: LIB3137-017-Q1-K1-A6
ggcgcccgccgtgagcctgagagtcgctgactccgcgggacctgcggtcgctgtgcggtcgggcgggtccaagcccgtcgcaccgctacgactccgtgcgaagaaatcgtccggaggtcatgaaaactcgcacaactccgttgacgaagctctcctgttgaagagaaaatcagaagaagttctgttctacttgaacgggaggtgtatttacctagtaggtccgtcctcatcctcctatgtgacgattgctatagagaattccgacttttagatgaaactaccatatttgaatatgtgattgatgagtgagagtgagcgtgtgcaagaatgatgggttctggaaaaagtactgtggggaagattat

SEQ ID NO: 7077 - DNA, 280 bp, Zea mays
  Clone ID: LIB3137-017-Q1-K1-A7
agcaaatattgcgtacatacgagctaatagtggagctgttgttacaattcaggagagtttgggtagtccagatgatattactgttgaaataaaggggacatcttcacaggtacaagctgcacagcagctcatccaggactcgttggctgcacaccgagaacctgtcagaagcagttatgtgggagcaggattagattcactgtataggtccagctactcacaatatggcagctccacctatccttcggcatcactgccatcttattctagcatcgatgat

SEQ ID NO: 7078 - DNA, 269 bp, Zea mays
  Clone ID: LIB3137-017-Q1-K1-A8
tgagcacatgctcctgtggcgttacccattttagtctcgcgattagtatgccctacatctgctgctgatgagatgggacatacatttctggcttgagcgcttgctgcgttaaccagcgctccacaatatgatatgaggagcggtgcctttaaccatggttgcatagagactggtgacgttgacagtagtattcttcccaacgactcctgtggaggagaatgcacactcgcttttggtccagctgaaacataagacaatgccttagatat

SEQ ID NO: 7079 - DNA, 227 bp, Zea mays
  unsure (1)..(227): unsure at all n locations; Clone ID: LIB3137-017-Q1-K1-A9
nggacgcgtgggcgcataggtcccgcggctactgcttcgtcaccttctccacggaggaggcgatgcgtaacgcgatagagggcatgaactgaaaggagctggacggccgcaacatcaccgtcaacgaggcccaggctcgcggcggccgtggaggcggcggcggcggctacggtggtggccatggacgctgcagatactgtggtggcgggcgccgtgatggcggcggc

SEQ ID NO: 7080 - DNA, 355 bp, Zea mays
  Clone ID: LIB3137-017-Q1-K1-B1
agactacaacgacgttacagcacaacacactgttgcacgtacatacgcagatagagaccagcagcaagctcgatcgagaggcatggtgagtgtaccggaggagaaggcccagctgggcttcggcggcctggtgggcgacctgagggaggtgtacgagagcggcaggacgcagggcctggagtggcggcagtcgcagctcaggggtctcgtcaggctcctggaggagaaggaggaggagatcttcgacgtgctccacgaggacctggggaagcaccgcggcgaggccttcagagacgaggttggggttctgaagaagtccgtcgtcgacaagctgcaaaacctcaagaactgggcg

SEQ ID NO: 7081 - DNA, 339 bp, Zea mays
  Clone ID: LIB3137-017-Q1-K1-B10
aagccacaagagaagagaggctaaccaccgctgcttctgcggcctgcgagtgcaacaaccgcggcggttgagtgggagccggcggcggctatatttgcttgcccggctggggttgcggcggaaggagggagagacaaccggcgatggcggcgtccgcgaggtccggagagagggcgaccagcttcgccgtcgcgtgcagcctcctcagtcgcttcatccgccagaacggcgttgaggctgtcgagctatgcctcatgatcaaaggcgaggtcgagcagcagaggacgccggcgacaactaactcacttcccggagcggacggcgaggaggtcgaaagga

SEQ ID NO: 7082 - DNA, 330 bp, Zea mays
  Clone ID: LIB3137-017-Q1-K1-B12
aaacgaatgcgagcccgttcaaacacttgatgcctttagcccgcctctacctcctcttcctgtcaacttcaccggggtaccgggggcgaaatacggcgagggcgacaagcggtggatcgtggaggagcgcgccgatggcaccaacgtccacaactggcactgggcggagcgcgactgcatccagtggtcccgcgcgcggctcttctcgctgctcgcgggcctcaccgtcctcgacggcgaggacggcctcacgctccgcaccgtcgcgctcgacaatctcgacggcgaggcctacgtcaacattcgcaagggcaaggtcattccagggta

SEQ ID NO: 7083 - DNA, 348 bp, Zea mays
  Clone ID: LIB3137-017-Q1-K1-B2
ccggccggatccggtcgaccacgcgtcgccgttcggcacagcttgaccgctccttttccttcgtccgtcctgttcttcatacgccactcccccgcaggagcggcgcggcggcggcaaaggcaaaggcaagatgttcgggcgcgcgccgaagaagagcgacaacaccaagtactacgagatcctcggggtgcccaagtcggcgtcccaggacgacctcaagaaggcctaccgcaaggccgctatcaagaaccaccccgacaagggcggtgaccccgagaagttcaaggagctcgcacaagcctatgaggttttgagtgatccagagaaacgtgagatttatgatcagta

SEQ ID NO: 7084 - DNA, 234 bp, Zea mays
  Clone ID: LIB3137-017-Q1-K1-B3
agccttctggaccccatgtgatcacgctagtggtctcgattgtacatcagaaacctgcatccccaggtcaccgctagagagctggagaacgaactccgcacgatcgccgatcttcgcatgtctgcctgcccgcaaaccacctgactttgcctatatcgattttgatgataagatggacgcacaggatgcaatccttgacctacatggcaagaatggatggaaagatgaggtata

SEQ ID NO: 7085 - DNA, 321 bp, Zea mays
  Clone ID: LIB3137-017-Q1-K1-B4
ccctatcctccacgactcatggcagagtgactgatatcgactcggcgcgagcgacgacggccgggggtaacaggggaagcaccggaccaggacccttgttcgccggcgccacctctgatctccgcgaggatgtcaggattcaatatgtcgaccagcacattcgctacttgctgcacgctgttgggcaatgttagaacaacacaggcctcccagacagcggtgaagagaccatcgtctctaagctccttcagccaagttacgaaggttccaagcctgaagacctgcaagaaactggatgtctctgccatggctgactacaaa

SEQ ID NO: 7086 - DNA, 430 bp, Zea mays
  unsure (1)..(430): unsure at all n locations; Clone ID: LIB3137-017-Q1-K1-B5
ggatgaagatgaggatggaatatggaagcctttaatggtatcaaatccagcatacaagggaccttggaaacgcaagagaattaaaaatcctaactacaagggtaaatggaagaccccatggatcgataatccagagtttgaggatgatccacatctttatgtgctgaagcctttgaagtatattggaattgaagtttggcaggtaaaagctggttcagttttcgacaacattctgatttgtgatgaccctgagtatgcaagaaaggttgttgaggaaacttggggtgcaaatagggaggctgaaaaggaagcttttgaagaagctgaaaaggagaggaaagctagggaggatagggaaggtcaaaagggcaaagacgatggtggccggcatcgaatacacaggcgtcantaaaaacactacagagatcac

SEQ ID NO: 7087 - DNA, 396 bp, Zea mays
  unsure (1)..(396): unsure at all n locations; Clone ID: LIB3137-017-Q1-K1-B6
gtggatatatcccctgagaaggaaactgattgtgcacagcaggagactattgatttgaaatctaaacttcagtccaaggaagctgaaatcgaaaagctgaaatatgagcatctgaaaatttctgaggaacattgcgatttaatcaaccagaaccataaattaagtgaggaagctgcatatgcaaaagaattggcttcttcggctgccgtcgaactcaagaatttggctgaagaagttacaaagctatctgtgctaaatgcaaagcaggcgaaggagttattagttgctcaggagatggcacattcaagggttcatggtagaaagggtcgtacagctagtaagggtagggatgaggttgngacatggagcctcgatttggaagacatgaaaatggag

SEQ ID NO: 7088 - DNA, 344 bp, Zea mays
  Clone ID: LIB3137-017-Q1-K1-B7
cccgggaagaaaaaccaccaagagagcttgtctccgagggttaggagagagaaagaatgagggatcttcatcgtcgtgtggatagatcatagtcgccgttgttcgggccccggagagtgatcgagggggtccacgggggcaccttgcacgtagtcgttgccttcttggacggtgatatccactagagcgcctccaattgctcaccgaagcaacccagctgctgtcgagacgcatcttaccatcagcatgtacttcaacgcgtgcgattcatggtaaggatccttccacctagtttgccatgttcttcttaacatatactagcatacttcggattgttgtttcat

SEQ ID NO: 7089 - DNA, 296 bp, Zea mays
  Clone ID: LIB3137-017-Q1-K1-B8
cccgttataaaacaccataaagagagcgagtgttctaccgttccgaccaagaaacaaagagcgaacttcatcggcgagaggggagagcataaactacaggcataggaccatgtacagatatctcgggaataaaagcgaccacaccacgtgctaccagatccttgtgatgcccaaatatgcactaaagaaccacctattgatgacctaagcaacctcactattgtagaaacacatctcacaagccgattatccctaaacgctaacgattcatgagaaggattctttcatctagatag

SEQ ID NO: 7090 - DNA, 211 bp, Zea mays
  Clone ID: LIB3137-017-Q1-K1-B9
agcgtctggctacaggcaacagccctcgggaaactcgcctctcgcccgctcgcaaccggggcgggaaccaccggcccactgcgggtggcgcgggcccatagagagcagtctggtcctggcccacataaaacaaccaacggcttgcaagacatggcggactgcaaaacgtaacatactaaagacggagctgctgtaacatgacatgctgctt

SEQ ID NO: 7091 - DNA, 329 bp, Zea mays
  unsure (1)..(329): unsure at all n locations; Clone ID: LIB3137-017-Q1-K1-C1
ntccgcgacgcgtgggcggacgcgtgggcgagtgtcacactcgagcacgtcgagctcaaaggtgaggccgttagccaggaatcccggcaacaatgacttccctttcctccgccgtggcactgccgtcctcgtgccgggcccggccggcggggggaagccggagggcgcggatggtggtgacgcgcgcggcggcgtcgagcccgaagctgccgaacgggcggcggctgcgggtggcggtggtgggaggcggccccgccggtggcgccgcggcggaggcgctggccaagggcggcgtggagacggtgctgatcgagcggaagatggacaac

SEQ ID NO: 7092 - DNA, 389 bp, Zea mays
  Clone ID: LIB3137-017-Q1-K1-C10
gccaaaccctacttgccaccgccaaacttcctccttcgtccgcgccggcgccgctctatgggtctaaaataacgggggccaggggcaccgggactagctgaaaggagagggaacggagggggatggcgtcgccggacgacgagataagccggctcttccgcatccgccgcacggtgtatgagatgctgcgcgaccgcggatacggtgtccgcgacgaacaaatcaagctcgaaaggcacaagttcatcgaacgctacggcaaccccgtccgccgtgacgagctcaccttcaacgccacaaacttgaacggcccatcggaccacatctacgtgttctttcctaatgaagcaaagcccggggtgaagacaatcaggaactacgtcgagaag

SEQ ID NO: 7093 - DNA, 417 bp, Zea mays
  Clone ID: LIB3137-017-Q1-K1-C11
gcatcaacctctctcctctcctctcgctctttactactagctactagctttaatttgtaactgcttgtctgccatggaggaagaggagggatcgtcgacatcatcagtcgctgtgcctgtgccgccgccgcctaataagtacgactcctggacgacagatccggaggagctgatgatgatgatggtcgacgaggcggcggtgcagcaggaagggccccgtcgccggcgggactccatgctcaacaagctcatctccacggtctactccggacccaccatcagcgacatagagagcgcgctctctttcaccggcggcggcgacgtggatgctcgcaactacaacaactcctccgccggcccaggggctttatcgtccccggagaaggtgctgatgagcaagatggagaacaagtacac

SEQ ID NO: 7094 - DNA, 405 bp, Zea mays
  Clone ID: LIB3137-017-Q1-K1-C12
gtgcaatgtccttgccatggcaatcgttatttaagaggatcttcagctctttgaccacccgttttcaaacagaagcgcttttaatggactttgggcagtaccattcaccttcggtgttgcagtcttctgtttcgaaggattcagcatgacccttgcactagaagcgtcgatggcagaccggagaaagttccgctcggtgctttcccaagcagttgccgccatcatagccgtgtatgtctgttttggagtttgtgggtacttggcctatggcgaggccaccaaagacatcataacacttaatcttccgaacaattggtcgtctgctgcagttaaggttggcctatgcatcgcactggcattcaccttcccagtgatgatgcacccgatccatgagatcgtcgagac

SEQ ID NO: 7095 - DNA, 349 bp, Zea mays
  unsure (1)..(349): unsure at all n locations; Clone ID: LIB3137-017-Q1-K1-C3
caggcaggcaggtcggcgaggagggcaggattaccgaagaccgagccgtgcgggggctcgggacgggaacgggacaggaccccaaaatctcagatccttcctgcccgcccgcccgtgcccgtcgacgcgtcgttcttgccggccgcgccccacctncgccctctcctcctccaggggaatcggatacgccacaggctgcgcgatggtgctgtgggtcttcggctacggctccctcatctggaaccccggcttcgacttcgacgacaaaatcctcggcttcatcaagggctacaagcgcacctttaatctcgcttgcattgaccacagaggcacaccggagcatccggcg

SEQ ID NO: 7096 - DNA, 407 bp, Zea mays
  Clone ID: LIB3137-017-Q1-K1-C4
ggcagcaggagcagtagcgtccgtccggtcctcgcgcgttcccctccccgaccggcaggttgcccgtccacgcccggccattcatccgtttcccactgctcctccgtggctcagctctgctccctgtatctctgggtctgcccctctgctctcccggtctctcctcttcccgtcccgcccagcgcgtcccccaaggaagccccgacgccacggcatggggatcgtggaggaggcgcacaacctgcgcgtggtgggcgaggggaagcgcggggtcatcgtgctggcgcacggtttcggcaccgaccagtccgtctggaagcatctggtgccgcacctcgtcgccaactaccgcgtcgtgctcttcgacaccatgggcgccggccccaccaacccggactactttgact

SEQ ID NO: 7097 - DNA, 403 bp, Zea mays
  unsure (1)..(403): unsure at all n locations; Clone ID: LIB3137-017-Q1-K1-C5
cggacgcgtgggcggacgcttgggcggacgttaggtcttctcgaccccccatcccctccctgacatggccgacaacgcgaaggccgcggcggcccatgcgaggccggagtcgtcgcaggaggaggaggaggactggaaggaggccgagggggacgtcgccgaagtcgaccgcgccgccaccaatggcgccggcgaggggggcgtgcccacagacaggccgatccgggtctacgccgacggcatctacgacctcttccacttcggccacgccaagtcgctggagcaggccaagaagtcgtttccaaacacatatcttcttgttggatgctgcaatgatgagttgacacataaattcaaaggaagaactgttatgactgangatgagcgatatgagtcacttcgt

SEQ ID NO: 7098 - DNA, 376 bp, Zea mays
  Clone ID: LIB3137-017-Q1-K1-C6
ggcaaagaaaaaggaactatctctggagaactttctagcaggcatgtgggttcttgttgctgagttgaaaagaggagctttaggcatatctgatttgaatgttgacgaccgaactgttaacctagctgatataactaacagcacaaaggagaacaaaggtggaaagaattttgctctagttgagaagcaagcatcagaagattctgtgaagtcactgagttcagaagaacatacaagtccggagtttgaaccacttcttgttcgtctgaaggctaaaattcaggagatgaaggaaaaggacattgatcccctgagcgataaagatgggaactcacatgtctgcaaagtttgtttcgaatctgcagccgctgcagta

SEQ ID NO: 7099 - DNA, 378 bp, Zea mays
  Clone ID: LIB3137-017-Q1-K1-C7
gggtggcgggcagttccagcctgcgagggtttagcacaagaccggcggcatcctgcatcggtccggcagctccagctccagctcgtcggaggacgacggcatgggcggaaggaggaagaagggaatcaaggagaagatcaaggagaagctgcccggaggccacaaggacgaccagcacgccacggcgacgaccggcggcgcctacgggcagcagggacacaccggcagcgcctacgggcagcagggacacaccggcggcgcctacgccaccggcaccgagggcaccggcgagaagaaaggcattatggacaagatcaaagagaagctgcccggacagcactgagcgcccataagtacagtggctgtgctggcgcgtca

SEQ ID NO: 7100 - DNA, 385 bp, Zea mays
  Clone ID: LIB3137-017-Q1-K1-C8
gcgacggcggtggacccgaagaagggcagtttgggcaccatcgcccccatcgccatcggggtcatcgtgggcgccaacatcctggtgggcggcgtcttcgacggcgcgtccatgaaccccgccgtgtccttcggccccgccctcgtcagctgggagtggggctaccagtgggtgtactgggtcggccccctcatcggcggcggcctcgccggcgtcatctacgagctgctcttcatctcccacacccacgagcagctcccctccaccgactactaaaagccgaagccgaccgacctaggggtgcgcagcgcagctagcgcatccagctctctctccccgctcgccgccgtttagtttctctcgtgcacgtgcatgcatcgtcgac

SEQ ID NO: 7101 - DNA, 317 bp, Zea mays
  Clone ID: LIB3137-017-Q1-K1-C9
ggttcttctatatgtttgtattctctactattatactgtgcctttatgtatttggtttcgggtgggtgtacattgtcaagagtagagacgcaaaacagtcgtcgatctggaaagcaatgttgaagactccagcatcaattgttctgatcatatactgcttcatctgcgtgtggcttgtgggtggtctgtctgtttttcatatatatctcatgagcaccaaccagacaacctatgagaacttcagatatcgctatgatcggcgagccaacccgtacaacatagggatcttgaacaacttcatggagatattgtgcacc

SEQ ID NO: 7102 - DNA, 378 bp, Zea mays
  Clone ID: LIB3137-017-Q1-K1-D1
gtctgtgaagattttttaaagggatattgtgctgatggtgatgagtgtcgtaaaaagcacagctatgtatgcctcgtctttgaggcaacaggagagtgcccacaaggatcaagatgcaagcttcatcacccgaagaagaaaagcaaatccaagagaagcaaagtagacaccgtccaaaacaacagtcggggtcggtattttgagacaaacgttggccatggcagtggagcaagaatagtttatttggaggaagatgagagacagaaaccagagcaagtctctggtgaggagtttgctgacttcattgaacttggtgccggtattgaagtccctgaagatgcagacacttcggatgacatacagctgatggaactggac

SEQ ID NO: 7103 - DNA, 201 bp, Zea mays
  Clone ID: LIB3137-017-Q1-K1-D10
aaaaaccgggccgaccgacgcgtccgcgcacccactaaccccattaccccaagaaaatatatccaaatcccccccccccacatccacgcccatctcaaagggcttacggactacccccataacccccccttcactatcctgccccctttttcaccctatccatacctcaccaccctcaaccaaaaccaaacctcacccttt

SEQ ID NO: 7104 - DNA, 411 bp, Zea mays
  unsure (1)..(411): unsure at all n locations; Clone ID: LIB3137-017-Q1-K1-D11
caccaaccctagacgatcctcctccgccattangcgggacggcgtgcctccgtcggtggccggctccggcggcgcggcgggcggcgacgggcccaggcgatgctcgcagtgcgggcaccacgggcacaacgcgcgaacctgcacggcgcggcccgtcaagctcttcggcgtgcgcatcggggacaagcccatccggaagagcgccagcatggggaacatcgcgcacctcgccgcggagggcagcggcggcagggaggaagggtacggctccgacggggagcgcccgcacaagaagcgaggtgaggcatggactgaagaggagcacaagaagtttctgcttgggttgaataagctagggaaaggcgattggcgtggtatatcccgtaaatatgttggttcaaggacacctac

SEQ ID NO: 7105 - DNA, 404 bp, Zea mays
  Clone ID: LIB3137-017-Q1-K1-D12
tggcgaccgtatttgtaattttgaggttgttttatcgtatttttccaaagatagattcctggaccagatgggcatggaggaggcacaatatgtttgcaaaattgatgggagcacatgaatatttcctcacctaccttgagcaagcaagacagaagtttcataggctatacccttcaagttcaaagcgaggaaatctgcaggagggcgcaatgaacgctaccgcttgggcttccaaatcattagcatcagtttcaattggagaaccaagtgcaattggaaggacaaactctacaagtgagctaagatgaaatctgatcttttttgtccccagggattatatgtacagtacagtagagcgatcaggatatgaacacccagaaacttgtgtaacggctatattactc

SEQ ID NO: 7106 - DNA, 276 bp, Zea mays
  unsure (1)..(276): unsure at all n locations; Clone ID: LIB3137-017-Q1-K1-D2
tcgactcgtgccgncgcccgcatccattagcctgacgctggcgctgccgctgccgccgcccatgtccgccgccccgccccgccgcgtggtcatctgcggcggcggcgtggtgggcgcgtgcacggcctacttcctcgccacccacgccgcgtnccccaccgtcccgacgctcgtcgagaggtgcgccccggcgtgcgccgcctcggggaaagccggccgcttcctggcgctggactggtgcgactccaccccggcgctgtacaggctcgcgcgggc

SEQ ID NO: 7107 - DNA, 233 bp, Zea mays
  unsure (1)..(233): unsure at all n locations; Clone ID: LIB3137-017-Q1-K1-D3
cgccggcatgctcgtcgactcgctcgtctgtatcgccgncatctaccggcccacggcagggacgccgacgttcacggcggacggatactagatgagcgtcggcgtcaaccacctgggccacttcctcctggcgcgcctgctcctggacgacatgcaaaagtccgactacccggtccgccggctcatcattctcggctccatcaccggcaacaccaacacgcttgccgggaaca

SEQ ID NO: 7108 - DNA, 376 bp, Zea mays
  Clone ID: LIB3137-017-Q1-K1-D4
ccgaaccccaaaccctagtttcgctcgttgctgcggctgcggcgagccggcgatggcgaagtgtctgccatccaaacgcgagaagcggcttcggacgttgcgccgggagatagcggagccgttctacgacaagaaggaggccgccaagctcgccgcgcaggccgcagccctagctgctgccccgctcccggtccgcggccccccgccgtcccaggatgccggctcctcccgcgcagctagctcggcctcggctatggctatggatgtggagatgtctgatgcagggaacagcaggtctaagaccttcttgaggccacttggcagcattagcaaagaagaaggtgcagcttcatttggagatcaagaaagacaggag

SEQ ID NO: 7109 - DNA, 331 bp, Zea mays
  Clone ID: LIB3137-017-Q1-K1-D5
ggcacccactccccagtcaaggcatatccattctatggatctcgcgcccctgctccttctctcccagctgctgctgcttccggtggtggcggttgtctccggcgagaccgccgcgcacccgggctacacgcacgctgaggaggcatgcagcggtgtgctagaggcagaggcggagaaagcaacggtgctggtgcctgcgccagagcggcgcgaagagttcgacggcgggcggatcgtggacatcagccactactaccgcgaggacatgccggagtgggagtcatcagagggctccggcgagttcctgcagctggcgcggtccatgcgcaac

SEQ ID NO: 7110 - DNA, 391 bp, Zea mays
  unsure (1)..(391): unsure at all n locations; Clone ID: LIB3137-017-Q1-K1-D6
canaagcaacaaggcagcagcacaagcaagaatcatacctcctcccttcgcctgtgatcatgtgcgcttgctgcggcggcaagtgcgggtgcggctccagctgctcctgcggcagcggatgcaacggctgcggtatgtaccctgacgtggagaccgccgccaccagcagcgtcaagaccacggtcctcgccgcgccgaccaccaaggccagcgccggcggcttcgaggcggccaccgagggcggcggctgctactgcaacacctgcaagtgcggcaccagctgcggctgctcctgctgcagctgcaactgagccggcccggctcggcgatggcgcacgagagtcgagaggacgacgacgaggaggcgtataataataaatataatagcggc

SEQ ID NO: 7111 - DNA, 305 bp, Zea mays
  Clone ID: LIB3137-017-Q1-K1-D7
agcctgatgactccgccaagggcgccacggcgtcgactggcaatcagccccggagatcttccgcggcatcaagctgtgccaggggtacgtggtggtgggcacgacggtgggcctgttcctgccgctggcgcacgtgctgggcgggttcgcgcgcggcgacgatgcggcggtgcggtcggcgacgccgcacctgttcctgctgtcgagccacatcctgacggagaacgtggtggggtcgctgggcgccttctcgccgtccgtcagggcgctggtgccgctgctctacaccgtgcgccgcgtctttg

SEQ ID NO: 7112 - DNA, 432 bp, Zea mays
  unsure (1)..(432): unsure at all n locations; Clone ID: LIB3137-017-Q1-K1-D8
gaccgaagcgaactctccctacgcattcactctcaccatgagccgccancgctacttccagcgccttctcgacctgcacctgcgacgccaacgacgacctcttcttccccttccctacccctgcctcgtcctgcccctacatcaccgcctcctccgcccaccaccgcttcctcctcgacgaccaccccttctacccaacctcctgcccgctcggcatcacctcccgctccccgatcgacgacaccttcgacctcgacctcctcctgcccctccccctccacgccgacgtctccgcgcccccgtgcgcggtcttcgacttcgaccccttcctcctcgacacccttgggcaacgcatctccgttcttgagcgcgcgcttcgcctcgccccaccccgccggaagtacacctacgccggccaaggcaacggcatga

SEQ ID NO: 7113 - DNA, 231 bp, Zea mays
  Clone ID: LIB3137-017-Q1-K1-D9
ggaatcccggtcgaccgcacgcgtccggcacgcgtgggcgggggtcgggacctgaatcctcaatccgcttcctcaccaaatacgcgacgcttttgcggcgcgctggcgtacccacaatggcgctcaccaccgcctccacggactcctctccctcccgaatcatacgccgcttctcttcttctcaagactctcgccccccttcctcgctcctacatctagccccgcgccgag

SEQ ID NO: 7114 - DNA, 434 bp, Zea mays
  unsure (1)..(434): unsure at all n locations; Clone ID: LIB3137-017-Q1-K1-E10
atttggtacaaaggtggaaataaagaatattatctcattttctgcgataaatagggcaatcgattatgagatctgccggcagattctgctccataaagaaggccaggctgatcaaattgtacaagaaacccgcctgtgggatgaatcttctcagaaaacttttacaatgcgaaaaaaggagggacttgccgactatagatattttccagaacctgatcttcctgaagtagttatcactagtgactatattaatgaaatcagcaagtcaatgccggagcttccagaagcaaagcgtaggcgttatgagaatatgggactcagcatgcaagatgttctgttccttgctaatgatgataatattggtcatttctttgattctactcttgagcatggtgctgatgcanagctggctgccaacttgatcatgggtgaca

SEQ ID NO: 7115 - DNA, 370 bp, Zea mays
  Clone ID: LIB3137-017-Q1-K1-E11
agaaccctaacctgctcgacgaagaaaccactactctcacaccatgaacggaaacgcctccgggaagctataccagaccgcggggtccatcatactctccgcttctcaacgctcctacttctccgtactcgccgccgagggccgaaccgccgcactcgacaactatgacacgaagaacctacccaccgcctgctcctaccacaggcacagatcccacaccgcgtcaagatggggagccatcgctgtcgcagaccccgccgcacattacatgctccaagaccagcaagctcatgctgcagagatagaacacactttcattgacatcaaacccaacggcgtccaaagaggcctgatatcagagattgtgaac

SEQ ID NO: 7116 - DNA, 423 bp, Zea mays
  Clone ID: LIB3137-017-Q1-K1-E12
ccagagcttgcatccggcggcggagtaccatggttcggcgagggccatcggtggctgcccgggatacgtcagcgacaagccggggaaccacaacttcgagctgctcaggaagctcgtgctccccgacggctccgtgctacgcgcgcagcttcccggccgccccacacgcgactgcctcttctccgacccggcgcgcgacggcgcgagtttgctcaagatctggaacctgaacaagtgcggtggcgtggtgggtgtgttcaactgccagggagccgggtggtgccgcgtgaccaagcggacgcgcgtgcacgacgcgtcgtcgggcacgctgaccggcaccgtgcgtgccgacgacgtcgacgccatagcgcgcatcgctggtgacagcggcgggtgggacggcgagaccgtggtgtatgcgca

SEQ ID NO: 7117 - DNA, 388 bp, Zea mays
  Clone ID: LIB3137-017-Q1-K1-E3
cggacccgtgggcaaatcccctgtcccgctttcggctagtccgaccaggcgatccccccgggaaaccctcccccagaacccgagagcggagaagagcgcaagatgttcggcttcgggcaccacggccaccacggccagaacccgccggcgcaccccccggcgcacggcggcgtgcaccagcccaccttcaagatcttctgcaaggccgacgaggggtactgcctcaccgtccgcgacggcaacgtggtgctggcccccgccaacccgcgcgacgagcaccagcactggtacaaggacatgcgcttcagcacccaagtcaaggacgaggagggcaaccctgcgttcgccctggtcaacaaggccactgggctcgccatcaagcactccc

SEQ ID NO: 7118 - DNA, 367 bp, Zea mays
  Clone ID: LIB3137-017-Q1-K1-E5
ggggtttggggggcaaagggggcacctttgtactggggttttttctccccattttattcttcttcttaatacaaaaatacgcagctctcctgcgtattcaagaaaaaaaggagaaaggggggaagcccttatgacacactcacacactcataccaaagactcatacaatagattcttaattcacaccctctttttagacaatgacattatacatacacacaattttgaagacccttcagatgtattcattatttaggtgcttccgcttttagatataccactgctgctgctaaattatttactgtcaggcgtgctaacatgaaggaattttccagggcatttatctaatttctggtatactaagcta

SEQ ID NO: 7119 - DNA, 412 bp, Zea mays
  Clone ID: LIB3137-017-Q1-K1-E6
cagagagctagcatacatcgctagctcactttagtatatatattacataaatattggcatatggaactaaactgaattgaggacgatatggcccgcttggtctcttccggaatcattggtaaggggcacaacatctttgacgatggcggattcggtgaagtccatgctgacccaattaaagtcgagcgtccgcacaagcgtccgccgcagaagcagaatgcggagaatggaacgacgacgaaggttgatgagccaaaggaattgcctaagcacgtgtgcttcaagggagacaacgggctgtacctgagcgctcggatggtggaaggctacccctacctgcagtttgcgtcggacgacataggccatccaagtgtgaggttcaccacgtacaactacatgatcgatggcaagc

SEQ ID NO: 7120 - DNA, 53 bp, Zea mays
  Clone ID: LIB3137-017-Q1-K1-E7
aaaaacccggccgacccacccgtccgcctacaccttgcacacattcctaaccc

SEQ ID NO: 7121 - DNA, 342 bp, Zea mays
  Clone ID: LIB3137-017-Q1-K1-E8
gaacagtaccgcagcggcagccatggtgctttcgcacgcgagctccggccgggacgacgacgacgcggtggcctccaccttcgcgtcgcgctacgtgcgcgagcgcctgccgcggtaccggatgccggagcggtcgatcccgcgggaggcggcgcagcagatcatcagcgacgagctcatgctggacggcaacccgcgcctgaacctggcgtccttcgtcaccacgtggatggagcccgagtgcgacaagctcatcatggactccatcaacaagaactacgtcgacatggacgagtaccccgtcaccactgagctccagaaccgctgcgtaaacatgatagc

SEQ ID NO: 7122 - DNA, 272 bp, Zea mays
  Clone ID: LIB3137-017-Q1-K1-E9
gcaggcaggtcggcgaggagggcaggaagatcgtaaccgagccgtgcgggggctcaggaggggaacttgacaggacccttggatctcacatacttcctgcacgccctcccgtgcccgtcgacgcgtcattcttgcctgccgcgccacacctccgacctcatcttcttcagagagatcatattcgccacaagctccgccatgaacctgtcgttcttcgtctacacctccatcaaccccaactgcgacttgctcatcatcgactccatcaacaa

SEQ ID NO: 7123 - DNA, 392 bp, Zea mays
  Clone ID: LIB3137-017-Q1-K1-F1
ctcagcctatcctatccagaacgcagaactgagacccacgaactcgcagcaggccagcagccatggccgcccccgcaacgagctcccttctgagcacgctgctgcagctaccactcgctccgttctcggggaagagctcgccgccgtccgtggtgcacgtggcgcgccgggcgccgacggcggtggtggcggccaagggatacaatgtgcagatcctggtggacgagaacgagggggaggagtccatcttccgcaggttccggcgggaggtgatgcgcgccggcgtgctgcaggagatcaagcgccgccggaggtacgagagcaagacggacgagaagaagcgcaaggcgcgcgaggccggacgccgcaaccgtcgcaggcgtatgatggac

SEQ ID NO: 7124 - DNA, 426 bp, Zea mays
  unsure (1)..(426): unsure at all n locations; Clone ID: LIB3137-017-Q1-K1-F10
ctctgagcctggctgccgaaagtgccttnatggtttcttgtaatcttgttacattaggatgcatttttgatgacggcatggggaagcacgagcaagagcagaagtaggagccgcagtcgcagcaggagcaggagccgcagtcctcggcgaagagatagattgcgcagtgaacgtgcaccccaccgcagtcgcagccggagccgtagcccataccgtcgcagagaacgacgtggtcacagggattttgcatgcaagaactgcaggagacctgngcacttcgctaaggagtgtccatctgcgcctatgtgcaataactgtaaccttccaggccactttgcagcagaatgcaccttacaaactgtttgctggaactgcaaagagtctgggcacattgccagtgagtgcaagaacgaggccctatgccac

SEQ ID NO: 7125 - DNA, 425 bp, Zea mays
  unsure (1)..(425): unsure at all n locations; Clone ID: LIB3137-017-Q1-K1-F11
gcagcaggtactggcccatgcgccgcaccattgctgttagcacgaagagtggcaccgccagggccgcccaccgggcgccgaggaccgagcgcacgccgtcggcgatccaagcgttcgccgccgacagatacgccttcgaagctctccaagtataactccgtagttctgtcaacaattttctccaatatccatcttttgttgtacactccaaaagcaccaacgatttttgttgttaagcggtaaggcgagcaagtaaacatgaacaggaggcggtaaggcgagcaagtaaacatgaccaccgtcttaacgcctaggcgatgccttaaatacattgtttctcattacgtattgcatgggatgaagctggttgcttatgccatgagggtgatttgntcaattatgctgcttatgatgatggtacttta

SEQ ID NO: 7126 - DNA, 432 bp, Zea mays
  Clone ID: LIB3137-017-Q1-K1-F12
caccgtttcagtgctataggataggatttttctttgacggccatgaaaccccctcagctggcggccggggagcgctcctgggctcacgaggtcaagcaggccctccgtgagaaactccggcgctcctacggcgccgcctccgccacaccggcggccggtgaaccgagccgtggcgccgactgccgtggctcggccgccgaggaccccataaggagagtcatgttcttggctccctggggccacacataaaacacagacccagatctgggcttgcaagagcatggccggatctgcagagaactgctcaaccatacttaaaaggaactggagcttgtcttgtaaactatggagcatgctgcttgcaccacgaacatgaacgcatggctggttaactaggtagatatatgggtgtggatgggggagagagaaaaa

SEQ ID NO: 7127 - DNA, 202 bp, Zea mays
  Clone ID: LIB3137-017-Q1-K1-F2
tgacgatgcgcaagacggcggcgaaggcaaagccggcggcgagctccggcagcccgtggtacggccccgaccgcgtgctctacctgggcccgctgtccggcgcgcccccgagctacctgacgggcgagttcccgggcgactacggctgggacaccgcggggctgtcggcggacccggagacgttcgccaagaacccggagct

SEQ ID NO: 7128 - DNA, 414 bp, Zea mays
  Clone ID: LIB3137-017-Q1-K1-F4
accggccgaatccggtcgaccgacgcgtcggaatcacagagcttcagcagcttttctttaacccacaactgattcatgactcggttcccagtcctaccacctgtggccgtaagaggcaaaagacatctcaatctgttcctgctttacctgcaccgcctcctgcgatgcattcacaacagctggctacaccaacacagccatcatcttcaactgctaggaaagcagtacccccaggccataaaggcaaaaagatgaaaccaggtcagaaggtaccacgtggctctgcagccaagcctataccatcttcagcaggtcctagtggaagaggaccgcacatgaataggggtggttctgctcctgaagctcaagctcagaatgtcgatccattgattggtcgtaaagtgatgagtcggt

SEQ ID NO: 7129 - DNA, 411 bp, Zea mays
  Clone ID: LIB3137-017-Q1-K1-F5
caaaaaaacaacaggagaacaggcaaaggcctccctccctcaactcaggaaaccatccaacgtgtcgatcggccttgcttgccttggtactcctgcttccgccatggttcacatcaaagagttccggatcgtcatgcccatgtccatggaagagtacgagatagggctgagctacaccatcatgaagatggagcagcagaacaccaacagcaaggagggcgtggaggtgctgcagcaagccccgttccacgaggatgccaagcttggcaagggccacttcactttcaaagtttatcatctgcaaagcaagattccgtcatggatgaagggctttgcacctgccagcgccctcgcggtgcacgaggactcgtggtgtgcgtttccaaagagcagaacagtgatcaagtgccc

SEQ ID NO: 7130 - DNA, 301 bp, Zea mays
  Clone ID: LIB3137-017-Q1-K1-F6
actcaggaaaccatccaactgggccattctcctggcttgcgcgtgctactcctgcttccgccatgcttcacatcaaagacttccgcatcgtcatgcccatgtccatgtaagagtacgatatatggctgatctacaccatcatgaagatggagcagcagaacaccaacagcaaggagggcgtgcaggtgctgcaacatgcccccttccacgaggatgccaaccttggcaaggtccacttcactttcaaagtttatcatctgcaaagcaacattccgtcatggatgaagggcttttcaccttc

SEQ ID NO: 7131 - DNA, 432 bp, Zea mays
  Clone ID: LIB3137-017-Q1-K1-F7
ccagaagcgagggagggtgaagcaccgccgttgtctccgccgccgccgcacaaagacgagaggaagaggttcccggcgccggcaccaccatgtcgtcgatgatgaacgcgctggcaaactggctggcgaacccgcgccgcaacccgctggcgcgtctccacatgcacgccgtctcctcgcgcctcaggaaatacggactgaggtacgacgacctctacgacccctacttccatctggacatcaaggaggcgctcggtaggctgcctagggaggtggtcgacgcccgcatccagcgcctcaagcgtgccatggacctctccatgaagcaccagtacctcccggaggacctccaggcacagcaggttccattcagaggatatttgcgtgacatgttggccgtggtgaaaaaggaaagcgccgagcgtcagtcac

SEQ ID NO: 7132 - DNA, 388 bp, Zea mays
  Clone ID: LIB3137-017-Q1-K1-F8
tgcctcgctcgcgccgcatagcagagcatggatcctttcacgccctctcctcgccgccatcgggctcgccgcggcgggtctgcgggtcctttctccggcagaggcggcgacggtgggcgtgaactacggccgcgtggcgaacaacctgcccaacccagcggcggttgtgcagctgctcaagcagcagggcgtcgcgcaggtgaagctgtacgacgccgaccccaccgtgctgcgcgccctcgcgaacaccggcatcaaggtggtggtggcgctgcccaacgagcaggtcgcggcggcggcgtcgcgcgcgtcctacgcgctgctgtgggtgcgccggaacgtggcggcgtaccacccggccacgcacatccagggcatcgccgtgggc

SEQ ID NO: 7133 - DNA, 302 bp, Zea mays
  unsure (1)..(302): unsure at all n locations; Clone ID: LIB3137-017-Q1-K1-F9
gtcatacttacatgcactttcaccccccagatagttctataaacaagntantcaacacgctgtcgcaaatactggggcctatggaccgccccacntaagatttttttccaatttaacttgttacctgtcatgttattgaaatatatagaaagacctgttatagtggcgacgagtcactatgtctcatgttctaagcaacctctccacgtgctgagaaggcttgccttaaataatcactttctcatactccactcatgtgcgagccttcagcactgagtatgaaccttacctgtgggataatg

SEQ ID NO: 7134 - DNA, 193 bp, Zea mays
  unsure (1)..(193): unsure at all n locations; Clone ID: LIB3137-015-Q1-K1-F12
ccgtccgtacattggtgtcggtcaaaaagaagctggatatatattatanntatagtgtcacaaccagctacattttgtcgggtggaggcttttaaagatggccttcgtgatcactacngctgctcnntttttaggacccgtggaacctnngccatcggctgtcactcgatgaaataatacgatnnntaaccac

SEQ ID NO: 7135 - DNA, 487 bp, Zea mays
  Clone ID: LIB3137-013-Q1-K1-C3
cggacgcgtgggctgtccaggctgccatcctgagcggtgagggcaacgagaaggtgcaggacctgcttctgctggacgtcacccctctgtccctgggtctggagactgctggaggagttatgacagtgctgatcccgaggaacaccaccattcccaccaagaaggagcaggtattctccacctactcggacaaccagcccggtgtcctgatccaggtctacgagggtgagaggacccgcacacgcgacaacaacctgctgggcaagtttgagctctccggcatcccccctgcaccccgtggtgtgccacagatcaccgtgtgctttgacattgatgccaacggcatcctgaacgtgtctgccgaggacaagacgacggtgcagaagaacaagatcacaatcaccaacgacaaggtgccgtctctccaagaggagatcgagaagatggtgcatgacgctgagaagtacaagtctgaggatgaggagca

SEQ ID NO: 7136 - DNA, 474 bp, Zea mays
  unsure (1)..(474): unsure at all n locations; Clone ID: LIB3137-013-Q1-K1-C4
gcagcgggcagcggcatgggcaccagccccgtcatccctgcgacgatgctcttcgtcgctcttcttgtcgctgtctgcttcggcgccaccgccgccaggtccagccacgcccgccacaccgacgccgacgacgcgattcgtctccccagcagctttggcgctggtggtcgaccgtggaattgctgcgactccgctatcaagaacgccgagctgccggcgtggcgctgcaacgacgtggtggacaagtgctccgccgactgccaggactgcgagggcgtcgccggccggcgacggcttcgtctgcggtgactttatcttaagcctgaccgagccnccggtctgcacaccgaggccgtgggactgctgcgccagcgtggcctgcacaagggactacatccccaatgcatgtgcctggaaaggtggaagtcgtgctcgagcaactgcgaacggtgcgagtttctgtatcattcggac

SEQ ID NO: 7137 - DNA, 459 bp, Zea mays
  Clone ID: LIB3137-013-Q1-K1-C5
cgtccgtcaagctagaaaggcgtcccttgctcgattcttggagaaaagaaaggaaagggtgagtactgctgcaccttacccagcatccaagagcccgatggagagcagtgacacgtttggcaacgggagcgccaacgacaagtcatcatgcacagacattgtcctctcaagcaaccatgaggagtccctatgtttagggcagcccacgaacatcagcttcatccaagagtcccccagtacaaaactacacatctcatcttaatatctgatcatgcccaatgttcatagatttgtccacgctgactgatgcaaggaccatacgatacttttgcattcaggcaaggactcgagaggaagagattacgtatgttatcggtgccgctagctgtcgtttatgatgatgctttgttgagctagcttactgtgatgctggtggtgcccccaactaactaacaagat

SEQ ID NO: 7138 - DNA, 365 bp, Zea mays
  Clone ID: LIB3137-013-Q1-K1-C6
ctaaagctaagcgccttactccctacatgctaaatcacctgtactatgctgcatatctgagcttgcttatcatcatatggaagctcttgcttagtcctgcaaatgacacttcaagtacctctattattagatccatgctatcaaccaatgtattgatcgcgtctgtcatgactccaagcatacactcccactctcatgcttatttacttatctacgtctgaattgtctaaaaaacaggtgaacaaatcctcttcctgctgataaacttgctatccataaacgtcttaattctgctcccaaaattatgacgacacatctaacattaaaatgccacagtcctgcatacatactacattgctacttat

SEQ ID NO: 7139 - DNA, 455 bp, Zea mays
  Clone ID: LIB3137-013-Q1-K1-C7
gccgcagtccgcaccccctccccaatcacgccacccgacaccgcgctccgcagattcgtaggcgccgctaggcttccggcgagatggacgtggtgaaggcggcgcagttgtcggggcggacgctggaacgggtagtggtgcatcccttggtgctgctcagcatcgtcgaccactacaaccgcgtcgcccgcgacacccgcaagcgcgtcgtcggcgtcctcctcggcacctcatcccgcgggtccgtcgatgtcaccaactcctacgccgtgccgtttgaggaggatgacaaggatcctaggatctggttccttgaccacaattaccacgagtcaatgttctgcatgctcaagaggattaatgccaacgagcatgttgttggctggtacagcactggcccaatactaatggagaacgacttggatgtacatgcattattcaacagctatgttcct

SEQ ID NO: 7140 - DNA, 491 bp, Zea mays
  Clone ID: LIB3137-013-Q1-K1-C8
gcctgtttggtgcgcgtccacctttcggggtcaccggcttctgctttcttgctacgccaccgcgcctctcgtctatttatggagtcccccgatccatgaagccggggcaggccgagagttgtcaaggacgacgtctgccggcagtgctcctgctcctcctcctccttcctggccgccgcgcgagcttgggttagttagtgtctcttcttcgcggagacctgtgagaggagccatcatcatggccgctgttgagactgttgtcctcaaggttgctatgtcatgcgagggctgcgccggggcggtcagaagagtgctctccaagatggaaggagttgaaaccttcgacatagacctcaaggagcagaaggtgacagtcaaaggcaatgtcaagcctgaggacgtcttccagacggtttccaagtcggggaagaggacctcgtactgggagggcgaagccacggccccggacgctgcggcggctccagaagccg

SEQ ID NO: 7141 - DNA, 445 bp, Zea mays
  Clone ID: LIB3137-013-Q1-K1-C9
gaaatggcaccctgacaagaagcaggggcagggcgaagagaattcaacctccaaatttcagggaattaacgaggcataccaaggtctgagtaatccagcaaaaaggcaagagtatgacaaaaaaggcattctatacgttcaagatcagaatgtagtggattacctgaaccggcacaaggggctaatacttacgtgcaatggtcttggtataaggtactcagtatggtgaacacgctcaagggcccacagtttgcactcatctgcagtcttggagaatctgtaatgtatgccatcaaaatttattttcatcccttgtgtgccatagaatggcatatatggatttttgtgtgtatgacaggtggggccagtggggatgaaaataatttctgatgacatacagggaaacctttgatctgaaaatggtatagtgcagcagtgccatgtt

SEQ ID NO: 7142 - DNA, 359 bp, Zea mays
  unsure (1)..(359): unsure at all n locations; Clone ID: LIB3137-013-Q1-K1-D1
ggaaccctagcctcctcgtcgttgaatccaccacaccacaccatgagcgggagcgcctccaggaagctcttccagaccgccaggtccatcgtcctctccgcttctcaacgctcctccttctccgtcctcgccgccgagggccgcaccgccgcgctcgccaactttggcaggaagatcctccccagcgcctgctcctaccacaggcagggatcccacgccgcgtcgggatggggagccatcgctgccgcagtcccccgcgcagtttacatgctccaggaccaggaggctcatgctgcagagatggagcgcactntcatttgcatcaagcccgnctgcgtccaagaggcctgattctgaga

SEQ ID NO: 7143 - DNA, 324 bp, Zea mays
  Clone ID: LIB3137-013-Q1-K1-D10
cgcctcgctaccacagttcctcttcaagattctcagagggtactgagaactgaacgtggaagggtaagatccctggaataggtagtttgctgtaagcctgtaaagattgtatccaagcaataagaaagccccttatcacctcctcggaggcgtgttccccgctctgtaaatttgacaccggtaggttgctccagttgtatgttttgcgaatcatgggtagtggaaaattgaaatgttcattggttcttttaaaaaaaaaaaaaaaaattaaaatgaccttaataatagtgataaataaaaattttttagtattacatattatac

SEQ ID NO: 7144 - DNA, 418 bp, Zea mays
  Clone ID: LIB3137-013-Q1-K1-D11
gctgggtgtcaaatggtgttgttggctcaccatcatttgcagcttatgatcaacgttatgaggttttgcttggaaatcttcgtggcttggtctcaagggagcatatagataaaagtatttcctcctacaaatactggaaatattctgttaatgagcatgggactaaagatatgccagcaattattgaggaaattcacaagatcaaaatatcggaacttggcaaaagtcatcctcaatcagcagaggggacaggagatcaaaatgataagttaaaaagtttggaagtacaggcttcacaggaagacagtttataataccaaccctacaagctttgtgctgtatgtcacagcctgggtggtgcagttatgctgatgtatgtggttactttaaggatcacacaaaaaccccacagattgtc

SEQ ID NO: 7145 - DNA, 398 bp, Zea mays
  Clone ID: LIB3137-013-Q1-K1-D2
gctggggactggctgcaggggccctacgcgtactacctctacagccagtacggcttctacgggggcgtcattggccgcctcttcatcgccggcttctgttcctccatgctcttctgcaccatcgtccgatccctcgcggataagcagtgcgttgtgcccatctccgccttgaggatgaattcagtcgatttcgttctgccatggtggataccgccgccaggctgatggattttcccaggtcagggggcgtaagagggcgtgtgtcacgtactgcataacctacatcctaagctgcataaccaagcactctccccagtacaaagttcttatgattgggcgcgtccttggtggcattgccacttcgatgctcttctagcgattgagtcgaggctcgtggc

SEQ ID NO: 7146 - DNA, 469 bp, Zea mays
  Clone ID: LIB3137-013-Q1-K1-D3
gcgggcgcgaccaccgccacgccctaccccccctcccccgccgcctagtccgagttgtggaatccccgtggactcccgccccccgtccatcccccgcgcgtcgccgcggcgcgccgggccgatctgctccgccgccccgcccgcctcctcaggtgtccagccgaggaggacgtagagctgggcatataacgagctagatttcaaaaaaaaagggaaccatgaagaaagtgttcgatcagacggtccgggacctaaaaagagaggtgaacaagaaggtcctcaaggtgcctggaatagaacaaagatccttgatgccacaagcaacgagccgtggggtccacatggatctctactggcagacattgctcaagcgacgaataactatcatgagtaccagatgatcatgccattgtgtggaagagggtcagtgacactggtaaaaattggcgtcatgtttacaagggattga

SEQ ID NO: 7147 - DNA, 454 bp, Zea mays
  unsure (1)..(454): unsure at all n locations; Clone ID: LIB3137-013-Q1-K1-D4
ggagactttcatgttcaatctgaggtggaagaatatccttgcgttaatgtctgtctggtcagtgttcttggtgctgcaagttctcaagaataattcaaaatcatgcagctctttctactgggtgataaacgttctacaggttccagttgcggtaagtgtgttcttgtgggaggccatgcagttatgtagggagagtcatgcacgacgtatgaatgggaacctggaatgtgtgtgtgaggcctctattgagtggtcaccagcacaactgatcttttgtgccttttgtggccttctcggtgggactgttggtggccttcttggatctggtggtgggttcatccttggcccacttcttcttgagcttgggtgcataccgcangtggcaagtgcaacagcaacattcgtgatgatgttctcctcctgcctctctgtggtgagttttactttctgcaca

SEQ ID NO: 7148 - DNA, 478 bp, Zea mays
  unsure (1)..(478): unsure at all n locations; Clone ID: LIB3137-013-Q1-K1-D5
gcgggggcggcaagcaaccacgggcggagctcggagcgtcctcctcctcccgtctataaaggcccctccttttcttcctccatatataggggccatcagatccaagaagagggaaaagcaccaaggaccttcggcgcccgttcaggatccacatcttcccgagcgagttcttggttgacctcttcccccttcggaccacctccaaggctcttggtgtagcttgccactctcaccaatcaagttttcatgtctgatctcgacattcagatcccaactgccttcgatcccttcgctgaggccaatgctggggcctctggtgcggcagcagggtcaaaggactacgttcacgtgcgcatccactagcgtaatggtcgcaagagcctgactaccgtccagggattgaagaaggagttcagctacagcaagatcctcatgaatctcaagnagagttctgctgcaatggtacagtggtccagga

SEQ ID NO: 7149 - DNA, 469 bp, Zea mays
  Clone ID: LIB3137-013-Q1-K1-D6
gcgggggctgcaagcaaccacgggcggagctcgtttcgtcctcctactcccgtctataaagtgccctccttttcttcctccatatataagggccatcacatccaagaagagggaaaagcaccaatgaccttcggcgcccgttcaagatccacatcttcccgagcgagttcttgcttgacctcttcccccttcggaccacctccaaggctcttggtgtaacttgccactctcaccaatcaacttttcatgtctgatctcgacattcacataccaactgccttcgatcccttcgcttaggccaatgctggggactctggtgcagcaacaaggtcaaaggactactttcacgtgcgcatccaacatcgtaatggtcacaagagcctgactaccgtccatggattgaagacagaattcagctacagcaagatcctcaaagatctcaataaagagttctgctgcaatggtacag

SEQ ID NO: 7150 - DNA, 445 bp, Zea mays
  Clone ID: LIB3137-013-Q1-K1-D7
gcattctaccatttcatgatgtcccttatttacatgtgtaaaatgatccacatcaataaaagtcaccccttcgtattatgaagcaaaataacaagcttacatgctattactgatatacttcctgttcttacagccaggatctcttggcctacgtgtagacagactccaggaagatgtccatcttttgcttctccatcaccgtcgttatcatgcagcctgctggaatgccacagcgggacaggagcatggtgatgagcatgcgcatgatgactgcaagtgtctccgcatcccgacgttcgacgactggaacctgcaggacgacatgcccgtcacccaatactgtcatgcaggcacttattcatcagagttccgtcgacataaaaggactacgacgaggatctgttcaaggtgtcccagtgttcctgccaagccctacaactacaag

SEQ ID NO: 7151 - DNA, 414 bp, Zea mays
  Clone ID: LIB3137-013-Q1-K1-D9
ggaattcgaagatgaagaagacaatgatgactcagtacctgataacaaggatgaatcagaggaagaagagcctatgaatgatgatgtatatgaatttactgaaggattaagaggcagaaaagctaataggatggaagaagctggttcaacaggctcttcttctggaagcaggagattaccaccacctgtaccttcctcatcttcaaaaaaaattgcggtctctatctgcattagatgcccgcccaggcactttgtcaaagagaactccggatgacctataggaaggtgagattgcaatgtctggggactcacatatggacctccagcagtcatggagctggaaccatgaacgtgatgacggtgaggatgaacaagtactacaaccgaaaataaaacgcatacgaagtattcgtc

SEQ ID NO: 7152 - DNA, 354 bp, Zea mays
  Clone ID: LIB3137-013-Q1-K1-E1
cccccgacatcgcgcagggcgtgcacgggcacttcacgaagcggcccgaggagatcggcgcgggcgaccagggccacatgttcgggtacgccaccgacgagacccccgagctgatgccgctgagccacgtgctggccaccaagctgggcgcgcgcctcaccgaggtgcgcaagaacggcacctgcgcctggctgaggcccgacggcaagacccaggtgacggtggagtacgtgaacgagggcggcgccatggtgcccgtccgcgtgcacaccgtgctcatctccacccagcacgacgagaccgtcaccaacgacgaggatcgtccgccgacctcaaggagcaacgtcatcaagc

SEQ ID NO: 7153 - DNA, 284 bp, Zea mays
  Clone ID: LIB3137-013-Q1-K1-E10
ctcatacctaacttgtttttgggaaaacgtttatcccttttgcattcagtgtgcctactgacgaagagtattttcttgccgaggtaaacaatctcctcatcatctaagtgttctccatctggaagatgaacacacccttcctctaatacctctttctccacaacaccctttaatacacctccatcacttataatttcttgccccaccgctcctttccgtcgcggaaagaccactccgttcacaagatgacaattcgcttcgcacacctcttttaacaagcccaa

SEQ ID NO: 7154 - DNA, 422 bp, Zea mays
  Clone ID: LIB3137-013-Q1-K1-E12
cagaaaagcacactcttcctgatgggcaggttataacaattgaaaaagaggggtacattgggggtgaagctttatttcaaccacgtatattgggcttggaagattatggtatcgttcaccagctagtcactagtgtctcaaatgtttcatcagagtaccatcgtcagctgcttgaaaataccatgttatgtggtggcacctcatcaatgactggttagttattgatttcatatgccagatgccttttgttctttatgtgcacctttgttttattcaacattgtgagctagctatatatcaaatgcatatctattagctagatagggtaagtaatactccctccattcacagatatatgacgccgtttacttttttcaaaaactttaatcactcgtcttattcaaaaaatagtaagttatcat

SEQ ID NO: 7155 - DNA, 364 bp, Zea mays
  Clone ID: LIB3137-013-Q1-K1-E2
cggacgcgtgggggatggaccacagctttacatgatagagccctcaggagtttcctataaatactttggtgctgcattggggaagggaaggcaggccgcaaagactgagatagaaaagttgaaactttcggagcttacctgccgagaaggcattgttgaagttgcaaagataatttatggagtgcatgacgaatccaaggacaaagcttttgagttggagttgagctggatctgtgatgaatcgaaccgccagcatcagaaggttccgaatgaattgttggagcaggccaaagctgctgctcaggcagctcttgaggagatggatgctgactaagaaacatgacaaatatgcccatgcttcatg

SEQ ID NO: 7156 - DNA, 480 bp, Zea mays
  unsure (1)..(480): unsure at all n locations; Clone ID: LIB3137-013-Q1-K1-E3
gcctgggccaccagcaacgagtcgctggagaatgccttcgcctcctacggcgagatcctcgactccaaggtcatcaccgaccgggagacggggaggtctcgcggcttcggcttcgttaccttctcctccgagaactccatgctcgacgctatcgagaacatgaacggcaaggagctcgacggccgtaacatcaccgttaaccaggcccagtcccgtggcggtggcggtggcggcggtggctacggcggcggtcgcggcggcggcggctatggtggcgggcgccgtgacggcggttatggcggcggtggcggctacggcggtcggcgcgaggtgtggtggcggcggctactgaggcggtggcggctactgcggtcggcgcgaggtgngtggtggcggctacggcggcggcggcggcggctggagggactgatgtgtgggcccatcctggcttcggcgagttatcttatctatctatagatc

SEQ ID NO: 7157 - DNA, 482 bp, Zea mays
  unsure (1)..(482): unsure at all n locations; Clone ID: LIB3137-013-Q1-K1-E4
ccgcgatacgatgtccgtccctcctgcccgcctcgccgcgtcctcgctcccgctgctcctggtgtggctccagctccagctcctcctcgcgtccgcctgcgaccgctgcgtgcgccactccaaggccgcctactacacctccgcgctcaccctcgccggcggctcctgtgggtacggcaccgacgccgcctccttgagcgcagggctcctcgccgccgccagccccgcgctgtaccgcgccggcgtcggctgcggcgcctgcttccaggtgcggtgcaaggacaagaagctgtgcgccgcggcgggcgcagggtggttgggtcacggaccgcgccaggaccaaccgcaccganctcgtgctcagcagacccgcgttcgcggccatggcgcgccccggcatgccccacgtctcgcagcacgcgtgcagcngacgncgagtacaaaaggtgccgtgcgagtacaagcacaggaacctgtcggtg

SEQ ID NO: 7158 - DNA, 463 bp, Zea mays
  Clone ID: LIB3137-013-Q1-K1-E5
cgttcacctcgcccgacggcccaagcagcccatgtcttcgtcgggcccctccccggcgacgggaatccacgcgtcgccgccgttgggccttttgccggcgacgggaacccatcacaccaggtcatggggcaaaacaacctccacaagttttactggttctaccaccaaacatgagcagagcttgcatggaaatgttaagccgttgcaattggcggcaaatgaatcctctcgtttggcttacagaagtccagcacttaaaaaccagtggaatcttcctgctagttcttcctccataatgtggttaccacctttgatgataacgaacacgtgtcttccagtgttattgaagaaaaagttggagtactgttattaaacttgggtggtccagagacacttgacgatgttcaaccatttttattcaacctatttgctgatccagatatcattcgactccctaggctct

SEQ ID NO: 7159 - DNA, 340 bp, Zea mays
  Clone ID: LIB3137-013-Q1-K1-E6
cattcacctacacccacgcccaaagcatcccattttttattcataaccatccccacataggtgatttctctctacgtcgacgactgacattttgcccgcaacaacatccattcacacaacatcttgtcactaaactacctgcagaatgatcactgtttcatccaccaatcattaacatagcttgcatgtatatttcaaccccatgcatttctcgttaaatatatactctatattccataacacaattccaccacataaaaacctttggaatcattatgattgctatctctccacttatgaagataccacctatgatgataacaacacatgtataccacct

SEQ ID NO: 7160 - DNA, 212 bp, Zea mays
  Clone ID: LIB3137-013-Q1-K1-E7
taaagcgacgcaccccgcagcggatcattatgcgtcgccgttcttgcactaatgtcgttaccacctttgatgataacgaacacgtgtcttccagtgttattgaacaaaaagttggagtactgttattaaaccttgttggtccagagacacttgacgatgttcaaccatttttattcaacctatttgctgatccatatatcattcgactccct

SEQ ID NO: 7161 - DNA, 354 bp, Zea mays
  Clone ID: LIB3137-013-Q1-K1-E9
aaaggagagaacatctcgatccgcacacctcacgcctgaaggccacatctagccttcctctggctctctctctcgccccaaggacaacgataacatcaaacatgagaaccaaaggaaacaaacagagcaagagcatcgctctcgaagcaaaacgcgcagcacgccggccggccacttcgcacgtacgtatgacgcgcacgcaccggtgcatatatggggctcctggaccagctgtgggacagacacggtggccgggccgcgcccggactccagactaagcaagctgcgcaagtacgcctccttatccccctcctcctcatctgcggcagcggcggctgccgtgcaactgccgac

SEQ ID NO: 7162 - DNA, 400 bp, Zea mays
  Clone ID: LIB3137-013-Q1-K1-F1
acggtctctcctcctatgttgtccttcttcaggccgttgttcatcaactggcttcctcttcggctccttatatggagagtacgcgcgtccttcactggatgcaccatctctcttcctctagtccaatcgtctaactattgctttcgacaatagatatttacctacatcattctcatccatttatgctcaatcaccttatatgtatacttcctcaatagctcacactcacaatctttattcacattatgacaccattattaactgcaaacaagataccgcttcgcatgactacctccctatagatgctccgcacgacttcacatcttttgaagcttcatttatatacacaccaaattttgaaccactacaaattcttctttcacaaataatatctatatcc

SEQ ID NO: 7163 - DNA, 411 bp, Zea mays
  Clone ID: LIB3137-013-Q1-K1-F10
cgcctcaccccgagccagccgtctcgctagggtttcgccgccgccgccgccatgcctcgccgcagctcaggaaggtctgccccacgcccagctccccgtgctgctccagtgaggaacccgccacagccagcacgccaggctcctcctccagctcctgttcgagatggtggtggctccatgtttggaggaattgggtccaccattgctcaaggtatggcgtttggcacgggtagtgccatggcacacagggctgttgatgctgtattaggtccccggaccattcagcatgagactgttgcctcagaagctgctgctgctgcccctgcccctccagtgatgaatgctgatgcttgcagcatccattctaaggctttccaagattgtctcaacaactatggcagcgagatcagc

SEQ ID NO: 7164 - DNA, 323 bp, Zea mays
  Clone ID: LIB3137-013-Q1-K1-F11
ggacgatcgatcaagaagcaagcagcagtaacaagaaaccatcatcgatccatgtatccacgaatggcggcgctcggaggacggcggaggagggcgtcgtcagcggccctcctgctagccttgttggcggtggccctggtctccctggccggcccagccacggtcgcggggaacaagaccgggcaggtgaccgtgttctggggccggaacaaggccgagggcacgctgcgcgaggcctgcgactcgggcctctacaccatggtgatcatgtccttcctcgacgtctacggcccgcagcgcggcggctaccaccagtaccacct

SEQ ID NO: 7165 - DNA, 353 bp, Zea mays
  Clone ID: LIB3137-013-Q1-K1-F12
acggcgacttctgcgtcggactcggaggccccgttgatcggtggccaggctgagctcctcccaggatcccagtacacctccggaggccggatcctctgagccgaccgacggcccgagctcctctggtctactctccagtacgcggctcttcagggaccgggagcgaggacgagcgtcctgcttcgacagcatcggcgtgcctgatgagcgctgaaatctgcgcttccgtctccggacagccgatgccatgccttgctcgggagaggtagcaaacgaaacatgtatcttatgccgcggtggcggctgctgctgctgcttgcgctcatttgcctgcgtgcttcacgtttggcttc

SEQ ID NO: 7166 - DNA, 463 bp, Zea mays
  Clone ID: LIB3137-013-Q1-K1-F2
cggacgcgtgggcggggacgcacaggcctctcgccctccgcgcggctccacaggagagcaaaaatggcgaccctctccatggtctccgtccccatcgcaccctcctccttgtccctttccacccggggccgcagctcctccgcatccttccccgctaagaagggaggaatcggtcacggtggcttgcggatcgagtgcatccgtattggtggtgttgagattccaaaccacaagagggtggagtactcgctgcagtacatacatggcattggacgctcacgctcacgccagatcctcctggacctcaatttcgataacaagatcaccaaggacctctccgggagggaggtcatcaccctccgtagggaggttggcacgtacatgattgagggagaccttaaacgttcaacccgtgtggcgaatgagaggctgaaggagattaggtgctacaagggcatccggc

SEQ ID NO: 7167 - DNA, 442 bp, Zea mays
  Clone ID: LIB3137-013-Q1-K1-F3
cggacgcgtggggggtgctactccgtccgcgcttggtctgctctcgtccttccggaggccgcggcgcaacatggcgaagatcaagccgaaggccttgctcgcgcaaagcaaggtgaagaaggtccccggccaaatcagcgtggccacgatcgtcacctacatgatcctcggcgtcctggtcgtgtcctccgtttacgctgcctacaggtactgctgggcaggcacaggagcagcggaggcagtgggcgcccaggggaactgatcccccgccgactgcgtggctgatctcgctgttggtgtatcatccggttggggtaaaatctttgggtgttgctgtctagcaatggggttcttgggacatggataggtggtatgttatacggttacaccgtaccgatgatgtgtatgttgaatttcttccttttattatcctttgatgatc

SEQ ID NO: 7168 - DNA, 380 bp, Zea mays
  Clone ID: LIB3137-013-Q1-K1-F4
ggtgttgaacgcgacgtcgtggtcgggcgggcgtcgtccccggcgcgaggcgtacgcgacggttctgcactcgtcggacacgtacctgtgcggcgcgatcgtgctggcgcagagcatccggcgcgcggggtcgacccgcgacctggtcctcctgcacgaccacacggtgtcgaggccggcgctgcgcgcgctgtcggcggccgggtggacgccccggcggatcaagcgcatccgcaacccgcgcgcggcgcggggcacctacaacgagtacaactacagcaagttccggctgtggcagctggccgactacgaccgcgtggtgttcgtggacgccgacatcctggtgctgcgcgacctggacgcgctgttcgcgttcccgc

SEQ ID NO: 7169 - DNA, 467 bp, Zea mays
  unsure (1)..(467): unsure at all n locations; Clone ID: LIB3137-013-Q1-K1-F5
cggacgcgtgggcagctaccattcaagatttcgttggcattttcaggactccaacataatgggccaaagaagcgtggatataatacacgagtttttgagtgcaaagaggctgcccgtgctcttttgcatgcttcaggctgtgaagatacaccaaatatactttgcaatgttgacccagttgtatatgaggcccagaagtgtgtattggaagaaaatctttccaggagagctgagcactacttttttgaaatgaagcggcttacaaaggggatgcatgggctcatgggaacctacaagaacttggacagctgatctctgaatctggtcgcagctccatactcaactacgaatgtgggagcaaagagatgatccagctgtacgagatcctactgaaggcccncggcgccctcggcgcccggttcagcggtgccggcttcaggtgctgctgcctggccatcgtggagagc

SEQ ID NO: 7170 - DNA, 484 bp, Zea mays
  Clone ID: LIB3137-013-Q1-K1-F6
cggacgcgtgggcggggcagatgaacaagatcactatcaccaacgacaagggccgtctgtgcaaggaggagatcgagaagatggtgcaggacgcggagaagtacaagtcggaggacgaggagcacaagaagaaggtggagtccaagaactcgctggagaactacgcctacaacatgcgcaacacgatcaaggacgagaagatcgcgtccaagctggctgccgacgacaagaagaagatcgaggacgccatcgacgcggccatcagctggctggacgccaaccatctcgccgatgcggacgagttcgatgacaagatgaaggagctggagagcctttgcaaccccatcatcgtcaagatgtaccaggcgctggtgccgcatgggtggctgcctcggcatggacgatgacgctccggctggaagcggtggccctggccccaagatcgaggaggtggactaagcggattgtgtcagtctcgtgtgtc

SEQ ID NO: 7171 - DNA, 324 bp, Zea mays
  Clone ID: LIB3137-013-Q1-K1-F8
gccgcgggcccgcgcgccggaggcgggctcggcctgccgctgccgctgctcgtgcgcttggccgacgtcctgcgccaccgcgtcgagacgctcaacgccgccttcggctacgccgtccgctccaccggctacggctcaaggtaccagggcgtgtacccggtcaagtgcaaccaggacaggtacgtcgtcgaggacattgtggagttcggagcgccctttgggttcggcctcgaggccggctccaagcccgagctgctgctcgccatgagctgcctcgccgcgcgcggcggcctggacgccctgctcatctgcaacgggtacaag

SEQ ID NO: 7172 - DNA, 317 bp, Zea mays
  Clone ID: LIB3137-013-Q1-K1-G1
ataaggggcgacgaaaatggctccaacgaccgccaccaaggacgacagtggctacggcgacgagcgccggcgcgagctgcaggcgttcgacgacacgaagctgggggtgaaaggcctggtggactccggcgtcaagtccatcccgtccatcttccaccacccgccggaagccctgagcgacatgatttctccggcgccgcctctgccgtcgtcgtcgccctccgccgccgccatcccgtgtggtggacctctcggtgacgcggcgcgaggacctagtcgagcaggtgaggcacgcggccgggacggtgggcttcttc

SEQ ID NO: 7173 - DNA, 308 bp, Zea mays
  Clone ID: LIB3137-013-Q1-K1-G10
ggcttctcctccccctcttaccaagtcctcctcgggttagggttccttagggttttgtgggggggcgatggcggcggctgatgtggagtaccgttgcttcgtcggcgggcttgcctgggccaccagcaacgagtcgctggagaatgccttcgcctcctacggcgagatcctcgactccaaggtcatcaccgaccgggagacggggaggtctcgcggcttcggcttcgttaccttctcctccgagaactccatgctcgacgctatcgagaacatgaacggcaaggagctcgacggtcgtaacatcaccg

SEQ ID NO: 7174 - DNA, 339 bp, Zea mays
  Clone ID: LIB3137-013-Q1-K1-G11
gttcctccgtccgggaggacgaggaggaggatgcgcatccctccatcctctgcgactgcgtgcgtctctcgagctcgagtcgattgatgattcatcttcctagtctcgtctccgcgccattctccaaatccatctatcgtcaccatccccatcccagccccagacccgatgcagcaacagcaggacccatcacccgccgatcccgacccactgtcgccccccgacctctgtgatgccgccgcctcgtccgcaacgcataccatccctttccgcaacgcctcctccaagtacgacttcgtcaaggtcaaggtctggctctgggagaacgccgaccactac

SEQ ID NO: 7175 - DNA, 402 bp, Zea mays
  Clone ID: LIB3137-013-Q1-K1-G12
atggcttggtcttgtgctcgtccgatgagcatcgccctcgctgccgtcctcctgctgtgcgggggcgcgtggctgcagcaggcggcggaagctcgcccccaccacatggacaccgacagcagcatctacatggaccgcggcagcaacgacttcttctccatcgtggggtactcgccggaggacctgacgcagcacgaccggctcgtcagagctgttcgaggagtgggtggccaagtaccgcaaggcgtactgcagcttcgaggagaagctgcgccggttcgaggtgttcaaggacaacctgcaccacatcgacgaggccaacaggaaggaggtcaccagctactggctgggcctcaacgccttctccgacctcacgcacgacgagttcaaggccacctacct

SEQ ID NO: 7176 - DNA, 294 bp, Zea mays
  Clone ID: LIB3137-013-Q1-K1-G2
ataaggggcgactaaaatggctccaacgaccgcttctcaatgacgacagtggctacggcgaggagcgccttcgcgagctgcaggcgttctacgacacgaagctgggggtgaaaggcctggtggactccggcttcaagtccattccgtccatctttcaccacccgacgtacgccctgagcgacatgatttctccggcgcctcctctgccgccgtcgtcgccctccgccgccgtcatcccggtggtggacctctcggtgacgcggagcgatgacctagtcgagcacgtgaggcacg

SEQ ID NO: 7177 - DNA, 302 bp, Zea mays
  Clone ID: LIB3137-013-Q1-K1-G3
gcgagtcaatctcaatcgtggtctgttcagtggaagacagagtcctcttcgcgctctcactggcaagctgagggctctccagaagctgatgaccgcttgtaaaaggctgatgatctctctctttaagtccatcccgtccatgtttcaccacccgccggaagccctgagcgacatgatttctccggcgccgactctgccttcgtcgtctccctccgccgccgtcataccgttgatggacctctcggtgacgcggcgcgaggacctagtagagcatttgatgcactcttcctttactgtgggct

SEQ ID NO: 7178 - DNA, 372 bp, Zea mays
  unsure (1)..(372): unsure at all n locations; Clone ID: LIB3137-013-Q1-K1-G4
ctcggatcgcggttggggggttgcggaatgggagcaaaggcggaggagtgtgaggtgccgccgctggctgcgaacgcggaggaggcagcttccaccaatcagtgcaccctcatcttcaaaggctgttccaacagcatggaaaaagtctacgccatcagcagtcctagtaagaaaagaaaatcacagtatgagctgagtgatccaaagttgctaccacttaaatgcaagtttcgcaaacggttatattgccaggatgatgagtctgcaaccacagaaagtttaggatantgatggtattttcatgaacaagacctctgggacggacatggtcagcatacctgaaaaatgggctctngtgagaacactatagcc

SEQ ID NO: 7179 - DNA, 459 bp, Zea mays
  unsure (1)..(459): unsure at all n locations; Clone ID: LIB3137-013-Q1-K1-G5
gagagaatgtgccctctacacttgattcagttgtaccttcaatagctccattaggtggcatgccaatgaaattcacagaagcgccactaactgcttcaaagaagaaccctgttagtcgtccatcaaagcctgttgggccacctccaggatttgatcatgtagccccaaagcgccaagatgattctattccagttgaaaaactgcagatcccacaggttgatgattacagctggctagatggttatcagcaatcgattgatcatgttcacaacttaagaactgtttattcttggtgtcagtgacagcactgcatttgccactccattcccctttcctgggaacaacagttatctgggatgcatgcacaaggngctaccaatgaaaagacatggcaagaattccgtctttttgagccttcanaacagaacatgctccaaaattaccaccaaagaaatcagc

SEQ ID NO: 7180 - DNA, 282 bp, Zea mays
  Clone ID: LIB3137-013-Q1-K1-G6
gttggcttctcctcccccaccggttcgtgttcaggttctggttcgtgggcgagagggaagagatggcggcgtcggacgttgagtaccgttgcttcgttggcggcctcgcctgggccaccgacgaccactccctcaacaacgccttcagcacctacggcgaggtcctcgagtcgaagatcatcctggatcgggagacgcatatgtcccgcggcttcggcttcgtcaccttctccacggaggacgcgatgcgcagcgccatcgagggcatgaacggcaaggagc

SEQ ID NO: 7181 - DNA, 365 bp, Zea mays
  Clone ID: LIB3137-013-Q1-K1-G7
gagggattaaactggcgcaagtccaaccacgtattctctttttacatggccatggacaggggatgagaacatacatcgttacgtccttaacatgttcatgtaccctactgtacgccatgacataaaacaaattgagaagaccatacattatctaactggtatccctatagatcctgataatgctaactccccatactcagagttcctgtacatatgatgttcaatcacattttactattaggacactatgcgcatacccatcggtcgtcacaaactgcaaggtgatcttcagccgcatcataaccgttatccaatagcagccccatagcagccgcataagacactatagaccattcagttgcata

SEQ ID NO: 7182 - DNA, 457 bp, Zea mays
  Clone ID: LIB3137-013-Q1-K1-G8
cttccccgtcctgcaggctccaggcgctgctgctctcgtcctccgctagcgagcgaatcgggggcccgacgccgcggcgggaggtatctcgctttcgatcagcgacggcgcgcccggatcgcttgatctgacggagtttctatctaggattttggttggagcgtcgttctccggtgcttatctcatttctatttatcggtgcctcgggttcacggccaaattcgctgctgcgtggggctttggagattggagccaattccttaaagtggcggtggcagcgtctggtgggaaccatgagcttcgtgttccgaggaagcagggccgacatagaggccggtggcttcacagggttcgcccccgagcgccgcaccatgcgaattcatgcatggagcatgccggtgatagcaattcttggtttttcttctaactgtttttgttttgttcatggtactgaact

SEQ ID NO: 7183 - DNA, 332 bp, Zea mays
  Clone ID: LIB3137-013-Q1-K1-G9
gagccacatcgagaacacgatcgagcacacatgcacgaagactcgtttaggagaaaccacagaccaccaagccgtgaaagcatcatggagtacggtcagcaggggcagcacggccacggcgccacgggccatgtcgaccagtacggcaacccagtcggcggcgtcgagcacggcaccggcggcatgaggcacggcacgggaaccggcggcatgggccagctgggtgagcacggcggcgctggcatgggtggcgggcagttccagcctgcgagggaggagcacaagaccggcggcatcctgcatcgctccggcagctccagctccagctcgtc

SEQ ID NO: 7184 - DNA, 450 bp, Zea mays
  unsure (1)..(450): unsure at all n locations; Clone ID: LIB3137-013-Q1-K1-H1
gagctcgagccctcgccctctcctcaaacacaagcctcagatctcagtcacctgcgccgccgcttcgttcgtgtggaggggagaagagaggaaatggcggcgaccgagggcgtgctcctggggatgggcaaccccctcctcgacatctccgccgtcgtcgatgacgccttcctgacaaagtatgacatcaagctgaacaatgctattctcgctgaggagaagcacttgcctatgtatgacgagttggctagcaagagcaatgttgaatatattgccggaggagccacccagaactctatcagggttgcccaatggatgcttcaaactcctggggcaacaagttacatgggatgcatttggaagacaacgttggtgaggaaatgaagaanaacgctcagctgcggagttactgctcattactacgaggatgagactgctcctactgcacat

SEQ ID NO: 7185 - DNA, 428 bp, Zea mays
  unsure (1)..(428): unsure at all n locations; Clone ID: LIB3137-013-Q1-K1-H10
aaacaccacgccgaagataaaggggagatagagtacacggttatcagaccagtgcagagagcaatagatgctgtggtggggtgccgatcctcgtccgagtctcatctccgatccacgctcggctgcgtccgnggctggtcgcgtgcgtggtcccgtccggcacagtgtcaagcggtcggaagtgcgaacgatcttcgagggccgccgttccgggagtgtcgacgaggacctccgaggagtgaggaggaggacgacgtagggggtggttggagagcaagcccgccttcgtcgtccgcgcctcgtccgcggcgacgcatcccagggcgcgccatgagcagcggagccggcgccgggcgcccgaccagcagtacatgggcgttcggcgccgcccgtggggcaagtgggccggcgagatccgcgaccccgtc

SEQ ID NO: 7186 - DNA, 498 bp, Zea mays
  Clone ID: LIB3137-013-Q1-K1-H11
acggacaaacacactcgatgaaaaggagatatgatttcacgttacagacaggcatacaccaaagatgtgtcgttgttaccatcctgtgcgatctcatttccaccactcctttgactccttgctgatctacatatcccttctgcaaatgcaatctgcttgaatgctaactacttttttgccactttccggtagttctactagtgactcctcctattactaagattactacatttttattttttaaaaataatcccttttttttttttttactccttctacattattgatatatcttttcttcgctacttttatctatcaacactctaaatgtttttctcttttatcaattcccttaatttttactccctttattcttttagtaaatattttataaaactaatttttttgtttttatacaagttaatcaaattacttccttcaattcttttatttatattacctttcttttttttatttattttaaaaatatttctctat

SEQ ID NO: 7187 - DNA, 299 bp, Zea mays
  unsure (1)..(299): unsure at all n locations; Clone ID: LIB3137-013-Q1-K1-H2
ccgcctccgccgccggcgccggggactggtacaaccaggagctggacctcaccctgcagcagcggatgcgctgggtgcagcgcaagtacatgatctacaactactgcaccgaccccaagcgctaccagcagggcctccccgccgagtgctccatgcagtagcgcccggttattcctcgcccgtccaacaatggcgcgcgcgcgcgtgtgtgtgcatgtggtccgctctactgctaccgctacgacgatcggtgtcgatcaccgcatcaaggcaagacgaaaggcatcngaaacatggta

SEQ ID NO: 7188 - DNA, 460 bp, Zea mays
  Clone ID: LIB3137-013-Q1-K1-H3
ccctttccccttccctccctccctctccccgcgggccgccagaggcaatttcgccctcgatgcgaccccgattcgtccgcccgcgaccgggattccctccgccaagcgcggatctgaacgctgcgctccgtgtcgccgctcgaatccgccatgaagggggccaaatccaagggcgccgccaaggccgatgccaagctggcggtgaagagcaagggggcggagaagcccgccaagggccagaaaaggaaaggccgccaggaccccaaccaggcttagaaggcgtccaacgccttctttcgtggtcatggaaggaatttcgcaaggaggtcaaggagaagaacccttagaaccagtctgtcgttgcggtggggaaagctgctggcaccaggtggaaatccctgagcgagtcggacaagctccctatgtagccaaggctaacaagctcaagctcgagtacaac

SEQ ID NO: 7189 - DNA, 508 bp, Zea mays
  unsure (1)..(508): unsure at all n locations; Clone ID: LIB3137-013-Q1-K1-H4
caaaaccccacgcgagcacccattgccaaccatggcgaccaccacctcttcctcctcgctgaccactcctctcctccgcccgaaccccaataccaaccctgctcccagatctctccaactcctcaggagcaggaggtgcgctcgtgccgtaactaccgccgtagccggaggtgcggtgccttacggggctaatccgcggcgcgggatttggtcgatcagggatgacttgggtggtgccaaggtcgccctacttcccagtgggagtccgcggcggtgcaggagcgtgggtccgtcgcccatggtgatgaancggttccagagcgtcgtcagtcagcttttccagcacagaattattcggtgcggagcgcccgttgaggatgatatggccaacatcattggtagcacagctgctctaccttgacgctattgattcccaataaggatatcattatgtatgtggaattcggcaggaaggtcagtggacagctggaatggctatatttgatac

SEQ ID NO: 7190 - DNA, 279 bp, Zea mays
  Clone ID: LIB3137-013-Q1-K1-H5
ctgatgcccatactatcgctcgttctgaaccatttctatcataaacccttactacctcgcggtgactcacatacgtagggcgagatcctcaactatctaatcatatcgctcgtgtatactccacacgagcagtaagtcatcaaatacaacacatacgatggcaacttgaccaccacacccataaacggtgctatcctcactctcaatacaagaacggctcaacttcttcttaagggcatgcacacaagtgtctggactggccacaaacatcctgagcaa

SEQ ID NO: 7191 - DNA, 400 bp, Zea mays
  unsure (1)..(400): unsure at all n locations; Clone ID: LIB3137-013-Q1-K1-H6
cccactcagaaaacccagccgccgccgcatcggcctcccaggtaagcagtagcgtccaccggagccgccgccatgaagcgcaacccccgcgtcacgagctcccgccggaagtgccgcaaggcgcacttcacggccccgtcctccgtccgccgcgtgctcatgtccgcggcgctatcgacggagctccgccacaagtacaatgtgcgttccatcccgatccgcaaggacgacgaggtgcaggtcgtgcgcggcacctacaaggggccgtgagggnatagtggtgcagggtgtacccgccgtcgctgggtcatccacgttgagcgggatcacccgcgagaaggtgaacggctccaccgtaaacgtgggcatccacccttccaggtcatggttacaaagctga

SEQ ID NO: 7192 - DNA, 478 bp, Zea mays
  unsure (1)..(478): unsure at all n locations; Clone ID: LIB3137-013-Q1-K1-H7
cgcctagtgatggtcgtcgttggtccctgcgtccttccccggtcgtctcacctcccttcggggcccctgttttttttcagcttcggcgtccatcgcgtcctgctccttccattcgtatgctctggtgatcgtccaccccggcgtccagcgctgcccttgtctcttcgggttttgtctccccaacaccagtcggacgctccttccattcatatgctctggtggtcgtccaccccagcgtccagtgctgctctcgcctcgtcgggctttgtctccccaacatcagtcgctgcttcaactcatgttcgtggatgccgtatctacgactccgacactccctacacaaatctgctgttttgtgttcatcgccgaataaaaatgccgggcgcttctggagaacggaaagatgaagtctgctcttcgatcctaagcgttcagtgttatgcgcgaaccaganactcgtgccgatatcacggtcttc

SEQ ID NO: 7193 - DNA, 169 bp, Zea mays
  Clone ID: LIB3137-013-Q1-K1-H8
tcaccctgtacttcctctcattcattcgttatacaatacacaaccaatatcatgtaaaactctcccattcttgacgccattcagtccttgaatagcctcaatactgactcttttgtataactttcatgatactacataactctaatattttaactctttcatactcatc

SEQ ID NO: 7194 - DNA, 311 bp, Zea mays
  Clone ID: LIB3137-014-Q1-K1-A1
cccttagctcggagtcggacacccacccgccacgaccaccagaccactcgcttccccgaaggttagctccgcgcttctctgttcgagctatccagcctccatcaagagcgagcgagcgagggcaacgggcatggcggcggctgtgtccttctcccgggtgcgagctctcccgacgtggtccagctccgtgtccggcgacgaccaccaccgctcctactccgcggcgctggccatgtcggtgtcggtgcggccccggtgtcgcgcgcggtcgccggcgcggatgatgggcaacgtgaacgccggcaaggggc

SEQ ID NO: 7195 - DNA, 439 bp, Zea mays
  Clone ID: LIB3137-014-Q1-K1-A10
acgattcgtgaagcgattcgccgactcgctcggtcacccaaaggtcagccaggagctcaggtccatctggttagacctgctggccaagtgcgacgcgtcgctggggatgaagattgccacccggctcaacatgaagccaaacatgtgatgcatcatgcttgtgctgaataataatgaagacgcatgcatgtcgtcgccaggaacaaagatcgacaaataatacaagaccagcacgcatgggcatactctatatatacgtatagcccgtgcccgtgcccgcctttgtaccaatacaagccaaaccaagtggatgtgtattattattattattactaggtgagtgcccgtgcgttgcaacggaacacaaactattcgttaaaatgttagcctacgatgattatagtaaaaaaaacaacacataacttataatcaacatcgt

SEQ ID NO: 7196 - DNA, 449 bp, Zea mays
  Clone ID: LIB3137-014-Q1-K1-A11
acgagttcatccgcagcagtggggaatatgacattaatggcttcgtggaggacacatatgggcgctttctccttcaagaagctgtccaccatcagtaccggaatcaatatgttggaagaggatggagaagttgatgcatatgtatcccctcataaggagatagacccacacatttcagcacccaatcgaaagaaagccaggttcatgataccaaagagtgctcaggtggacagtgaggtgcgcctcgagctgcatgagctcatggacgctagggaggcaggcatgtccttcatcctggggcactcgtacatgaaggcgaagagcgggtcgagtttcataaagcggattgtgataaacttcttctacgagttcttgaggaagaacagccgtggccctgcatactccgcatacataccccatgccttcactctggaggtaggaatggtcta

SEQ ID NO: 7197 - DNA, 279 bp, Zea mays
  unsure (1)..(279): unsure at all n locations; Clone ID: LIB3137-014-Q1-K1-A12
cttcccctcnncctcaataactcttttttttccnccaccatatccctccctttagaaagagtttcttataacaaccatcccaccccacatcccccattcatctctcacatatactaccaattactactccctcttcctttccccctacagcttatccacaatttttttttaataccactacatcacaaacaaccctctctacttcctcatcttccacaccgaccctcactttatcaacaactacttcctaaacaccatttacccaattatcccttctca

SEQ ID NO: 7198 - DNA, 337 bp, Zea mays
  Clone ID: LIB3137-014-Q1-K1-A2
caacggccccgccgcgccgaccccgctcacggtgctcttcctcggcgacacctccaagggcgacaggccggggcagttcaccaacttccatctgacgggcgcgaccggcatcttcacgggcttctccaccgagttcgtgtcgcgcgcgtgggacctgccggaggcggacgcggcggcgctggtgtcgagccagccggcctcgggcatcgtccgggcgtcctcgtccccgctgccggcgccgtcgccgcgggaccgcgagggggtggcgctcaactgcctggaggcgccgctggacgtggacatcccgggcggggggccgcgtcgtggtgctcaacac

SEQ ID NO: 7199 - DNA, 55 bp, Zea mays
  Clone ID: LIB3137-014-Q1-K1-A3
cttccctggaggccatgaccccatcgcccctttctttcacgccggctcgcggttc

SEQ ID NO: 7200 - DNA, 421 bp, Zea mays
  Clone ID: LIB3137-014-Q1-K1-A5
cttattgttatacatcctgcaaccgactcgcccaagtgattagccagagctgatttggtagtgcgattgatcctcatcagttccttagctgaagctaaatagtacttctgcaacctgagtgccaaaaccatcatcggcacagagacgaacagaacttgccatgtaacaacattggctttcgaggaagaagatcgcttctttgagaaaaattcggaacttgttgacaagaatgctgcttcatatttctataattttgcagcgactgaatggctgattcaacgcctggaaacaatgagtgctgcagttctttctttttctgccttcatcatggctctcctccctgcaggaacttttagctctggctttataagaatggcgttgtcttatggtctgtccctaaacaattcctttgttttctcta

SEQ ID NO: 7201 - DNA, 377 bp, Zea mays
  Clone ID: LIB3137-014-Q1-K1-A7
cgcgtccgctccacctctcctcccaccgcagcatctggctagcgcgaggcggaggcggatagagggagggggaccatggcaagctcttcatcggcggcatctcctgggaaacaacggaggagaagctgagcgagcacttctccgcctacggagaggttacgcaggccgccgtcatgcgcgacaagacgacgggccgcccccgaggcttcgggtttgtcgtcttcgccgaccccgccgtcgtcgaccgagcgctgcaggacccccacaccctcgacggccgcacggtcgatgtgaagcgggcactctcgcgggaagagcagcaggccttcaaggccgcaaaccctaaccggtggaggaacacttgcggaggaaatggc

SEQ ID NO: 7202 - DNA, 322 bp, Zea mays
  Clone ID: LIB3137-014-Q1-K1-A8
tgaccgaggaaatgtcagaaaaatttctcggtttgcctggagtacctttcattttaggtcgcttcgtcttagctgtggttttcctaccgtgctggatgtgcttggtctgttctgtccccagtgcctctaatccgctgagcctgttcagcgctctgttactctaacccttcgtgtcctatttagttcgctacgttttatatgttgtgcttattctgtaatttagtgatgtttgtctcatgacgcaacggagttcaggacgaataaaaagaaagatttgctagacacattctggattccaactgcctgtacaatgttgcacctc

SEQ ID NO: 7203 - DNA, 406 bp, Zea mays
  unsure (1)..(406): unsure at all n locations; Clone ID: LIB3137-014-Q1-K1-B11
actgttataaataaccacacaccctttttttcttaacccaaccaatcanttacattgatgagcctctctactactcttagttactaccatcagcttgcttcaacagtataatagagctatcctatgatttcgtcacctaatccctcttcagcggcccttctcctcctttcttcttcttccgttctaacacattctctcgcttaccttactcacgacaactgctttaataacaataatgtgactgtgcataacctgttcatccactactttactcttactctttatcctctttccaacatcctccctctgttctctatcacctacactcttcaccctctcaatcactccgaattccccctgtgctattttacagttctccttctctcgccctactcctcccattttt

SEQ ID NO: 7204 - DNA, 398 bp, Zea mays
  Clone ID: LIB3137-014-Q1-K1-B2
accacgcaccccaccaacccatacccataccagaggctctctgattttacttctcagcgggagagcggctgatcgagcgagcgagcgaggcacacggagctagctaaacagagcacacggatagaaaagcaagatgtcggacggcacggcgacctgcatcgacatcatcctcgccattatcctgccgccgctcggggtcttcttcaagttcggctgcggggttgagttctggatctgccttatcctcaccttcttcggctacctccccggcatcatctacgccgtctgggccatcaccaagtagccggccggtgcgttagcatgcaatgcgcgcgcagggtgatctcgtggcgggggacgcggtgtgcgcgtgtcttgagatgtgattccttccttcc

SEQ ID NO: 7205 - DNA, 376 bp, Zea mays
  Clone ID: LIB3137-014-Q1-K1-B4
gatttggatgatgaggtctgctccttaccatcgtgccagtctagatcttctctcacagatgcgtgggagtgattggccgatacccgggctgattcctcgggctccacctatagcgcttcaattacaaagaggaactcatggccgactaacaggcagccgcaaccggatggatcgaacaatgccatcaacagaaaaaggcagccctccttccatcgtggctaagaaaaatctgactacttcacgccgcagcacaaaccaattcaagaaatctgaggacaagattgtcgttactacagctccagatgcaacggcaatcaaaatggtggctgacgagaagctgctgaaagaaggcaatgttagggagaggcttgaaacg

SEQ ID NO: 7206 - DNA, 363 bp, Zea mays
  unsure (1)..(363): unsure at all n locations; Clone ID: LIB3137-014-Q1-K1-B5
gaaacccgacagggggagtgttatttcaagcttggctgaaaataaaacgtccattggtagtgctaaccaataacaacggacaaagccaacacgactaaccaggccacccagtatcgcttccaaattaatatcatacacagatgtggctgtttcgccccctgcacattattgaaacccatttggagaacaagaagcaaaagagaaagatagtggacgtgatattgacctatcactgtcatccgaggaagaaaataaaaagtttacagaaaaagagaaagaaaagccaagtgaggacagtagcaaagagattctttcaagtcagcgagacttaaagagtcatgtagaaatacctnctgacagcaa

SEQ ID NO: 7207 - DNA, 337 bp, Zea mays
  unsure (1)..(337): unsure at all n locations; Clone ID: LIB3137-014-Q1-K1-B6
gagccttccgggttggctttttcttccccttccgttcggtttctggttcctgagggtcttccgggttcgggttgcgtttttaaccgatccagatggccccttccgattttgagtaccccttcttcggtcgcngcctcgcctgggccacggacgaccactccctccacaacgccttcagcacctacggcgaggtcctcgagtccaagatcatcctccatcgggagacgcagaggtcccgcggcttcggcttcgtcaccttctccacggaggaggcgatgcggaacgccatcgagggcatgaacggcaaggagctggacggccgcaacatcaccgtcaa

SEQ ID NO: 7208 - DNA, 210 bp, Zea mays
  Clone ID: LIB3137-014-Q1-K1-B7
caactaatctgtaacagtgaaagggtctctatctgagtgcctgacttggttacgtggtcggaatctctgaatagcactcctgacgtcctgggctcgactccccggagcgaatttctggttaaaaaaaatcccctcgtctgtcccaccccaaaccataggtctaaggaccggtcctggtccccaccctttcttacatgggcttaccgtgcc

SEQ ID NO: 7209 - DNA, 391 bp, Zea mays
  Clone ID: LIB3137-014-Q1-K1-B8
ggatgttaacgagttccagaccaacctggtaccctacccgaggatccacttcatgcgggcgtcgtacgctccagtcatctctgctgagaaggcctaccacgagcagctctctgtggctgagatcaccaacagtgccttcgagccatcttccatgatggccaagtgcgacccacgccatggcaagtacatggcctgctgcctcatgtaccgtggtgatgtggtccccaaggatgtgaatgctgctgtggccaccatcaagaccaaacgcaccatccagttcgtggattggtgcccgactggcttcaagtgcggcatcaactaccagcctcctagcgttgtgcctggtggcgacctggccaacgtgcaacgtgccgtgtgcatgatctccaac

SEQ ID NO: 7210 - DNA, 431 bp, Zea mays
  unsure (1)..(431): unsure at all n locations; Clone ID: LIB3137-014-Q1-K1-C1
gtccgcggacgcctgggtttgaaatgtangtatgcttctctatcatgttcagcaagggaatcaaagcatgtttgacatacatagaagctgttccctggaatgagaacgaggaggagaagctgaagaatctctttgcaagattcacttttgacgaagcaatatcccaggatatactggcaagactgcgaccacacaactggaaaggctcagatgacctcgctgtacagcttattcaatctgtcactaacagcaccagcactatggcaagaaaagacatgcaatctttggtgaatggtcttctaagcaaaaagtcagtctatcaaaaggactcgtcaggattaaacaaggagagcctgtatcacatctgttattcatgtctagagtcactggttgacctctttgaagaggccatataaccaacatattacaca

SEQ ID NO: 7211 - DNA, 384 bp, Zea mays
  unsure (1)..(384): unsure at all n locations; Clone ID: LIB3137-014-Q1-K1-C11
aaaacccgggtcgaccgactcgtacgggctggtaatgttctatccgttcatctacgtgtacttgttctcgtttcaaaattcatctagttgtttcttaaaacgacatggttctntcttcttgtgcttgctgttagaaattgccaagaattatcactttcgcattctcttcttgggtgtagctcttgtcttcttgttcaaggaggctgaggaaagaaaagacattgaagatgaatccgtcgcatcttcaaggtactacttccacatgtgctctctcatcataattccctaactggtcatcgaggatgtgaagttcccccactgccacacctgcttctttgatgatatggctgtcgaccttctatgcatctactactcatccatcat

SEQ ID NO: 7212 - DNA, 282 bp, Zea mays
  unsure (1)..(282): unsure at all n locations; Clone ID: LIB3137-014-Q1-K1-C12
tcttactcaaatcctctctcttacattaatatccttctttaaagtattcatccaanaacacctccccagcctttttatatcaaattacacccccaaaaaatcctccaccaccaatatctttttacaacacttcatctttaacttcttctcttcttaccttctcccttacatttttttccttcctctccattaaaataaacacctctctttttcaatatccctccataaccattatttaccacaatttctcactcctatatatccccatctccttcaacttca

SEQ ID NO: 7213 - DNA, 442 bp, Zea mays
  unsure (1)..(442): unsure at all n locations; Clone ID: LIB3137-014-Q1-K1-C2
ctcagccccactctctggagatcaaagatgtcaatccagttgaaacagacagtgagcagaggaagcatgcctactccgttgcgcttgcgtctgctgtcgctgctgaagctgcagcagttgctgcccaggctgctgcggaagttgtccgcctcacagcagttaccacggctgcaccaaagatgcctgttagttcgagggaagaacttgccgccaccaagattcagactgccttcaggggttatctggcaaggagagcattgcgtgcactaagagggctagttagattgaagtcgcttgttgatggaaatgctgtcaaacgccaaaccgctcacaccttgcaatgcacacaagcaatgacaagagttcaaactcaaatctactctanaagggtgaagttggaggaggagaaacaggctcttcaaagacaactccaattgaaaca

SEQ ID NO: 7214 - DNA, 424 bp, Zea mays
  Clone ID: LIB3137-014-Q1-K1-C3
ggggtgagaaggcaatgcagcttctcgagagtggcctcaaggtgaaggagtatgagcttctgaggaggaacttcagtgatactggctgctttggttttggtattcaggagcacattgatcttggaatcaagtatgacccgtctactggtatttatggcatggacttttacgtcgttctggaacgagctggttatcgtgttgcacgtcggcgcaggtgcaagtcccgcgttggcatccatcacagggtgaccaaagaagacgccatgaagtggttccaggtgaagtacgagggtgtcatcctcaacaaggcccaaaacacctcgtaatcattgatagtcatcaaacgacttgccctttagcactccagttctcaagtataatctgtgtactatgaattctgtgtttgttggataccaaatgcact

SEQ ID NO: 7215 - DNA, 446 bp, Zea mays
  unsure (1)..(446): unsure at all n locations; Clone ID: LIB3137-014-Q1-K1-C4
cccacgcgtccgcccacgcgtccggctgcgcacaccgacttcttttgcacaaggtacagcagcgcaggcgcagcggcagcccgccgctggatctctcccgaggctccggcgatggagcggtcctgctacttcccgctgcggtgggagagcacgggcgaccagtggtggtacgcgtcgccgatagactgggcggcggccgacggccactacgacatcgtccgccagctgctgcacctcgaccctaacctgctcatcaagctcacctccctccgccggatccgccgcctcgaggcgctgtgggacgacgacgcccgcttcgccgacgcggcccggaaccgcgcgtncgtcgcccgcagcctgctgctggagtgcgagtgcaggaaccaccgccccggcgccggggagaacacgctgctccgggccgggtacggcggctgggtgctcta

SEQ ID NO: 7216 - DNA, 217 bp, Zea mays
  Clone ID: LIB3137-014-Q1-K1-C7
ctttgttgctgtttttattcgttcgtcacataagcagtcgtggtcggtcagccggggacagggatcttccatgtgttcgtcctgcccgctgccttctgcgtgctgctcgccgcatccgccgtgtcctcgaggcccgtcctgactccgctgggtactagccgccctgctgccggcgacctgtccgtgtacttccactcggactcgtgcccccaacttg

SEQ ID NO: 7217 - DNA, 342 bp, Zea mays
  Clone ID: LIB3137-014-Q1-K1-C8
cggacgcgtgggtagaaggcgtgtacaccattaagaagccggccaaccaaccgactcgccgaacccttctgatcgatcgagggccccttgttctagccagttgtccccttccctctcgccggcgttgctcctgcctgctccaatggccgctgcctctgccgccgcccccacgaagacagcgaacatccccgcgacgatgcgggccgtgcagtacgactcctgcggcgggggcgccgctggactcaagcatgtggaagttcccgtcccttcggccaaaaagaatgagcttttgctttaactggaggcagcaaacatcatcccactggactgtaaagtgcacaa

SEQ ID NO: 7218 - DNA, 343 bp, Zea mays
  Clone ID: LIB3137-014-Q1-K1-C9
cacaccacctcctccatcccggccatctctcttgcaccgccgcctcctctgcctacctagtccctcttctacccggcgccgccgcttcaccgtgacccgaccatccccagcaacatctcccagaccctcgacctcgtgctctcccccaacgcctcctccgccttcacttgcgccgcctttcccgaccccccgccgctccctgccaactccaacgcctcctccacctgccctgcctacttccgcttcatccacgatgacctccacccatggcgcgccgctgggggcatcacccgctccatggtcgaccgcgcgcgcgccaccgtcaactttcgactcgtcgtca

SEQ ID NO: 7219 - DNA, 298 bp, Zea mays
  Clone ID: LIB3137-014-Q1-K1-D1
taattctgggctcacaattgttagtcacagtggtgtggaaagtgcagcatatgcatgttcaaatagtcaactagaaagcgcatctaatgtgatatctccaaatgttgatgtaccttttgttgattgggatgctcttgagattgttcctattacagaagagctggttggttctatagttcccgttgttgatgaagacaatttttatgaacacattggtctttgagtaccacatgaataagatctatgaggctgaacctgcagttaaagagtatttgaaaaaaaatcacaaggcattttg

SEQ ID NO: 7220 - DNA, 352 bp, Zea mays
  Clone ID: LIB3137-014-Q1-K1-D2
gaaagaattaaagcaccaactcagcctcatgctttccgccctaaaatccctttttcctggggaggctttgtccactacccatcctaatatggactcatagctccgcaaccagacaaggatcatactcttcaatcgcaaggacatcatctcaactgatgatatgaatgcataggctacttactttcgtaatcagggcatcaaacatgttttctccaactgccatatatgatatgcttacaatgaaattatgtaggatggcaaaatcagtaccatctgttgctaacacatacagaaacgagaacggattgcttcctccaccgattcgagctaaaatacctacatatccaaatgt

SEQ ID NO: 7221 - DNA, 443 bp, Zea mays
  unsure (1)..(443): unsure at all n locations; Clone ID: LIB3137-014-Q1-K1-D3
acgcgtccggcgccagggtttcaggcttccacgaatctttttgtcggcctcaattcccctcggcgccgagagcgccttctatagcttcggtcctcggttagttaaccatccaggttctgtcaagatgtctgatagccatgagactgacaggaacattgagatttggaaaattaagaaactgatcaaggcattggaatcagccagaggcaatggcacaagcatgatctctctaatcatgcctccacgtgatcaggttgctcgagtggctaagatgttaggtgatgaatatggtactgcttcgaacatcaagagtagagttaatcgtcaatctgtgttggctgccatcacctcagctcagcagaggttgaagctctacaacaaagtgcctcctaacggattggttctgtacactggaactattgttactgaagacngataggaaa

SEQ ID NO: 7222 - DNA, 320 bp, Zea mays
  unsure (1)..(320): unsure at all n locations; Clone ID: LIB3137-014-Q1-K1-D7
ataccgggccgccgacgcgtacgatccaatangaacggtcatctaatcgtccatctgtttctgtagtactanctnttccggggggggtttttagattgatgggcggccatcatctcacgtccagggatgatgatgattcccttgtaccaagtccacttatgctcaaaagtgaaaatgtacaagaggatggggtctatttattggaaaacggtgaggatggtctagtctacgtaagaaacatggtaaatccggctaccctggaacaaatattcggtgtctcttctttggctgcaataccagcccagttagcattggagcac

SEQ ID NO: 7223 - DNA, 379 bp, Zea mays
  unsure (1)..(379): unsure at all n locations; Clone ID: LIB3137-014-Q1-K1-D8
cgacccatctcgtccggcccacctaattccctgccattcctcttccttctcctcctcgtctccccctangggagacgggttttattaaacacaaagacgcccccctcatcctatgaagccatggatcacaatgaggctgcgtgccaggccccctatggacccatcctctgcatcaataactgttgcttcttctgcagcgctgcgaccattaacatgttctccaagtgccacaaggacatgataactaagcatcatcatgccaatcttgcttcctcctctatctacaacatcctaaaccgcatctaccccttcatacatcctcttctttctttcaacaacaccttattaccttattcccaacttcacttcaaacaattaa

SEQ ID NO: 7224 - DNA, 425 bp, Zea mays
  unsure (1)..(425): unsure at all n locations; Clone ID: LIB3137-014-Q1-K1-E1
gtcgagggctgggagaggatttacccttgatgagctgaaggctgccggcattccaaagaagcgttgccccaaccattggcatttctgtggatcaccaccgcaagaacaaatatctcgagggactgcaggccaatgtccagaggcttaagacgtacaaggccaagctggttatcttcccaaggcgtgctcgcaaggccaatgccggcgactctactccggaggagcttgccacggccacccaggtccagggcgactacatgcctattactcgtggtgagaagcgctcagtcgaggttgtgaaggttactgatgagatgaagtcgtttgcggcctacggcaagctccgtcttgagcggatgaacaagaaacaccttggtgcccgccaaaaaaaggcggctgangcggagaaagatgaaaagaagtga

SEQ ID NO: 7225 - DNA, 445 bp, Zea mays
  Clone ID: LIB3137-014-Q1-K1-E10
atcagttcttactgtgaaaggtctattttattgcataggacatactccaaacagtcggctggttcttttccaaatcgaacttgatagtgctggctatattttagttaaagagggctcagccaaaacttcagttgatggtgtattcgctgctggtgatgttcaggatcatgaatggagacaagctattactgcagctggatctggatgcatagctgctttgtcagttgaaagatacttagttgccaatgatcttcttgtcgaatttcaccagcctgttcaagaagaaacaaagaaggatattacagataaagatgttcaaatgggctttgacatttctcacagaaaacacaatggacagtatgcactccgcaaactataccatgagagtccacgactcatttgtgttctatacacttctcccacatgttgtccttgcataacctta

SEQ ID NO: 7226 - DNA, 51 bp, Zea mays
  Clone ID: LIB3137-014-Q1-K1-E2
tccgaattccggtcgggccaaccttccggccaattttgttacaccgcccga

SEQ ID NO: 7227 - DNA, 166 bp, Zea mays
  Clone ID: LIB3137-014-Q1-K1-E3
ctcagtctcccgcgcgcaagctacaacggttcagggtccggtgctgctgcggctgatccgggtaccgtgggagacaccttggaacgggaggagggcggcggcacataggcaggcgcttcggctgatgagtcatccaaccggaagcagccgccccctgttgacccca

SEQ ID NO: 7228 - DNA, 434 bp, Zea mays
  Clone ID: LIB3137-014-Q1-K1-E5
gaagaggaactctttgatcaaagcttgggattagaatgagaagacaaaagctgagaacaaggctgcttataaagtatccgctattctttcatgggaaaacacaaagaaagcaaacatagaagctgaactgaagaagattgaggaacaactggaaaagaagaaggctgaatatgcagagaagatgaagaacaaggttgcaatgatacacaaggaatccgaagagaagcgagcgatggtggaggcaaaacgcggtgaggaggtcctgaaggccgaggagatggctgccaagtaccggtccaccggccacgctcctaagaagctcatcggttgcttcggagcctaagaaaccttccaagtcagaccgagcagaaagtgaaaaacgtcagccagtgattgcttggtcctctcgctctatcaagtgtgtagcgtgtctt

SEQ ID NO: 7229 - DNA, 419 bp, Zea mays
  Clone ID: LIB3137-014-Q1-K1-E6
tttttcctccttccgggatgtcttttaggaggaggcgcatccctccatcctctgcgtcttcatacatctctcgagctccattccattgatgattcatcttcctagtctcgtctccgcgccattctccaaatccatctatcgtcaccatccccatcccatccccatacccgatgcatcaacagcatgacccatcaccctcccatccctacccactgccgcccccctacctctgtgatgccgcctcctcgtccgcaacgcatacgatcccttcccgcaacgcctcctccaagtacgatttcgtcaaggtcaacgtctggctcggggagaacgccgaccactactacgtcctctccacgttcctcctcagcaggatgctcacagtcaccaagattcctaatcatgtcgccatcaacatttcc

SEQ ID NO: 7230 - DNA, 430 bp, Zea mays
  Clone ID: LIB3137-014-Q1-K1-E7
cctcaatccgcagcacttgacaaagcatctccagttcgcccaaaatctccagccatgaagaaagcatctccaattgctcccaaatctccaccagttgataaagcctctccagctctgccaaaatcattatcaggtgctaaagatgcgctttttccttctaggtcgctgcagattgataagtttactccagccgccccaaggttatcacaagatgataaggctgctctgccttcttcagaacagtcacatatatctccagctactacttctgaagctcaaggggcaactactaggaaggtcacaaccaccacctcactttcagaggctgctgcagcatggaggccttcaagtgctcctgtgttacccacaccaagatcaaccgggccagctgcttcacatattcaaacttccacattgctttcccgctcta

SEQ ID NO: 7231 - DNA, 204 bp, Zea mays
  Clone ID: LIB3137-014-Q1-K1-E8
tactcctcaccaacacaatcttaaaatccttcccatcctacctctctattatatacttacctcattacatcaactcttcattcttctcatcatatctctcattcaatctcttacctcctaaaactcttcctctcctctcttaatctctccaaccactcattcttccttatccacttactttcattcttcacctccttcctcaaa

SEQ ID NO: 7232 - DNA, 422 bp, Zea mays
  Clone ID: LIB3137-014-Q1-K1-F1
gttgtttattgcttgcgagcccctaaaaacctgaggccactactcaccaatgcaatagggaggagagtgggcggacgtaaactacaagcacataagaatcgcgaagccatgtatcgtggctcataagagaactctgacgcgctgccctgcgaggctctgatcttcgtcacccgttcccgtagctggtccttcgtggagcgccctggtctgctcctggtcaccgcgttcctgctcgctcaacttgttgccaccttcctcgctgtctacgccaactggggcttcgccaggatcaagggtatcggctggggctgggcaggtgtggtctggctctacagcatcgtcttctacttccccctggacctgctcaagttcttcatccgcttcgtgctcagcggcagggcatgggacaacctcctcgagaa

SEQ ID NO: 7233 - DNA, 301 bp, Zea mays
  Clone ID: LIB3137-014-Q1-K1-F10
cagcgccagctccacccctcaccttttctttatatacacccctcctcccaaccctaccgaatcatcactaccaccgctctctcttcctctcctccatctctcaacgcctgaaactcacctcaccttccctcctctccgctcatcccccactactcccgtagaaaatagctgactctgattatatccatcccctcttctacgacaacctaactttcatcgtcaatgcttccttcgccctctactactctcctaatgccttctttcccagcatcttttttctccctctccacaccggtttaat

SEQ ID NO: 7234 - DNA, 363 bp, Zea mays
  Clone ID: LIB3137-014-Q1-K1-F2
ggaggctgttcagacagagaaggcaccaccatccctaggcccttattctcaggccatcaaagcagataatcttgtgtttgtttctggagttcttggcttgaatcccgagaccaggaagtttatctctgaaaatgttgaggagcaaactgagcaggttatgaaaaacatgggcgagatattgaaagctagtggtgctagctattcttcagttgtgaagacaacgatcatgttggctgatctgcaggatttcaataaagtaaacgagatctatggcaaatatttcccggcgccagcacctgcacgatcaacctaccaagtggcggcgctgccactgaatgcccggattgagattgagtgcatcgc

SEQ ID NO: 7235 - DNA, 409 bp, Zea mays
  Clone ID: LIB3137-014-Q1-K1-F3
aacgatactaataaacccagttgatcgtgtttttagcacatatgagttctcagttgaagtggcgggtatattccttgtgcatgcaaacttgacttctgcaaagttaatgactacccgtgtgttaacaaagtctcgtgctgtcagtactttggacatctggccttggaagtacttggttccatggatgagggaagatctgtttgccaggagagatgccaggggtgtttacaaagttcatagtagtaagaaggttaatgcatatgatgtggacgatatggttatgccattacatcggtacatcaatgatccagttgcccatgaaatcattcataatggggctacctttcagattactgggttaacgaacaactcatattttgatggagcacatgaggttcgacattgtgtc

SEQ ID NO: 7236 - DNA, 385 bp, Zea mays
  Clone ID: LIB3137-014-Q1-K1-F6
ggcggagcggttccaaagggttaaaagttgtccaatctgccgttgtttccttgctgtgccttccccggattcctgggggcgggtatttttggccctgggcacctggttaaagccccaggattggccggccttccccggcgggcaggccacttacctgggcgccccgttgccgtggggcacgctgccgaccatcctggtgatcgagttcgtggccatcgccttcgccgagcaccagcgcaccatggagaatgaccccgagaagaagaagtaccccggcggcgccttcgacccgctcggcttctccaaggaccccgccaagttcgaggagtacaagctcaaggagatcaagaacggccgcctcgccatgctgtgccttcgtcggctt

SEQ ID NO: 7237 - DNA, 187 bp, Zea mays
  Clone ID: LIB3137-014-Q1-K1-F7
tcttttccttccatccaatcttttattcaatctcagccatagcttctcttcggacagcattctactaactaccacgccgcctataccaattcccgttcctaggagaaaactcgtcaagtgattgaggcggcccatgacaaaaggagggaggccaatcacaatgcttcctactccgccaaccacacca

SEQ ID NO: 7238 - DNA, 448 bp, Zea mays
  Clone ID: LIB3137-014-Q1-K1-F8
tgcgcctccaggctccacttctccgctcggctgtctgcactggaaggacagcatgtggggcggggcttcatcaccggcggcggcggcggtcgatgagaagcaggaggcggcgcccgtcaggcgctgcaagggcgtcaacgacctcgacaaggtcgttctccgcgaggtccggggcagctccgcagaggtgtacttgtatggtgggcatgtgacatcatggaaagatgagcatggagatgaattactttttgttagcaataaggctattttcaagcctccaaaagctatacgtggaggaataccaatatgctttccgcaggtatgccattgtccttccaatagctttggcttctctgtatcttcttttgcaggaatcttaattacacttatgtagttctccaactttgggaatctggaaccacatggatttgcaaggaataggacatgg

SEQ ID NO: 7239 - DNA, 321 bp, Zea mays
  unsure (1)..(321): unsure at all n locations; Clone ID: LIB3137-014-Q1-K1-G10
tctttcttctcctccccctcttacttatttctcttccggttacgcttacttanggagaagttttttacaataacctcccctcacctnaactaccccttcttcttcactgtctttcctctcccaccatcaacaattctctttaaaatcccttcacctcctacttttatatcctccactccaatttcatcacctaccttcatactactacatctcccttcttccacttctttaccttctcctcctacaactccattctccactctatctataacataaacctcaaataactctaccgccataacatcacccttaaccattccc

SEQ ID NO: 7240 - DNA, 344 bp, Zea mays
  Clone ID: LIB3137-014-Q1-K1-G12
tctcgtactacccttctctctctcttctttctttcttatctccgacgaatgctatctacaccaccgtgtgctttctcttacacataccccgccaccctctccttcttcttcttcccctcctctcctatccctaatctaatgttgagcctgtcgtccgagatgaacgtggtctttttttcctccatgtactccaccggacacctctccccctactcctacaccctcattaacacatgccctgaacatttcgtggtgaatgtgctctactgcagcatctgccacactgacatccaccaatccataaaccacctcgttgcttcaaagtatcctatcttcccttttca

SEQ ID NO: 7241 - DNA, 359 bp, Zea mays
  unsure (1)..(359): unsure at all n locations; Clone ID: LIB3137-014-Q1-K1-G2
ctcgtggctgccctgctcatactgcttgccctcgccgtatcgtccacccgcaacgcacaggagggttccatggccgacaacaccgggacgttggtgggcggcatccaggacgtgccggggaacgagaacgaccttcacctccaggagctcgcccgcttcgccgtcgatgagcacaacaagaaggccaatgctcttctggggttcgagaagcttgtgaaagccaaaaacacaagtggttgctggcacgatgtactatctcactattgaagtgaaggatggcgaagtcaagaagcctctacgaagctaaggtctgggagaagccatgggagaacctcaaggngctgcaggaattcaagcct

SEQ ID NO: 7242 - DNA, 51 bp, Zea mays
  Clone ID: LIB3137-014-Q1-K1-G4
cgtccgctcgcataccactgcatgggtgttggggttctttgtatccctgct

SEQ ID NO: 7243 - DNA, 404 bp, Zea mays
  Clone ID: LIB3137-014-Q1-K1-G5
cgtcggatcaccgccatcggatgcgacggattcggcgtcaatggcgtcctcatctgctggggaggccagtttccgcctctctgatcgagagaggaggtcatcgctgggactcagattcacggtgctcctgatgcacgtcgcgttcgttggcgctgtcttcatcctcgatccgaccctcgactggcgaatccacgaggagccgtggtatatagggtcgtatggagtgctggttctgctcacgctagtgcaatacttctacacagctggctcatctccagggtatgttattgatgtaatgagagctggttccatgatgcatgcaaccttcgtcaacactgctgctctttcaaagcagtcaaattcaagaaatggaaacacaaattctccaacgagtcatgctcaac

SEQ ID NO: 7244 - DNA, 344 bp, Zea mays
  Clone ID: LIB3137-014-Q1-K1-G6
cgtccggtacgatggccatgcatgtggtgcgcaactttcacctgcagcggtacgctgagcggtggggcgagatcgcatgcttcccgtggcggttccagcccaagactggcaccaacacgcgcgccacctacacgctgaacccggacggcactgtgaaggtggtgaacgagacgtgggccgactggcgccgcggacacatctaaagcacggcctggcgcgccgaccctgccagcgacgaggccaagctcaaggttcgcttctacgtgccagccttcctacccctcatgcacgtcaccggcgactactgggtgctccacatggacgccgactaccagtacgcgctc

SEQ ID NO: 7245 - DNA, 175 bp, Zea mays
  Clone ID: LIB3137-014-Q1-K1-G7
gacccactcttacagtcttcctccactatatcactcccctttgttattcttctactagtactatcttcggcgcgagattttaatatacaacttctccccctactacacaccttctcttatttacccaccaccatacttctatcaaaccacctcttctttcttcaagcctaccacc

SEQ ID NO: 7246 - DNA, 307 bp, Zea mays
  unsure (1)..(307): unsure at all n locations; Clone ID: LIB3137-014-Q1-K1-G8
gctccgtctacccctctacacctgccattggtttttaaccatggcgtgggctactcggggccgtgtttttaaaaacttctttgctccnaccatcctcttcgtcccaaatactatctcttccccctccgtctcatgatccatcaccgccgccaagctatcccacttcctctccttttccacctcctgaaacaccgccctctgggccaccttcatcggcggcataataatgttcaataacctgcctaagcacatcttcttcaacttgcataacaagatgttctcctcctacttcacgcttatatctacc

SEQ ID NO: 7247 - DNA, 244 bp, Zea mays
  Clone ID: LIB3137-014-Q1-K1-G9
acagcataataatccatattctactccatctctttcttctatactgcgagccctattcgggcgggtcttttatcaaatgctccgccccctcaaccctttcacattctccttcatctaggctattccttcctcttctgcttcttttattaaagcgtaccactaactctttttttaccactacaacaacccacgtaacgtatgttccttctacaaaaactaccccaacttcatcacttttttgttc

SEQ ID NO: 7248 - DNA, 94 bp, Zea mays
  Clone ID: LIB3137-014-Q1-K1-H11
attttcttcccttctttctttctcttaaaatttataacaacctctatttctcttcccttatttccttatagtctaccatcttctcctctctttc

SEQ ID NO: 7249 - DNA, 275 bp, Zea mays
  unsure (1)..(275): unsure at all n locations; Clone ID: LIB3137-014-Q1-K1-H6
tccatctctccatctcccctccattttctttctaaaattctgcnncnacctcccatgcggtctcttctactaacccactccgcacattcctctctaccttatctctcttttttctattaaatttttaatctctttctcctttgtttccttccaccttacctctctatttatattaatattatcccttatcccttctcccctctttcctccttacctatttactcctatcacttcatctctctcctttcctcctctaatcgcttctactcttctca

SEQ ID NO: 7250 - DNA, 267 bp, Zea mays
  Clone ID: LIB3137-015-Q1-K1-A1
ccttggggccacttttaccgagtggtttaataagggctagtggaggaaccatggttagggactaaattaccctaacccgaagcaccttaccttggctagtcctcctacgtcttttctcttcgtttaatcttggtcggggatttgattcttcacttcttgcgcgcattgcagagggtgctcggtctgcagctatcttaggttaaccagtcgtgtgtggtctatcggtttcgatataatattactactgctctgttataatcagcgggg

SEQ ID NO: 7251 - DNA, 427 bp, Zea mays
  Clone ID: LIB3137-015-Q1-K1-A10
gcttaaaggagcttctcgtctgatctcgagctaacgagctcaccggcgggcaggaggctggcggcgtccaccaaggtcggctctaggctggcctctccgcacgcctccttgtccgccggtgctgcggcggcggcgctggctagctcccccgtgctgggctctgggatgctcccaggcgccgggttcggcgagacggggagtcaccacgcggcggacgcgccgccaccgctgccttgcagttcctcgggcgattcaagggaatattatcagtggaagagactggtgaatcaaaggcagtcaatgctagatggaggcaaagtgcctgctgcattgggccaccatgtttttggtgcgggctgttcctcacggaaccaacatatctacagatatttttcatcttctcatcaagggagcaagggtctacatg

SEQ ID NO: 7252 - DNA, 343 bp, Zea mays
  Clone ID: LIB3137-015-Q1-K1-A2
cgttcccttcctgcacccaacctcatttcgttctccagatccaggatggccgtcctccttgagaccttgcctccccgagtgctctcggtgagctactttgtttcgatttatcaggaaatccgcttgcttcatgttgtgcaggctcatatctgattgctggattcggcaaacccgcgttggatcctgtatcggttagtccttgcctgcaagggtcttgttgttttgttttggtggtcgagcatcgcatgttctgcttctggatccagatctggagaaatcgcgaagtcgtcgtcgttcggttcggagcggatctgaggcgacgatagatggaggcggcgggatc

SEQ ID NO: 7253 - DNA, 393 bp, Zea mays
  Clone ID: LIB3137-015-Q1-K1-A3
ccgccggcctctgctccttttccgccgccgttggatctcgtatcgccggagaccatgtaccgcgccgccgggagccacctccgctccctcaagcatcatggtgcttctaggcttgccagtacaagtgttgcgaagcagtcctcaggtggtctgttcagctggcttcttggtggaaaatcaagcgaactccctccccttgatgttccactcccaggcattagcattccctcacctctaccagattttgtagagccatctaagacaaaagtcactactcttccaaatggcgtcaagatcgcctcggagacatcatcgagcccagcagcatctgggggtctgtacattgactggggttccatttacgaaacacctgcttcatctggagtatcacat

SEQ ID NO: 7254 - DNA, 341 bp, Zea mays
  Clone ID: LIB3137-015-Q1-K1-A4
gtcttcacactcctcgccatcacataaaaccagtgcatgcagaagcagcgcaatggcgagcaggaccatggccctctcctccacagccttcgccggcaaggcagtgaacgtgccgtcgtctctcttcggcgaggcccgcgtgacgatgcgcaagacggcggcgaaggcaaagccggcggcgagctccggcagcccgtggtacggccccgaccgcgtgctctacctgggcccgctgtccggcgcgcccccgagctacctgacgggcgagttcccgggcgactacggctgggacaccgcggggctgtcggcggacccggagacgttcgccaagaaccgggagc

SEQ ID NO: 7255 - DNA, 195 bp, Zea mays
  unsure (1)..(195): unsure at all n locations; Clone ID: LIB3137-015-Q1-K1-A5
gcctgaggactagcgcacattcggttgagtattgctttccttaaccagngcattttccagaggggagagtattgtggatgccgggtgctaggccacaaccncangaactccccgtcatcgctcatgtcgacatggactgctactatgttcaagacgagcagcagaggaaccccgcgctcaggcgacagccgaccg

SEQ ID NO: 7256 - DNA, 356 bp, Zea mays
  Clone ID: LIB3137-015-Q1-K1-A6
gcagtggtgcatcatggtggagcaggtactacagcagcagggctgatagctgggtgtcctactactgtagtgccgttttttggagaccagttcttctggggcgagagagttcatgcacgaggagtgggtcctgcacctatatctatcgcagaacttactgtagaagcactatcagatgcaataatattcatgcttgatccagaggtaaaatcacgaacaatggaactggcgatagcaataggcaatgaggatggtgtggcagcagctgtagatgcatttcatcgtcacctgccttcagaattgccgctgtcgccgcccgcacatgtggaggaagaacgcacagacttctttcaatg

SEQ ID NO: 7257 - DNA, 364 bp, Zea mays
  Clone ID: LIB3137-015-Q1-K1-A7
ctttgggccccattttcaacagagtgattgttcatggaaacatctgatcgaaatcaaggggcgaaatcagccgaggaagcggatctgcatgattcaggcgcaaaggatcatgatacttctagtctagggtattcttgtgctgataatgaaaacagtgtcattgatgaagatagcaccagaactgacgtgtcatgtatggacagcatcctcccatcatgtgtgcttgaggattcaccaaataaccatgacactgtcgtgcctcgtggtgcggttgttgctgatcaaaatggagaaaaaaagaaggctgataattatcagtcagtgtatgctggagaaggaacaacttcaagtgtaatcacaaaaa

SEQ ID NO: 7258 - DNA, 456 bp, Zea mays
  unsure (1)..(456): unsure at all n locations; Clone ID: LIB3137-015-Q1-K1-A8
cgcttgccttgctcgctttgcctttcctttctcgactcctcgcattcgctgcgtcgncgacgcttcttcctcgccgcggggtccccttcacctctcggatccggcggccatggcgaggaaccccggctgcaccgtcttcataggtaggtcgtgttgtagacctacacatacctcgtgacaaggaaactagccgaccaaaaggttatgcttttgctgagtatgaaacagaggagattgcccagtatgccattaagctattttctggccttgttcgacttcgtaataaaacacttagatttgcgatctctgggcaagacaaaccctcattaaatggcaatattcctgtaattcctagtttaaactctgtaccacagccaaagcctcctcatcaacatatgaggtctagtgatacccctttgccacaacatacagcaatgagtggcaagaatgctgggt

SEQ ID NO: 7259 - DNA, 177 bp, Zea mays
  Clone ID: LIB3137-015-Q1-K1-A9
ccactccctccacaacgccttcagcacctacagcaaggtcctcgaatccaagatcatcctcaatcacgaaacgcagatgtcccgcggcttcgccttcgtcaccttctccacggaggaagcgatgccgaacgccatcgacggcatgaacggcaaagaactggacggccgcaacatcac

SEQ ID NO: 7260 - DNA, 333 bp, Zea mays
  Clone ID: LIB3137-015-Q1-K1-B1
gtgaggttctccggggttcggtttcgtgggttagcggatcgagatggcggcgtcggatgtggagtaccgctgcttcgtcggcggcctcgcctgggccacggacgaccactccctccacaacgccttcagcacctacggcgaggtcctcgagtccaagatcatcctcgatcgggagacgcagaggtcccgcggcttcggcttcgtcaccttctccacggaggaggcgatgcggaacgccatcgagggcatgaacggcaaggagctggacggccgcaacatcaccgtcaacgaggcccagtcccgcggcggccgtggaagcggcggccgtgggta

SEQ ID NO: 7261 - DNA, 256 bp, Zea mays
  unsure (1)..(256): unsure at all n locations; Clone ID: LIB3137-015-Q1-K1-B11
ccgcctccgcacgccccgctccgatggtagccgcggctgtgaccctgccctcctcgggcacgcccttcgccgtcgccacaaccgcctcttcctcatccgcccgccgctgcctgctcctgccctccgcggctccccgccgagctctccgcgtcgtggcctccgccgctaccgagggcgccgccaagcccacgcagccgccgacatcgccctncggcatcgtgctcgtcgacccatccgaagcccagaaggtgcaccg

SEQ ID NO: 7262 - DNA, 452 bp, Zea mays
  Clone ID: LIB3137-015-Q1-K1-B2
ccggaccggaatcggaagggtccggcccacgcgtccgcggacgcgtggggccgagaaaccgctgatggttgtcgtcgccgccgccgccgccgcgaagcagaaggcgaagaagcatatacacctcttctactgctccgaatgcgaggagctcgctctcaaggtcgccgccagctccgacgtcatcgagctccagtctatcaactggcgcttcgacgacgggttcccgaacctgttcatcaacaaggcccgcgacatccgggggcagcacgtggcgttcctggcctccttcagctcgccggcggtcatattcgagcaagtctccgtcatcttcgcgctgcccaagctcttcatcgcctcggtcacgctcatcctgcccttcttccccacgggctccttcgagcgcgtcgaggaggagggcgacgtcgccaccgcgttcaccctcgcgcacattc

SEQ ID NO: 7263 - DNA, 413 bp, Zea mays
  Clone ID: LIB3137-015-Q1-K1-B3
cccgacccccgcaccgcagcgtaaaccctagttcccggcggcgaccttgcggcctccgctgcgctctgactggtgcgcgtttagacgaggagctgcggcggccaagaccaatcgaccatggctacccgtatccagtttgagaacaactgtgaaattggtgttttctccaagctgacaaatgcttactgtctggtagcgattggagggtcagagaacttctacagtgcctttgaggctgagcttgcagatgccatccctgtggtcaagacctctattggtggcactagaataataggccgactttgtgttggaaacaagaatggacttctattgccacatactacaaccgaccaagagcttcagcatctgaggaattgcttgcctgatcaagtggtggttcagcgcattgatga

SEQ ID NO: 7264 - DNA, 424 bp, Zea mays
  Clone ID: LIB3137-015-Q1-K1-B4
agccaattgaagaggctaccactgtagaggtgtagtctttgccttctcctgctgcagttaacctgaaaccacctcccaagattgagcggaatcaatcatttgatgatgatgattttgcaaacaagcctgttgccatgaaaagtaatgcagcagcagcaccagttaaggcaactgtttattcagttgctgacctacagatggcaacagatagcttcaacatggacaaccttattggagagggtactttaggacgtgtgtacaaggcacaatttagtgatggaaaggttctagctgtgaagaaattaaacagtacaacactgccaaggcaatcatcagatgatttctatgagctggtgtcgaacatttcgaaattgcaccatcccaatctcagtgagcttgtgggctactgcatggagcacggaca

SEQ ID NO: 7265 - DNA, 368 bp, Zea mays
  Clone ID: LIB3137-015-Q1-K1-B5
cctgtgtcctggcgtggagctcgcgcagccgtctcgtctcgcctggagctcgcgcagccgcctcgcctggatctcgcgctagggttggagccagggtcctcacagccgcctctatcctcgcctggagctcgcgctagggttcctctcgcagccgccgctgttgaggtgctacttgcaaaagcgtgtactgaacagctcaaaaggccctgttgtacgtgcactgcgtgctcagactgataagagagagtatgcaatagagatgaagaacagtgtggaaaggtccatatggtaaaggaaatcagtggcgaagtctatctttttctcctcctgccgtacgtccgttccagcttgcaaagcgctcgcgagct

SEQ ID NO: 7266 - DNA, 399 bp, Zea mays
  Clone ID: LIB3137-015-Q1-K1-B7
ttctgaatgctgcaacggtggacagatctgcttctcaaatgatgaatcagaaaaaggagatctgaaaacaagatgtcgatcattggatagtgattctaatgaatcaaataagtctagttctccaggaaataagaaagaccagtctgattctgatggttgctgctgtcaaatggataagtttggcatgggagaaaagaaatcatgctgctcaccttctaagatcaatgatagttcacgtggagctgtgcttcgttatgctttgcacctgcgatttctgtgcccctccaagaaaaaatcctcgaaatcaatgcttcgttgcaaatctgatctatcaacggcaccatatagcagcaatacgctacctgaggaagaacggaggttctatctctacaatgatct

SEQ ID NO: 7267 - DNA, 373 bp, Zea mays
  Clone ID: LIB3137-015-Q1-K1-B8
ggggccagccgcggtccccaacgtcataggatctcgttccagccgcggcagggcgcacaacaccggcacctcatgggcgccgacgacgacgccgccgccgccatggaggcgcaagagagggaggcggagatcgagaaggccatgcgcgcccgcgtcgcagacttcaagaagcaggccgattccttgactcttgaaggcgttaggagagcactggaaaaggacctggatttgaagatatattcacttgatgcacataaaaagtttataaagcaatgtgtagacaaagcttttgctgaatctgctgatgaaaatgcaaatgatgatgcattagaggattctgatgctaaagatgatcatttatcaaaagaaggga

SEQ ID NO: 7268 - DNA, 415 bp, Zea mays
  Clone ID: LIB3137-015-Q1-K1-C1
gaagaaaacaatggttggtgaatttagtagtgtcatgcatgtcaggggaatcctttccatgggaaggcactctgatccaaacagggctggctcttccttttctattcttctgggcaattcaccgcatcttgatggccagtatgctgtatttgggagggtcactaaaggtgacgatacattgactaaactagagaggcttccaacccggagagaaggcatttttgtaatgccgatcgagcgtatcaacatcctatcaacttactattatgatattgatctagagagctgtgaagcagaaaaatctattctccggaggagactttctgaatcagcatcagaagttgagcgatggagaagaaaatgctttgcttaatggtggaataaagactgcatattcccgttcatgatgctggat

SEQ ID NO: 7269 - DNA, 401 bp, Zea mays
  Clone ID: LIB3137-015-Q1-K1-C10
agcagaagcaactttgcggagagtacattcagtctagaaagatgatgacatgccaccaagggaggccattcttgcacgactggaggctgagctaaagctttctcgccaggagattgcaaatctccaggatgacaacagagctttgcatcgtctaacaaaacaaaaggaggcagctctgctagaagcagagaggactgtgcaaattgctatggcaaaagctgctatggttgacgacttgcaaaacaagaaccaagagttgatcaagcaaattgacatctgccatgaagaaaataaaatcttagataagctgcatcgccaaaagattgcagaacttgaaaagcttaaccaaactgtgaaggagttggaaaaagctgttctttaacgtggtgcaacggctaatg

SEQ ID NO: 7270 - DNA, 331 bp, Zea mays
  Clone ID: LIB3137-015-Q1-K1-C11
tcgcggacgcgtgggggtggccagatttcttctttcgcgcatctctatcttccttccccagctcagtctccagcgcatctgattttttgcaccgccgcgcgctagtgtgcatcttctgaagatttttccaccggatgtctcatcttatgccctctcctctccatttcttacgtagcccagatattccagcagccgttcgctcgaatccaccgccgctcctgccccaatggcgcacgcccacctcctcagccatggagctcacgagcatctccctacgccctctgctatctgctgttctcatcctcccagctcgcctcctgtccccaaccat

SEQ ID NO: 7271 - DNA, 370 bp, Zea mays
  Clone ID: LIB3137-015-Q1-K1-C12
gcggctacccctacgccgagcgagccgtcgactagtaccacggtgtcgccaagtttgatccggcgaccgggaagcagttcaagtcccccgccaagacgctgtcctacaccaactacttcgccgaggcgctcatcgccgaggcggagcaggacagcaagatcgtggccatccacgcggccatgggcggcggcacggggctcaactacttcctccgccgcttcccgagccggtgcttcgacgtcgggatcgcggagcagcacgccgtcacgttcgcggccggcctggcctgcgagggcctcaagcccttctgcgccatctactcgtctttcctgcagcgcggctacgaccaggtcgtgcacgacgtcgatct

SEQ ID NO: 7272 - DNA, 382 bp, Zea mays
  Clone ID: LIB3137-015-Q1-K1-C2
atttaaggttcctcgcgttgctcgcattcattatattttctgctgagcaagtacatgttgctgttctcgatgttggcctaagagggaagtttgatgcaactaatgtggttaaagcacctgtagtttgtggcatatcttcccttggatatgatcatatggaaattcttgggaatacacttggagaaatcgcaagagagaaggctgggattttcaagaaaggagttccggcctatactgctccacaaccagaagaggcaatgactgctctcaaacaaagagcttcggaattgggtatctctctccaagtcgttgatcctttggagccccatcacctaaaagatcagcatcttgggctgcatggagaacatcaatatataaatgc

SEQ ID NO: 7273 - DNA, 376 bp, Zea mays
  unsure (1)..(376): unsure at all n locations; Clone ID: LIB3137-015-Q1-K1-C3
aacctccactgaacacaatggagcagctcctatctgttcaaaatgccatttctaaaattgaggagcttgtccaagatgcanatattgttcttctgaagataagagctctattgttggcttttccatcccaggcgacggacagagctattctggcattggtattgatggccctgagccttgccatcgttcccacaaaagtgcttctgctgctggtgtttctggaggtatccacgaacaactcaccactacgaagagcaagcacagaaaggtgtaccagaaggttgagagagtggtggttcagcatacctgcagctccagtggtggtggagaaagagaaagaggacaagcaaagncgatgatatatctaatgtaaatc

SEQ ID NO: 7274 - DNA, 388 bp, Zea mays
  Clone ID: LIB3137-015-Q1-K1-C4
cacgactccagatctcccaccgctcgccatggtcctttacgcgaggcaccgccacacgccggattcgagctcctccccacatgccgcctctgacatggatctcccgctcgccggggctgcctaccagccctacgtctctgagctcctctccttctccatcgagcgcctgcacaaggagccggagcttctgagggtcgacgcggagcgagtgcggcggcagatgcaggatgtggcagtggagaactacggcgccttcatcgccgccttcgaggcgctctacttcgtccgcgcgcagctcgagagcttccatggccacctcgaggccatggtgtatacggaatgcgaactatgatgaagcacttgatctagaagcttttgtgagcaaaat

SEQ ID NO: 7275 - DNA, 334 bp, Zea mays
  unsure (1)..(334): unsure at all n locations; Clone ID: LIB3137-015-Q1-K1-C5
cccgttctcgcattttccttctcccgcctagtttatatgcgttagctacccaatcacttcggaccggcggttctacgtgatcccaccggctgacatggatccatacatgcacgcggcgtctaacgagagcaactacagctagtggaccaccaactccggcgcccgcgtctggaacaacaactatgtcctcaccgtcggacagcgacgagcaatcctgcttgaggattatcatctaatcgaaaagctcgctcacgttcacagacaacgtatacctgaacgcgtcgtgcatgcacagngagacagcgccaatggcttctttgagggcactcatgat

SEQ ID NO: 7276 - DNA, 187 bp, Zea mays
  Clone ID: LIB3137-015-Q1-K1-C6
cctcgcttccggcgccatggagacgaagcgggtggccatcatcggcgccggcgtgagcggcctggcggcgtgcaagcacctgctggagcgcggctgccggcccgtggtgttcgaggccggcgccgtcgtgggcggcgtgtgggcgcgcgtgccgacagcacggctgcaacccgggccagaccagact

SEQ ID NO: 7277 - DNA, 233 bp, Zea mays
  unsure (1)..(233): unsure at all n locations; Clone ID: LIB3137-015-Q1-K1-C7
aggcccgggccgaccgacgcgtncgggtccaatcgtcatcaccggctacctgttcctgacttcacacctacctcctccacccagaggcgccttcatgcaaaactgggcggcctattcctacaacacccgcatatgccccataccaccatatacccgctctgatgctttaaatcaatgtgtataacattccaagcatctgacctgacaaataccgacccaagcaaccatgattc

SEQ ID NO: 7278 - DNA, 282 bp, Zea mays
  Clone ID: LIB3137-015-Q1-K1-C9
ggcgaccaccggagcgcggaggaggcacagtcgctcatctagagacgatggccgccgcgagcgccgtcccgtgcttctcctgctcgagtaagcgactggaagggaaggtggccctcgtcactggtggcgccaccggcatcggcgaggccatcgttcgcctcttcatggagcacggcgccaacgtctgcatcgcggacatccaggatgaagccgggcagcaactgcgcgacgccctgtgaggtgacgcgcagggcgccatgttcgtccactgcgacgtgacgt

SEQ ID NO: 7279 - DNA, 424 bp, Zea mays
  Clone ID: LIB3137-015-Q1-K1-D10
gccgactagggtttaccggtgagcgcgttcgtgctagagagagagagtgagggcggaggaaaggggagatggcgcaggcggtggaggagtggtaccggcagatgcccatcatcacgcgctcctacctcaccgccgccgtcgtcaccaccgtcggctgcaccctcgagatcatttcgccgtatcacctgtacctgaacccgaagctcgtggtgcagcactacgagatctggcgcctcgtcaccaactttctctacttccgcaagatggatttggattttctgttccacatgttttttctcgcacgatactgcaagcttttggaggagaactcatttagaggaagaactgcccgacttttttacatgctcttgcttggtgctactgtcctaactagcattgttctgatcggagggatgatacctta

SEQ ID NO: 7280 - DNA, 358 bp, Zea mays
  Clone ID: LIB3137-015-Q1-K1-D11
gtttccgagagaggatcaaatggcaggaaggtcagccacaagacttaaactcggaaattctatatctgagggaactgtgaacaatgagacccttggctacttcattggaagggtctaccttttcttgacacaacttgggattgacaaggatcgtctccgtttccgtcaacacctgccaaatgaaatggctcattatgctgctgattgttgggatgcagagattgaatgctcctatggttggattgagtgtgttggaattgctgataggtctgcctatgacttacgtgcccactcggataaaagcggcgagaaacttgaagcacatgagaagtttgctgaacccagagaagtggagaaa

SEQ ID NO: 7281 - DNA, 339 bp, Zea mays
  Clone ID: LIB3137-015-Q1-K1-D12
gcctgaaaaccagacacaaccctcgctttgttcttaccaaccagtcaagctgccaactggtcgagctgcgggaacaggagacagtgccatcctgtgatacgtgctcagaagatcgacaccgtttacagacactgcacaggtaccgagacgcaacgatgctaatgtcaacaagagactcacaaggggactgcacaatcattgtgctggctggtgcaaactagaaagagtaggcactaaatctgaaagacaaagtgaacgaagaggctagcagaatacctatgacggacaggcccatattgtgtatcgcagaaaaagccgaagctcacatgaggaagaaac

SEQ ID NO: 7282 - DNA, 357 bp, Zea mays
  Clone ID: LIB3137-015-Q1-K1-D2
aatacaaaccctctcaaaagccgcaagatttacacacccgcctccaccgggcctgcccacgataacccaaaggcctcgagaagggctggaagcaccgagagcgctccagagatgtcgtcggatgagttgcgattggagctggacgagctgcggcggctggagggcctcgccaagcgcccccgagtccagaccctcctcgccaacgagatccgcaacatcgaagctaagatggcgaaggcaactgaaccgtcaccggagccactagcggcggcttccgcgcccgcggcggcggcgcgttctgatttgagctacgccacgttgggctcgttcagctgggaacaggacaacgagaagatc

SEQ ID NO: 7283 - DNA, 381 bp, Zea mays
  unsure (1)..(381): unsure at all n locations; Clone ID: LIB3137-015-Q1-K1-D3
atatacaaaccctcttcaaaagccggcagaattattttctccgcctgcaccgcgcctgcccacgagagcccanaagccgtggagaagggctggaagcaccgacagcgctccaaagatgtcgactgatgagttgcgattggagctgcacgagctgctgcggctggagggcctcgccaagcgcccccgagtccagaccctcctcgccaacgagatccgcaacatcgaagctaagatggcgaaggcaactgaaccgtcaccggagccactagcggcggcttccgcgcccgcggcggcggcgcgttctgatttgagctacgccacgttgggctcgttcaactgggaacaggacaacgagaagatcaggatatatattccccttga

SEQ ID NO: 7284 - DNA, 338 bp, Zea mays
  Clone ID: LIB3137-015-Q1-K1-D4
cgcgagcggcgcccttttttttttttttttttttttctgcagttgctactgattattctggggccactgcattgtagaacagacacgcgcgactctgacaccactaactcccgacatcgcactatccgcaaacgacgtcgaacgggacagggaatggtacttccagatagaaaacgagcagaagaatcccggttggacgacggcaccgagtcaccgacctcataggccaatcttattcctgcccatctgatcaccatttgctcaaaacaaaacaaaaaaaatcttgtccgtccgtctattccagttgacctctgcccggggacgaagacgctgtagcc

SEQ ID NO: 7285 - DNA, 332 bp, Zea mays
  Clone ID: LIB3137-015-Q1-K1-D6
gacgacttgtttcattgattcttgaagagatctagcttcttttgcaccacaaggtcgaggatgtcttgcagctgcggatcaagctgcggctgcggctcaagctgcaagtgcggcaagaagtaccctgacctggaggagacgagcaccgccgcgcaggccaccgtcgtcctcggcgtggccccggagaagaaggccgcgcccgagttcgtcgaggccgcggcagagtccggcgaggccgcccacggctgcagctgcggtggcaactgcaagtgcgacccctgcaactgctgatcacatcgatcgacgaccatggatatgattattatctatct

SEQ ID NO: 7286 - DNA, 300 bp, Zea mays
  Clone ID: LIB3137-015-Q1-K1-D7
gtcacacacacacacacacacacacattttctttctcacacacacacacacacacacagaggagtgtttttcaaagccaagggcgtgtactaccaaccagctatctcagacggcagcaggcaaccatcatgtcggacgagaagcaccaccacttcttcaaccaccacaagaaggacgaggagcagcccaccgtcgagtacaggtactccgagaccgatgtggtcaccgtcaccagcgagggcgagtccgacacgtacaaaaaagaggagaatgagcacaagcacaagcagcacctttgtg

SEQ ID NO: 7287 - DNA, 391 bp, Zea mays
  unsure (1)..(391): unsure at all n locations; Clone ID: LIB3137-015-Q1-K1-D8
cggacgcgtgggcggacgcgtgggacgcatgcctatccatcacatggngcggttcatgcgccgggatgccgacgagaagggcagcgacatctccgtctccgccgaggaggaattcaacattgagaacttgcagcttgttgaagctgagaaaaagaagatcaggcaagagtatgaacgcaaagagaagcacgttgaagtacgcaagaaaattgagtactctatgcacttgaatgcttctcgcatcgcctttcattttgttaactacatcatcctaaatcatatacatatctgacttttctaacctggggagcccatggctcacaaaatatggtgccaaaacccgtgtcttgtgaactgaatccatagcaatgcaattttttttaattggccc

SEQ ID NO: 7288 - DNA, 376 bp, Zea mays
  unsure (1)..(376): unsure at all n locations; Clone ID: LIB3137-015-Q1-K1-D9
atgcaatgcaagcgcagggtggtctcgngtggtgacgtggtgtgcgcgtgtcttgagacagcattccttccttctttgtttaggtgctgctgctcctgctggtgtagtactggtgtatccagtccttttaatttcttgattagtttgctcggctgaagaaatcaggacgcgtgcctggtgtcgctcctcagctccatgtacttgtacaaccgttcctccctgcagctgctgccccttctctcttttttgtttaccttgggttgatgggttgttaaattccgtgtttgtctcttttttaaccttcgcgattgtagtactgggttggttgcttgcttggttggtttccgttgggagatcgatgggaataagtctatga

SEQ ID NO: 7289 - DNA, 464 bp, Zea mays
  Clone ID: LIB3137-015-Q1-K1-E1
ccacgcgtccggggacgcgtggttccagaaaaagcactcccgttctcggaaagaaggcgccgttctagcagaagcagcacctgcgcagcggaaatcatactcctttcgactgttctcgtgccaaggcgatataagcaggaacgtgatcagccatcccaaagcagcgaagaaggaacccgtggtgtctgtcgagaaagagctggacagcagcgagctagctcctgctgtcgtgcctctgctggaacgagcggtttccgtggtatccagttcggacagcctgagtcagtgcgaggacgccgtgcacgaggtcgccagagcatgctcggcctgggacccgagcctcgtgaacctgctgtcgtgcgcctctttcatccaaggccttctcgaggtcacgctgacctccaaagacgacgccgtgctggagtcggccatgtcgatcatggggaaagctgcttctgggaacg

SEQ ID NO: 7290 - DNA, 338 bp, Zea mays
  Clone ID: LIB3137-015-Q1-K1-E10
acactcctcgccatcacataaaaccagtgcatttagaagcagcgcaatggcgagcagcacgcatggccctctcctccacagccttggccggcaaggcagtgaacgtgccgtcgtctctcttcggcgaggcccgcgtgacgatgcgcaagacggcggcgaaggcaaagccggcggcgagctccggcagcccgtggtacggccccgaccgcgtgctctacctgggcccgctgtccggcgcgcccccgagctacctgacgggcgagttcccgggcgactacggctgggacaccgcggggctgtcggcggacccggagacgttcgccaagaaccgggagctg

SEQ ID NO: 7291 - DNA, 356 bp, Zea mays
  unsure (1)..(356): unsure at all n locations; Clone ID: LIB3137-015-Q1-K1-E11
cggacgcgtggggctagctgcgcatctttagtcgtacatcccgggcgggcaatcgaaccgcggacgcctctgggtgtcgggaggggtgctttgctctttgcagccagctggccggccggccctggtgttttatataacttggaaggttcagtcgctgacagagaggaataaggaggaggatggggaggaagctgggcctcgacagggtcctcgactgcttctcgctctccctgtgctccagcgcctgcgcctgcgtacactccgtggaggaggaggagcangaagacgaggacgagcggaaagccctggtgagcagccagctggaggagctggtgaagctgagcaaggatctcgtc

SEQ ID NO: 7292 - DNA, 393 bp, Zea mays
  Clone ID: LIB3137-015-Q1-K1-E12
cacatcgagaacacgatcgagcacacttgcactatagactcgtttaggagaaaccacaaaccaggaagccgtgcaagcatcatggagtacggtcagcaggggcagcgcggccacggcgccacgggccatgtcgaccagtacggcaacccagtcggcggcgtcgagcacggcaccggcggcatgaggcacggcacgggaaccaccggcggcatgggccagctgggtgagcacggcggcgctggcatgggtggcgggcagttccagcctgcgagggaggagcacaagaccggcggcatcctgcatcgctccggcagctccagctccagctcgtcggaagacgacggcatgggcggaaagaggaagaaaggaatcaaggagaagatcaaagagaag

SEQ ID NO: 7293 - DNA, 373 bp, Zea mays
  Clone ID: LIB3137-015-Q1-K1-E2
agcaaagcgaagcgcgcgcacagcagctgctgtaggtctcctgacatggcgaaggacatcgaagcatcggggcccgaggccggcgagttctcggccaaggactacaccgaccctccgccggcgccgctcgtcgacgcggatgagctcaccaagtggtccctctaccgcgcggtcatcgccgagttcatcgccacgctgctcttcctctacatcaccgtggccaccgtcatcgggtacaagcaccagacggacgcggcggcgtcgggccccgacgcggcgtgcggtggcgtgggcatcctcggcatcgcgtgggccttcggcggcatgatcttcatcctcgtctactgcaccgccggcatctcaggtgggcaca

SEQ ID NO: 7294 - DNA, 340 bp, Zea mays
  Clone ID: LIB3137-015-Q1-K1-E3
gtggggagcgcagagacgctggggagatttttttagaacacgagcgaagccacccaagccgcgaaagcggggcggaggcggcaggggagtgctggagcgaagcgctcaagtcgttcctggaccacatccccgtctcctccgtaccgggcgcgctccaacccactgcctccccagcggtggaggtcaagctccacggctccgtcctgggcgccctcgacgccatgtacagcagcaacgccgcgggcgcggtgatcatcgacgtggtgcacagcagtctaggcaagtacgtcgatcgcgatattggcttcgtcgagttctcgagcctagtcctgtgggcact

SEQ ID NO: 7295 - DNA, 399 bp, Zea mays
  Clone ID: LIB3137-015-Q1-K1-E4
tggcgttgctcggcgagtacagcagtcaggagctccttcagggtcagctccagctctggcaccagtccctcggcttcttcaagtccctcgcgctcgcggtcgccatggacctccgcatcgccgacgccatccaccgcctcggtggcgccgccacccttccccagatactcgcggaggccgggatcaagatcgacccgcgcaacaacaagctccgcgacctgcggcgcgtcatgcgcgcgctcaccgtgtcgggcatcttcaccgtcgtccagcgaccagcgtcgtcgtcagatggaggcggcaggcgtggcgcataagcggaagggtccgtctacaagctgacggcggcctcccgcctcctcggcgtcggagagaaggagagctcgacgacggcgacga

SEQ ID NO: 7296 - DNA, 205 bp, Zea mays
  Clone ID: LIB3137-015-Q1-K1-E5
caactccagctatagcaccgagggcctcccttgtggaagtgcctggcgctcgcagtcgccatggacctccgcatcgcctacaccatacaccgcctcagtggcgcccgcaccctctcccagatactcgctgaggcccggatcaagatcgacccgcgcaacaacaagctgcgcgacctggcgcgcgtcatgcgcgcgctcaccgtgt

SEQ ID NO: 7297 - DNA, 392 bp, Zea mays
  Clone ID: LIB3137-015-Q1-K1-E6
caatggttggttgaaaccaaggaggtcagagttctttactagtttggagagcgcatgtgttcagccagaatacaaactaccagtcaggacacgtgctgactgtaaagcacagcagtatgaaataacaggctcacctttgagcccttctgatgttcctgctgatgccgctatgattggagatacaaacgagatttctccctggtggcaggagtttccaaagcgctggacggtcgttctcctctgcttctttgcgcttcttctttgcaatatggaccgcgtcaatatgagcattgcaatccttccaatgtcgtcagagttcagctggaatccagcaaccggtggtctaatccaatcatctttcttttggggttaccttctcacacagattcttg

SEQ ID NO: 7298 - DNA, 383 bp, Zea mays
  Clone ID: LIB3137-015-Q1-K1-E8
ctaccagcgactcagcgagcgagagcagttcttacgcagctagctaggagcagcagcagcggcggcggcgatggcggcctccatgatctcctcgtcagctctggcggtggcgcctcagggcctgccgcccctcggccgccgcgcctcctccttcgccgtcgtctgctccaagaagaagatcaagaccgacaagccctacgggattgggggtggcctgaccgtcgacgtcgacgccaacgggagaaagggcaagggcaagggcgtgtaccacttcgtcgacaagtacggcgcgaacgtcgacggatacagcccaatctacaacgaggatgactggtctcccaccggcgacgtctacgtcggtggaaccactgggcttctgatct

SEQ ID NO: 7299 - DNA, 379 bp, Zea mays
  Clone ID: LIB3137-015-Q1-K1-E9
gtgcgcgcaacccagctcccaccgacgtttgtaccttccgtcgctgccgcgctacttcggggcgttttccggcgacgagcacgcagcacgtagctgctaatggagattgacagcctcagagaaggatttgatcgagttgctgagaaacgttcattatcttctgctaaagctctggaagttgttgatcaaatagtgaatgaaattgagcaggctattgtgaagctgcagatgatgaatacagattctactggaaatgttgaccacccatccatccttgcagaactgaaagctaagctcaatgaaatggcaccactaaaccagcttgaaggcagccaaaaggagctcaatgttgctctgagcaaatatctcaaactccttg

SEQ ID NO: 7300 - DNA, 435 bp, Zea mays
  Clone ID: LIB3137-015-Q1-K1-F1
cgcgtccggcagtgcctttcttgcatcaactgtatgcattgcttttcttctgccgttctttggtcttgtgaggtctttcattggatctcttcttagtatacttgtggcagtcataatgccacccttgtgtttcctgaagatcgcgcagaacaaagcaacttgtgcacaggtaatcgcaagcatttgtatcgtaatgttgggcgtcatcagtgctgccctggggacatactcctccgtgaaaaaaattgtagaaaactactaagctcttcgacaataattgcctgcctgcagaggctctaccaccagattccacgtatggaactcgaaatggtcaggttttactgcacgaccaaaattttactagaactaccggatttcctgtacattgttacttgctgtattattcggaccacactagcctactaaaaagggaca

SEQ ID NO: 7301 - DNA, 387 bp, Zea mays
  Clone ID: LIB3137-015-Q1-K1-F10
agcaaaagcaacaacgcagcagcagcttaagtttgaccacacctcccttcgcctgtgagcatggcggcttgctgcggcggcaagtgcgggtgcggctccagctgctcatgcggcagcggatgcaacggctgcggtatgtaccctgacgtggagaccgccgccgccagcagcgtcaagaccacggtcctcgccgcgccgaccaccaaggccagcgccggcggcttcgaggcggccaccgagggcggcggctgcgactgcaacacctgcaagtgcggcaccagctgcggctgctcctgctgcagctgcaactgagccggcccggctcggcgatggcgcacgagagtcgagaggacgacgacgaggaggcgtataataaatataatagcg

SEQ ID NO: 7302 - DNA, 330 bp, Zea mays
  unsure (1)..(330): unsure at all n locations; Clone ID: LIB3137-015-Q1-K1-F11
gagcgaacagagcactgaagcagagctttgcgtctgtccggccaaaccctcacngccgcctcgacaatgccgcgcggtgtcgcgcgtgctcctgcccctgctactgctggcctcgccggcggccacgcgcctggcgtccgccgcctgcgcgggcgagaagttcccggcggggcgtgcgtacgcgtcgtgcgaggacctgccgaagctgggcgcgtcgctgcactggacgtacgacgcgtccaagagctccctgtcggtggcgttcgtggcggcgcccgcagcggcgggcggatgggtggcgtggggcctgaacccgacgggcgacggcat

SEQ ID NO: 7303 - DNA, 420 bp, Zea mays
  Clone ID: LIB3137-013-Q1-K1-C2
aattaagaaagctattaaggctgcttctgagggcccactcaagggtattatgggctacgtggaggaggatctggtttccaccgacttcaccggtgacagcaggtcgagcatcttcgacgccaaggccgggattgccctgaacgaccacttcatcaagctcgtctcttggtacgacaacgagtggggctacagcaaccgcgtcgtcgacctgatccgccacatgttcaagacccagtagagagagatatttctgcctccctatcgtgggtcgtccccaatggcctttggtcgcagaccatctttgctgcttgtctatgctgagaataaatgtgaacggtgcccctggacgcttgatccatgctggttttgagcacgttgtcttttttgtgtttaacttatctgctatccgtcctgtaacga

SEQ ID NO: 7304 - DNA, 144 bp, Zea mays
  Clone ID: LIB3137-011-Q1-K1-B4
gagatccggagcatactcagtcccaccgactttgtcgtttgacgacctcattttcttcgcggtggcgggtggtttttttttcaataataaacaataacccttgtggcaattcccgtggtgggcaaaaatatcttggtatctctt

SEQ ID NO: 7305 - DNA, 300 bp, Zea mays
  Clone ID: LIB3137-011-Q1-K1-B5
gccgcgccgtccaaaccctagccgtcggcggcggcggcggcggcatggttggcgtggaccggcccctcgtcttcgtgaaaggcctatagggcgacatggtaacccacgcccccgggatatccttaccccccgtgttttgggcgcccattccccccgacgtggtgagggttacccacaagatgttgtgctgtaaaaaagagcacgactattcagtattttcccgcggcggggaccacaaaatttgggcgtactctggggccccccgcgccccgttttttatttcccccgtgtcccgggggg

SEQ ID NO: 7306 - DNA, 155 bp, Zea mays
  Clone ID: LIB3137-011-Q1-K1-B6
gccgacttggcaccccccttgacctttgccaggtcttcgtcggcccttttgcttggaaccaggcttcaaccagaaccaccccagggaatcctcaattgcttttagttccttaccaaacccaaagaaggaggccatcaaagataccaaggcttttt

SEQ ID NO: 7307 - DNA, 126 bp, Zea mays
  Clone ID: LIB3137-011-Q1-K1-B7
acgcacgcactcttacaaaaatagtcttttttattatacttacttcctattactctgaggtggcggctttcctcaacaccaagcagacgacgaacgacgtggactttctagctaccgtggcccatc

SEQ ID NO: 7308 - DNA, 437 bp, Zea mays
  unsure (1)..(437): unsure at all n locations; Clone ID: LIB3137-011-Q1-K1-B8
cgcagctcccatcctctcgctcgccaggagaagcagccgccgttgctgctgccgcgtccacagaatggggggtttcgtgaagactcataagaccaatgcgtatttcaaacgtttccaagtgaaattcaagagaaggcgggctggcaagacagactacagggccaggataaggctgattaaccaagacaaaaacaagtacaacacacccaaatacagatttgttgtgcgatttaccaacaaggacatcactgcccaaatcatatctgctagtatagcgggtgatatggttcttgcttctgcctactcgcatgagttgccacgatatggtcttgaagttggtctgaccaactatgcagctgcctactgcactggccttctgttggctcgccgtgtgctcaagatccgtggtttggatcangagtacgagggcaatgttg

SEQ ID NO: 7309 - DNA, 425 bp, Zea mays
  Clone ID: LIB3137-011-Q1-K1-B9
ccaggttctaaatggcgatggcgatgatggctatgctacgcgcggtggcgctcggcgcgccgcacatcctcgacgccggagcctcttacttccgagtcgtatccctccgccacatgagcgcggacacgggcaccgctatggacaagatccgcgccgccgggctgctcaggacgcacgggcttatcgctgggcagtgggtggacgcctacgacggaaagaccattgaggtgcaaaatccagcaactggtgacgtcctggcaaacgtgtcctgtatgggcagcagagacacatctgatgctattgcttctgctcacagtacattctattcttggagtaaattcactgcaagcgagaggagcatggcactaataaaatggtacgatctacttatttcacacaaggaagagcttgcacttgttatgaca

SEQ ID NO: 7310 - DNA, 110 bp, Zea mays
  unsure (1)..(110): unsure at all n locations; Clone ID: LIB3137-011-Q1-K1-C1
agctttgtggtgctttcgcaaagcgtcagcaggtaatcctaacatntccctgttgacgcttgggggggggttcgcatatacacaacaaagacaccttcggattttctcct

SEQ ID NO: 7311 - DNA, 373 bp, Zea mays
  Clone ID: LIB3137-011-Q1-K1-C10
ctgacgcgtgggcagagcgcctgaaccttccttcgctccactcttgccccccccctggcgcgagactatcctaatgagtagtgcaacacacttgctctcgttcttctaactatatcctgcacagcacaggaccagagcccagaaccgtcggcaaaaggggagcggacatgaagtacgtgctggtgaccggaggggtggtgagcggcctcggcaagggcgtgacggccagcatcatcggcgtcgtgctcaaggcctgcggcctccgcgtcaccaccatcaagatcgatccatacctcaacactgatgctggaaccatgtctccattcgagcatggagaggtgtttgtttttgacgatggtggagaggtggattt

SEQ ID NO: 7312 - DNA, 423 bp, Zea mays
  Clone ID: LIB3137-011-Q1-K1-C11
ctcacccacccactcacggactcatctactgagcagcgcggtgggcatccgagcgagagggcgagcgcggaaggatcggaattccgaaggttgggcatggaggcgagcggcgagaaggctgcggtggtgcgacggctgatggaggcgaaggaggtgtccgggaagaccttctcgggaatcgccgccgagacgggtctcaccaacgtctacgtggcgcagctgctgcggcgccaggcgcagctcaaggccgacacggtgcccgcgctgagggcggtcctgcccacgctcacggacgacctcatcgaactcatgatgcagccgccctttccgtcctaccaccccaacatcgtccacgagcccgccatttacagattgaatgaagctgttatgcattttggagagagcatcaaggaaatcatcaat

SEQ ID NO: 7313 - DNA, 419 bp, Zea mays
  Clone ID: LIB3137-011-Q1-K1-C12
ctggtggccatcttcgttcttgcggaaatcgagtcgagcatgatgtggctatgaaactagggcgtcctccatgaagagatgaaaactttatccaaacccatacaagaaaaaatggagttcctacagaacaggcaaaaccaataatgggtgttctggataaagaaagcttgtaccttaaaacaggaggatacaagaagctggagtggttgtctgaaggcttttgaactgcttgaagcattagtgtagctttggtgcttttgtgactgatcagctctggagcagctagagtgatgtagttgtgggcttttgaacaatagctggagtgatatgaaacattagtgatgtagttgtgggcttttgaactgcttcaagctggagtgatgttgctgtgatgcttttgtgactgatcatatctggag

SEQ ID NO: 7314 - DNA, 354 bp, Zea mays
  Clone ID: LIB3137-011-Q1-K1-C3
aacacgatcgagcacacaagcacgaagactcgtttaggagaaaccacaaaccaccaagccgtgaaagcatcatggagtacggtcagcaggggcagcacggccacggcgccacgggccatgtcgaccagtacggcaacccagtcggcggcgtcgagcacggcaccggcggcatgaggcacggcacgggaaccggcggcatgggccagctgggtgagcacggcggcgctggcatgggtggcgggcagttccagcctgcgagggaggagcacaagaccggcggcatcctgcatcgctccggcagctccagctccagctcgtcggaagacgacggcatgggcggaaggaggaagaaag

SEQ ID NO: 7315 - DNA, 198 bp, Zea mays
  unsure (1)..(198): unsure at all n locations; Clone ID: LIB3137-011-Q1-K1-C4
gcgtccgaacactatctancacacaatcacgaagactctttttgtttttaccacaaaccaccaatccgtgaaagcagcttggtttactgtcagcaggggcagcacagacaccgcgccacggtccatgtccaccaatacgcctacccattctgactcgttaatctcggtaccgtctgcatgagtcacaccacgttaaca

SEQ ID NO: 7316 - DNA, 302 bp, Zea mays
  unsure (1)..(302): unsure at all n locations; Clone ID: LIB3137-011-Q1-K1-C5
ccgtccgtggcaaaaccgtngccggtggtgtccggtatcatacctgtttggtcgttgtgcaaagggcgnngcgtgggccggtgggcggtnctaatcccgggcaccggcaagggccgggtcgtgcatccacggnntcgtgcgttggcatagtntngcggcggttggctgttccactngtttatacccgggataagaaaagacccgtcccacngnttcaacgtctttccccttttcatttctacacgtnnacgccgcngtnncggagaatcgcagctttgcacgacngnaaccccanngcgtgg

SEQ ID NO: 7317 - DNA, 275 bp, Zea mays
  Clone ID: LIB3137-011-Q1-K1-C6
ctaaaattagaatcctctcatgcatctttagttagtagttcacacccactggagtgaacaaagttagcttcgtcttcccacgttacttatgataatgggttttcgttgcataccaaaagcagcaacatagcaactgcaaatggtcatggtagagagcgtgcacagcccttgggtatcatttctgagcgtgcacatcaagctttagcacttgagcacctcgagaatatgtggacaaacggaaagaactcccaaccagaaaatgttgatcatatctc

SEQ ID NO: 7318 - DNA, 311 bp, Zea mays
  unsure (1)..(311): unsure at all n locations; Clone ID: LIB3137-011-Q1-K1-C7
acgcgtccgaaacgatcnacacacaacacnaatactttttattttaacacaaanaccaaccgtggagcagtgattattctgtcacaagggcatcacagcactgctccactgtccatgtcgaccagtacggcaacccattcggcggcgtaaagcacggcacctgcggcatgatgcacggtacgggaaccgtctgcattggccagctgtgtgagcactgcagcgctcgcatgggtggcaggcagttacagcctacgaggtaggagcacaagaccgaaggcattctgcatcgattctgcagcttcaacttcagc

SEQ ID NO: 7319 - DNA, 447 bp, Zea mays
  Clone ID: LIB3137-011-Q1-K1-C8
caaagcaatacaaggctggactcagcgtcctgtaagatgacatattcgaagtggatcagccaggggacctgttcctctactgctactacggagggatgatttacattgggctcaagaagtttcctaaagctttggagcttcttcacaatgctgttaccgccccaatgtcaacattgaacgcgattgctgtagaagcttacaagaagtatatcctagtttcactcattgtgaatggacaggtcccatcatttcctaagtatacatccatatcagcccaaaggagtatgaaaaaccatgctcagatttattttgagctttctacaagctatagcaacggtcgctacactgatttagagacatttgtcgaatcaaattcagcagcatttcaatctgacaacaacctagggttggtgaagcaagtgctctcatcgatgtacaaacggaaca

SEQ ID NO: 7320 - DNA, 413 bp, Zea mays
  Clone ID: LIB3137-011-Q1-K1-C9
cttgaggcaggcagcagagtgcgctgaacaccggcatggacaccatcgtctctctctcgccgcagatgcttcgccagcgccagggccaccagtctactgcatcatcatcatcatcagcttgggctattaccacagctaggatcggtcgccacctgtctacagcatcatcctgttccagcccgcggctgctcatcaagcagagggcgacggcggcatcggcaccggcacagaaagagaaagaggtcgtcttcgtggctggcgccaccggcagagttgggtcccgggccgtaagggagctcatgaagcttggcttccgtgtgcgcgctgccgtcaggaacgcacagagggccacgtcgctggtgcagaaagagaaagagcagcagctgcttgagcttgtggagtgtgacctggag

SEQ ID NO: 7321 - DNA, 120 bp, Zea mays
  Clone ID: LIB3137-011-Q1-K1-D1
cttttctgttatgatgaagtgaatgtgcgtcaccgcagtttcgatgcaagctaattaaagatgtggtgtcacgtgagcgctcaaaataaaggatacacatgattaaattgcttttatgtc

SEQ ID NO: 7322 - DNA, 250 bp, Zea mays
  Clone ID: LIB3137-011-Q1-K1-D2
cacagtcaacaaaagctacggcctacgacggatacggtctcccctccactgcctcccttgccgtattgtcttcttcatctcatcgcatcccatagttgtgccagttggagacgcttctgttgctgaaggagacctacataaactatagtcagccgctaagttaaacaagccacgtgctgggccagaacctagcaggcttaaggatgagtaaaatgatatctgttcaacatgaggcacaacgatatctatc

SEQ ID NO: 7323 - DNA, 278 bp, Zea mays
  Clone ID: LIB3137-011-Q1-K1-D3
ctccccgccggcctccacctccacggcggggaggaggcggtactcgtgcatgacccagtcggtgcgggcgccgccgccgccacggcggcgcgggcagaagacgagcgtccgcttggtgccgacggggcgcttgcagcgcggcgacacgacgacggtctccttcccggacggcctccaccttcacggctgcgccgccaacgcgccttcgcccactaatgtgagctcccatggcggtggcgcggcggcggccgactgggtggtctgtcgcattttcagga

SEQ ID NO: 7324 - DNA, 271 bp, Zea mays
  unsure (1)..(271): unsure at all n locations; Clone ID: LIB3137-011-Q1-K1-D4
ctccccgccggcctccaccttcacggcgggtgttgatgctgtactcgtgcatgacccantcntgtcggtgtccgcctccaccacggctgcgccgtcagaagacaagcgtccgcttggtgcctacggggcgcttgcagcgcggcgacacgactacggtctccttcccggacggtctccaccttcacggctgcgccgccaacgcgccttcgcccactaatgtgagctcccatggcggtggcgcggcggctgccgactgggtggtctgtcgcat

SEQ ID NO: 7325 - DNA, 351 bp, Zea mays
  Clone ID: LIB3137-011-Q1-K1-D5
ggcacaagccatggcgtccatgaccggcctctcgcagggcgttctgcccagcaggcgcgccgccaacagggccaggacggccgccgtcgtcagggcgtccgccgaggcgcaggcgcaggcgggccgccgcgccgtgctcgggctggtggccactggcatcgtcggcggcgccttgtcgcaggcggtgcacgccgagaccgtcaagaccatcaagatcggagccccgccgccgccctccggtggactccccgggactctgaactctgaccaggcgagggacttcgacctccccttgaagaagcggttctacctgcagccgttgccgccgccggaggcggtggcaaggttaaa

SEQ ID NO: 7326 - DNA, 401 bp, Zea mays
  unsure (1)..(401): unsure at all n locations; Clone ID: LIB3137-011-Q1-K1-D6
cgcctcgtgtgcagcgtgctcgctcacctcctctgtcgacgcaccaccccgaagaccccccgcgcgcgctcgcagggtgttcgacccttcgcccgcgcgccctcacgacatggccgcctccgtctccgccgccgccaaggccgccgcggcgttcgcgcacaaggtccagaaggagctggccgcgccggcgcagcgccgcgcgggcttgacccgccggaccaagccgtgcagcgtgcgcgccgtcgcttcgcccgcgcgcgccctccgngccccgtcgtncaccggctcggtgaagagcgcgatgacgatgacggagaaaatactggcccgggcgtcggagcgcgcggcgcttgaacccggggagaacgtgtgggtcgacgtcgacgtgctcatgacgcacg

SEQ ID NO: 7327 - DNA, 436 bp, Zea mays
  Clone ID: LIB3137-011-Q1-K1-D8
gatcttctcattgctggcagatactttaactgaaattcaggaacaaattggtgctggtgatggcgatgactccgaagaggataatgactgggaagaagttcagaatggtgatgctagtatatcagatgatatcatacactcagcatcggttccttcaatgactaatccatcagttgaacatttaaatgcaatggccaaggtttttgatgaggtttgtgagcaaccaggtctgctcctttgttagttctgtcatatttatgccatatttaccttgagttgtacaacaggatgatgatgatagttatgacgatgatctgacaaaaaccgaccctcttaatgaggttcgttttcactgcagaaaagatcttccatttgaattagatgacgtcaaagtcaaataacccatattcatgcaggtgaagttagcggactttct

SEQ ID NO: 7328 - DNA, 214 bp, Zea mays
  Clone ID: LIB3137-011-Q1-K1-D9
ggacgcacgcgtgcgctcagcacgttctgcaacctgaagagctcatgtgatgtctggagatcgtgttcaacgtagcaccatcacgggcgggctcgtcctcatcaccatgctcatcgtcaacatcaaggtgttcctgaacgcgaccacgttcaagaagcatgccatgcacacgcttctgcacggcttgtagtgttggaagaagcgcatgaaactg

SEQ ID NO: 7329 - DNA, 253 bp, Zea mays
  unsure (1)..(253): unsure at all n locations; Clone ID: LIB3137-011-Q1-K1-E1
ggattagccgatcgaagcgtcatcggcggctgcgacaatggcggggctgtcgctgcggtgcggcgactgcggcgcgcagctgcggagtgtggaggaggcgcangcgcacgctgagtccaccaaccacgccaacttcgtcgagtccactgaggccgtcctcaaccttgtctgctccaactgcggcaagccatgccgctcccataccgaggtggacctgcacacgaagcgcacgggccatacggagttcgcggac

SEQ ID NO: 7330 - DNA, 212 bp, Zea mays
  unsure (1)..(212): unsure at all n locations; Clone ID: LIB3137-011-Q1-K1-E11
gcgttcgccggntnnggactagacccctcctactactctgctcccaaaacgtaccacccaggtgctacctttctttgaccccttcacttcaccatcctcccataaatccatctcccacttctggaatccctaccagcggaccaacgccgaaccaactgaaaaagcgacccaaggtctaccaatagaaattgaacccctgcaacccagcacaa

SEQ ID NO: 7331 - DNA, 306 bp, Zea mays
  Clone ID: LIB3137-011-Q1-K1-E12
gcgtccgctgggttctgcatcacatccttttattttatgtgacttcacaaatttagccaaggctggtatattctaatgaagctatgtttcacctatgctactacgagccaccatcacatttgcaacatgcttaagagcaaaatgacaccaaactaatggaaaatgtaatccatgttctatcaagatatttcttaccgcttcaaccaggcacaactgacatattcttcagtcgatgccatgcatactgacatggaggttgtgttctaagtgctgaatagcctatatgacatttatgagctttacccc

SEQ ID NO: 7332 - DNA, 333 bp, Zea mays
  Clone ID: LIB3137-011-Q1-K1-E2
gaacgacttgatgctcacgtggagcacatgcttgatggtctggatgatgctgatggagcagaggacgtgccttttgatgaacttgttggtatgcaaggccctgtcttccacttggttgagaacgcaataacagttttggccagcaatgctatattcctcattgttgtgatctttgttccattctcattgggaaggattgttctgtactacctatcatggtttttctcttcggcttctactcctatgctggcaaaaatgatgcccttcacagaaacagctatttctatagctaatgatacattaaagagcgcacttaatgttgtgaagaatttt

SEQ ID NO: 7333 - DNA, 338 bp, Zea mays
  Clone ID: LIB3137-011-Q1-K1-E3
tgtcactcacgctaccgccgtgaccgatcatctcccactctctcgtcagatcctctcggctagctaggtagctagctaggacagaggagggaggggaaggcgctggctatggcgactgcggcggcggcggccatggaggagccggacgtcgtcaacggccgcgacgtggtgagctgggtggcgtccggggtggtgctgtggtcgaccgccttcttgctggtgcgggcgctgttccccaagcgctcctacgacttctgcaaccgcgccgtctccaccatgcacgccgtcgccgccgtgtgcctcgcctgcctctccgtcgacgactggtcgtgcccccg

SEQ ID NO: 7334 - DNA, 305 bp, Zea mays
  Clone ID: LIB3137-011-Q1-K1-E4
caagcttcggcctcacctccagcggcaggtggtgctgcggagcttctcctcgccctagatcgggcgcgcgccaacgccagatcagagatcagggcgcgccggccgtctccattgccgggcggatcctgcgatgcgagctggaccgagagggaggagcgagggagcgcgcgggtagagaaggcggtgcggggggaggaaggaaggaaggaaggagcgccggccggagcagacgtcccctcggggccctcggtcggatgagatcgacgatgaaggcgcagcacgccaacggggcgggggagcaggag

SEQ ID NO: 7335 - DNA, 445 bp, Zea mays
  Clone ID: LIB3137-011-Q1-K1-E5
gtttcagtttggcacctccgaagcttccgtccgaatctctgcagcctccttcctcggccaggcttgcgggcgatggcggcggagcagaccgccgagcagttccggggccaggcgcggctgccccacttcgcgtccccgcggcgctacgacctgcgcctcacgcccgacctccccgcctgcgtcttcactggctcggtggcggtttccatcggcgtggccgcgcccacccgcttcctcgtactcaacgcagccgagctcgacgtcgcgaccggtggcgtcagcttcgcgcctcaaggctccgaccaggtgctacaacctttggaggttaccaacgcgccagaagatgagatcctgattattcacttcaatgaggtgctttctatcggggagggaactttgacgattgcattcaaggggactttgaatgataagatgcatggattct

SEQ ID NO: 7336 - DNA, 144 bp, Zea mays
  unsure (1)..(144): unsure at all n locations; Clone ID: LIB3137-011-Q1-K1-E6
cccacgcgtccgtttcagatttcacctcctaacttttctcttatatcttcacctccttcctcggccaagcttgctttcaataacagatgagcaaacccccnancatttccatttccattcgctacttccccacttatcttcccc

SEQ ID NO: 7337 - DNA, 429 bp, Zea mays
  Clone ID: LIB3137-011-Q1-K1-E8
cgcgaaccctagagccgcagcagcacactcccgcagtagcagcagccgccgccgccgccgccgagccgcaggaaacaggaggaagatgccggcggggcacgggcttcggtcgcggacccgcgacctgttcgcgcggccgttccgcaagaagggttacatcccgctcaccacgtacctgcgcacctacaagatcggcgactacgtcgacgtcaaggtgaacggcgccgtgcacaagggcatgccgcacaagttctaccacggccgcaccggtcgcgtctggaacgtcaccaagcgcgccatcggcgttgagatcaacaagcaggttaatggccgcatcatcaggaagcgtatccatgtccgtgtggagcatgtgcagcccttcccgtgcacagaggagtcccgcttgaggaaagccaagaacgatcagct

SEQ ID NO: 7338 - DNA, 412 bp, Zea mays
  unsure (1)..(412): unsure at all n locations; Clone ID: LIB3137-011-Q1-K1-E9
ctcagcacgttcggcaacctggagagcacgacggagtggctggagatcgtgttcaacatcatgaccatcacgggcgggctcgtcctcgtcaccatgctcatcggcaacatcaaggtgttcctgaacgcgaccacgtccaagaagcaggccatgcacacgcggctgcgcggcgtggagtggtggatgaagcgcaagaaactgccgcggagcttccgcggccgggtgcgccagttcgagcgccagcggtgggccgccacgcgcggcgtcgacgagtgccagatcgtgcgcgacctccccgagggcctccgccgggacatcaagtaccacctctgcctcgacctcgtccgccaggtcccattcttncagcacatggacgacctcgtgctcgaaaacatctgcgacagggtgaaat

SEQ ID NO: 7339 - DNA, 294 bp, Zea mays
  Clone ID: LIB3137-011-Q1-K1-F1
ctagagacaaccgctgcgtaaacgaatccatctccatgtcgtctcgtctcgttgcggcggcgggctcgtgctcccccctctcctcagcgtcccccctcgctcgcctaatctctcgccgcggccttgccggtgccgcagacggccatgggtctgcgaaggtgcccttgtggaaagatccgttgagcccgagcaagtggaaggaagagcactttgttctagcaagcctctcaatgtggggggttattttttatggtggttacaagctttttagtggaaagattgaagccaagactg

SEQ ID NO: 7340 - DNA, 324 bp, Zea mays
  Clone ID: LIB3137-011-Q1-K1-F2
cctcccatctccaagctgtcgtcgtccatgaaggggcttggcttcatcgggaaatccaaacgctaccgtacaggtggcgtccccaagggtaaggtgacaggtagaactaactacagtggcaaagccagcgagcatcagtccgggagccggagcgccaacgagctgctcccgcccagcgcgagtttcgtgaagctgtcggacatgagccgcaaggagtggagcgcgttcctcgagaagttccaggagctgctcccgagcgccctccgcacccggaagcacagcgccggcgtcggccagcgcccgatgccgaggctgggcacgtct

SEQ ID NO: 7341 - DNA, 300 bp, Zea mays
  Clone ID: LIB3137-011-Q1-K1-F3
gaaggatccggtgcatgcaggtgtggccggcctacggcaacaagaagttcgagacgctgtcgtacctgccgccgctgtcgacggacgacctgctgaagcaggtggactacctgctgcgcaacggctggataccctgcctcgagttcagcaagctcgggttcgtgtaccgcgagaactccacctccccgtgctactacgacggccgctactggaccatgtggaagctgcccatgttcggctgcaccgacgccacgcaggtgtacaaggagctgcaggaggccatcgccgcgtacccggacg

SEQ ID NO: 7342 - DNA, 398 bp, Zea mays
  Clone ID: LIB3137-011-Q1-K1-F4
ccttgctccatcttcctcctcctcttccgactgccctcatccactccactcccaagtccccaccacccgcaaccccggctctccactgcagcgcaggcttcgcttcggctacgctcggctcgagcagaagaaaatgcaacgggcagtgcaggccgtcaggtcacacggcaatgttcttaaatatgctgttctacaacacatcagcgctcccaagccagcaatgcttcctgctgccttttctcgtttcatgtcagtttcatctgctcgcctagaggatcgtggatttgaaactgccactgtagcagatgtcttgaagtctaaagggaagagtgctgatggatcttggctctggtgcaccacagaggatagcgtctatgacgcttgcaaatctatgactc

SEQ ID NO: 7343 - DNA, 433 bp, Zea mays
  unsure (1)..(433): unsure at all n locations; Clone ID: LIB3137-011-Q1-K1-F5
cctttccctccgtcgaaggcgcatcttttcctagctctccccaacaaccctacccgtttcctggcctcggcctccgtccgggtcgcctatcctccccggtggcctctccgcgccgccgacggggagcgggacaaccgcgtgcaggagctgagggtgcccgattcttggctgacgcctgcaggagcaacgcaggaatctgaatggctgagggagacactgcgcaagtggctcgacgacgagtactgcccggagccggccaacgtggacatcagcagcaccgccgcgcggtcgtatcgcgaatccctgatagcgcggcagtctgatctgggagagatcttgctgaggatggtgggcgacctggacaagctgtcgtacagggagagcttncacggccccttctcggccgccaacgctgcagtccgtttgatcgctc

SEQ ID NO: 7344 - DNA, 347 bp, Zea mays
  Clone ID: LIB3137-011-Q1-K1-F6
cccgcggcgacggtgacgacgaccgcgcgagcgccggcgactccctactgcatcaggtgccggggccttcgtcgtgctctccgccggcaacgagtatagacgggcgcgcatggccaccttcgagctgtaccggaggtccaccatcggcatgtgcctcaccgagacgctcgacgagatggtctccaacggcaccctcagcccggagctcgctatccaggtcctcgtccagttcgacaagtccatgacggatgctctggagaaccaagtgaagagcaaggttactgtcaagggtcacctgcacacctacaggttctgtgacaatgtgtggaccttcatcttgacagacg

SEQ ID NO: 7345 - DNA, 265 bp, Zea mays
  Clone ID: LIB3137-011-Q1-K1-F7
cacgcagctcagtctcgtccatccagtgctgttgaattttctttggtctgctggcaaggcaggcatgaaaccccctcagctgccggcaggggagggggcctcctgggctcacgaggtcaagcaggccctccgtgagaaactccggcgctcctacggcgccggagctgccttcgccacaccggaggccaggccggtcggcgaaccaagccgtgtcgctgagtgcctgggctcggctgccgaggaccccataaggagagtcatgttc

SEQ ID NO: 7346 - DNA, 266 bp, Zea mays
  Clone ID: LIB3137-011-Q1-K1-F8
cccacaccccccgagctgagcttagctccactccagctccaatcacagtcgtgaccagagcgcgagagctagctagagggccgtgaaaatgccgatcaataggatcgccctggggagccaccaggaggtgtaccacccgggcgccctcaaggcggcgttcgctgagttcatctccaccctcatcttcgtcttcgccggccagggctccggcatggccttcagcaagctgaccggcggcgggccgacgaccccggcgggcctgatcg

SEQ ID NO: 7347 - DNA, 272 bp, Zea mays
  Clone ID: LIB3137-011-Q1-K1-G1
cggacgcgtgggcgaactcttgctccgatcacgagctagctgaggtcgacgatggcggctgtgctgaacagcaggaagacgccgcaggcggtggtggccgtgctggtggcggcggcgctgctggcttcgtccgcttcggcggcgatcacctgcgggcaggtggggtcgtcgctggcgccgtgcatcccgtacgcgacggggagggccagcgcgctccccgcgtcgtgctgcagcggcgtcaagagcctcaacagcgcggcgcggaccagcgc

SEQ ID NO: 7348 - DNA, 421 bp, Zea mays
  Clone ID: LIB3137-011-Q1-K1-G10
cattgttggacgcgttcccctcctgcacgcaacctcatctcgtcctccagatcctggatggccgtcctccttgataccttgcctcgcgagtgctctcggtgagctactttgttttgatttatcaggaaatccgtttgcttcatgttatgcaggctcagatctgattgctggattcggcatcttacgggcttgaatagagctaggactgggagaaaacaacaaacccgcgttggatcctgtatcgatctggagaaatttctaagtcgtcgtcgtcgtcgtcgttcggttcggagcggatctgaggcgacgatggctggaggcggcgggatctcttggtctgcagtcctgcttcacctcgatggatgatgtctctgcgctgataattattggatcaatttcgataattattagtagatctatg

SEQ ID NO: 7349 - DNA, 419 bp, Zea mays
  Clone ID: LIB3137-011-Q1-K1-G12
gccttatcctcagccacgaaccgcccctcagtcccttgcacaccatggccgctggctgggcttcgcttctccacctcgcgaccccgaccctgactcgctccactcgcctcgccgtccgcctccccagcgcccagctgtcgcgctggccatcgggggcacgcatcgccgccgcgcagccgccgcgggcgtacaaggtgacgatcgagcacggcggcgagtcgcgggtggtggaggtggcggaggacgagacgatcctgtcccgcgcgctggacgagggcctggacgtgccgcacgactgcaagctcggcgtgtgcatgaccgtgcccgcgcggctggtctccgggacggtggaccaaatcgacggcatgctcagcgacgacgtcgtcgcgcgggggtacgcgctgctctgcgccgcgtac

SEQ ID NO: 7350 - DNA, 285 bp, Zea mays
  Clone ID: LIB3137-011-Q1-K1-G2
cgcggtgccgcctctcgtccatggcaaagggagcgggagctagctgacggccgcgcgcttgcgtcttgggtcctttaatttcgcagcattccgcgcgcttggtctctcggaggcgtggcggtagcctgtgccggtgtgcctcggagctccggcctccgggaataaacataggggtatcgccatgcaggcggcggccaagacgaggaatggctccttggaacaccccacccggacgtcctccctgggcggtaacaaggccggccggacggcgaggatggccgagtc

SEQ ID NO: 7351 - DNA, 72 bp, Zea mays
  Clone ID: LIB3137-011-Q1-K1-G3
tcgccaccacagatagcatcagcagactcgcaagggggtagggtaaggttgtgtactactcttcgccgtgcg

SEQ ID NO: 7352 - DNA, 295 bp, Zea mays
  unsure (1)..(295): unsure at all n locations; Clone ID: LIB3137-011-Q1-K1-G4
ggcagcgcggccacggcgccacgggccatgtcgaccagtacggcaacccagtcggcggcgtcgagcacggcaccggcggcatgaggcacggcacgggaaccaccggcggcatgggccagctgggtgagcacggcggcgctggcatgggtggcgggcagttccagcctgcgagggaggagcacaagaccggcggcatcctgcatcgctccggcagctccagctccagctcgtcggaggacgacngcatgggcggaagggggaagaagggaatcaaagagaagatcaaagagaagct

SEQ ID NO: 7353 - DNA, 295 bp, Zea mays
  Clone ID: LIB3137-011-Q1-K1-G5
gctcgatcgatctcactctcagctggtcgctcactcttgcagctccacccttcactcagtcggaggctcttagctctaggctctagctagccgcgccactccttcgtgtagccatcagccttctcatcgccaccaatggccactgccgaggtccagaccccgaccgtcgtggcggccgaggaagcgcccgtggtggagaccccgccgccggccgtcgtgcccgaggagtctgcccccgccgaggccgaggctgaggctcctgctgctcccgaggagcttcccgcggccgagcagc

SEQ ID NO: 7354 - DNA, 230 bp, Zea mays
  Clone ID: LIB3137-011-Q1-K1-G6
cgtagccaaagccaacaaacagccgctccgtctttctccgcggctgcagccagcgcgaggtgcctggctgtcattttgcatttgaggtcatcattgaatggctgcaacgatgggttcaatatctgccaacggttcttaccaaacaaataggcccagtgcactaaagcaggcacctcacatgcaattccaacaatgttgcaacggtggacttaggttcttaagcaagcact

SEQ ID NO: 7355 - DNA, 194 bp, Zea mays
  unsure (1)..(194): unsure at all n locations; Clone ID: LIB3137-011-Q1-K1-G7
gcgaccagcgtcgcaggtctttactaagatgaaggggactccaccgtcctcgcggttaagaccggcgcgagcgcaggacgccgcggactccacgctcgccgctacaggccgngcaggaattgcgtaaggagctgtcgccacgcatccataggctcggctcgcctaacttctcgctttacacagacctcagtgcg

SEQ ID NO: 7356 - DNA, 412 bp, Zea mays
  Clone ID: LIB3137-011-Q1-K1-G9
gaagaagtgatatgaagtgtcggccacattgttgtgtcgttcagatactctgggcatgaacaattgtcagaacattttcctgagctggggatccaatttataagtttaaatagggcatactagctacccagaaatttcgatatttcactgcccaagcacagaatgaattggtactgacgcaatggacccactttacacatggtctttatgaagcatgcttctttgacaaggttggtcattggtcagtatggcagcaaattgtggtacccaagcactcgcgttgtgtcggtatggtccgacattgacactgctactagtggctccaacaagtggccagcatatgtccatagaattcaaatccaatcaaaatcaggctgctttttcttgcaacattgcatgttctgatctcatg

SEQ ID NO: 7357 - DNA, 381 bp, Zea mays
  Clone ID: LIB3137-011-Q1-K1-H10
gggtacacgcagcatgcagccgtgaatttcaaggacgcgacggtctccacgggcgcgcaggtggcgcagaaggccacggaggtgacggccgacaccgcgcgcaaggtggcggagtacgccaaggagaaggcggagcaaggcaaggagcgcgcggcccgcgccgccgacgaggtggaggagccagggagtggcgcaaccgcgcaggccaaggaaccggcgtcccagacggcggacaataaggctcgcgacatcaccggacagcacaaggacaccaccggcgacatggcgcgtaaggccgcggacacggccgtacaggccaaggacaaggtgagggacacggccgtattcatggttcagaaggcgggcgataccgtcgtacgt

SEQ ID NO: 7358 - DNA, 391 bp, Zea mays
  Clone ID: LIB3137-011-Q1-K1-H12
cggacgcgtgggcgactattaacatgctacgcagggttgagccatatgcaacatatggccatctcgcccgtcacccgtcaggacccggaccaaaccaatcaggcggctcgggcgcggcggcgacacaaggcaaggaggccggacgttggggggaccggggctcgacgccagccgtggatcgcgtgcggagggggacaagcgtttgcctcatgttccgcgacggcggggaataaggcgacggcgtctgcggcggggatcggttgcggcggcgtgacaaggcggctgcggcggcggctcgggagggaggcggcaccatgtctggggtagtctggggcaagaagtcctccttcatctttgccgacgagcttcttcccgcgggttctttcttccc

SEQ ID NO: 7359 - DNA, 275 bp, Zea mays
  Clone ID: LIB3137-011-Q1-K1-H2
ctcctaacgaagaggagagggggcagaagaaaacctcgcgcgggggaggcgcgagaggaatcgcgggggccggaggagcagcggccggtggaggtggcgcgcgcggtggccgtccgagatggagtacatatcccctgagagaaatctggaggggacttgtggagatcctgggccgttatttgccgaccaaggtggcagcttgttggaccacttgggttatcaagggggaggaattccacaacatgagtctccaacactggatcatggacttttgg

SEQ ID NO: 7360 - DNA, 304 bp, Zea mays
  Clone ID: LIB3137-011-Q1-K1-H3
ctcgaatccagcgctcacccgcgccgcgtcgagacatgtcgaagaaaatcgtggtgaagctggacctgcacgacaacaaggacaagcagaaggcgctgaaggccatctccgtgctcgtcggcatcgacgccgtgtcggtggacatggcggcgcacaagatgacggtgatcgggacggtggacccggtgcaggtggtgagcaagctgcgcagcaagtcgtgggcggcgcacatcgactccgtcgggccggccaaggagcccgagaagaaggaggagaagaaggacggcggcggcgagaagaaaga

SEQ ID NO: 7361 - DNA, 256 bp, Zea mays
  Clone ID: LIB3137-011-Q1-K1-H4
ggaggccacaaggacgaccagcacgccacggtgacgaccggcggcgcctatgggcagcagggacacaccggcagcgcctacgggcagcagggacacaccggcggcgcctacgccaccggcaccgagggcaccggcgagaagaaaggcattatggacaagatcaaggagaagctgcccggacagcactgagcggcgcctatacgtggctgtgctgtgctgtgctggcgcgtcaaaaccgtactcttcagcgttccat

SEQ ID NO: 7362 - DNA, 411 bp, Zea mays
  Clone ID: LIB3137-011-Q1-K1-H5
cgagttcgctggccgcgtctgcgatcacgtggcaggatgcagaggatagcttcctgagagtgaaggtcgtgaacttcgggtcggacaccgttagcctcacggtctccacgagcgggctcggggccagcgtcaacgcgctgggatcaaccgccaccgtcctcacgtctggcaacgtcatggacgagaactccttcagtaacccgaacaaggttgcaccggtgaaaagccagctgagcaacgccgcggagcagatgcaggtcacgctggctcctcactccttcaccgccttcgatctggcgctggctgagcccaagcttgtggcggagatatgatgtgtgtgctgttagcgatcttgatcgataaaaaagctttgtactggtgtaccatgatacaagataacgtactacgtac

SEQ ID NO: 7363 - DNA, 296 bp, Zea mays
  Clone ID: LIB3137-011-Q1-K1-H7
ggatgagctcagtgaagatgacaagttgacagttgctcgtgctaggaagattcagcggttgggtagccagcctttccatgttgctgaagttttcacgggtgcacctggaaagtacgttgagctgaaggagagtgttaaaagtttccagggcgttttggatggcacgtatgatgaccttccagaacagtcattctacatggttggaggaatagaggaggtcatcggcaacgcagagaagattgccaaggaatctgcatcataaggggtctacaggcaacgcaaaattaacttttgga

SEQ ID NO: 7364 - DNA, 320 bp, Zea mays
  Clone ID: LIB3137-011-Q1-K1-H8
gggaggccacaaggacgaccagcacgccacggtgacgactcggcggcgcctatgggcagcagggacacagcggcagcgcctacgggcagcagggacacaccggcggcgcctacgccaccggcaccgagggcaccggcgagaagaaaggcattatggacaagatcaaggagaagctgcccggacagcactgagcggcgcctatacatggctgtgctgtgctgtgctggcgcgtcaaagccgtactcttcagcgttccatagataataagataaacccatgaataagtgtgcctaccctttgatcatgtgacagggacaggg

SEQ ID NO: 7365 - DNA, 322 bp, Zea mays
  unsure (1)..(322): unsure at all n locations; Clone ID: LIB3137-012-Q1-K1-A1
ccgtccgctctactgggtcacacacanctatcacagacatagtgtgctttccaaaaggccaagtgggtgtgtacctanngcaacgcagnnntagctcgggcccgtctgcaggggcgagctcatcaaatgtcggaggggagaaagcnnaccaccgacttgcttctaaccactcanncaagaagggtacgatggagcacgctccgctcgagcgaggtacgcggtaccctccgagaaccgaggtgggtcaactcgccaccggcgtagggctgagtaccgagaaggtactaagaaaggaaggagaaggagcacnaagcacnaagca

SEQ ID NO: 7366 - DNA, 356 bp, Zea mays
  Clone ID: LIB3137-012-Q1-K1-A10
accggaatggaaggccggatcgaccatgcgtacacaagccacccacatctgtgggacactgtgcatcagcggcgcactggattatggtgctcatggagagcaaacccatgatcgacactcatgtcgcatagataaagacattcctatggaacctctgaacataagcgcgggtgacaaatggtgattaacgatcgtcttgtttggaccataaagccttgtcccgataagaactggaggttgctgatatggtcattcacttgtcaaggatcagaagcacgactttgagtatggtccttgtaccgcatgacagagatacgactttgattcgatcccaggtacgccatttcagaaatccg

SEQ ID NO: 7367 - DNA, 427 bp, Zea mays
  Clone ID: LIB3137-012-Q1-K1-A11
accgggaaggaagggtcggatcacgcgtgcgaccgccgaacggactgaccgatagcacgtaatggtcatgaacgacagggggcgcgtaaggagcgcgtgccacctacgcacggacgactcgacgctcgaagcctttacagccgacgtcaggatcgagaacgacacgagcatcagcgttgacagcaagcgcatgacgggcgtcttcagcagggaccctgtcaagctccgatggagtgagctcggcactgacatcgtcatagatggcacccgagtcttcgtcgacggacaccgcgccggcaagcacattcaggccggcgcgaagaacgtgatcatgacggatgccgtcaatggcgcccacatcccgacctatgtcgggaggcgcaacgagggcgactacgaccacagcgtcgccgacatcatcagcaac

SEQ ID NO: 7368 - DNA, 307 bp, Zea mays
  Clone ID: LIB3137-012-Q1-K1-A2
gacgtactcttgcgtcggcgtgtggcagcacgaccgcgtcgagatcattgccaacgaccagggtaaccgcaccacgccctcgtacgtcgccttcaccgactccgagcgcctcatcggagatgcggccaagaaccaggtcgccatgaaccccatcaacaccgtctttgatgccaagcgtctcatcggcaggaggttcagtgatgcgtctgtccagagtgatatcaagttgtggcccttcaaggtcatttctgggcctggtgagaagccaatgattgttgtccagcacaagggtgaggagaagcagttt

SEQ ID NO: 7369 - DNA, 362 bp, Zea mays
  Clone ID: LIB3137-012-Q1-K1-A3
cttcagactgcagacgccttctgtctcagatattcgttgccgatccttcaaagaggatcacgatcccggagataaagcatcacccgtggttcttgaagaacctcccgagggagatctcggagagggagaaggccaactacaaggacgcggatgccgccgagccggcgcaggccgtggacgagatcatgcggattgttgaggaggccaagacccccggtgacatgtccaaagtggttgacccggcgctgctggccgacatggcagagctggagagcgacgaggaagaagcagacgccgatgacacctactgatcgctcctgcatgcaactcaacaactgctcaatcatggtgtccagtccttt

SEQ ID NO: 7370 - DNA, 176 bp, Zea mays
  Clone ID: LIB3137-012-Q1-K1-A4
gcgggaacaaatgatgtctcaccacgtgagagtatcagcaaccgcggcgcaatggattaccgtggtcatggagataaaacccatgatggacactcatggtgcatggataatgactccctatggaactctgaacataacgagggcgagaatggagagatacatctcttgtttggacc

SEQ ID NO: 7371 - DNA, 315 bp, Zea mays
  Clone ID: LIB3137-012-Q1-K1-A8
gacgtactcttgcgtccgtgtgtggcaacacgtaccgcttccagatcattgacaacgaccagggtaaccgaactacaccatcatacgtggtttttaaagaatctgagcgcgtaaatctagatgcgggcaaaagccaagtcgccatgaaccccatcaacaccgtctttgatgccaagcgtctaattcatacgaggttcagtgatgcgtatgaccagagtgatatcaattaatgggcctgaaacgtcatttctggccctgatgagaaacctatgaatggagtacaaaaaagcggacacgagaaacacctagtgattg

SEQ ID NO: 7372 - DNA, 410 bp, Zea mays
  Clone ID: LIB3137-012-Q1-K1-A9
atctagacctcccaatgttcctcctctgatgcctcagttcatgagggctcatggcagcatcagcgaacagtaccaacagacttcatcatctagctaatttgctggggcccataggtcaggaggcatgcgacctgccccaacacctgtaccagagaaccccacctttaccttgttcccgccaggttcatctggccatagctcgatggagactgatgatgctgggggaagccggttctacgcctgggagggtgaccggtttgccccataccgcgtgatgccggtagactgggagacaagctggctgacctcacagcagcagtcccaccagaacacatcagagcctacatctgctccaaggaggctgattgggcaatggctcgatggccgcaagtcatccccatcacccgagg

SEQ ID NO: 7373 - DNA, 378 bp, Zea mays
  Clone ID: LIB3137-012-Q1-K1-B1
ccgaagcaaaagcgcagagcgcatcagcgcagagtaggacagccatggcgacggcggcggcgcagtcccatccggcatcgatggacgcgcgccggtgggacgagtcatcgtaccgccgcggcatcctccgtgcccgcgacctctcgtcccgcaccctcttccgtgccgtcttctttgaccacagcgacgacccggataccgacatcctactcgccgccgcctccagcgacggctccctcgcttccttctccctttcatcctgcatctccgcatgttccgctacctcccaagtggagaccgccgccactctggtagatcctggctgcatcgggcaagcgcacagcggacctggctacgacgtcaggttttaccccgatc

SEQ ID NO: 7374 - DNA, 216 bp, Zea mays
  Clone ID: LIB3137-012-Q1-K1-B10
gccgacggcgtatccggacgcagggaggcatgttgacgccgcggccatcgacgtcgttgtggtcagccactgttagtgcgcagtcgggatgcgcccggaccttagcggcggccggtggacggccacggtgctgacggcccacgcggagcgttaggcgcccgcgctcgctgtgttactgaccatccgggagctcaggctgggctgcgcctattcgtt

SEQ ID NO: 7375 - DNA, 395 bp, Zea mays
  Clone ID: LIB3137-012-Q1-K1-B11
cctgtcacaccttccctcggtcccttccatctcctagccgccgccgccgccgccgcccaaaaccctacctaccctcttctccccctcactctcctttgatctccattctaatggcggcccaacccgtccggcgaaactgctactgcttgtatctactatcttcatcaggtactctgcgatcctactgaagatatacacgacggcgctgccatggtcaccctcaaccctttcgaactcctcggcgccgacaacaacaaccacccgccgactgtgaattgcgacgtcggggctgctgctcaaaaaggccaggccaataaaaccgccctggccccttctgggaaggctgcccaatctgcggcgaacaccaagttcccgacccagtccgcttctacctt

SEQ ID NO: 7376 - DNA, 218 bp, Zea mays
  Clone ID: LIB3137-012-Q1-K1-B12
ccggaacggaaggcccggcccgaacccacgcgatcaggacgacgaccattgccagctgtctgtcgttgacaaggacaactgatgcaccgaccccttgaagaagtggatgctcaagcaacagctgaacgcggacgtacgaagaacctttacaggtggctggcgttgtcatggacaactgatacaccggaccgacgtgtctgcttgcgtttctgtgaagt

SEQ ID NO: 7377 - DNA, 448 bp, Zea mays
  Clone ID: LIB3137-012-Q1-K1-B3
gggagattcgctctcttcccgcgatttaacagagtcaactagctgcgctgagagccctcgcctccctcagatccaaccctgtacagattcacgaactaaggtgtctgagatcgatgtcaatcgggagcctgctgtcacagaaactggtccgacaagggaccaacctgccgaggagcctccccacgtagcagctggggtgaacgatggcttctggcagcagttcctcaccgagcagcccggtcctgatgtacaccaggaggcccagtcagaaaggagagatggagatgatgataagggcgatcagacgaagataggggaccgagaaaatttttggtgggggaagaagaatgttgagcagatgagagagaagctggggcgtctcaccttggtggagaaaacctgactgtatttcttgtagctggaaaaaaaaagttagcacagaaacaca

SEQ ID NO: 7378 - DNA, 253 bp, Zea mays
  Clone ID: LIB3137-012-Q1-K1-B4
gcgatcgagaacacgatcgagcacacaagcacgaagactcgtttaggagaaaccacaaaccaccaagcgcgtgcaagcatcatggagtacggtcagcaggggcagcgcggtcacggcgccacgggccatgtcgaccagtacggcaacccagtcggcggcgtcgagcacggcaccggtggcatgaggcacggcacgggaaccaccggcggcatgggccatctgggtgagcacggcggcgctggcatgggtggtg

SEQ ID NO: 7379 - DNA, 427 bp, Zea mays
  Clone ID: LIB3137-012-Q1-K1-B5
tccatccttattgagtacagtgttgatccatggactcggaaggagttgtagcagcaaaggtggcagatgagactactaaaccggcaatccaagaagacggcgccgagagcaaggccgggatgactgatctgctgatgctgaccgacaagtcgcagctgcaggcgctggcgatgctgctgcggaacaacgaggagctcatgatgagccaggcgatcaagtcggagacggagcgcattgagtacctcaagacggtgagcgactgctacacgcggacgatgaagctcctcgacgattccatggcggccaggaccacgtacgagcgttcgggcggaacgaggagcctcgtcgcccgggacatggacgactacgtcgtctacggcctcaacgcgtgcttgcagaacgtccgcaactgctgcgtgcgcctgga

SEQ ID NO: 7380 - DNA, 407 bp, Zea mays
  unsure (1)..(407): unsure at all n locations; Clone ID: LIB3137-012-Q1-K1-B6
caaagagggaccccgcttccatggaggtggtgggcggcgtgtcgctgaggccgtcgccagcgccggcgcgtatccggactaccctgccacccgtcgacgtaggcggacgcttccttctccgccgggtcgcggggcgccagccggcgaggcgcgcgctggtcgtggaggcccggggcggcaggggctggtcggagcggcagatgcagcagcagcgccgcgcgccgctgctgccgaaaatcgaggacgacggcaacccgcgattcgtcatcttcatccgcaccgccaatgtctactttctgtacccgctcacatcatcacgggcgtacgacggcgacgatcatgctcgcgcaggacaactnctcgcacgacattacaagaccgctcgcaggacctcgcgcgcattacaa

SEQ ID NO: 7381 - DNA, 438 bp, Zea mays
  Clone ID: LIB3137-012-Q1-K1-B7
cccacgcgtccggacggatcctgctcctgctactacctttgcccatcttgatgctacaactgtgttgtcacgacagatctctgagcttggtatttatcctgctgttgatccactggattccacatcaagaatgctttctccccacgtgctgggtgaggatcactacaacactgctcgtggtgtgcagaaggttcttcagaactacaaaaatcttcaggatattattgctatcttgggtatggatgagctcagtgaggatgacaagctgacagtcgcccgtgcaagaaagattcagcgtttcctgagccagcctttccatgtcgctgaagttttcacgggtgctccaagaaagtatgtggagctgaaggaaagcgtgaagagttttcaaggtgttttggatgggaagtatgatgacctccctgagcaggcattctacat

SEQ ID NO: 7382 - DNA, 419 bp, Zea mays
  unsure (1)..(419): unsure at all n locations; Clone ID: LIB3137-012-Q1-K1-B9
attcgtttctcgcgagccatcgcttctgtaattctcaggcatccggaagaaatggccaagtcgaagaaccacacggcgcacaaccagtcgttcaaggcgcacaagaacggcattaagaaacccaagcgccaccgccagacctccaccaaggggatggaccccaagttcctgaggaacctgaggtattctaggaagggcaacaaaaagagtggtgaggctgaagctgaggagtaggaaggaaagcatggctttgtttcctctgtttttagctcagttccacctttaagacctggggttttgctaaagatggaacttaagtggtgttactgtatgatggcaaggaccttttgctgccgaaggttatgttttgaagttcatgctaccttttaaagtncaaaaacagatatcttgaagcttgg

SEQ ID NO: 7383 - DNA, 452 bp, Zea mays
  Clone ID: LIB3137-012-Q1-K1-C1
gcaattcgccgcctcccagctccctcccgatccccaagttctcactccaccagaagcgcagtgtctcacttgaatttccacctgctgaccggtcagacgacgaagaggtgcccgtgcatgccaagtcggcaccttcatcgccgactgcaggctcaggtgttaccttcttcagtggtactgatgctaccattgccaccgagaatctgaggaggatccttaacctcaaaattgaggataactgaatggcggttgggtagttctgtgtacatagtttaactacaactgacctttgtagtatgtatagggtaaccggggataaccactgtgtacctggcggtggttccttctgcagcagtactgtaagcggttagcaagcacagcgaggagtttaagaagtttggaaatgcaatgagaaggatgttgtggtaatggagatttggtggatttgcata

SEQ ID NO: 7384 - DNA, 370 bp, Zea mays
  Clone ID: LIB3137-012-Q1-K1-C10
ccggaacggaagggccgacccgcgcgtccgaatgattggggtgcgcattgacagttataagtctgtgatcatggggctactgctggtgctccgcgggtgcgttgtctcgccggcgacggacgcagacgggcgggcggaggaggcgcacctggtgcccgcgttgtacgtgttcggcgactccaccgtggacgtgggcaacaaccagtacctgccggggaactccgcgccgcaggttccctacggcatcgattttccgcactctcgggccaccgggcgcttcagcaacggctacaacgtcgcccacttcgtcgcgaaactgttggggttcaagaggaaccactcggcttacctgtacctgacgccaagaacg

SEQ ID NO: 7385 - DNA, 307 bp, Zea mays
  Clone ID: LIB3137-012-Q1-K1-C11
aaacctaaattaaagcaggtattatttacaccaggaggttgtgggcatgtgcccgcaaaaactgacagaagaaattaaaattctgtatatgcagaagaacaacatacgctgaatcactagtactttcctctgtttcaaacttgttcgtgcatgtcaagagcctggaatgtcctcactagagcaagattggtcggattgctactatgccaatgctccgtgctttgctttctttgtttcaacttgtacaggacgttttccgtgccgtgcaaaatgcttgcgaacttccttatgatcgggcgatccagct

SEQ ID NO: 7386 - DNA, 351 bp, Zea mays
  Clone ID: LIB3137-012-Q1-K1-C12
atgattactacggagactgtcgcgactgctcacggtagagttgataatggtgatagaggcacgtaagacgatgcaacaaataatgcagagcctcgaaaggcaggtggtcaatgttgagacgtccctaccttggctcatttgcatgaacatgatttccgtaagttctgccctgatctagaacatgaagagactgatcatgttcttgcagaggcattctcaatatatccatgcattaatatggccaaggatatacgggacaataggaccggttaaactaaaggatatagatttatttgtacagctgaagaaggtgatcatacttgtgacttagaagttacgaataggctatat

SEQ ID NO: 7387 - DNA, 122 bp, Zea mays
  unsure (1)..(122): unsure at all n locations; Clone ID: LIB3137-012-Q1-K1-C2
ccggtnccggacattcccgcggtcggacccacgtcgtctcgcatccatctctcgcgcccctagctgaggggacggtacccagcggcaccagagggtggcgacnngtacgacngtatcgacga

SEQ ID NO: 7388 - DNA, 319 bp, Zea mays
  Clone ID: LIB3137-012-Q1-K1-C3
ggtcatggcgatgtctctaagctgatgccgactgatatcgcaattgagtcacttcataagatcgagagtttcgtcatcgagcacgctgctgataatccagctagcgactcgcaagctgagtcacagatccaaaggatacagaccttgtaatatcttaatccttctgttttgtaccgaagcgtaccccctagagcatcgttggtttatttgttccgtgaagtgtcacgagggagagaaaaaaaaccctgaagtatttcttcttgtaagttgtaaaggaatggaataaaagagctaataatccgaagtgtaccggtggctg

SEQ ID NO: 7389 - DNA, 337 bp, Zea mays
  Clone ID: LIB3137-012-Q1-K1-C4
catgattggggtgcgcattgtcagttataagtctctgatcatggtgctactgctggtgctcctcgtctgcgttgtctcgccggcgacggccgcggccggccgggcggaggaggcgcacctggtgcccgcgttgtacgtgttcggcgactccaccgtggacgtgggcaacaaccagtacctgccggggaactccgcgccgcagctcccctacggcatcgatttcccgcactctcggcccaccgggcgcttcaacaacggctaccacgtcgcccacttcgtcgcgaaactggtgggtttcaagaagaacccggccgcttacctgtccctgacccccaaa

SEQ ID NO: 7390 - DNA, 396 bp, Zea mays
  Clone ID: LIB3137-012-Q1-K1-C5
atcgtgatatcagtgagaagattgctcttggtatggcaagcactggtggtgcaaaaggtggtgaggttatgtatgaccagcgtctgttcaaccaggacaagggaatggactctggttttgccacagatgatcagtacaatatctactctaagggtctcttcacagcgcagtccacgatgtccacgctatacaggcctaagaaggatggggattctgatgtatatggtgatgcacatgaacagctggagaaggttatgaagactgagaggttcaagcccgacaagggattaactggtgcttaaaaaaggactggcaagcaagacaggcctgtggagttcgacaagcaggaaaaaaatgatccatttgttttgaataactttttgactgaggggaaaa

SEQ ID NO: 7391 - DNA, 245 bp, Zea mays
  Clone ID: LIB3137-012-Q1-K1-C6
ggagacgcaacgagaaaaaatccgtacggttaaagttgtggcaggaggagtgggggcgcgggagagatgataaggatggcggcagcgtctcagccgccatcgtcagccttgcggatgcacgggtgcggcggcgcggcttctgcgtcgtccgcgcccgtgcgcctcttcacggagtcgcggggtagagtcgtggcgtcgattgggaggggcaggaagcggaagcgcgccatctcgtgctgctcgtc

SEQ ID NO: 7392 - DNA, 441 bp, Zea mays
  Clone ID: LIB3137-012-Q1-K1-C7
ccgcccttgggttttctattcgatagaccggggacgcacaggcctctcgccctccgcgcggctccacaggagagcaaaaatggcgaccctctccatggtctccgtccccatcgtaccctgctccttgtccctttccacccgtggccgcagctccttcgcatccttccccgctaagaagggacgaatcggccacggaggcttgcggatcgagtgcatccgtattggtggtgttgcgatttcaaaccacaagaaggtggagtacttgctgcagaacatacatggccttggacgctcacgctcacgccacatccttctggaccttaattttgataacaagatcaccaaggacctttccgaggaggacgtcatcacccttcgtaaggaggttggcaagtacatgattgagggagaccttatacgtttcaaccgtgtggcgattga

SEQ ID NO: 7393 - DNA, 443 bp, Zea mays
  Clone ID: LIB3137-012-Q1-K1-C8
cacctctccagccgacgcctcctccttcgccggcgtcgacgatgggcgactatggccacggcggggggcagatgcggggcaacccggactcccgccccaggggccagggccagcgccctaacgtacagcagctcaagctcatggggcacatccacccgacggggctcacgcccaacctgcttaagctcttcgaaccgccgtcaccggtcgagtacaagcccccgctggagaagcgcaaattgccggcctacacccggatgggacaatttgggggccactttgctgagccccaggatccaaagtatgctccgccagtacccaaatgtgagaccagggcaaataagaacgctagaattcggaataataagctcgagcaaggcgcaactaacgttgctgaagagctttagaagtatgacccacaaagtgaccccaatgctactgga

SEQ ID NO: 7394 - DNA, 427 bp, Zea mays
  Clone ID: LIB3137-012-Q1-K1-C9
gtcgacaattattaacagggatcacgaaagctcgtgttcaaatcttttgtgaagaactgcatgtgtattctactcaaccagtattaccatgaagctaaagatgattatgaagacatcataccttctgaaagagaaactgaatcaacatcttatcacaatttctccctaaactatttgtcctttgaggtaaaaaagacactcatttcttttaagaaattatttgggatgggtatgaaacttggcttgaccaggaaagaagcaaacacattaagggtaaccttaagagctgacggattcaaaaactctattatggatattattttggatgaactaacttacaacagcaggtatttattcccatttctcttggcctttgtggaacggaagtggaaattggagattattttgcagtacttttcaaaatatt

SEQ ID NO: 7395 - DNA, 249 bp, Zea mays
  Clone ID: LIB3137-012-Q1-K1-D1
gccaagttttggcacgtaagttgatgctcagtctcgtagctgatttccagcaacagaaaacactggttctaaatccgaaatttgttgatgggattagatcaattctgcgcaacacaagcttggataaggaattcattgcgaaagcaataactttgcctggtcaaggggagattatggatatgatggaagttgcagatcctgatgcagttcatgctgtccgtaactttattaagaaggagcttgccgtgc

SEQ ID NO: 7396 - DNA, 205 bp, Zea mays
  Clone ID: LIB3137-012-Q1-K1-D10
caggctacagctcccgtctctccgccgcttgcttggaaaacgaagaaaccctcctccaccaacccaatccagctacatccgtctgggtgaactccagggccaggagcagttcgccgccttcgttcgcatcacctacgcggttgaatccaactggcatgaaggaacgtgatgggcaagacgagctccctcaagctggagcaccccc

SEQ ID NO: 7397 - DNA, 225 bp, Zea mays
  Clone ID: LIB3137-012-Q1-K1-D11
ctttgctacatagccgatactccagcttcgctcggagggactgacaacgaaaggccacgacccgctcgtacacatggcagggaaaagggaactagcacctgaagtccgttcaaagcgcttgtgaacgcacgatccggccatagtcatgctgcctgacagaaacggcaacctagctttgcacgttggaaccagaaagaaaacaacagagattggaaatgtgcttat

SEQ ID NO: 7398 - DNA, 440 bp, Zea mays
  Clone ID: LIB3137-012-Q1-K1-D2
cgtcaaaagcaaggccgccccactctaggctcacctgattccttccgccttgtcagcgcagcgatccagacccacccgagccaacaacccatggccgccgcgacgccgcgtctcctgctcgcggtcgcgggcctcaccctcgccgtcctcgccgccgcggtctcgccgtctctggcggcggggccgccggtgctgcaggacccggcggagctcctgcgccttgccaaggagccggccttcgcggactggatggtcggggtgcggcggcggatccacgagaacccggagctgggatacgaggagttccagaccagcgagctcgtgcgccgggagctccacgccatggggatcccctacaggcaccccttcgccgtcaccggcgtggtagcaacagtcggcaccggcggtccgcccttcgttgctctgcgggcggacatgga

SEQ ID NO: 7399 - DNA, 213 bp, Zea mays
  unsure (1)..(213): unsure at all n locations; Clone ID: LIB3137-012-Q1-K1-D3
ccgtccgaaggcttctcgaagcctccgaaaccctttccgcgatctntnntcttccgccccgcttcaatctnnntctttggcgcaaggaactcacgttttcgctttcttcgggttcttctcttttcgactttcggcccccgaataaagaatgnngcgtcggcttggcgccgcctccttcgnnncgccgatctccaaggcgccgnngcgtcgtct

SEQ ID NO: 7400 - DNA, 350 bp, Zea mays
  Clone ID: LIB3137-012-Q1-K1-D4
aacagttgttccaaaaggactcgaagataattactcctgaagctctagctactgttaaggctgctattgcaaatagtgagaaagacaagaaggttgatgcaacaaaaaaggcagtgcctcgaaaggcagctgggcaaagttgggaggaccctaccttggctgattggcctgaaaatgatttccgtttgttctgcggtgatcttggaaatgaagtgaatgatgatgttcttgcaaaggcattctcaaaatatccatccttcaatatggccagggttatacgggacaagtggactggtaaaactaaaggatatggttttggtagttttgctgatgcgtctgatcttactttt

SEQ ID NO: 7401 - DNA, 403 bp, Zea mays
  Clone ID: LIB3137-012-Q1-K1-D6
cggacgcgtgggcggacgcgtgggcggacgcgtgggtgcgtgctcagcagtcagcacttccacctccatggggatggggctcccacttccaccccgtcgctgctgaactgaaccatcctagtaggtgtcggctccggctccgggctccctctccccctttcccttcccttccaccagccggactgccggactccgaaccgaaggagagtgacgacgcgccccgcgcacgcatcgcagtcgcatcagtaacaaacaaaggcggaagctgtaacaacgaccggaaaccaaacacctcgcgtatagaatccgctcgcctggtggggccacgtaggggcttgccgtgccggaaggacggcaatgccggaagcggcgcggggcctgctggatccggcggccgaggggg

SEQ ID NO: 7402 - DNA, 141 bp, Zea mays
  Clone ID: LIB3137-012-Q1-K1-D7
gtccagaagcgacgccgacgcagtctaggattacctgatctcatccgcagcgacagagcagggaggcagacccacccgagccagcaacccatggccgacgagacgccgcgaatactgctcgcgatcgcgggcctaacccta

SEQ ID NO: 7403 - DNA, 247 bp, Zea mays
  Clone ID: LIB3137-012-Q1-K1-D8
tcggaaccgattcaggttctaagcatgatcaagctgggctatgaaggtgttgtggcactggtgggtgacgatatatcactttcaatcggtcctgaccagattgaagctctgtatgagttggccaaattttagtacgagtgtcgtaactacttacgggctgttgatttcttttaccagtatggagcctttggcacaaaccgtgatcgatatttgaggcccctttgctgaatactgcgtaaacaaatgc

SEQ ID NO: 7404 - DNA, 357 bp, Zea mays
  Clone ID: LIB3137-012-Q1-K1-D9
cacaatggcaccagaaaggatgctcctcggcgtctgtgccgagctgatggtggtcggcgtcacgaacgcggcggagggccaggtggcttcggtcgtcgtgggcctggcgaggtgctgccgacagtactaggaagaacatgaaggctgaggccggtttcaagggtcttcacgtggcgatcaagtgcaagaacagcaacggcgagtactagacaaagggcgtgagtgagatccaaaggtacggagcccttaagagaccactaggcgtcgacctacacaggtgccactggcatccgcaactgcacaggagcggcaataactcgccttttcctgggcaggagccgatcatgatcggaccca

SEQ ID NO: 7405 - DNA, 220 bp, Zea mays
  unsure (1)..(220): unsure at all n locations; Clone ID: LIB3137-012-Q1-K1-E1
cgtctcggcacatccacttcgctcggctcctacagtncagaggacatagagggagggagcatagctgagcactcgagccagagggcatgtcagcttgcttatggagggcgccggtnaggtacggggagacgaatctctnctcgcgagcccttcgtgccctcgcgnngcgttggctccgcgcaaggcccattctgtggcccccgtggtcgaagtccaaggg

SEQ ID NO: 7406 - DNA, 323 bp, Zea mays
  unsure (1)..(323): unsure at all n locations; Clone ID: LIB3137-012-Q1-K1-E11
gaatggnaagggtcgactccacgcgatccgtaccaacttttgacacagtcgagcagcgcacgtctttttcgagatctgagaagaattgatgagcgagcgcgcgaaccaatcaaagaggaggccgtactacctctctttcaacctcgtcccgcgcgcctgtttgaacggagtggtaccatatcaaacagtacatttccgtgcacatcgagcaaggcgatgtccaggtcggcaacgcatgctgcgaactttactgtctagaacaccgattacatgctaatcatcaacgacagggacataagaccgctcacatcacaatgatgcct

SEQ ID NO: 7407 - DNA, 414 bp, Zea mays
  Clone ID: LIB3137-012-Q1-K1-E12
gaacaagcggtccttcaagtatgcttgggtgctcgacaagctcaaggctgagcgtgagaggggtatcaccattgatattgctctgtggaagtttgagaccaccaagtattactgcaccgccattgatgcccctggacaccgtgacttcatcaagaacatgatcactgctacctaccaggctgactgtgctgtccttatcattgactccaccactggtggatatgaggctggtatatacaaagatggccagacccgtgagcatgctcttcttgcgttcactcttggactgaaacaaatgatttgctgctgcaacaagatggatgcaaccactcccaaatactgcaaggcgcgttatgatgagattgtgaaggaagtctcatcctaccttaagaaagatgggtacaaccctgataa

SEQ ID NO: 7408 - DNA, 396 bp, Zea mays
  Clone ID: LIB3137-012-Q1-K1-E2
gcagaaaggagcagagagcgcacaccaaaaccaaaaccaaaaccaaaacggaatcattgggcacagcaacggagtcactccagtgcatcctataccgttcttccccggaccgcctttcgtgtacccctggagtccagcatggaacggcattcccgccatggcagcggcggtgtgcgcagccccagcgacagccgaagcagcgatttcatcagaacacggcaccgcgagcagcaccgtccagtggaacgtgccaccagcgatcgtgcccgtgctgccaccgggattctgcggcccgatcccagtcccggtaatcccgccgccttccgtctggccactgatcacttcctggcccaacgcaacatggagcgcgccgtggctcgggcctagcgctagcgt

SEQ ID NO: 7409 - DNA, 435 bp, Zea mays
  Clone ID: LIB3137-012-Q1-K1-E3
ggtgggttggcttctcctccccctccggttcgggttcgggttcgtgaggttctccggggttcggtttcgtgggtgagcggatcgagatggcggcgtcggatgttgagtaccgctgcttcgtcggcggcctcgcctgggccacggacgaccactccctccacaacgccttcagcacctacggcgaggtcctcgagtccaagattatcctccatcgggagacgcagaggtcccgcggcttcggcttcgtcaccttctccacggaggaggcgatgcggaacgccatcgagggcatgaacggcaaggagctggacggccgcaacatcaccgtcaacgaggcccagtcccgcggcggccgtggaggcggcggcggcggctaccgtggtggccgtggaggcggcggctaccgcggtggcgggcgccgtgatggcggcggcg

SEQ ID NO: 7410 - DNA, 393 bp, Zea mays
  Clone ID: LIB3137-012-Q1-K1-E4
cggacgcgtgggcgggtgcggtgcggctcacagtgcccccaccaaaccatccttgtgcgattcgccgccatcattgtgagcaagctcgagcgcgtctgccgccaccgcttccgttgcttagctctgtgctcccgccaagaaggcgaaggggagacggttggttgagttgagccagccaggcgtctgctctcggttgctttgctatggggatctgcgcgtcgtccaagcgcgtggagcaggaagaggacgagaacgtggtgtacgtggtggtggacgggcagggcggcggctgtggagggggatggggaggggacggccgtggcgcggcgggggagccgacggtggccggcttccttttctcgcagaagggcaagaaggggcccaaccaggacg

SEQ ID NO: 7411 - DNA, 440 bp, Zea mays
  Clone ID: LIB3137-012-Q1-K1-E5
tcggcgtcttcacaaacgccggcgcaaactcttgcccgagcccgacagatctctaattccccataccgtccaccgatcgaccttcacgccagtctcggtctcttccgaaggcgtcgcgcgcggttgtttgagaggagaggaggaagatgagggagtgcatctccgtccacatcgggcaagccggcatccaagtcggcaacgcgtgctgggaactttactgcctcgagcacggcatccagcctgatggccaagtgcctggagataagaccgcgggacatcacgatgatgccttcagcaccttcttcagccagactggtgctgggaagcacgttccccgtgcaatcttcgttgatctagaacccactgtgatcgatgaggtgcgcactggcacgtaccgccagctcttccaccctgagcagctcatcagtggcaaggaggat

SEQ ID NO: 7412 - DNA, 406 bp, Zea mays
  unsure (1)..(406): unsure at all n locations; Clone ID: LIB3137-012-Q1-K1-E6
caccaactcgtcgacggtagagagagcaagctcttcggcgatttgagaagaatcgaggagcgagcgagcgagcgagcgagagaggaggaggaggagctggggcttgagcctgcgcccgggggccccgggtcacggaatcctaccattaccaaccctagccttcgttgatcgccgtctcaggtcatggcagggccggcgccggatcgggccgccctgactgtggngccgggcatggacatgccaatcatgcacgacagcgaccggtacgagctcgtgcgcgatatcggctccggcaacttcggcgttgcccgcctcatgcgcgaccgccgcaccagcgaactcgtcgccgtcaagtacatcgagcgcggcgagaagatagatgagaatgtccagcgtgagataatta

SEQ ID NO: 7413 - DNA, 403 bp, Zea mays
  Clone ID: LIB3137-012-Q1-K1-E7
agccaacaaggcaacaacaaacacctccctccttcttcactttcctgccgatgttgcacgaagcaagctagggcacacaaaccgacaaggccgtctacgcgcgcgttggtcgttgtcgttgccgaccagcatgcatgcagcatggtcgtgaacaacaaggtggacagcttgtcttacgacgtctaggccacgccatcctttttcgacggcgacggctctgtgcaagggacaactccggcgtacccagcttcggcgcctgcaccagcaacccaagcgcccgtgtcgcgggaaggctgcgccgcgttggtgcttgagcttcacaaggtgtcgctgttcgagcggtggactacagcaaaggcgctgtggcagcgcctggacgatgtgttctttccggacgacccgt

SEQ ID NO: 7414 - DNA, 422 bp, Zea mays
  Clone ID: LIB3137-012-Q1-K1-E8
atcgagaacacgatcgagcacacaagcacgaagactcgtttaggagaaaccacaaaccaccaagccgtgaaagcatcatggagtacggtcagcaggggcagcacgggcacggcgccacgggccatgtcgaccagtacggcaacccagtcggcggcgtcgagcacggcaccggcggcatgaggcacggcacgggaaccggcggcatgggccaactgggtgagcaccgcggcgctggcatgggtggcgggcacttccagcctgcgagggaggagcacaagaccggcggcatcctgcatcgctccggcagctccagctccagctcgtcggaggacgacggcatgggcggaaggaggaagaagggaatcaaggagaacatcaaggagaagctgcccggaggccacaaggacgaccagcacgccacg

SEQ ID NO: 7415 - DNA, 417 bp, Zea mays
  Clone ID: LIB3137-012-Q1-K1-E9
gcccactcctctccggctcctcttcttctccaccacaccacaggcaccggcaccggcaccggcaccggcaccacctcctccctccctccgtcctgccaccgcgcggcaccccagccacagcacagcaatggcgggcaacggcgccatcgtggagagcgacccgctgaactggggcgcggcagcggctgaactggcggggagccacctggacgaagagaagcgcatggtggcgcatgccctgcagccggtggtgaagatcgaaggctacacgctccgcgtccgccaggtggcccgcgtcgcgtccggcagggacgcgtacggcgttgccgtcgagctcgaccaggaggccccgccccgcctcaaggccagcatccagtggatcctcgactggatcgcccaccggggcgacatctaccg

SEQ ID NO: 7416 - DNA, 376 bp, Zea mays
  Clone ID: LIB3137-012-Q1-K1-F1
cggacgcgtgggctgcagccgagcactatgagctccacaggcggcggctactatggcgccgggaattcttggccggaagtggtcgggctcatcctggaagaagccaagagggtgatcctgtgcgacaagcccgacgccgacatcgtcgtgctgcccgtctgcacgcctgtgaccatggatttccgcctcaaccgcgttcgcatcttcttcgacaccgtttcggatgcaccccacatcggctgagaatcaaatctataaaatgaataactcggacatgtcatgcgtgcatgtccttcgtcgaataatggatgtgtgtgcttcgttccaataaattgctagtaaaaataatggcattgtccgtttgcatgaataaaat

SEQ ID NO: 7417 - DNA, 456 bp, Zea mays
  Clone ID: LIB3137-012-Q1-K1-F10
tgcaaggaaaaatcaacttcgttactactgttacttgccatgaagcttatgctgaggactgtgatctatcagttgagcacctgtacacagtcatgttgacttgcgccagagcaaaaatttatgcacagtgcctctgctttcaagcgacattgttttcagttaacacctatacgtactatcaactcatagaaaaattaggcctcagctgtggtcattagtcaatatatcaacggttgtaacatgtagtacatgtctggtaaatatggcgacatagtaagtataaacagaagctgttcttataaacctgatatctttttgttcatcttgaacgcatcgcctattcttgacttcttgtaaaccaacagaaatctgttgccttttggcgcctcttattattatataaacagaagctgaaacccgggggtcgcgctggtgatcatcaggtcattcatacat

SEQ ID NO: 7418 - DNA, 349 bp, Zea mays
  Clone ID: LIB3137-012-Q1-K1-F11
gcatcgtacacatacagacaataaactctaatttgcaaaggtaacaaaaaaaaaaaagagtgctttcctccttggccttgatggtaggctagtagagaaaaccgcgcgcagcatctgtttacatgttgttgctcgtcctgtccgagcacctcctttccagatttatggtcggttctgccctaacccgccttgtccagtccttctctgttgttttcctctactggttttatgtcttcttagtaagccgccagtagttggactcaccttttcaagttatctaggcatgtcctatatatttaccacatataaaaattatactaaagcaatttcctatgaagtgcctttatat

SEQ ID NO: 7419 - DNA, 358 bp, Zea mays
  Clone ID: LIB3137-012-Q1-K1-F12
gaaggaaggccggcccgcgcatgcgttcgcaggcccaactacccaagcctcggttctcaaccacgcagaaacctcagacttcagggccgctgcctttctatccatcccttcctcgccgcggcggtcgcccgctatcacataaacaatggcgaacgctggggctctgcttcggctcagctacggtgacaacgccaccatcttcttcacccctgagggagatggccctaccactgtcactggacgtgtgtctggccttacgcttggcccacctgggttgcatgtgcatacacttactgacaccaccaatggctggctgagcactggaccacactaacattcttcctgcaaggcacctggg

SEQ ID NO: 7420 - DNA, 261 bp, Zea mays
  Clone ID: LIB3137-012-Q1-K1-F2
gttactgctcaaggcgctgccgcaccatgtaaataagcaagggacggtacattatatcccagctaggctttgttcgtttcatccctaatccatggggattgagggggattagagtggattgagggggattttgacttataggggatttaatccctctcaatccccatggatttgataaaaacgaacagggccctagtgtggccgaggaatgcggcctgctcatcacacgggagggtggcaggttcgaggtcagggcgggca

SEQ ID NO: 7421 - DNA, 281 bp, Zea mays
  Clone ID: LIB3137-012-Q1-K1-F3
tgcaattgcagtcaactcctgaaagttttcagattaatctgctgaggctgagggctgtgcagagccaattccaacaggtgatcgtgatcgccacaagcatgctcgtcctgcgccaagttctgatgagcgagaactcgagggccactcctctggaactggaaaatgccatctcagaactcgtcaaggctctcgcggacatactgcacagctcacccgattccggcacggaagagattgtgcaggcgatggtcaatgcatcagcctcagttggctcaccatca

SEQ ID NO: 7422 - DNA, 455 bp, Zea mays
  unsure (1)..(455): unsure at all n locations; Clone ID: LIB3137-012-Q1-K1-F4
tgcaaggaaaaatcaacttcgttactactgtaacttgccatgaagcttatgctgaggactgtaatctatcagttgagcacctctacacagtcatgttgacttgcgccagagcaaaaatttatgcacagtgcctctgctttcaagcgacattgttttcagttaacacctatacgtactatcaactcatagaaaaattaggcctcagctgtggtcattagtcaatatatcaacggttgtaacatgtagtacatgtctggtaaatatggcgacatagtaagtataaacagaagctgttcttataaacctgatatctttttgttcatcttgaacgcatcgcctattcttgacttcttgtaaaccaacagaaatctgttgccttttggcgcctcttattattatataaacagaagctgaaacccggnggtcgcgctggtgatcatcacgtcattcataca

SEQ ID NO: 7423 - DNA, 451 bp, Zea mays
  unsure (1)..(451): unsure at all n locations; Clone ID: LIB3137-012-Q1-K1-F5
attaaaaccaagtatccgttataaatggtctggtttataaatgctatctattttcccaaagaaaatatttttgggtgactacgctacagcttgatcctgctttgattagtagattcacttgctaagtttattctatgttcactctcattacgttatggtgagatgttgacataatgacatgtgaccacaattatggcagcacatattgtttcagttactaaagtaccaactgctgatacatagggatcttaaataggaaaaaacaattacacatggtttcttaggcatgtcatcaagttataaactnttccccaaaaaatgtttatgtacattancttgcaattgctaacctgttgtgcatttgattttgcaatcgtaaccatcgcgctatcaaatatacctccaatcaacaggatcgagctacgcaaattgctctacattctcacataca

SEQ ID NO: 7424 - DNA, 351 bp, Zea mays
  unsure (1)..(351): unsure at all n locations; Clone ID: LIB3137-012-Q1-K1-F6
atttgtacgtccacaaaaatattctgcagagaatttgagaacaaagattcaagatgtccatgccattctctgccaacgggtggcaatggcgaaagacaacgtccacatgttgtaagctatatgtaattgtaacttacgtacaaagagtcgtccctgtgctgtgcggtcagggaaaatagtctggtggttgcgctgttttactctacaagatgtcttatatgatgtacaagatacagacacttctgggtgtagtgaccttgttcccacctcaccttttaaagtttgtggcgctgagtcaatatggatctaagtcaattgattgaagaaacattttcgactaannnaaannna

SEQ ID NO: 7425 - DNA, 302 bp, Zea mays
  Clone ID: LIB3137-012-Q1-K1-F7
ccggaacggacagcccggctccgacccatcgcgttcctggacacggcgccggcagcccatcaccatgagctccacacgcggacattgatcatatcgacgctagagcatttgttcggccgcatagcgtaatccactcagcacttgaagaagcctagagggtgttcctgtgcaacaagcctgactccgacatttaacttgctgtccatccgcacgcctgtgaccaatacttaccgccccatcctctggcccatctatgccgacaccttatcacaagcaccccacatcggctgagaatcaaatct

SEQ ID NO: 7426 - DNA, 262 bp, Zea mays
  Clone ID: LIB3137-012-Q1-K1-F8
ggtactgctcaaggcgctgccgcaccatgtaaataaacaagggacggctcatgatatcccagcgaggctttgatcgtgtcatccctaatccatgaggattgatggggatgagagtggatcgagggagagagaacctgatggccaattcaatgcatctgaataatgatatattagatctagacaaacatgtccctacatactgcacagatacgccatgtcatcacacagaattggcagcatggcatgcataactagtgctacc

SEQ ID NO: 7427 - DNA, 264 bp, Zea mays
  Clone ID: LIB3137-012-Q1-K1-F9
ccggaccggaagcccggtcgaccacgcgtccgagacgatgaagctagagtttatattgcagaaactgtgctggcgcatggagtctattcacaggcacaactatgttgatagggacatcaaaccagataatcttttgttacatcgcagtgggcacctgaagctctctgacttcggtttgtgtaaacctttggacagcagttattatcttaatttggatgaaccagacaatatgtatggataagttaccacacctttgcctgatac

SEQ ID NO: 7428 - DNA, 264 bp, Zea mays
  Clone ID: LIB3137-012-Q1-K1-G1
cttagattgaaatcgcactgaggaagctcatactccactgaactgtgagactgttccgaaggggatattaaaaaacagtgccgaatctgaaaacatgaactggatactgcctaattctaacccctgtccaaagtgctaacggtcaatagagaaaaaccagagatgcatgcatatgacatgcacccatccttgtaaattcgaatttagctgtatatgaccgggtgcatggtcagatcacggagagagaacaggtggcttttatgc

SEQ ID NO: 7429 - DNA, 329 bp, Zea mays
  Clone ID: LIB3137-012-Q1-K1-G10
gccgcccggcagcgggcggggctcggacccgaccatcccgccgggcttcctgtcggagctcaaggcccggtgcgcgccgggggacttcaacacgcgcctggccctggaccgcggcagcgagaacgtcttcgacacctccatcctccgcaacatccgcaacggcttcgccgtcatcggcaccgacgccgcgctctacaacgacacggtcacggtcgacgtcgtcgactcctactccggcctgctcagcaacttcttcgggccctacttccggcaggacttcgcggacgccatggtccgcatgggcagcatcggcgtggtcaccggcagca

SEQ ID NO: 7430 - DNA, 417 bp, Zea mays
  Clone ID: LIB3137-012-Q1-K1-G11
cggacgcgtgggcggacgcgtgggcggacgcgtgggcggacgcgtgggctccactcttcttctgcggtcggatcccccggcgggtcggactgcggagcacgggctccggcgagccgctgacgagggcctgtgcggcgaccgagctcgtggcgggagaagatggacgaagcgagcacctccgcgtccggcgccgcgacgaggcgcggcttcgtgcctgcgagatcgggagttttctataggttcacccagcagaacctcccagcttggaagccagcaatgacacctggatgtataatagcaatgttcttgattatcggaataattttcatacctttcgggcttctttgtctccaaacttcaaatcatattgcagaaatcatctaccgctatgatgttgactgtgtgcctgatgcttac

SEQ ID NO: 7431 - DNA, 388 bp, Zea mays
  Clone ID: LIB3137-012-Q1-K1-G12
ccggaattgaagggccgacccagcgcgacccgggcgttgcccatcacttcttgaactcctccgctcgatcgaactgagagcggattcggcaggtgcattgtgaaattgaagagggtgggataagcatcgaaaagagcatgagcactgccagtggtacaaggcgtgcaccaagaagacagtcgcacgatgggtctgctgataaagtagtggtgatcatcgaagcaacctcctcggtggtggggagccgacgtggaccaccgacccctagtcctggcgcccaaaactcacccattgatgtggaggccatccaacattaagttcacgcactatctgcatggcgagtgcccccaccgaggagggacacgagaaaccaggaggaacctataac

SEQ ID NO: 7432 - DNA, 322 bp, Zea mays
  Clone ID: LIB3137-012-Q1-K1-G2
cttttgttggaattgcacagaggaagctcatctaccagtgaactgtgagactgtttggaaggggatattaaaaaacagtgcataatctgaaaacatgaactggatactggctaattctaagccctgaccaaagtgcaaacggccaatagagaaaaaccagggatgcatgcatatgacatgcacccctccttgtaaattcaaattttgctggttatgtctgggtgcatggtcagatcactgagagagaacaggtggctcttatgcttgcaatccttataaatcacctaaaaaaggaggaatttacgactagactgattccagg

SEQ ID NO: 7433 - DNA, 425 bp, Zea mays
  Clone ID: LIB3137-012-Q1-K1-G3
ggccgcccttttttttttttttttttttttttttttttttttttttttttttccaaccgagccgggatcctccctttgcgttttataacttacaaaaaacaagctcgtataataatattattacaatatagtacttagcaccggggaaatagagtcgaaaacaagagacaacccgaacggttgaagcatgatcctccgttcccgcctatgactacaagccgtccggggagaaaacaaaggctccaccgggatgccgtcgttttttgatcggacggccgaaacattcttgggcggggccggccctacacgcctgcactgcccttggtcaagccgggcgacgacgaggagatttgaagaagcgacagcggtgcggacggaagcgaggaaaatttgaaaaggtgatgacacggagccgagccgagcca

SEQ ID NO: 7434 - DNA, 412 bp, Zea mays
  Clone ID: LIB3137-012-Q1-K1-G4
attccgttgggcctcgcttccgatgcgccggagctcgcacgcgatgggagcgcaagggtttcggctgctgctgcttctgctgctcgcggcggcggcggcggaggcgcgcttcgttgtggagaagaacagccttatggtgacgtcgccgacttcgttgcggggacgacacgacagcgctatagggaacttcggaatcccacagtacggcgggagcatggcgggcgccgtcgtctaccctaaggacaacgccaaggcttgcgacgatttcgacggcaggcaccccttccgtgccaagcctggtgcgatgcccacgttcctcctcatcgaccggggtgagtgcttatttgcgaagagcgttggaatgcacaaaatgctggtgcctctgcagtacttgtaggtgatgacaaggatg

SEQ ID NO: 7435 - DNA, 381 bp, Zea mays
  Clone ID: LIB3137-012-Q1-K1-G5
ggctgaggaagtacgggagaggggactggaggaacatctcgcgcaagtacgtgacgacccggacgccgacgcatgtggccagccacgcgcagaagtacttcatccggctcagctccggcggcaaggacaagcggcggtccagcatccacgacattaccaccgtcaacctccccggcgacgccccgcgctcgtcgccgcccgcggtcaccacggccaccaccaacccctccgccggcgccctggtggtggacgtgaagcccttcgtgccgcacccctacggccacgtgaagctggagcccaagagctcgctcgtcgtggccggcctgggcttcaacgactcatcagtccacctactgatgcgctgcggacaagtgtgagtga

SEQ ID NO: 7436 - DNA, 332 bp, Zea mays
  Clone ID: LIB3137-012-Q1-K1-G6
ttttgtttaggacgtcgccacattccatcccatctctcagcgccctcgtctcccgatgtggatgggggaaggtacataatgcgctcgaccacattaattttgtcgttaagagtcaaaccatggtttgtgttcacaactgaaaccattggattttgtttttgacatcctcaaggaggaactaaccgagagcttgctgccgcaaagaacatttctcacatctgagatcgggagaagaaagcattgtcaaggagaatagccgatctgttgatgtgcttggccatgagactgcttttgcaaccttcatgggtaagattcccatcaacaagaaaaac

SEQ ID NO: 7437 - DNA, 454 bp, Zea mays
  Clone ID: LIB3137-012-Q1-K1-G7
cttttgttggaattgcactgaggaagctcatcgaccagtgaactgtgagactgtttctaagtggatattaaaaaacagtgcagaatctgaaaacatgaactggatactggctaattctaagccctgtccaaagtgcaaacggccaatagagaaaaaccagggatgcatgcatatgacatgcacccctccttgtaaattcgaattttgctggttatgtctgggtgcatggtcagatcacggagagagaacaggtggcttttatgcttgcaatcgttatgaatcagcaaagaaagaaggagtttacgacgagactgatgcaaggagggaaagagctaaaaactctcttgagagatatatgcattactatgagcgctgggcattcaatcagacatcgaggcagaaggcccaagcacatctgctaaaagcggaaaaggaccagattgcaaatttaact

SEQ ID NO: 7438 - DNA, 465 bp, Zea mays
  unsure (1)..(465): unsure at all n locations; Clone ID: LIB3137-012-Q1-K1-G8
aaaagggtcacctcttaacaccagggccgccgccattgctgnctccctttgttcgtttctgcggcacccctcgatctccgagcgtggttaantccacgccatcnngaccggcgaacgctcaccgtatncccaatctcgaataccctccgcgctcagcgtcatggaccggcttctccaaaaccgatcggcggtggtggccctaacgttccggcgggatcccaccccgcgggcgggagccaggcggcggcagggggaggcgcgacgcagcggacgcagtatccgtatgtgactggtacttcagtcattgccttgaaatacaaggatggtgtgatcatggcatgtgacactggagcctcctacggatcaactttgagatacaagagtgtggaacgcattaaggctgttggcaagcatagcatcattggagcaagcggagagttcagcgattttcaagagatcctgcgc

SEQ ID NO: 7439 - DNA, 430 bp, Zea mays
  Clone ID: LIB3137-012-Q1-K1-G9
gctgacagatttagaatcctatatgaggtttcttctggatggtggtccaagtgattcagttgatagccttctgaaccttgatggatcgcaggatgttggtagcgacatggacctctggagcttcgacgacatgcccatcgtcggcgatttcttttgaggattttgaagcttggtcataggagtatgtacatagggactaggggaataaagaccgggggagattgggaagcacctgcttggcaccttgggggtagcatttgctcgtgtctagctcagagatgcagaagttgcattctgaaactacttggttatcgacctggtccctattttagctatctctttatgagagccatttatgagactgaaccattttggtttcctttcttttcggtggtacaatatatggcttaacattatgatttatggatat

SEQ ID NO: 7440 - DNA, 473 bp, Zea mays
  Clone ID: LIB3137-012-Q1-K1-H1
cggacggaaggccgggccgaccacgcgtacggttgacatattaacaatcctatatgaggtttcttctggatggaggtccaagtgattgagtggatagccttctgaaccttgatggatcgcaagatgttggtagcgacatggacctctggagcttcgacgacatgcccatcgtcggagatttcttttgaagattttgaagcttggtcataggagtatggacatagggactaggggaataaagaccgggggagattgggaagcacctgcttggcaccttgggggtagcatttgctcgtgtctagctcagagatgcagaagttgcattctgaaactacttggttatcgacctgttccctattttagctatctctttatgagagccatttatgagactgaaccattttgttttcctttcttttcgttgttacaatatatggtttaacattatgatttatggatatgtgccaaatatg

SEQ ID NO: 7441 - DNA, 264 bp, Zea mays
  Clone ID: LIB3137-012-Q1-K1-H10
ccgttcgcctcttctcctccctcctgccgggtccctaataaagagcagcagcgcaagaggttggtagagcgagcgagaagaaggcaatggcggcggagagcttcctgttcacctcggagtccgtgaacgaggggcacccagacaagctgtgcgaccaggtgtcggacgcggtgctggacgcctgcctggctcaggaccccgacagcaaggtggcctgcgagacctgcaccaagacgaacatggtgatggttttcggcgagatca

SEQ ID NO: 7442 - DNA, 293 bp, Zea mays
  Clone ID: LIB3137-012-Q1-K1-H11
gaattaaaggaccgacccacgcgacccgtcacgcgttcgcccacgcttctggatccggttggtttactaatcaagaccacgaccgcgcgagggtggtgttgctagctataattaggctactgctatatagaacttgcttggcacctgggatacagaaacaatgtgctcctcataataattaacaagtaaacctatgcatacatgcatgagcaccgagcgattcagtatcctgactgcatggcggcctgccatatctgtaccgaaacatacatgacaaggagcgtcagctagat

SEQ ID NO: 7443 - DNA, 403 bp, Zea mays
  Clone ID: LIB3137-012-Q1-K1-H12
gctgagggacaagaggttgaggcagcagcttatgaaacgaaaaagagcaaccatgtcacgaggaagcttgagaagcgcaaggagggacgtacccttgacccacacattgaggagcaatttggcagtggacggttgctggcatgcatttcttcccgccctggacagtgtggccgagctgatgggtacatccttgagggtaaagagcttgagttctacatgaagaagctacagaggaagaagggcaagagcgctgtagcttagagcattctcatggattgtcttgcaccgaaatgtgtgtcctgatgagtacactttttttggttagtcgtctcaagttcaaagcgttatgccatgttttcagtcctgattaagacactgttttttaaaagcgattgagctcttt

SEQ ID NO: 7444 - DNA, 368 bp, Zea mays
  Clone ID: LIB3137-012-Q1-K1-H2
ctgagctggtctgtttagttggaaagccatctgtactgtacgtttttcgccgatcatggaggatgagaggaacacccagcagcaccagggcggtgagcaggcccaggaccaggagaacgaggtgaaggacaggggactcctggacagccttctcggcaggaacaagcacgacgaccaggagaagaagaaccagcatgaggaggaggagctcgcgaccggcatggagaacgtcacggtggctgagcccgaccacaaggaggagggacacgaagccgccgagaagaatgacagccttctagccaagctgcaccgcaccagctccagttccagctcgtcgagcgacgactaggaagaggaagtgatcgatg

SEQ ID NO: 7445 - DNA, 284 bp, Zea mays
  Clone ID: LIB3137-012-Q1-K1-H3
cgggcggcatcctacgtctcgtactgacccccgcaccgccaaaccctagtccacagcggcgaggcgaccttgcgacctccgttcctctgcgctccggctgagttgctgatttgggataatcatgttctctctgagtgaatgaacatgtctgggaatgatgataagccacatgctgctgcaaacagaataaaggcagccacgttatcagtgactaagggattgagcagggctcaagctgaatgggctgcgactgctgctacccgcaatgtgaatgcctatgggca

SEQ ID NO: 7446 - DNA, 402 bp, Zea mays
  Clone ID: LIB3137-012-Q1-K1-H4
cggttttgcccctcccttcttgaactcctccgctcgatcgaactcagttccgattcggcaggttcattgtgaagttgaggtgggtggtataagcatcgaagagagcatgagcactgccagtggtacaaggcgtgcaccaagaagacagtcgcaagatgggtctgctgataaagtagtggtgatcatcgaagcaacctccccggtggtggggagccgtcgtggaccaccgacccctgttcctggcgcccaaaactcacccattgatgtggaggccatcgaagatgaagttcaagcagtatcttcctcgcgagtgcccccaccgaggagggacaggagaaccaggagggaacctataacagtggttgacttggaggttgacgctagccaggaagggaacaaacg

SEQ ID NO: 7447 - DNA, 211 bp, Zea mays
  Clone ID: LIB3137-012-Q1-K1-H5
cccacgcgttcgcccacgcgtccggagcggattcggatactaactccgagcgccggccgcgcatggctgctgatgctgctactacttcgcctcctcctatataagatcgcattgcaatgggggatacagaaccactgtgctgctgacgatcatgaacatctatcctcatacatacatgcatacgcatggcgcgatgaggaatcctgcctga

SEQ ID NO: 7448 - DNA, 336 bp, Zea mays
  unsure (1)..(336): unsure at all n locations; Clone ID: LIB3137-012-Q1-K1-H6
ccggaattggaagggcccgagcccagcgcgatcccgcttatgcctagcgttcccgtgcagnctagtggaaatatagctttattttagtcagagccagcgagcggtcggagagagccatctccaagccttcgaatcgctatgcagccccgtcaagcgtgtacgctcgaccggcggtcgcaacccctcccgagctgtcatcatcttctgcagggtgaaccacatcgatttcgaggaggtcacggtggatctgttcaagtctcagcacctcacacccgaattcaaaaaaataaacccaatgggacaggtacctgcaatcgttgatggaagattcaaact

SEQ ID NO: 7449 - DNA, 358 bp, Zea mays
  Clone ID: LIB3137-012-Q1-K1-H7
tcggagacagatgtgcactccatgtagatgatagtccccggatgccgaggtagccgaagtcgaggtggtcgaagtttgagcatcaacggttggcggggtgacacaaaaatggacaacaacagcctcgtggacccttttgattctttccgtgaccggtcatcgaggatcctcgacaaggaagccggcgcagcgcatgcgtctgcgctcgctagaggggccgcaccggccttcgaccagtggaggcggcggtggatccggtcgggaaagctacgacagcgacggatccagccatgacgacggcggaatttgagtgcttgtgcctttgaatgggcatcatattgcttttttacatgaaacg

SEQ ID NO: 7450 - DNA, 451 bp, Zea mays
  Clone ID: LIB3137-012-Q1-K1-H8
ctgacctgatccgtcgactcggactgacatctgcaccgcccaaccctagtccacagcggcgaggcgaccttgcgacctccgttcctctgcgctccggctgagttgctgatttgggataatcatgttctgtctgagtgaatgaacatgtctgggaatgatgatcagccacatgctgctgcaaacagaataaaggcagccacgttatcagcgactaacggattgagcaaggctcaagctgaatgggctgcgactgctgctacccgcaatgtgaatgcctatgggcagaacgaagagggacgaagccgctggcaggagaggaagaaagccaaaagtcagatgtatctgatgagtacagaaaaagttgcgaagctcggcactgtgaagcaaaaaagcttagaaacttcttctgttggcgcatatacccaatgccagaagtgtttccagcatggtc

SEQ ID NO: 7451 - DNA, 233 bp, Zea mays
  Clone ID: LIB3137-012-Q1-K1-H9
gcacacaagacgacagttcttcactggcaatggaactggccgggttacgagaattggaggacctgtttcagattcagtcctggatctgattctccaagatgaatctgtacatatgcttgccttaaaatgggctcaacatttctgtgaagagtacaatccccgtaaatatagaggcactctcttttctacccctgcagttcatttaggctgatgcatctaccagatgtgtacca

SEQ ID NO: 7452 - DNA, 258 bp, Zea mays
  Clone ID: LIB3137-013-Q1-K1-A1
ctatgcgtggcggtgtatgccctgactgccctttcagggtacctcttgtttggcgaggataccgagtccgacgtgctcaccaacttcgacaaggatctcgggataagattcagctctctgctcaactacattgtcaggatagggtatgtcatccacctggtcctcgtcttcccagttgtccacttctcgctgaggcagacagtggaggcgctgatcttcggggagctggcagcccctagcaggaagagaacactcaca

SEQ ID NO: 7453 - DNA, 401 bp, Zea mays
  unsure (1)..(401): unsure at all n locations; Clone ID: LIB3137-013-Q1-K1-A11
gcaccggaacaagttccggtccaatttggaggccttttcaaggaggatgaccctgagttcacaaccttggacactgtcactgagctcactatcaaaccatcgtcgaaagaaaccattgagatccccgtcaccgagaactccgcgattgtatgggaactccgggtgctcggttgggaggtgagctacagcgccgagttcacccctgacaccgagggtgggtacactgtcattatacagaaaacaaggaaggtgcccgctaacgaggaaccaatcatgaagggaagcttcaaggtaggcgagcccggcaagcttgtgctaactgtgaacaaccctgcatccaagaagaagaagctcctttacagatcaaaggtcaagagcatcancgagtgagtgagtgagtg

SEQ ID NO: 7454 - DNA, 366 bp, Zea mays
  Clone ID: LIB3137-013-Q1-K1-A12
ttaagattggtctccggaaaggttctaaatcttttgaagaagcccgagcagcatgattcaccgaagagagtgggatgctgggtgatatatgggagactgtatcaaacagtgatcttgttttgctactgatatctgattctgctcaggctgataactacgagaaaattttctcgcacatgaaaccaaacagtattcttggtttgtcacatggatttctccttggacatttgcaatctctgggttttgatttccctaaaagcatcagtgtgattgctgtatgccccaagggaatgggcccatcagtcaaaagactttatgttcatggcaaagagatcaatggtgctggtatcaatgctagctttgctg

SEQ ID NO: 7455 - DNA, 334 bp, Zea mays
  Clone ID: LIB3137-013-Q1-K1-A2
ctagatcgcgagcggccgctcgtctagaacctataagctagccaagacaggaataataatggcggcgtcgacggtggcgagcctctctgtcccggtgacgacggcgaccttcgcggcggcggcggcggcgggcggcgccgacgtgctgatcgtcgtcccgaggagggcgggcgccgggcgcgtcgtctggttccccgcggcggcgcgccgcggcggcgggcggttggtcgccgtgcggtccagcgggccggccacgccgccggagatctccgacaaggtgtcggagagcatcaagcaggcggaggagacgtgcgcggacgaccagaagggcgac

SEQ ID NO: 7456 - DNA, 397 bp, Zea mays
  Clone ID: LIB3137-013-Q1-K1-A3
gagacagaggagcctatttgagtatatcgacaaagtcactgcctggatgaggagcatctcgggactaactccctcagagctgtggagttctacgccttcgtctcaaaacctttcctactgctatcactgaacatcgcaacacatactcctgtaattgcataaacgacgctgataaagtgccgagtgcttccttgcaccaagactattatcatccacacttgacaaacgctgattatatgtacagtctgtattactggcttatgtaatacttatgacataaccattctacttatctacatatacaaatcaccatcgggtaactagacaaatgaaactggtgcatcgatgtacatgaatccctaaaggctatatgactgtccacggaggctataaggag

SEQ ID NO: 7457 - DNA, 489 bp, Zea mays
  Clone ID: LIB3137-013-Q1-K1-A4
caaaatacgatgctgcggcgccttgtcggcggatccgccgccgtgcgttcgccgctgccggggccgttctgtcggctgcttcacaacggcggcggaggtggcgggtgtagctcgggggagccggagagcgtggcgtaccgcatgtctatgctgctgcgcccctctaccgtcagcaagaaggggctcacctggaactggtgcagcctcatcggtcgcctcgccgcaccggtgaggccgatcgacactagctttcttgaagtccccagggcgtacaccttcctctccgtcaccctctcgtcgcccgcgccctcttcgagctcgtccaacataaatgtgacattgcagctgactggtgagctggcaaatgttggcctaaagcatgtgaagcatgatgacctcgtttatgtatctggtcatcttggctcttatcatacagtcagtccacgtggtgaacggcacattgtatataagatttatgtcagagagctg

SEQ ID NO: 7458 - DNA, 337 bp, Zea mays
  Clone ID: LIB3137-013-Q1-K1-A5
gagacagtgcgtggccatggcctctcgcgacggcgccaccttccaagtgtaccgggccatgcccgcgccgacgccgatgtctctggcgtccgccgctccagccgcagccgccgccgacgccgcggcgccgaagaaggcgggcgcgggcgctggaaaggaccggcacagcaaggtgaacgggcgcgggcggcgcgtgcggatgccgatcgtgtgcgcggcgcgcgtgttccagctgacccgcgagctggggctcaagtcggacgggcagaccatcgagtggctgctccggcaggccgagccctcgatcctggcggccacggtgtccggcaccaccccc

SEQ ID NO: 7459 - DNA, 494 bp, Zea mays
  Clone ID: LIB3137-013-Q1-K1-A6
cgaccatccaccagcagctagcgtagcgagcgatggccaccgaactccagtcgccgctgctgcctccgccaccgccgccgccgcagcgacgactaagcccgcgggcagccgcgtgggcggcgctcgccgtctcggcgacggtcctgctcctccccttcctgatcggcagcaccaccagcagcagcagcacgagacaccctcggcctcgatcctccccaccatccaaccccgtggagctcaccctcctgaccgccgccagcgacaagggcgccggtgtgcctggacgggagccccccgggctaccacctgcagcgggggtccggccgccgggtccggcagctggctcatccatctcatgggggggcgggtggtgcgaccaccgtccgcagctggctctgaccgcaggacgacctacctcggctcgtccctcttcatgcagaaagtcatggacttcactggcattctcagcaacgacccggcgcagaatcctgatt

SEQ ID NO: 7460 - DNA, 292 bp, Zea mays
  Clone ID: LIB3137-013-Q1-K1-A8
cacacgtcaaagcggaaaacctcagaaaaccacaataaatcatcctcgtccaccactgcccccgctctgctgcaactccactcggcccggccgccctttccacccaccttgatcctctgatccgttggtgcttgaccgatccatggacacccatatcggatccgtgaacggggcggcgtcgaaccagacggttggctgcccggcgtcggcgccggggtgcccgatggcgtccacgccggcgcatcccgcggcgaccctgtcggcggggaagccgtcgctggggcgccacctc

SEQ ID NO: 7461 - DNA, 481 bp, Zea mays
  Clone ID: LIB3137-013-Q1-K1-B1
agcagagatatcttgctcaattgctgtcgaaactgctgcagatcggcaccctggagttgagcagtacgctatcaggtcattcgctgatgcattagatgctgttccactagccttggctgaaaacagtggtttgtcgccaattgataccttgaccgcggtaaaagctcagcaagttaaggagagcaacccccactgcggcatagactgcaacgatgtaggcaccaacgacatgaaagagcagaacgtctttgagaccctgattggcaagcagcagcagatcctgctggccactcaggtggtgaagatgatcctgaagatcgacgacgtcatctcaccgtccgagtactgatgaagcctgaaggaaggaggaaaaaaagagaggaacaggtggctatgctggatgagagtttagtaggcagcattgctgatgtgttgattggtttactccttgttcaagcgtgctccttgtatcttatgagct

SEQ ID NO: 7462 - DNA, 348 bp, Zea mays
  Clone ID: LIB3137-013-Q1-K1-B10
caaagcaatacaaggctggactcatcgtcctgtaagatgacatattcgaagtggatcatccaaaggacctgttcctctactgctactaccgagggatgatttacattgggctcaagaagtttcctaaagctttggagcttcttcacaatgctgttaccgccccaatgtcaacattgaacgcgattgctgtagaagcttacaagaagtatatcctactttcactcattgtgaatggacaggtcccatcatttcctaagtatacattcatatcagcccaaaggagtatgaaaaaccatgctcagatttatattgagctttttacaaactatagcaacggtcgctacaact

SEQ ID NO: 7463 - DNA, 442 bp, Zea mays
  Clone ID: LIB3137-013-Q1-K1-B11
atttccccgaaccaaatcactcccaccgtctccacagcaaccagcacacatttccctttggcggatcgaaggaaggaaggaaggaggagatgggtggcggcatggaggtgcacaaaaaccggtggatcgaagagtggaacgccggccgcgagaacctcgagttcaatttccgctggacccgccgcagcctcgccgtcgtcggcctcttcggcctcgctgtccccatcctcgtctacaagggcatcgtccgcgaattccatatgcaggacgaggatgcaggccggccatacaggaagttcctgtaagcggcgtccagggccgcatgagacgtcgatccctcgaccggggctgcgaggaggggagtttccattcagtttgtgtcggtattgttttagtctgaatctgatggagcagcttggaatgctgaactattgtgcctgat

SEQ ID NO: 7464 - DNA, 308 bp, Zea mays
  Clone ID: LIB3137-013-Q1-K1-B2
agcagagatatcttgctcaattgctgtcgaaactgctgcacatcggcaccctgcagttgaggagctctctatcaggtgagtctgctgatgcattacatgctgacccacttgcctcgtctgaaaacatggtgcttgacccaatcagatcctcgcatctcgtatccgctcaccatgctaaggagaaccacaccgactgctgcctagactgcaaccatgtatgcaccatcgacatcaaacagcataacgcctttgagaccctgattggcaagcaggacgagatcctgctgccacctcaagcggtgaatatg

SEQ ID NO: 7465 - DNA, 481 bp, Zea mays
  unsure (1)..(481): unsure at all n locations; Clone ID: LIB3137-013-Q1-K1-B3
atcagaatatgacctgggaggagaaggggacctgttcaaagctccagaagccatcatcgaggaaccgctgctcctgaactgtctgtctgattctgttcatttgttgttgtgtaggctgggcttgtgccaagcttgaatcctcttgtgaaggagtttctcaatgctgctgatgacaagcggaaggaagtcctctctaaaatagaagaggatgttgctaagctcagcggttctgcagccaactaagaagctacaagtgaatgccgaggagagcagcgatgacttggctaacccaccgaaggtagaagagaagcttggtgctgtccctcatggcctgtacaccgactctgaggttgcccagagggaacncgagtctatctctaggaagactctcaggagctcagccgagaagtnntgagtccaagctgacgtttccagactcatggacatcatcatcaactcactctacagcaacaaggatatc

SEQ ID NO: 7466 - DNA, 297 bp, Zea mays
  Clone ID: LIB3137-011-Q1-K1-B3
gcacagtcatccacactaacgaacgaactcttgctccgatcacgagctagctgaggtcgacgatggcggctgtgctgaacagcaggaagacgccgcaggtggtggccgtgctggtggtggtggcgctgctggcttcgtccgcgtcggcggcgatcacctgcgggcaggtggggtcgtcgctggcgccgtgcatcccgtacgcgacggggagggccagcgcgctccccgcgtcgtgctgcagcggcgtcaagagccttaacagcgcggcgcggaccagcgcggaccgccaggcggcgt

SEQ ID NO: 7467 - DNA, 489 bp, Zea mays
  unsure (1)..(489): unsure at all n locations; Clone ID: LIB3137-013-Q1-K1-B4
gatatattatgttccggtaagattttgtgggaacaacatgacatttcacttgttacataacttgttaatatttctagagtctatcttcaggaattttcttttacttcatctaatttatgagcaacgaccagagcttttgaagaagttattctacttttcctctttgttgcatgtattgtggaaccttttcatttgctactaattaggaagctctgctccttgattagatatgtctgcttttaaagctgcaaacccagatgctgtctttgaagattttattcggtggcattcacctggtgaatggttgagtgaggacaaaacagatggtaatgcaggctggcctcccaaaggaaagctttctcaccgtatgtcccaacatgggaatgtgtggcgcanaatctggaatgatgctctgccattgcctgtttctgaacagaagtctntgctttgaccctgtcgggaaggagaaaaggtgcttcattaccttga

SEQ ID NO: 7468 - DNA, 474 bp, Zea mays
  Clone ID: LIB3137-013-Q1-K1-B5
aatcaacaaatgttgaagtgattgttgataggatgattgaatacatgatcaacataactgatcatcattataagacagaaattgcatcacgttgtgttgaacttgcagagcaatttgcgcctagcaatcagtggttcatccagaccatgaacaaagtctttgagcatgccggagatcttgtcaacatcagagtggcgcacaatctgatgcggctaattgctgaaggctttggagaggaggatgaaggtgctgacagtcagctaagatcatcggctgtggattcatatctccgcattgtcggagagccaaagcttccttcttcgtttctgcagataatatgctgggttttgggggaatatggaacagcagatggaaaatattcagcttcttatattattgggaagttgctgtgatgtggcagaggcccacctcactgatgacactgtcaaggcatatgcgatctcagcaattctg

SEQ ID NO: 7469 - DNA, 488 bp, Zea mays
  Clone ID: LIB3137-013-Q1-K1-B6
gttcaccggtctcgcacactgttgtcggtaggcgctatcatcgccagcgactcgtttctcctccgctgcattggtcatgcttgtcgtggctagaccacaaaccttcctcaagcatgggcgtgacatcgccttagactagctccaacaggccagctatttggcaaggcaaagctaatttagcttgtcatgtagtactgttcgtgctccaatagcccagctatctagcccagccaaattacatgggaggagagagaaccggcaaattagctggcctagacacgccagccattcttcaaccgtcacgctcacctcgcgagggaatcggcgggcagcggctccacgaggatctgcgagggcgtggcttcatcgacgaccaggatggacatccagttcaactccgaaaagtggtcgctccctgtagcctcagccatgatggaacttgagaagtacaaccttaccagtgcatttactggatcaatgcataacat

SEQ ID NO: 7470 - DNA, 456 bp, Zea mays
  unsure (1)..(456): unsure at all n locations; Clone ID: LIB3137-013-Q1-K1-B7
ggttcttcgacgtggtggaccgcgccaaggcgtccctggaggcgcggtgccccggcgtggtgtcctgcgccgacatcctcgccttcgcggccagggacagcgtcgtgctcaccggcggcctcggctacaaggtgccgtccggacgccgtgacggccggatatccaatgccacgcaggccctgaacgagctgcccccgcccttcttcaacgccacccaactcgtcgacaacttcgcctccaagaacctcagcctcgaggacatggttgtcctctccggcgcacacaccantcggcgtctcgcactgcagcagcttcgccggaattaacaacacaggcgaccggctctacaacttcagtggctcatccgagggagcatttgcccgtaaacagcgtcggttctttcccacacacgacgttcatggacctatacgccggcagttcgacacaagtctacgt

SEQ ID NO: 7471 - DNA, 488 bp, Zea mays
  Clone ID: LIB3137-013-Q1-K1-B8
ccacctcctgctcccgcaccgcctccggctccgcctcgcctccgccgtcaccccatcccgggcgcggcccctcggcctcggcgcccgcccgccccgcccccacgccgcacccctcggctacggagttggtgcagggagaaggccgagtggtggactggaccacagagccatgtcaagttccacaaattcaacagtggccacggagttgtcggtgtctgagaatagcagggaaattgagccgctaccttttgtgaatgacaaacatggaggcgtcatcattgagatgaagagtccaatggatcctggagtgttttcagcttacttgaaagcagcgctggcaaaatggagggagcaggtgacccccccccccttaagcatcaatgttaccatttaccctatcatgccaagtaaatatcccaatatttaagtttggaactgtggacgatatacgcgaaagatccatcattccatgcaagcatctttatatg

SEQ ID NO: 7472 - DNA, 400 bp, Zea mays
  Clone ID: LIB3137-013-Q1-K1-B9
cccacgcgtccgggcacccgcacgaccacccgcctactgccggtcaccgggacctagcatgggcgtgcggcggcgggggaggggaaggtaggcgatgaggaaacgtgagcgggagaatccgtgcgggatctgcgggcactaccacaagtacgaggagggggaggtctgcggggtgtgcggccaccgctggaaaccgtcgtacggggagggcgccccgtcgaggcacgagtccgccttccccacagaggtgctcaaggactttctcttcctagggagctacgacaacgcctcacgctccgaggtcctcagaacgctcagtatctcccacatgcttaatactgtgcctgattgccacaatccgtacaagaattcattcacatatcacagtctttaacgggac

SEQ ID NO: 7473 - DNA, 402 bp, Zea mays
  unsure (1)..(402): unsure at all n locations; Clone ID: LIB3137-013-Q1-K1-C1
cgagaaggacgccggcttctaagagcaagggcgtcccttccggagggtatgcttcaagacctgccgaatccggcacgaagaagatagaacagaacagcgacgatgaaggtgattttagcagaaccaatgggtcactctatggtgaggcagcggagcatgcaagtactgcagaagagtcgtctcaggtgtactcgacaggagacatttcaagcagcgcagaaaggggcgaagctgggaccgaagaagaggctgaccaaaatcaatcttcagcgttgttttctgtatctgtggatgatgactcaatcgacaggaaacttgatgagtaccggtggtaaaataagtgcatgnncnaagttcgaaacctaaatcttcatcacttgcaaagtgttggctggacaaaac

SEQ ID NO: 7474 - DNA, 200 bp, Zea mays
  Clone ID: LIB3137-009-Q1-K1-B3
ggaacccccaacacaaaaaagcaaaagcatatcacataatggccggcggcgtgttctcggggctctctggcgcgcgcgggcccgttgcggctggcgtggacgcgggaggcagtcatgggccgcgaccgcctgagcgggtgaccgccgctccggtccactcgctatcccgactcgcgtcgagcgcctcagaacactattcg

SEQ ID NO: 7475 - DNA, 236 bp, Zea mays
  Clone ID: LIB3137-009-Q1-K1-B4
aagaaaagctgagaaagtcaagccatacagatataactctcaaggatgacattcgattgagggataaggctgaactgtataaaacgtacctgatgttctgcatcactggggagactactaatgtatcatttggaacagctatctctacaaagaaagatgattcaaacgttttaatgctaaaacaattgggtgacatacttgggttaactcgcaaagaagcttaacgatgtcacatt

SEQ ID NO: 7476 - DNA, 302 bp, Zea mays
  unsure (1)..(302): unsure at all n locations; Clone ID: LIB3137-009-Q1-K1-B5
ctgcaagctaaggagagtgtgatcaccaacagctagtgctagtcccccttccttgcatccatccatggcatgcgtcagcaccttccagagctgccccattgccagaagagcaaagatcaacacgagggccangggctgcagcagtagcgtggcgaaggggtcaccaccaccagccttccagttccagtgcagggcgtcgactttcgcggcggacaccagcctccggctcgagctggacgagaaccccgaggcgatcatctcgggtgcgtggcccgggaactgctccctgctcaactacgacg

SEQ ID NO: 7477 - DNA, 406 bp, Zea mays
  unsure (1)..(406): unsure at all n locations; Clone ID: LIB3137-009-Q1-K1-B6
gttgagattgaatatgctgacatgtcaaacgcattggttgccatcacgcctgatgctgcttccattccaactccaaagctcaagaatgtcaatcgtctgaggacagaacaccaagtttatgaactgccagattcacaccctcttctggaaagattcgaacagagaaaaccagatgatcccttgccatatcttctttccatatggaccccaagtgaaactgcacaatcgatcgatgcccccaagacattctgtgattcaagggagacgggtagactatggtgaaagtcaacatgctttagttgcaacaatatacgagaaatgcaagctcaaaaagtcaaaagaacacttttgataccatgccgaacagcaatgagaggaagcttnccacttaatgggacgtattttc

SEQ ID NO: 7478 - DNA, 414 bp, Zea mays
  Clone ID: LIB3137-009-Q1-K1-B7
gcaggccagctctgatgtcccctcccagaggggagagttagctagcgaccctgcaacggtagcgatgccctggagatcctcggggggggtgctggatccaggcgcgctgatgagggtgtggctcatgcggcgtgggtccgatggatgtcccttgtattaccacagcgtcgtgcgggctgggagcttactcccgcatggtggagacggtgtggcgggaggtgctcaaagcaacgctgactcctcctgcttacccgagagcagcccgaataatgtcaccacgtgaaagcgttcctctcggtacgtcaggtattcttcgtgtgttatcgacctttggtttccgtccttgctatgactcttctctatttttcttgcctcggtcagtttgcacgtgccgcataagtcggtaaaggacgt

SEQ ID NO: 7479 - DNA, 386 bp, Zea mays
  Clone ID: LIB3137-009-Q1-K1-B9
cggacgcgtgggctaaaccctaaacatggcgggtagagactactgacggttgccggtgcgcgccgcgcgacttctgaggccccgcccccgacccggcgtcgccggaactggctccactggcacccccatcactgggactgggagagtgggagttcagagccgcagacgctgaggcgccggatcaccggaaggccgggaaggaaggtgtggccgcaagacgcaagcaggatgcatggactcgactcaccatgtctgactcaccgggaggacgggaaggcatatattacagcaggcaaaggaaacctgaacgcaatggcagtgtatttacacctatagctgcaatgtattccagtggtcatgcactacctgttgcaaataagatccac

SEQ ID NO: 7480 - DNA, 344 bp, Zea mays
  Clone ID: LIB3137-009-Q1-K1-C1
gaccaccaacatcctgctggacgacaagctggtcgccaaggtttccgacttcgggctgtccaagacgggtcccaacaacgtcgacaacacccacgtgagcacggtcgtgaagggcagcttcgggtacctcgacccggagtacttccggcggcagcagctgacggaaaagtcggacgtctactcgttcggggtcgtgctgttggaggtcctgtgcgcgcagccccgcctgagcccctcgctccccaaggagcaagtgaacctggccgactgggcgctgcactgacaaaagaaaggcgtgctcgggcagatcattgacccgcacctgcaggggcaggtcttcccgc

SEQ ID NO: 7481 - DNA, 339 bp, Zea mays
  Clone ID: LIB3137-009-Q1-K1-C10
accgcctccgccgacgacaacagcgtatcgtacggtacctccgaaaagggtggggaaaagtagaatgaatccgaatggtcaacggagaaggtcgtgggggctaagtcccggtgaccgaggtttcaacggaggtcccggcggcccacgtggccgaggcgcccaaggcgaagaatgcgcccaaggagaagaaggcgcctaaggagaagaagccgtccgcggcgaagaagccggcggcgcaccctccctacgctgagatgattgtagaggcgatcgctgccctcaaggagaggaaggggtcgagctcggtggccatcagcaagtacgtcgaggggaagcacg

SEQ ID NO: 7482 - DNA, 357 bp, Zea mays
  unsure (1)..(357): unsure at all n locations; Clone ID: LIB3137-009-Q1-K1-C11
gctgccgccaacccgactggctcccccctcactcttctcccgccatgaactaccgcttacagaacctcctcggcgcgccgtaccgcggcggcgacgccgtgttcgcgggagactcacccgttctcctctccgctgttgggaatcgcgtggcctctactgacctcactgcctcctcgtctctcacgcttncgttcgagtcttcatacaacgtcacccgcctcgccactttccccttgggcgactttcttcttgcaggtgatgacaatggccgggcgctttaagccaaccttcgacggcgggccgtacttcaacgggttttctttaaaggcgcgccattaagcggtcggtttaaccccg

SEQ ID NO: 7483 - DNA, 214 bp, Zea mays
  Clone ID: LIB3137-009-Q1-K1-C12
aaccggtccaacactttcacgctcagcttcagcaatggctgcctacaccatggcgatctcctacacggcgatggccggcacccccatcaaggtgggttccttcggcgagggccgcatcaccatgcgcaagaccgtgggcaaacccaaggtggcggcgtgcggcaacccctggtacggccccgaccgcgtcaagtacctcggccccttatgcggc

SEQ ID NO: 7484 - DNA, 306 bp, Zea mays
  Clone ID: LIB3137-009-Q1-K1-C2
gccgcgccaccgccgccgacgccggcgacggcgccgcggccaccggcttcacggtactactactacgcctcccgcgtcaagccagccgtctcccgaccgccgccccagttgccgagatctaggcactactacacatccccgcggcggcagcaggtcgtccacttcaaccgccgccgcggcgggtcccggtggtaccacgaccagcggaagctcacggcggggggcttaatcaacggcggcggggcggtcgcgttctacttggggcctttggagaccggggcctacaccaaccggttccaccttggc

SEQ ID NO: 7485 - DNA, 86 bp, Zea mays
  Clone ID: LIB3137-009-Q1-K1-C4
gtccatccgtccgacagagcacatctcacgctgcgggtcgaacagggccgtccgtcaatcacgtttcaggccgacggcggcacgat

SEQ ID NO: 7486 - DNA, 183 bp, Zea mays
  Clone ID: LIB3137-009-Q1-K1-C5
ctccgatcctcgtcgccgacgcatccacccgaaccctcctccgcgacctcgccgtcgccgcagccttggccatgtcgatcttcgagtataatgggtccgccgtggtggcgatggtggggaagaactgtttcgcgatcgccagcgaccggcggctgggcgtgcagcttcagaccatcgcgacag

SEQ ID NO: 7487 - DNA, 269 bp, Zea mays
  Clone ID: LIB3137-009-Q1-K1-C6
gaagctcaaagcaagcagatctaagctccaggcagcgtcgcgacagagtgagtgagtagcacgacaacaacaatggcttccctgaaggccgcgaagcccagcggagttgcggcgcagggcaaggagccggcgcccaagctcagcgagacggcgacgaagccgtcagccgcgaagagcggcggcgttaagaaggctgagcagaagccccgggaaaccaaaaggaaagtgaagagcagcaaacaggcggcggcggccaaaaaagtgacgta

SEQ ID NO: 7488 - DNA, 382 bp, Zea mays
  Clone ID: LIB3137-009-Q1-K1-C7
ccctccgctccacttacctgctgctggtgagcaccgcaagcaccaactcgcgcccaccggtgcgctacaccagccgacgccatcatgtctaccgtcgccgccgcccccaccgtcgtgaaatcggctccggagctcgtcgcgccagtggggccaacacccggcggcaccctcccactggcctccatcgacaagaccgcggcggtgcgtgtgtcggtggatttcatccaagtttttcccccggccggaagaacaagcggggacaaagacgccggcgtggccgcgatgcgcgacggcttcgcgaaggcactggtgccgtactacccggtggccggccgcatcgcggacgccagccccggggagcccgtggtggagtgcaccgggc

SEQ ID NO: 7489 - DNA, 390 bp, Zea mays
  Clone ID: LIB3137-009-Q1-K1-C8
ccctccgctccacttacctgctgctggtgagcaccgcaagcaccaactcgcgcccaccggtgcgctacaccagccgacgccatcatgtctaccgtcgccgccgcccccaccgtcgtgaaatcggctccggagctcgtcgcgccagtggggccaacacccggcggcaccctcccactgtcctccatcgacaagaccgcggcggtgcgtgtgtcggtggatttcatccacgtttttcccccggccgtaagagcaagcggggacaaagacgccgccgtggccgcgatgcgcgacggcttcgcgaaagcactggtgccgtactacccggtggccggccgcatcgcggacgccagccccggggagcccgtggtggaatgcaccgggcaaggcgtc

SEQ ID NO: 7490 - DNA, 340 bp, Zea mays
  Clone ID: LIB3137-009-Q1-K1-C9
gaagaatgccgccgacgctgggcctgctcctcgcggcggcggcggcggtcctgctgctgctgctgccgccgccaccatcggcgggggcgcaggagacgtgctggtcggggccggcgccgcggcgcggggcgtggatgtccgtggccagcttcggggcgcgcggggacgggcagacgctcaacacgggcgcgttcgcgcgcgccgtggcgcgcatcgcgcgtcgccggggcgcgcggggcggcataataacaagcctagacaaaaactcctgcggggctcgtgatgcgctactacttagacatggtactggtggcggtctacccagtagccgccctcattg

SEQ ID NO: 7491 - DNA, 365 bp, Zea mays
  Clone ID: LIB3137-009-Q1-K1-D1
gtctaaagagaatgtaactgatacatctgtagctacctttagcatgtggagatgcaggaatcttggtgtatttgccatggagcgggagtggtgtgctgtgatcaaaatgctgttagatttcttatttattggccttgtcgatgtgggatcccgatctccagaagaggtggtgctttcagaaaatttggtgcatgctgctatacggaggaagtctgtttacatgggtagatttctggtgagatacagacctaactaaaacttctagggggctgcacaaacatacttatttatacctgattctttgggcccgtcaatgattacctcccttcatatatcaactgccactattgattcaaaagatgtgt

SEQ ID NO: 7492 - DNA, 249 bp, Zea mays
  Clone ID: LIB3137-009-Q1-K1-D10
cggacgcgtgggacaattcgtgcctgcctgccctgcctctcggccacctccctggtgctccccctcctacgccgcccccgtcctcggcccccacgcgctcgcgcggcgcacgaggcgacgaacccgacctcctcctccgcgcccgtccctgccaccggtcgccgatgagctcggagggctggggcgctgacctgagttttatggagagaggatgccagagctgcgaagcagtactcgccaagcatgcct

SEQ ID NO: 7493 - DNA, 344 bp, Zea mays
  Clone ID: LIB3137-009-Q1-K1-D11
acagccccccccccccccccccttctcgcgcctcctacctctctccagtcgggtgccacgccttgccgcgctttacctctgcggcgcactcccgttatcatataacccgcgcgccggctccggcgagattcgaccaaactccatggggctcgagatggtggaggtcatgtccgagactgttcctacggttgtgcctgcggcaaggaaggaaaacggggggggtatttaaccggttaagcggtacttctttggggccaaggacccccgccggggggcccgggggcttgaaaacggcggtgaacgggcgcttacggttaaaggaaactttgggggggacgggcttc

SEQ ID NO: 7494 - DNA, 287 bp, Zea mays
  Clone ID: LIB3137-009-Q1-K1-D12
aggacgcgtgggcctggaacgactcattggatcttttgggtcggccccttcattggcgctgccctggctgccatataccaccaggtgatcatcagagtcatatcgttcaagagcaggttttaagctgacgcggccgtgccgagacatgcctagcctaagaacgggcgtgttcctgagatgtcttattgtctgcgccacgcctagtttctgtgaacagtgctattatttacctcttcagggctgtctcttattgctgcgccgatctgttaaccgtaacaagaactctg

SEQ ID NO: 7495 - DNA, 327 bp, Zea mays
  Clone ID: LIB3137-009-Q1-K1-D2
gccctcacccacggtacggcttctcgatccaaggagcccggtcgacatccccagtggaaagaccttgacggcctcaccagtgctgtacatacaattactgtcagccgttgattactcctgcggattattgtcacaggccttgtgcgaatctgctgaacttgaacggcatggactctctcttggatgacaacgaaaacctgaaggcctcatatacatgactgactgcactcccataatggactgcgcttcatggcttactgcagacgaaccgtgcgacttcaacatatgtaggttcagaggagatcaacaaaacacgctaaaaccatg

SEQ ID NO: 7496 - DNA, 450 bp, Zea mays
  unsure (1)..(450): unsure at all n locations; Clone ID: LIB3137-009-Q1-K1-D3
ggaccggaangaccgacgcgaccgacccgaacaacatttactttgtcatggagtatttaaaatttagacagctctacaacaagatgtgcaagggtggcaagctcacagaggccgttgcacacaaatacttgcagcagctcattgatgctgcggattactgtcacaccccaggtgtgtatcacctgaacttgaagcctgagaaccttctgtttgatgacaatgaaaacctgaaggtctcaaattttatactgactgcactttcataattcaactcgcatcatggcttactccacaccacctttggcactccagcatatgtcgctcccaaagcgatcaagaaaaaaggctataatcgatcaaagtcaaacataattgcctgccctcttattctatttctactacttggtggatatcttccttttctgacccaaaacataatggaaatgtatt

SEQ ID NO: 7497 - DNA, 383 bp, Zea mays
  Clone ID: LIB3137-009-Q1-K1-D4
gtaattttatagctctcgcatccacttgaactacatcgtgattggttcacaatatccaaaaccttccgtgcggtgaattggcaggcttagtaaccgggaaccaggaacttggccacgttcctcgttccgggaacgttcgttccgttccgggaatgtgggaacaatctcgttccagtagtgttaaatcctagattttgtagcgtaccgcgtaccaacgttccgttcctcgatcccatcgatctgggaagggtaccacgttccccgtcctcgatcccatcgatctgggaacctggttactaaaggcaagaagaactttattattaccagcctgggttaagaccggtcaaggtatattggcaaatggggattttcatattcatttt

SEQ ID NO: 7498 - DNA, 294 bp, Zea mays
  Clone ID: LIB3137-009-Q1-K1-D5
ggaaagaacaatgttgctttcctttgtttcttcatgctacgaaagctggaagagtgtcttcgattgctaatagaaagcaatcgtattccggaagcagcattgatggcaagatcttatcttcccagcaaagtccctgagattgtagcattgtggaaaaaggatctacagaaggtaaactcaaaagcagcagagtcgctggctgatcctaatgagtacccaaacttatgtgaagactggcagattgctctcaacgtaaaagctgctcgtgcctataaaaagaatatctatccaccg

SEQ ID NO: 7499 - DNA, 324 bp, Zea mays
  Clone ID: LIB3137-009-Q1-K1-D7
ggttgcggggcaagcgaattggcgtcccagctgggttcttcggcttcccagatggatccgtcaggcagatggtgtaccagcagcacctcgacacgctcaggcgacatggagcggtggtgacagaggacctttcgattgcgaacctggatgtgatacagaacgccactgtgagtggggagctggcagctctagcagcagagttcaagatcgccctgaacgcatatctgtcgtccgatctgtcacgctcccccgtggcctccctggctgaactaatagtgttcaacaatgcgcatccggatgaagagatgctcaaacaagtcgggc

SEQ ID NO: 7500 - DNA, 348 bp, Zea mays
  Clone ID: LIB3137-009-Q1-K1-D8
cgcggaacaacatctactttgtcatggagtatgtgaaaggcggagagctctttgacaagattggcaagagtggcaagctcacagaggccgctgcacacaagtacttccagcagctcattggtgcggtggattactgccacagccgaggtgtgtatcaccgggacttgaagcctgagaaccttctgttggatgagaatgagaacctcaaggtctcagattttggactgagtgcactttcagaatccaaggggcaagatggcttactccacaccacctgtgggactccagcatatgtagctccagaagtgatcagcaagacaggctatgatggggcaaagtcaaacatct

SEQ ID NO: 7501 - DNA, 309 bp, Zea mays
  Clone ID: LIB3137-009-Q1-K1-D9
cgcacgcgtgcacggactcgtggacggactcttggacttgaatcgatggacgccaaagccggggtcggtggcgccgaccagcttccgcggatgcacaactacctgaatctactgcttttagcttaccagatctttggtgttgtttacggggacctgagcacattggcactctacgtgtataaaagtacgtgctatggaaagctcagacactaccgatacgaggagacagtgttcggcatactttagctcatcttgtggaccttcactctgattcctttgctaaagtatgtcaccatcctcttgagtgct

SEQ ID NO: 7502 - DNA, 236 bp, Zea mays
  Clone ID: LIB3137-009-Q1-K1-E1
cccaggccttcgacgcgtccttcgccgtcgaagagtccccagcagtgtagcacgatgcccttttctcggcccgccgttggtttcttagttagactggttggggtccggccaagctgctgtcctccttcccgtgcatttgcagctgtcagagctcacaagattcagcttgccaagaaaaaaaggcgattagatgaagtgtgcttagaacggtttcaacaatacagtagaacatacat

SEQ ID NO: 7503 - DNA, 404 bp, Zea mays
  Clone ID: LIB3137-009-Q1-K1-E10
ccgcgacatcgaggtggccaccatcgacgtcgccataggcaacacgtacctggccctcgcccgattcgacgaggccgtcttctcgtaccagaaagcgctgaccgtgctcaagtctgcacgcggcgacgaccaccctaccgtcgcgtccgtctacgtccgcctcgccgacctctaccaccgcacgggcaggctccgcgagtccaagtcctactgcgagaacgccctgcgcgtctacgccaagcccgcgcccggcgcttgccccgacgagatcggcggaaggttgatggagatcgctgccatctacgaggcgctcgacgacctcgacgaggcgctgaggcttctgcagagggcgctgaagctgctggaggacgcgccggggcagtggagcaccgtcgctgggatcg

SEQ ID NO: 7504 - DNA, 326 bp, Zea mays
  unsure (1)..(326): unsure at all n locations; Clone ID: LIB3137-009-Q1-K1-E11
ctccaagtcacacggaggcagccatcacagcctcgcccgactccgcttcctctgttctttgggcatggagctgatcacaaatgtcaccgagtacgagaagctcgcgaaggagaggctgccgaagatggtgtacgactactacgcctncggcgcagaacatcatgggacgctcaacgagaaccgggaagccttctccagaattctataatgggatagagtgttcccagcctacatcacgaagatgacggcctggttaataaaatcacgttaagccacgggtactgatcgacgtcttccggatcgacatggccacaaacattctgggc

SEQ ID NO: 7505 - DNA, 318 bp, Zea mays
  Clone ID: LIB3137-009-Q1-K1-E12
gttcaactaacacaaacgcatgcttcacaacatgcgcggagtcacgtacatctgcgcttaggggatggacatgatcacaaaggtgaccgagaacgagaagatcgacaacgagttggtgacgaagaaggtggacgagtactacgggttgggggcagaagatcagaggaagctcaacgagtactgcgaggtgttctgcagattcatataatgcaatatagtgaccctagactacatcgcgaacatgaagggctgcgtaataaacggagcttacgggaacgatattaagcgacgtgtcaacaatggacatgtgcacaaaga

SEQ ID NO: 7506 - DNA, 390 bp, Zea mays
  Clone ID: LIB3137-009-Q1-K1-E2
gccaacatcacgattttggctggtagaattccgaacttcattttcagcaaaatgtgtacaagcaagcagcattctgcctgaactttctatcgtgtactccaacaagaacatctcttttggaacaattgaccttgggcatttcccaaatgctgcagcaaagtttgggatatccatgtgggatcatctccccacttacatattgtttgacaaggtgactgaagtttctcggtttccaaaaatcacaagtgaatcaaaagtatttgtgccaaaagttactaagaaacttctttgccagcattttgatctcgacagacgattgattggatacctatccacctgatctgtcaccgatcccatatgccttaaaggatggggacattttcctttttt

SEQ ID NO: 7507 - DNA, 409 bp, Zea mays
  Clone ID: LIB3137-009-Q1-K1-E3
ctgcttccgacctcgtagcgaatcggaccggggggctagggttccggtgcgcctgtgcaatcggacgcgaggctaggctgggcatggagggaaccgctgcggcccggaagaggtcccggccggagacggcgaacggggctgccgccgccgggaagcgctccaaagacacggagtcatttcaaactggtctatcaagcaaatcgaagccttgcaccaagtttttcagtacgattgggtgcccgcttggcgagggatgtcattttctgcactttgtccctggtggttacccggcagttgcaaaaatgctgaatctaagtagctctgctgtatctgcgccatcaagaactcatgtggatcatgccgctcttaccggggcctctcatccaacttgtacgggcaagacacgcat

SEQ ID NO: 7508 - DNA, 367 bp, Zea mays
  Clone ID: LIB3137-009-Q1-K1-E4
ggaatatgcaccatcacaacaggttcccaagtcaaatgtcaagaaggatggccgtgaagggactgttacgaaagatcctgagtacttggagtttcttgagtttatttcaaagcctactgagcatctgcctagtgctgaaattcagcttgaaaggaaagaagccgaaagggcagctgctggaaaggaggcacctgttgtgacacctcttatgatgtatgtccggcagcaaaaggcagctaaaagtatggctcaaagacctggaagtaggcttaacagaaaagttgcaggtgttgtaactagcagttccagtcctaaaaagtcttttgagaagcgcacatcctccacgtatgttgtacgagacagtatt

SEQ ID NO: 7509 - DNA, 183 bp, Zea mays
  Clone ID: LIB3137-009-Q1-K1-E5
caccagccgtattgtcccgaccccgaccgatcctcgcctgctgcagccatggcgacctccgcggcgctctctaccgccgccaatcccacccagctctgccggtcccgcgcttcgctgggcaagccggtgaaagggcttggcctgagcatgggccgcgagcgcgcccaacggagcattgtgtgc

SEQ ID NO: 7510 - DNA, 369 bp, Zea mays
  Clone ID: LIB3137-009-Q1-K1-E7
aaaccatcctattcctcccaaggcaagaaaccaagaccatggctggcacggccaagacccgcgtcctcggcttcctccttgctcttgctcttgtggccacctcgacgccggctgcggccaccacgctgacgctccacaacctgtgtccgtaccccgtgtggccgctggtgagcccgaacaccgggttccccgccatctccgagaacacgggccgcctcgacggcggcgggcgcgggctggtctccttccgcttcccggacagcttctgggcgggccgcgtggtggcgcgcacgggatgcagctccgggcattcccggtgcgagacggggagcgcagcgccggcgacggtggtgcaactggtggtgcacg

SEQ ID NO: 7511 - DNA, 391 bp, Zea mays
  Clone ID: LIB3137-009-Q1-K1-E8
ctactactcaagtatccatccttattgagtacagtgttgatccatggactcggaaggagttgtagcagcaaaggtggcagatgagactactaaaccggcaatccaagaagacggcgccgagagcaaggccgggatgactgatctgctgatgctgaccgacaagtcgcagctgcaggcgctggcgatgctgctgcggaacaacgaggagctcatgatgagccaggcgatcaagtcggagacggagcgcattgagtacctcaagacggtgagcgactgctacacgcggacgatgaagctcctcgacgattccatggcggccaggaccacgtacgagcgttcgggcggaatgaggagcctcgtcgcccgggacatggacgactacgtcgtctac

SEQ ID NO: 7512 - DNA, 385 bp, Zea mays
  Clone ID: LIB3137-009-Q1-K1-E9
gctcgaaggattttgttccaaataaacaagttttgatggctgatgatgatgagaatgaggttgatcttgatgagttgtatgcagcaacagacaatgagaagaaagtgtcagaattggatctatacatgagtgagggcctagtgaaggctaatgaaagtgatgcaccatttaatgccttatcatggtggaagggtcaagtgacaaatttccctattctttctacccttgctcgtgatgtactatcaatgcaggtgtcaactgttgcttcagagtcggcatttagctctggtggacgcgtggttgatgcctttcgttcgaagcttaaacctgaaattattgaagccttggtttgtactaaggattggaagattgcttcagagaaaga

SEQ ID NO: 7513 - DNA, 325 bp, Zea mays
  Clone ID: LIB3137-009-Q1-K1-F1
tggacagtcattgcagccaactttctaaatgagtacgagaagcagtgttatgagtttaaagaagattgcaacacaaagaaaaagattattgtaaaaattaaaacaagtgctgaaaaatcacttggggtagaaaaagaagaccattttcggcccggacttttgggattacttcaaaatattggtcttattaaaaattcaaaagacttcacaaaattattttcccggtttaacctggaagacacattaaagtttaaggacctttgtgaacaccacaaaaatgtgcttaaaagatatggttatgactattattttggtcgccaagaaa

SEQ ID NO: 7514 - DNA, 274 bp, Zea mays
  Clone ID: LIB3137-009-Q1-K1-F10
agattactggtcccatgcacaaggatgctgcaaattgttgccggtaccttgctatggttttgtaccatgctggtgatacagccggtgcaattgtgcagcagcatagggaactcatcataaacgagagatgtcttggtcttgatcatccggacacagcccacagttatggtaacatggccttgttctatcatgggctcaatcaaactgaattggcacttgggcacatgtcccggacactgctgctgctaaagttggcgtcaagacctgatcattc

SEQ ID NO: 7515 - DNA, 280 bp, Zea mays
  Clone ID: LIB3137-009-Q1-K1-F11
gcatttcgtaactttgaacaagaagcaagactatctgctgtttgggactctgaccagaatgctacatctagttctggtgataatcttgcttctttataccgtccacctttttctttgatgttcaacggaccctttgacaaggcaaagttagaggcttcttccctggacaaatggctattaatcaatttgcagtcgacagcggaatttaactctcacatgcttaatcgaaacacttggggaaatgatgccggggctcaagtgattcggcaaattttatttt

SEQ ID NO: 7516 - DNA, 245 bp, Zea mays
  Clone ID: LIB3137-009-Q1-K1-F12
gcatttcgtaactttgaacaaaaaacaagacaatctgctgtttgggactctgagcagaatggtacatttagtgctggtgataatcttgcttctttataccgtacacctttttctttgatgttgaacggaccctttgacaaggcaaagttagaagcttcttccctggacaaaacggtattaatgaatatggagggcgacaagggaatttaagctgtcacatgcttaaatcgaaacacttggggaaa

SEQ ID NO: 7517 - DNA, 112 bp, Zea mays
  Clone ID: LIB3137-009-Q1-K1-F2
cttttgttgaagaggtgatggaacttgttgagttgaatcccttaagcggtgctgttgttggtctgcctggggtaaatggtttatcgactgaacaacgtaaaacgttgacaat

SEQ ID NO: 7518 - DNA, 296 bp, Zea mays
  Clone ID: LIB3137-009-Q1-K1-F4
atatttttatatttttagcgatcggacgcattaacagactttcatatatcgaaatttacgagtcacacgcgtatcacagctaagctgatctagatacataaagagaagaacttcaccttgacctactaataaagaccacataaacttgttcatgactcacctaacacaggactcacacagatcaaacaccacaccatacctgagattactgctacgataaaccaccctgaatcataatcaggtcgtctactaaggaatacctaaccaaaccaggtttttcaaaccctaattaaacc

SEQ ID NO: 7519 - DNA, 416 bp, Zea mays
  Clone ID: LIB3137-009-Q1-K1-F5
gtttcctggcggcgacggctggtcgagcggcgccgcccttggctaggtcttcgctgggtccttccccggcgacgagcgtccatctggggtcgactgaactgagcaagcagtaagaagagacactatgttgttcttctcctacttcaaagagctggtggggaaagaagtgacaggggaactcaaaaatgacttgggcaacccggggaaccttcacttgggtgaaccagaccttaacaataaacttgaaaacaaccgcgtaggcgaacaagacaaggattcccacattcttttaatggggaactgctttattaagggcttcggggggccggacctgcttcttccgcaagacggcggggacattgacattcttcacgaccccaccaagaaggaagcgcgccgaggcttattcttatggg

SEQ ID NO: 7520 - DNA, 388 bp, Zea mays
  Clone ID: LIB3137-009-Q1-K1-F6
tttaggctggttttgctggcgatgatgcaccaagggcggttttccctagcattgttggccgtcctcgccacactggtgtcatggtagggatgggacagaaggacgcatatgttggcgatgaggcacagtccaagagaagtattcttacgctcaagtacccgattgagcacggtattgggagcaactgggatgacatggaaaaaatctggcatcatactttctacaaccaactttcgggtggcccaaaagaacccccttgggtggttaaccaaggttctttggacccaaaaggccaccagggaaaaaataacccaattattgttggaaactttaaaggttcttgccttgattgtggcaatcaaagcggggttttaattttttgttaggg

SEQ ID NO: 7521 - DNA, 424 bp, Zea mays
  unsure (1)..(424): unsure at all n locations; Clone ID: LIB3137-009-Q1-K1-F8
ctggtgccattcgatttgatttggcgcggggtactttcctatggccgcctccatcgcggcctcgcccttctttccagggtcgccggcgccggccgctcctaagaacggccttggagagcgcccagagagcctggacgtccgcggcgttgcggcgaagccgggagcctcgtctaatgccgtgagggcgggcaagacgcgcgcccacgctgccgtccccaaggtgaacggtggcaagtctgcggtggcggatgtggaacacgagaccgtaactgtaccttcgtcggtgccgaggactttctacaaccagcttcccgactggagcatgctccttgctgccatcacgaccatcttcttggccgccgagaagcagtggacgatgctngattggaagcccangcggcctgacatgctcactgacactttt

SEQ ID NO: 7522 - DNA, 323 bp, Zea mays
  Clone ID: LIB3137-009-Q1-K1-F9
catggatgatctcatcgcgcggcagatccgcgtcacacgccaggagaacgcgctctgcgccggcgcctgcttcgaccgcgatgccgccaacgcgttccagctttacgtcgccgagtatctcgcgttcgccgtcaagcgggcgggcttcctatacggccgcatcgacgcagagaccaaggaggtcttggtcgacttcatctatgagccgccccagcagggcttcgaggacgtggtccatctcatgagggaccccgacgaggaagcccgcgtcgataccattgccgaagggcttgggatgcgccgggtcggcctcgtggtcacgc

SEQ ID NO: 7523 - DNA, 245 bp, Zea mays
  Clone ID: LIB3137-009-Q1-K1-G1
cggacgcgtgggtggatttcgtccgtggcgagtggctaccgcttcttctccttgtgtgacatctgaatctttgtggttcgaaggcgattgacttgggttcactgacgcggtgacgcccaatgagctcccacgtctccacatcgcggggtcttcatcccccaagcaagcttgggacgttggactcacccggtgcgtggcagccgccaacacctatggcttcacccgaaacaagccggggggatgac

SEQ ID NO: 7524 - DNA, 275 bp, Zea mays
  Clone ID: LIB3137-009-Q1-K1-G10
cccaggcacacacgacacgaaccaggcagctgcggagggaggaaccctagcggaacaggtgacggcggcgcgctaccggtgacgggggatacggcggcatcgtcccctcctccatccccggcgcggcggcgccagcagccggcctgcaagctgtttgaagagctcgccatttaatctcaatggaagccaagtttttccgtttcctgaagctcgttggggtcggcttcaaagcgaggtcagagagccaaagccgtgagttgttccttaaactgggc

SEQ ID NO: 7525 - DNA, 350 bp, Zea mays
  unsure (1)..(350): unsure at all n locations; Clone ID: LIB3137-009-Q1-K1-G11
ccgcaaccgcaagcaagcgaagcgcagagcctgcctgaccagagctagctgagtgcaacagccaacagcagctggtctgactgacatggcgaaggacatcgaggcatcggggcccgaggcgggcgagttctcggccaaggactacaccgaccctccgccggcgccgctggtcgacgcggaggagctcacccagtggtccctgtaccgcgcggtcatcgccgagttcatcgccacgctgctcttcctctacatcaccgtggccaccgtgatcgggtacaagcaccanacggacgcgtcggcgtcgggccccgacgcggcgtgcggcggcgtcggcatcctcggcatcgcgt

SEQ ID NO: 7526 - DNA, 142 bp, Zea mays
  unsure (1)..(142): unsure at all n locations; Clone ID: LIB3137-009-Q1-K1-G12
cccactcttcgcctactttctggagcagctagggttccgtcctcgatccgatgcgncgagtgcacaccacctttgcccactccgatcgaatcgatggccgccgagggcgagaaaaaaatgataaccctcaaaaagctccgat

SEQ ID NO: 7527 - DNA, 137 bp, Zea mays
  Clone ID: LIB3137-009-Q1-K1-G2
acgcgtgcgtgtaagactgtcctccatatccaaagccggggcgccgcccctggctgtgctgggctgtgcgccctacgaacgcgcgccaacaccagccctagcgccgcccgtagctctagcgacgacgccctgccgac

SEQ ID NO: 7528 - DNA, 413 bp, Zea mays
  Clone ID: LIB3137-009-Q1-K1-G3
gcgggaggacaaagatgaaacagaaaacgaagagacggaacgacaggaaagaagcaatggccaatgcaaaggacatgagtcaaccaaagctagtgaaaagatatggaatgagctcaccccacccgagagcatgaagaagctggtaatcaagaactacaaaggcgtaaagtttgcaaaatggataaaaggtcccaagctaggagactccttccccagccttgtgtttttggatcttgaaaactgcatgtcatgtactaaactgccttcacttggcctcctgagtcaactacagtccctgcaaatctcaaatgcagactcagtcatcaccatcggttcagaattccttgggaccactgtactttcatcagccactccattccccaagcttgaaggtttaaaagctagaaacatga

SEQ ID NO: 7529 - DNA, 250 bp, Zea mays
  Clone ID: LIB3137-009-Q1-K1-G4
gaactatacaagttcacaataccttttgatgaaagaaagggctccggtgtatagagagggcctcgcgctccgctcctccctgcacctcatccccttcccctgctccccctcacacgacgtgcggcggtgcgaggaccggccctggcaccagcgcccccggtgcctggagcagtgcagggaggaggagcgggagaagcggcaagagcggagcaggcatgaggccgacgatcgtagcggcgaaggctcatcg

SEQ ID NO: 7530 - DNA, 426 bp, Zea mays
  Clone ID: LIB3137-009-Q1-K1-G6
gaccgacgcgtccgcaagaaccataaggatgttcttattgtggtggatcataatgattatcctgctttactggagtgccttaaaggaaagcgagacgatcagcagttccccaggatgttggcatggaaagccatgcagcatgtcgcctcttatgattctgcagtatcagaatggttgtggaagcaatcaaataaaggagagatgttccccccaagctttactgtgccactggagctgaagtctacactccggtatggcgaaaatcctcatcagagtgctgcattctatgctgacaagagcctttctcttgtccgggctggtggtattgccactgctattcaacaccatggaaaggaaatgtcttacaacaactacttggatgcggatgctgcatggaactgtgtatcggacgttgatagtcctact

SEQ ID NO: 7531 - DNA, 247 bp, Zea mays
  Clone ID: LIB3137-009-Q1-K1-G7
atccacactaacgaacgaactcttgctccgatcacgagctagctgaggtcgacgatggcgggtgtgctgaacagcaggaagacgccgcacgtggtggccgtgctggtggtggtggcgctgctggcttcgtccgcgtcggcggccatcacctgcgggcaggtggggtcgtcgctggcgccgtgcatcccgtacgcgacggggagggccagcgcgctacccgcgtcgtgctgcagcggcgtcaagagcc

SEQ ID NO: 7532 - DNA, 446 bp, Zea mays
  Clone ID: LIB3137-009-Q1-K1-G8
cgatcaggccactgccggacccgccggagatccgctcagcccgcgctattccgatccgaagcacctcgtcggatctccagggatctgacggaggaccagcgcgtcggctgctgacccggcggggcacgcgcgcacgccagccatggcgcgtggtggcggatgcgggtgctgcccgccgatggatctgatgcgggcggaggcgatgcacctggtgcaggtcatcatacccgctgagtctgcacacctcacaatctactatgtcggcgacactggcctcctgcacttcaaagaccttaatgcaaaaaaaaacccggttcaacgtacatatgcttgccagatcaaaaaggtgtagggaaatggctcgtatattgaggtttttaaggagcagatgtcaaaagctgacataggtcctacacaattaaatgaaactcatctggaatttgatg

SEQ ID NO: 7533 - DNA, 299 bp, Zea mays
  unsure (1)..(299): unsure at all n locations; Clone ID: LIB3137-009-Q1-K1-H1
ctcgtctccacctcgtccctcacctctgacccaagccagggttccaccccacccccgcccctatccaatccgatggagggcggcgactcgtccggcgccggcgccggcggcgcgntggccgangnggtcaagtggcggagcgacgcgtcgcgggcgttccaatactacctggaccggtcgacgcctcacgccacggggcggtggttcggcacgctcgccgtcgtggacatataagagctgggggtttacatggagcagggcttatacatcgtcacgtacgggctcgagatctagcttat

SEQ ID NO: 7534 - DNA, 189 bp, Zea mays
  Clone ID: LIB3137-009-Q1-K1-H10
ctcttctccctcttgccggtccgctatatagagagcaactgcgcacgatgttgggggaaagcaagatatgagccatctgactgaacctttcttttaacctcggagaccaaaaacgaagggcaccccgacaagctgtgcgaccaggtgtcggacgcctagcttgacgcatgtctcgcgcatgaccccgac

SEQ ID NO: 7535 - DNA, 246 bp, Zea mays
  Clone ID: LIB3137-009-Q1-K1-H11
tcttggtgtgcgcgctcggtttccattccttttttccctcgcgcgcggccaacctagaaagcgacggcggagccggagagggaaggggaggagggacgaccggtcaagggcggacgatgtgctgcggcggcgacggggagtgccggccgctcgggtggctcctgggcctgcccttcgcgctgctcgccgtactcgtctctttcgtcggcgccgtcatctggatcatcgggctgcccatctcgtgca

SEQ ID NO: 7536 - DNA, 237 bp, Zea mays
  unsure (1)..(237): unsure at all n locations; Clone ID: LIB3137-009-Q1-K1-H12
accaatttttcctaagccttcngatagagggcagggtaggctttcgtttcgtccggaagaagcaagctaaaggaaggcgatcggatcggaggccatcgggaacggaacggaacggaaaaagccttaattcgagttatcggaggagtcgctagcaccacaacacagggccttcgattgcacgtattggggtgggaggatgttgcanaaaccatggaagggatgcatcttcttccttct

SEQ ID NO: 7537 - DNA, 275 bp, Zea mays
  Clone ID: LIB3137-009-Q1-K1-H2
gcgcagactttctgaagaaaaccttgttccctcttattacagaaactgtaagaaatgctattgctgtgcttcacgatcttggtgctttaacacaaggacgaacaactaacagaattagggaaaaaggtggggttcctggcagccaatcattcaccaccaaaatgcttctggttggtttattaatggactggcttgaatcaacattgacattggccttttcaaattattattaaaatacaattggtctttcaacaaccccttattagatggaaaag

SEQ ID NO: 7538 - DNA, 61 bp, Zea mays
  Clone ID: LIB3137-009-Q1-K1-H3
tcttcttcacacaagcgagctccttctgctcttgtgctaagtagctagctcacggcagaag

SEQ ID NO: 7539 - DNA, 362 bp, Zea mays
  Clone ID: LIB3137-009-Q1-K1-H4
gatgccttctagtaatcagacatcattatatgctactgtaggcactgagggcagtgctgaactgaagcaggatgtaagccattgtaatgacttcaatatcagagtcaatgacgaaagcttgaaccaggtgttaagaaatcagcatggtgatgctatcccattacctgacgaggtatggctggatgccaaggtggacaaggaaaggagttggtgtgtggaaccattaattgcaaactttgattgttgtactgacaacgttaatgaggatagcttgtgcactgatcacagattggctgatgcttcttcaagccccacaagtgatgcaccatccatgctgggcgaagaagaattttattctttta

SEQ ID NO: 7540 - DNA, 435 bp, Zea mays
  unsure (1)..(435): unsure at all n locations; Clone ID: LIB3137-009-Q1-K1-H5
accggccggaacgaccgacgcgtccgggacgcntnnncggacncntggggtacttcaaacggaacgggaaggaacggtgggtttcgcttggcggtgtcatcttgtgtgtcacaggcacggaaggcatgtttgctgacctangacacttcaacatccgggccgttcagatcagcttcaacggcatcttgttcccatcggtggtactgtgttacatcggccaagcggcgtacctgcggaaattcccggagaacgtcggagacaccttctacaaatccatcccagcacctctgttctggccaaccttcatcatcgcaatccttgctgccatcatcgcaagccaagcgatgctctctggcgcgttcgccatcctcttcaaagccttgtcgctgggctgccttcccaaggtgcaagtgatccacacctncaagaagtacg

SEQ ID NO: 7541 - DNA, 208 bp, Zea mays
  Clone ID: LIB3137-009-Q1-K1-H6
gagtccagatgcaagtccaggtttgtcggcgatgctgcgagcggcatgcgggcggctgctcgcgccggggctccgtcggctcggactgggcacatgcacctacggcaaagcagctcctgccatcgggaacggaacggtacggaagaaccctcagctcgaggtatgggacgagtcgctagcaccacaacacaaggccttcgattgcacg

SEQ ID NO: 7542 - DNA, 342 bp, Zea mays
  Clone ID: LIB3137-009-Q1-K1-H7
caagaagacactggataaacacgctttttccactttatacagaaacactagaaatgcgggggtggtgcttgatacgggtcctaagctagctcataacacaatcaaattaaggcgcggattaactccttctgaatgtgcaagtacaaagccttcacaggatgacttgcgtcagacaaaagaagaggaaatggatgatcactgctctcatgttccagttcggcatctgatattcatgcatcatggcattcaacagaagctggagaaaggtaatcgggttgatgatggtaatgatttcctgcgaataactgctgacctagctgaaacaacttaacttcttatcaa

SEQ ID NO: 7543 - DNA, 54 bp, Zea mays
  Clone ID: LIB3137-009-Q1-K1-H8
cccacgcgtccggttctagatcgcgagcggtcgcccggttaatatttactatct

SEQ ID NO: 7544 - DNA, 374 bp, Zea mays
  Clone ID: LIB3137-009-Q1-K1-H9
ggccggtcttctttggttttggtgagctgtaccgccacatctttcagcaccgagcaagagcggtgctttgctgagtccacctttgttgaggctaagctgagagtgtaggagtgaaggctcagtgctctctggaccgtcgaggatcgatcgggcggcggcgccgccgtcgtcgggcagaagcggtcgtcgccggacaaggcgcacaggtccaccatggacgccgtctaccaccaagagtcaccgttgacgagcaacggtgccgccaccgccggcgagaagctgggcgtggagcgattcgagctgacgctgatctacatctcgctctcgcggaaagagaaggaggacgatttccttgcgatgaaaggcaccaaagc

SEQ ID NO: 7545 - DNA, 408 bp, Zea mays
  Clone ID: LIB3137-010-Q1-K1-A1
caagtaccagctgattagagtgagcgccaagggcatgaacgagggctgcaagtgggtggaaatgtttgaggatgttagcatggtgatcttctctgtagcgctcagcgactacgaccagctcggagccccagcgagcggcagtagcaggacactcgtgaataagatgatccaaagcagggacctgtttgaggctacaataaggcagccgtgcttccgtgacacgccgttcctgcttttgctgaacaagtacgacgcgttcgaggagaatatcggccgtgccccgttgtcttcgtgcagagtggttcggcgacttctgcccgctgcggacgcaccacaacagccagtcgctggcgcagcaggcgttctactacgtggccatcaagttcagggacctgtacgcggcgagca

SEQ ID NO: 7546 - DNA, 391 bp, Zea mays
  Clone ID: LIB3137-010-Q1-K1-A10
ggcggaagccgcaaacccgtcaaatgcatgccctgctctagaacgtacattggtggtgcacatctcgacaccttgacgggccagcttgctcagcgtcgtgacatagtggaaatgtctgattctggtgaattgtgcaaaggacttgctgatgatgtcgaagttcctatgctttcaaaactacgccggcaactggttggtaaaggttctcaccgccgtttagtctattctgtggattttggtgcccatgaaggtgctatggttaatttccttgatcactacgatgcccatctggtgatatttgaaaaacttcctgatggagtgtttgccgacccatttgagctacagcattttgttgagcgcaaaagtttcgttgatgttgcttgttttggag

SEQ ID NO: 7547 - DNA, 397 bp, Zea mays
  Clone ID: LIB3137-010-Q1-K1-A11
ggcggaagccgcaaacccgtcaaatgcatgccctgctctagaacgtacattggtggtgcgacatctcgacaccttgacgggccagcttgctcagcgtcgtgacatagtggaaatgtctgattctggtgaattgtgcaaaggacttgctgatgatgtcgaagttcctatgctttcaaaactacgccggcaactggttggtaaaggttctcaccgccgtttagtctattctgtggattttggtgcccatgaaggtgctatggttaatttccttgatcactacgatgcccatctggtgatatttgaaaaacttcctgatggagtgtttgccgacccatttgagctacagcattttgttgagcgcaaagttttcgttgatgttgctgtttttggagacgcc

SEQ ID NO: 7548 - DNA, 422 bp, Zea mays
  Clone ID: LIB3137-010-Q1-K1-A12
gcccccttctccagcgtcaagcgccttctcatgggcgccacggggaggcacccggactgctccctactccgcgacctgtcccgcctccccttccccgctgccgtcggtggcggcgctgtcgtccacgccgaccacatcggccgccgcatcgcgctctcgccgacccacctcctctccatgctgctggcctacctcaagcagctcgcggaggccgacctcggcggcgcccccgtagccgactgcgtgatctccgtgccctgctacttcactcaagcgcagcgccgagcctacctcgacgccgccgccatcgcggggctcatgccgctccgcctcatgcacgacctcgccgccaccgcgcttggctacggcctctaccgctccgacctcggcggctccgggggtcccacctgtgtcgcgttcgt

SEQ ID NO: 7549 - DNA, 274 bp, Zea mays
  Clone ID: LIB3137-010-Q1-K1-A2
gccacgccccatgacgaccgcatcgcccgccacgtccgcctgcgcaagaaggtaagtgggaccactgagaggccgaggttgagtgttttccgctcaaacaaacatctgtacgctcaagtcatcgacgacacaaagcaatgtactctggcttcagcttcaaccatgcacaaatctctctccaaggaatttgaatactcggctgggccaacgatcgaaatagcacaaaagatcggtgaggtgattgccaagtcttgcttggagaaagggatcacca

SEQ ID NO: 7550 - DNA, 418 bp, Zea mays
  Clone ID: LIB3137-010-Q1-K1-A3
gccagtttgccactgcatcagcaaggcatatcctgctgggcagcaataatgcctcactgcgtcgtcggcatcgcggcggcgctgctccttctgcagcagctgatggcctcgtcgtcgtcctaccccagcagtgcggtccttgcagactccgtgctcggccggaaagctggcatcgtcgtcgacgaggcgtcggcgcgtgagagttcacccccgggggctgggactgggaggtacgccgtgatcttcgacgccggcagcacagggacccgtgtacacgtcttcaggttcgacaggaagctcgaactcctcgagatcggcgacgacggcatcgaggtgttcgccaaagtgaagcccgggctgagctcatacgctggacatccccaagaggctgcaaattccatgctgcctcttcttgaca

SEQ ID NO: 7551 - DNA, 340 bp, Zea mays
  Clone ID: LIB3137-010-Q1-K1-A4
cgtccggctggactcccatattcatgctacttcttgactcgcgtatcgaggatggaataaaaagcttttttcaggaggtccatgaactttacatcaagatattcctcaacccgctttacctgcccggctctcgcataacatcctctcatttctataccatggtgagggcgctcgcaaggaggtacctgtaatatgggcatatgctgaggtttcatcgtaaagcagacactccgatttttttgtgccatcatcatctgataacacatacgtctaattttccttggcgtaggctttgttatgaccgacctatggatcattttttttagagaacaaaatgact

SEQ ID NO: 7552 - DNA, 409 bp, Zea mays
  Clone ID: LIB3137-010-Q1-K1-A5
cggacgcgtgggcgcgccggtccgacagcttcgggcgtggccactgccgactccgcacgtcttcggtcgctctgggggccggttccggcgcctgagcgtcaccgaggccgaggaggccgcgcagacggcggcgcaggaggatccagaaaccgaagttactggagagagtgctgcagatgacagtgctggaagcacagacgaaactccatctattattgtgacaacactgcaatcatacagagtagctctgattaatgatgatgacgcaaaagctgctgagatagaatcctttttactttctatcgaggatgagaagaactctcttttgagcaaaatcactgctctagatgtggaactagcaactcaacgagaacgtatcttgcggattagtgctgattttgacaatttc

SEQ ID NO: 7553 - DNA, 411 bp, Zea mays
  Clone ID: LIB3137-010-Q1-K1-A6
ggaggatgtcgtcgtctccctcgccggctgccacccgcctggatctggggggcaacccgggcgctcccctcaccatctgcatgatcggcgccggcggcttcatcggctcccacctctgcgagaagctaatggccgagacgcaccacaccgtcctcgctgttgacgtctactgcgacaagatccgccaccttgtcgaccccgcgccgccgcacctcgccgggcgcatctgattccaccgacttaacataaaaaacgactccaggctagaggggctcatcaagatggccgatctgaccataaacctggccgggatctgcacgccggccgactacaacactcgcccacttgacaccatctacagcaacttcatcgacgcactcccaggggtcaagtactgctccgagaacagca

SEQ ID NO: 7554 - DNA, 408 bp, Zea mays
  Clone ID: LIB3137-010-Q1-K1-A7
actagataaaaagttcccctttccctgaattccccaacttccctcgccggagtctctggccgtctccaggccacagccaccgtgagatctgcccgattccgccggccggacccggggactgcctcccctcctggatccgttcgggcggccggccggcctagcttcaagtgcggggatggtgttctacttcaaggcgcggcccgaggccggcgactacaccatcttcatgggtcttgacaagtacgagaacgaggacctcatgaactacggcttccccgaggacatatggttccatgtagataagatgggctctgcacatgtgtatgtgagataagaataaaggccaatcaatggatgacatgaccgacggtttgctggaagactgagcgcagcttgtcaaagctaatt

SEQ ID NO: 7555 - DNA, 240 bp, Zea mays
  Clone ID: LIB3137-010-Q1-K1-A8
aaaaaaaaaaacaaaaatctatcacacactaaatatcaaaaaacaaaaacggtcgacatgggtggaacacaatcttaccttacggtcacccttgttgcccacattgcctgctgccgccttaaaagatcaaaaccttcttacccctccttaccatgggataatttttttttcggcgtcccaaccttccttttctttgcccccgtttcaaaatccccccccttcgaatacctttttattccc

SEQ ID NO: 7556 - DNA, 380 bp, Zea mays
  Clone ID: LIB3137-010-Q1-K1-A9
gctctctctcgcctctggttggcagagtctctcttgaagcctcgagactcgtctcgccggtgctccctcagctctgccgctgcgtgcctgcgttagctgttgcattgcagcgcatccccgcgagccttgagctgctagctcgcccttcaccacagtccccagacatggagttcgaagaccgctgccacaaggtccaggagcccaagttcgactgcctgctcttcgacctcgacgacaccctgtatccgctgagcgccgggatcgcaggccatgtcaagaagaacattgaagattacatggttgagaagctgggtattgacgagaccaagatcgagaacctgggtaatctgctgtacaagaactacggcaccactattgct

SEQ ID NO: 7557 - DNA, 422 bp, Zea mays
  Clone ID: LIB3137-010-Q1-K1-B1
acgcgtccgtttgctaccattgttcactttaggtactcccaaggagctcttacataattttcatgatagggggaggttggtatgtaagagaaattagctttgcctttcttatctatccgtccgcaagaccgcaacaccaccccattctccagcaacgagacaacaaatctcctcctcttgctctccgtatccgcataaggccatcaccttaaagggcagcggcggcggctgatgccacctccttcaccaccctctacatcgcgcgttcggcggagcaccggtccctctttgcctccaaggacgaacctttggcactcctcttcctccgtggcgcccacatcccctcgcaagccgtctccttctccgggggccttgcagcgtcttcatcttacagtcgcgcgcgctttgctacattcgccagc

SEQ ID NO: 7558 - DNA, 405 bp, Zea mays
  Clone ID: LIB3137-010-Q1-K1-B10
ccgcaccacagaaccagctggggctagcccgccgcgcagcgcatccacaaattaaacggagcccggccggggcatccattattcgttgcagtagtcgcagctgacggacgactgaaccaccgacagacaacatggccgcctccgcctccaccgtctccggcctcgccggcgcctccctggccagccgcccggcgttctccaccagcttcacgcggggcagccgggtgtcggcgaggaaccccctgatgagcaagaacctggagaggaatggcaggatcacctgcatgacgtttccccgggactggctgcggagggacctgagcgtcatcagcttcgggctcatcggctggatggggccgtccagcgttccggtcatcaacggtaacagcctcacggggctcttct

SEQ ID NO: 7559 - DNA, 390 bp, Zea mays
  Clone ID: LIB3137-010-Q1-K1-B11
cgcttcttgcagccgtcgccgcgaagcgctccagagaacttccgtcaacatggggaagacacgtggtatgggagccgggcgcaagctcaagacccaccgcaggaaccagcggtgggctgacaaggcatacaagaagagccatttgggcaatgagtggaagaaacccttcgctgggtcatcccatgccaagggcattgtcctggagaagattggtattgaggccaagcagcccaactccgctatccgtaagtgtgctcgtgttcagcttgttaagaatggcaagaagattgctgccttcgtgccaaatgacggttgtttgaactacattgaggaaaatgatgaggtcttgattgctggatttggtcgtaaggggcacgctgtgggagatat

SEQ ID NO: 7560 - DNA, 420 bp, Zea mays
  Clone ID: LIB3137-010-Q1-K1-B12
cctcgtcgcagtcccgccgttacatggcccgctctgttcccctttccggcgcccgcgacggactgcgacgagcggatagatagatctgtgccccgtccctgtctcgccatcctcctttctcctcctccactccctatcgactatcgagcagagcgaatccttagcggggaagtctttccgagctcagggagtggggtttaaaacgcggctcgacgaaaggaaggccgcactcgctgctgctgctggtcgcttgctttcggtggcgagcgtctcggtaaagcggcgtctgcgtcggaggcggcggcagagactggacttgcttgctccttgctgcgcagtgtagtgctgtgctaccttggagacaggatcctgccgcagggactcataattgatcagtgtgccccaacataagagcgaaac

SEQ ID NO: 7561 - DNA, 414 bp, Zea mays
  Clone ID: LIB3137-010-Q1-K1-B2
ctcccaagccagtaccgagtcctacgagcagtcgcacgcaagtgtcaagagacgaaacggtcgacatgggtcgcacgcaatctgccgtagcggtcgccgtggtggccgcggtgctgctgctggcagcggcggcgacgacctcggaggccgccatcacctgcgggcaggtgagctccgccatcgcgccctgcctctcctacgcccgcggcacggggtccgccccctccgcgtcctgctgtagcggcgtcaggaacctcaagagcgccgccagcaccgccgccgacaggcgcgccgcctgcaactgcctcaagaacgccgccaggggcgtcagcggcctcaacgccggcaacgccgccagcatcccctccaagtgcggcgtcagcatcccctacaccatcagcacctccaccgact

SEQ ID NO: 7562 - DNA, 420 bp, Zea mays
  Clone ID: LIB3137-010-Q1-K1-B3
gtggccagaatgtaactgcttctgatgttccattgaatatggaggatttagtcactgagaagcgtcatgaacttattgaagttgtttctgaagtagatgaccagcttgctgaagcttttctcaatgatgagccaataacagctaatcagcttaaggcggctattcgaagagctacagtggcacggaggttcataccagtatacatgggaagtgcattcaaaaataagggtgttcaaccacttcttgatggcgtgctggattatctaccgtgcccgttggaggtttataactacgcccttgatcaaaacaaatctgaagagaaggtattattagctggaactccagctgaaccacttgtggcattagcatttaagctagaggaaggtcgttttggtcagctgacctatctaagaatctatg

SEQ ID NO: 7563 - DNA, 416 bp, Zea mays
  unsure (1)..(416): unsure at all n locations; Clone ID: LIB3137-010-Q1-K1-B4
cccgaccaagaccatcaaggtgcccgagggcttcgactacgagctctacaaccgcaacgacatcaaccgcatcctcgggcccaaggcctcctgcatctccttcaaggactccgcctgccgctgcttcggctacatggtctccaagaagaagtacatctacaccatcgacgacgactgcttcgttgccaaggacccatctggcaaggatatcaatgctcttgagcagcacatcaagaacctcctcagcccatccaccccgttcttcttcaacaccctgtacgacccctaccgtgagggtgctgactttgtgcgtggataccccttcagcctcagggagggtgctcacaccgncgtctcccacggcctgtggctgaacatccctgactatgatgctcccacacagctggtcaagccca

SEQ ID NO: 7564 - DNA, 412 bp, Zea mays
  Clone ID: LIB3137-010-Q1-K1-B6
cgacccatcactctctgctcgcgcactctcacctgcccgcgccgtattcgaccgccggggagatgaacaaggagaggctcatgaagatggccggcgccgtccgcaccggcggcaagggcaccatgcgcaggaagaagaaggctgtacacaagacggtcaccacggacgacaagaggctgcagggcactctcaagagagtaggggtcaacaccatccctgcaatcgaggaggtgaacatattcaaggacgatctcgtcatccagttcttgaaccccaaagtgcaagcttccatcgcagcaaacacatgggtggtcagtggatctccacagacgaaaaagctacaggatgttctccctggtatcattaaccagcttggccctgacaacatggagcacctgaagaggattgccga

SEQ ID NO: 7565 - DNA, 338 bp, Zea mays
  Clone ID: LIB3137-010-Q1-K1-B7
gtagagagtacctgagtaacctgacaaaaaaacagccacctccatttagagaaaagtgtgctaaagcagatcctgattcactcaaacttttgcaaaaacttttggcatttgatcctaacgataggccaactgctctacaagcatttgctcatccgtattctaaaggccctccaggagtaacgagagaaccatcacgccatcctataacaaaaatgcagttccagtgtcagcgatacaaggctacccaacaggatgtcaaggtacttatatgccaggagatattgtagtatcatcctcaacttagcaaggcatacatgaattggacatgcaaaacaaac

SEQ ID NO: 7566 - DNA, 410 bp, Zea mays
  Clone ID: LIB3137-010-Q1-K1-B8
gttccatttccccatcttccacatccaattcgcgagttctccctcctctgcggccatggcgctctctgtggagaacacctcgtctggacgggagtacaaggtcaaggatctctggcaggcggactttggccgcctctagattgacctggccgaggtcgaaatgcccggcctcatggcgtgccgcgccgagttcggcccgtccaagcccttagacggcgctaggatctcggggtctctccacatgaccatccagaccgccgtcctcatcgagaccctcaccgcgctcggcgccgacgtccgctggtgctcctgcaacatcttctccacgcatgaccacgccgccgacatcataacacgcgactcgggcgccgcgttcgcctggaagggggagacccttgaagagtactggt

SEQ ID NO: 7567 - DNA, 430 bp, Zea mays
  Clone ID: LIB3137-010-Q1-K1-B9
cctgaacctggtgggcgacccggacctggtggcgagagaccccgtggtagccttcaaggcggccatctggttctggatgacgccgcagtcgcccaagccctcgtgccacgccgtgatgaccggcgactggaggccctccgccaccgaccgcgccgcggggaggctccccggatacggcctgaccacgaacatcatcaacggtggcctagagtgcggcgaggaccgctccaccgacggcgccaaagccgccaaggaccgggtcggctactacaagaggtactgcggtatgctccgagtggggtacggggacaacatggcatgcaggaaccagaagccttacggaggatgatgacactagtggctgatctatggttgctgcaatgcaagccttcacgtgtgtttgcctctctacctaaagaataaatcaagc

SEQ ID NO: 7568 - DNA, 413 bp, Zea mays
  unsure (1)..(413): unsure at all n locations; Clone ID: LIB3137-010-Q1-K1-C1
gaggaaatgaaaaaactacgaggtctaagattggaaacactgatggaaacctgccaagggacagaaagcggagatgtagcgatcaggtgtccaataccatgcaaaagcagcaggcggtatagggaacatgacttgagagctgcacaagatctttctgaattcattgtgagtaaggcttcacctccatactttatgggatctccaccacttcgtgcaaccaatcctcttgctcatgatgcacaattctgtgcgtggaaggtgcacagcgtagatcagtcactaggaattcctataccagccaagagttacaatgctcgctactatgcaaggaaagaatcttttangaaggcttgaagctactttttgtcaagttcatgatcgtcagtgatgtcatagtcgtatctccgcttctc

SEQ ID NO: 7569 - DNA, 389 bp, Zea mays
  Clone ID: LIB3137-010-Q1-K1-C10
cgcttcctttcgtcttccccttcgcccctttctctctctctctctctctctctctcgcgggttctcgcgtcgccgtcgccgctggtgcgagatggtcgagacgaggcggagcgccgccgcgaagcgcccggcggcgggggaagaggataagggggcgccggcatcgcctgcatcggctcccgcggagaacgcgggggcgggtccgagggcgggtgacgatgtcgcgtcgtcgcagcccccgaagcgagccaaggttgggtgcacggaggcggacaccgagaagccgttggtggcgccggcagaagtcggcaccgttgcgggcccactgcccaacacggttggtctgcaggcgctgaccggcgccatggacaagctggaggccctcttga

SEQ ID NO: 7570 - DNA, 360 bp, Zea mays
  Clone ID: LIB3137-010-Q1-K1-C11
cgcgtactcatgcaagtggccccttactttcacaaaaaatggtataggcttagaataggggacacttacgaacaacagtcactgtttcaatacatgcatatataacggactttgctttctctaagcctgcagaaggaggcatatatgacaataggaatggaatggattatcatattcatgcgattgatatcgcatgcacgggaacctccaatgcatattgtgcacattgcacaggtaatggttcctatcgcaaaggttggaggacttggtgatgaatgtacaaaccattgacgacctcttcacgatttacgccatatagatctacattttctgacaaaatatgatcgttgaatcctaatc

SEQ ID NO: 7571 - DNA, 229 bp, Zea mays
  Clone ID: LIB3137-010-Q1-K1-C12
cggacgcgtgggcggacgcacgggtgctttgataataattactgaacttgcaaaatcaggggaggaggagcatgacctcaaaacaagccatcaaggacgtgaaaaataacagaggtgcctctgcctgggccggaaaggagaagaccaaagacggcgtgcatgagaaggcgggcaaagctagggcacacataccctgccgagaatgcagtggctgtagacacgatgcacg

SEQ ID NO: 7572 - DNA, 352 bp, Zea mays
  Clone ID: LIB3137-010-Q1-K1-C2
agccaccatgccaccgcacgcaaccaaggtatcccgtcgccgcgcctgcagcagccacgggggcggcgctgtcgcgggccctggcggcggcgcgccctttcctgcgcggggaggaggcggaggtggacccggcgctgcctggcctcgccgccgtgctgcgcggcgcgggcgccggcgagtgctggcacaagcacggcacgttcctggcgcacctgctggacgtgcaccggatcctccgcctgtggggcgcgcccgacgccgtggcgcgctgcggcctctaccactccgcctactccaactcctacgtcaacctggccatcttccagcctgacaccgggcgcgcccacgtcgc

SEQ ID NO: 7573 - DNA, 348 bp, Zea mays
  Clone ID: LIB3137-010-Q1-K1-C3
cggacgcgtgggtgcgtcgtgagtgtttgtgtttcagagctgagagtctgagactgagagagatagaggtgatgatggctctgcaggcgcaggggacgcgggtgccgctggtcctggcgctcttcctcctcctggccggttgcggcagcgaggcgcagccgctggtgccggcgctgtttacgttcggtgactcgtcggtggacgtcgggaacaacgactacctccacaccatcatcaaggccaacttcccgccatacggcagggacttcgccaaccacgtcgccaccgggaggttctgcaatggcaagctggcgaccgacatcaccgccgacacgctggggttcacta

SEQ ID NO: 7574 - DNA, 308 bp, Zea mays
  Clone ID: LIB3137-010-Q1-K1-C4
cacgcgtcccgcctctggtttgcttgcctcccagatcttgccaactaattggaggcaggggagctgatgtgccatcccgcaacgcgccgtctcgacggcggatcgttttcttctgcttctactgcgtgatctttgggcaagaagataagacacgtccaagcgtcgccacagtcaatggcggcttgcttgcattcaagatggggaaggacagagaatctgccaagctgaacgaggagaaggggtccaaggatgagatccatatgaaggtcaagagcaagggcgagccgtacggcgaggaagaccgcaag

SEQ ID NO: 7575 - DNA, 409 bp, Zea mays
  Clone ID: LIB3137-010-Q1-K1-C5
ctagggtttttgattttagccgccgccgttgctcatctcacatccctcgagaagacgcctgctcctcgccgatcgatacgatggccgtcttctccgacctccacaccgccgacggcctcaagtccctcgaggctcacctcgccggcaaaacctatgtgtctggtgactccattactaaggatgacattaaggtcttcgccgcggtgccgtcgaagcctggcgctgagtttcctaatgccgcccgctggtacgagaccgtctctgcggctgtagcctcaagattccctggtaaggcctgtggtgtaaatctgcctgcgggatcagctcctgcggcagctgctcctgcggatgaggctgaggacgatgatgaccttgatctttttggtgatgaaactgaggaggacaagaa

SEQ ID NO: 7576 - DNA, 341 bp, Zea mays
  Clone ID: LIB3137-010-Q1-K1-C6
gtcacttctccactaacaaaaccgcatcgatctcgctgtcgtcactccgggtgacccaggcacgaacagaggcaccacccagcatggccctgcaggcggcgctcctcccatccaccctctcatccgttcccaagaagtgcaacctcgccgtcgcggcgaaagacacggcattccttagcgtatcccacaaaaaggtgcaggccgcgtccctgtcagcgagaacgcgcatggcgactacagcgcctgtggccactccggggtccatcacggaggccaacgattggaagaagaccgcgcggcatggcgtggcggagatcacagtcgcgtcatccttgttggga

SEQ ID NO: 7577 - DNA, 409 bp, Zea mays
  Clone ID: LIB3137-010-Q1-K1-C7
ctccaagtcacacggaggcagccatcacagcctcgcccgactccgcttggcctgttcggtgggcatggagctgatcacaaatgtcaccgagtacgagaagctcgcgaaggagaggctgccgaagatggtgtacgactactacgcctccggcgcagaagatcagtggacgctcaaggagaaccgggaggccttctccagaattctataatgggatagagtgttcccagcctacatcacgaagatgacggcctggttaataaaatcagtttaggccacgggtactgatcgacgtctcccgtatcgacatggccacaaacattctgggcttcagcatttccatgcctatcatgatcgctccttcagccatgcagaaaatggctcatcctgatggagagcttgccacggcaag

SEQ ID NO: 7578 - DNA, 89 bp, Zea mays
  Clone ID: LIB3137-010-Q1-K1-C8
gaagagataaccctcaaagctccgatggcgaggaattcgaggtggaagaggcggggcgatggattcgcataccatccgccacatgatcg

SEQ ID NO: 7579 - DNA, 399 bp, Zea mays
  Clone ID: LIB3137-010-Q1-K1-C9
gtgcattcttatgttttgcgcaactgacataccaagcaatgccgagagctagacgcaagaataataccattcctcaaagtagatctttactattatgccatgatatattcaaatcatcttctcaagaaagattgtgctaaacactttaaaggggtcaagagtcacgcatacggtgaagagatagaaaagagtttcacaaagctgcttgtagaagaactaaaacaaagagaagaggaggcaacacaggctcaacaagaggctgatgttaagttgctcgaggccaaaaagttagcttcacagtatcagaaggaggctgacaaatgcagctcaagcatggataacctatgaagaagctagggagaactcagcggaagcattggtccaacaaaagaaactgac

SEQ ID NO: 7580 - DNA, 387 bp, Zea mays
  Clone ID: LIB3137-010-Q1-K1-D1
cccagcgcgcgagatatctacatcgatcatcaccagcgagcgagccggccgagcagcaccgatggcggcgtacatgcgcgtgacgcaccgcgacgaggaaggcaagaaggtgacggagaagatgccggtcccggagacgcggcgcccggacacggccaagcacttcgagcgcaagctggaggagcagggcctccaccgcttcgagcggcacccggcgaacgcgccccggggcgtgggcatcggcgccccgccgcccaagtccgggcgcggcggcaagtacacctgggagggccccggcagcgtcgtcgaggaccagctcgacccggcgccgcccgccatcgaccccaacgaccccaactacaaagaggcggaagatggaggggcggc

SEQ ID NO: 7581 - DNA, 406 bp, Zea mays
  Clone ID: LIB3137-010-Q1-K1-D10
ccgccggcctctgctcctcttccgccgtcgcaggatctcgtatcgccggagaccatgtaccgcgccgccgggagccacctccgctccctcaagcatcatggtgcttctaggcttgccagtacaagtgttgcgaagcagtcctcaggtggtctgttcagctggcttcttggtggaaaatcaagcgaactccctccccttgatgttccactcccaggcattagcattccctcacctctaccagattttgtagagccatctaagacaaaagtcactactcttccaaatggcgtcaagatcgcctcggagacatcatcgagcccagcagcatctgtgggtctgtacattgactgtggttccatttacgaaacacctgcttcatcttgagtatcacatctgttggagagaa

SEQ ID NO: 7582 - DNA, 424 bp, Zea mays
  unsure (1)..(424): unsure at all n locations; Clone ID: LIB3137-010-Q1-K1-D11
agatgaagggggactaccaccgctacctcgccgagttcaagaccggcgccgagcgcaaggacgccgcggactccacgctcgccgcctaccaggccgcgcaggacatcgccgtcaaggagctgccgcccacgcatcccatcaggctcggcctcgccctcaacttctccgtcttctactacgagatcctcagctcgccggaccgcgcctgctcgctggccaagcaggccttcgacgaagctatttcagagctggatagtcttggggaagagtcgtacaaggatagcaccctcatcatgcagcttcttcgtgacaacctcaccttgtggacttcagacatgcaggaggatggtggcgatgaaatgcgggatgcaaacaagcctgacgaggagcagtagtagccaaacatctncatcgatcatgccat

SEQ ID NO: 7583 - DNA, 360 bp, Zea mays
  Clone ID: LIB3137-010-Q1-K1-D12
ggaagcgaagcggaagagaccgagagggagaagcgtttctcctgggttgttcgggtgagccgctagcgagagcgagacggagcgaggctttgccgctgcagagcagagcgacatgagctaccggcttggaggcgcggcggaccgcgaggagggggacgaggagctgttcgagacggcgccgtccgtctccggcggcgagggctcgtgcgaccaggagcgccgcgcgttcgtgccgccgctgcggaggatgaactcggacagcatctacgacatggcgtccatggtgtcgcagcagctcccagccaagaaagggctatcgcggtactacgagggcaagtcgcagtcgttcgcgtgcatgtc

SEQ ID NO: 7584 - DNA, 386 bp, Zea mays
  Clone ID: LIB3137-010-Q1-K1-D3
agttagaagaagcaccagtgcctgatcgatggcggcccaggctctcctctccggccgggagctgctgggccgccccgtgcagtcggccgtctctaggtcgtcggcgaggaaggcgcccttcgtcgtcagggccagctccagccctccagccaagcaaggtgccgacaggcagctgtggttcgcgtccaagcagtccctctcctacctcgatggcacgctgcccggcgactatggcttcgacccgctgggcctctcggacccggagggcaccgggggcttcatcgagcccaagtggctggcctacggcgaggtgatcaacggccgctacgccatgctgggcgcggtgggcgccatcgccccggagatcttcggcaagatgggcatca

SEQ ID NO: 7585 - DNA, 390 bp, Zea mays
  Clone ID: LIB3137-010-Q1-K1-D4
cgctctacaggcctaaacctcacctcgccggcggccaaaaatcgaagcaccgaaccagcggctgctgcaggggcggcggcgcggcaagggttgaccatggcggagctaaagcggttgtcggagagccgtgacctgacgcggattgagcgcatcggtgcgcactcccacatacgggggctagggttggactcgtccatggaggcgcgcgatacctcggagggcatggtcgtgcagcttcacgcgcgccgcgcctcggggctcatactccagctcatccgccagggcaagattgccggccgcgctgtgctccttgcgggccatcccggcaccggctagaccgcgctcgccatgggtatcgccaagtcgcttggtgcggagacacccttcgcc

SEQ ID NO: 7586 - DNA, 209 bp, Zea mays
  Clone ID: LIB3137-010-Q1-K1-D5
cgcacccaacccaatgaaccacttccatggactcgagcggtacgacgcgggggttcgtggtgggtgccatgatgaccgccgctctttggtttcttctcaagatcaaacaggcatgctgaaaacatgaagatgaccgcgtatacacggatgacgccatggaacacaaggctgcccatcataaagaagacgctgcatatgattacgaccaa

SEQ ID NO: 7587 - DNA, 129 bp, Zea mays
  unsure (1)..(129): unsure at all n locations; Clone ID: LIB3137-010-Q1-K1-D6
ancaattctccagattaaaagcacatcgttacatgccggaaatcacgggagcgcagatggatcttccactcctgcgaaccattcaggggctatatacaactatgtataagcgcgcatccatataaatac

SEQ ID NO: 7588 - DNA, 202 bp, Zea mays
  Clone ID: LIB3137-010-Q1-K1-D7
aactgttgctgtcacacgtcgcctttcgcggccgaacactatgatctcgagaggcggcggcgaccaatgcactaacaagtcttcgtcccaaccggtccggctgactcttgacgacgccaggatggtgatactatcccacaagcccgacgccgacacaggaacgctgggagtaccatccccagatacaatggcttcgagcccc

SEQ ID NO: 7589 - DNA, 367 bp, Zea mays
  Clone ID: LIB3137-010-Q1-K1-D8
cttattcgcagcgtcttagatccatcttcagatgaattccttgctcgcgctctggctgggagtgacggcatcatcccagtcccctcccgcctctggccagtttgatcacgcccccggctacggtgcaccgcacaccggccggtgaccctacatcacttgctaatctttcttgagggcacatggccgcttcttttgcaaatgtcaacgccgatgcagggctgaaaaagcttgatgagtaccttctcactcgcgagctacatgaatggctacgaagcttccaacgatgacctggctgactactcttcatttatggatgatccgtcatccaagtatatcaatgcagcaagggggattaatcacattgatg

SEQ ID NO: 7590 - DNA, 153 bp, Zea mays
  Clone ID: LIB3137-010-Q1-K1-E1
actggttacatacaacacttccattttcccgagctcgcattcaatcagggcccaattgaggtaataatataacaacaatggtggttcccgtcatcaacttttccaagctgaacggcgctaaaagggcaaaaaccctggcgcaaatcgccaatg

SEQ ID NO: 7591 - DNA, 414 bp, Zea mays
  Clone ID: LIB3137-010-Q1-K1-E10
gtggaacacagcatacttacatattacttgttcccttcagaaatgaaaatgggatacggaagaaatggatatcaagatttgatgtgtggccatatctggaaacatttgctgaggatgctgctggtgaaattgctgctgaattacaaggtacttcagacttcataattggaaactacagtgatggaaatcttgtggcatcgttgctatcttacaagatgggaattacccagtgcaacattgctcatgctctggaaaagactaaatatccagattcagacatattttggaagaacttcgatgagaagtaccatttctcctgtcagttcactgctgatataattgctatgaacaatgctgattttatcatcaccagcacataccaagaaattgcctgtagcaaaaatactgttggac

SEQ ID NO: 7592 - DNA, 415 bp, Zea mays
  Clone ID: LIB3137-010-Q1-K1-E11
cacacctacagaattcttgttgcttaaatacatgtttgacccatcattggagacggatcctgattttgacttggatattagagatgatgtccaagatgaatgttccaagtttggtgcagtgaagcatatttttgttgacaaaaatactgcaggcttcgtgtatctgcagttcgatagtgtaactgcagcagggaaggcccaacaagcacttcatggaagatggttcgccggaaagatgattacagcgacatttatgtccgatcaggaatacagtactaagttcccaaacttgtgagcatatgcggggaagagttggtcagacccgcatagttcgttcggagagtttgctagtgctgtatcgttggatggtagactagacgaacaccttattgattgtatgacaggatagtttcag

SEQ ID NO: 7593 - DNA, 365 bp, Zea mays
  Clone ID: LIB3137-010-Q1-K1-E12
gttgggagtaggttgcagcaatattctttgtgttgcgcgtactggtactgggaagggctagaaaatggtaaggacaaatctactcacttggaacgaggaagagaccacaaaagcagaaaggatcccagagatatgcctgtggagggttcaagaaaggaaaagaatagagatgcaacaagggagggcgccaagaaagaaaaaccaagacatataccaagggaatattccagaaaggaggacatgagatatgcaccaaaggaggtacccaaggacaactctagagataggtcaaacactgatgcaaagatggatgacataaaagatgcaccaaatgtcccggagaaggaaagcctgagagatgcacc

SEQ ID NO: 7594 - DNA, 252 bp, Zea mays
  Clone ID: LIB3137-010-Q1-K1-E2
atcagtattactggcttagacaagactgaatgggactgaggtgttacgttggacaaaaattcccggattaaatccccgagctgcggcattatgtgccaacgcacttaagggttgcccacaacttcgacgttaccatctcgggcttggtcggggacttaccgcctgcctgggacgtcgaggcgtagtcgaagatcgtcataaacacttacctactcatcgtttattacgtcgcccttgttgtacgaatatatc

SEQ ID NO: 7595 - DNA, 415 bp, Zea mays
  Clone ID: LIB3137-010-Q1-K1-E3
gggggaccacgcgtccgaaaaagaaaaagaggtacgtcgacctgggctgcgtcttcgtcgaccgcaagatcttcagggggaccgggggcaccatcctcggcctcggcgtcttcatcggcttcatcatgatgatcgtcaagctcgtcccgaacaagcgcccgccgccgccgccgcccgaccagtacacgcaggcgctgcacaaggcgctcatgttcttcaacgcgcatggatccggtccgttgccaaagcacaacggcgtcagttggaggggcaattcctgcatgaaggatggcctctccaacagcaccgtccgccagagcttggtcggaggcttctactatgcgggggacgccatcaagttcaactaccccatggcctggtccatgaccatgctcagctggagtgtcatcgagca

SEQ ID NO: 7596 - DNA, 397 bp, Zea mays
  unsure (1)..(397): unsure at all n locations; Clone ID: LIB3137-010-Q1-K1-E4
cggacgcgtgggtccccatccgcacctctctccatctccctgctcctccgcctccttggggatccagggaagccagggatcgccatgtcggactcggaggagcaccacttcgaatcgaaggccgacgccggagcgtccaagacctacccgcagcaggctggcaccgtccgtaagaacggcttcatcgtcatcaagaaccgcccctgcaaggttgtggaggtttctacctcaaagactggtaagcatggccatgccaaatgccactttgttgccatagacatattcaacgggaaaaagctcgaagatattgttccttcgtcacacaactgtgatattccacatgtgaaccgtactgagtanccagctgatgatatatcagaggatggatttgtgagcc

SEQ ID NO: 7597 - DNA, 327 bp, Zea mays
  Clone ID: LIB3137-010-Q1-K1-E6
tcgatacgattacacgatttataaacatgagggtacttgagggaaaacatgtggggtctggggcatcatccaataatgttgatctttcagttgtatcaaacaaagatgactgtgctgccatgtcttaagagccatccgctctaggagatctatttgcacagcacttctcactattgactacagacaagaagttagaatcgtctgaggctaagcttcttttgcctcaaatcatctaatcaaagcacgccaatccagcacatgttgctaactacacgttacaacacatatttttacacttgctgctactttttttcttttccataactc

SEQ ID NO: 7598 - DNA, 356 bp, Zea mays
  Clone ID: LIB3137-010-Q1-K1-E8
cggacgcgtgggctcgaagcttcgtctgcagacgaagtcgccggctctggcctcggcgctggtgccggtgggttgccagtggcggtgggtgggtggccgggtggtggtgttgctgggatgcccgccgcgacggcgaccgcagcccgcctccgcgtgccggtgccaaaagccccccaccactcgccctgctcgagccggcgccaccccgactgccgtcgccgctgacgaggcgagctgccacacgcttggcgcgcgccatggacgccttgtcccgccctgctgtcgtcatcggcaacggcaccgggttcacgaagatggggttcgcggggaacgtggagccctgcttcatcaccccc

SEQ ID NO: 7599 - DNA, 303 bp, Zea mays
  unsure (1)..(303): unsure at all n locations; Clone ID: LIB3137-010-Q1-K1-E9
tcgtctcgtccctagtccgtccgcgtccataaactcaatatcctcgtccatcgcccccgaatacatttccgtgtgcgtttccgggtgccgctgaagtcgtatcgcattccgagcccgattcgcgttgactttcgatcgactttcgggtgccttcgacgatttcgcggtgccttcgcagattagattaggcattcccttgtcgactctcttcgaagggggnntagagcgccgagtcgaccccgtctgtcactgtgcgatggtgccttccctctatcccgccgctctggtgtaccttgtggaaac

SEQ ID NO: 7600 - DNA, 376 bp, Zea mays
  Clone ID: LIB3137-010-Q1-K1-F10
gaagaagcggaggggaggcaggaatcgcctgcccgcgcctccatcgccctgccggcgacggcccacatgccgaccgcctacagcctccgcgcgccgccctccgcctcgcagcagcgcctcaggctgcccctaccgccgcccccgccgccgctgccgttttgcccgggtggaggggccgcccgccggaggaggggtgtcggggtggcgtctgcgtccgcgtcgcccttcgacgagctgcacgcgcgggggaggcccgtacatggaccctccaagaaatccatgctctggaacttgatccaggatatagagcccttggacctaagtgtcatccagaaagatgttgctcctgaaacagtagatgcaatgaagaggacta

SEQ ID NO: 7601 - DNA, 344 bp, Zea mays
  unsure (1)..(344): unsure at all n locations; Clone ID: LIB3137-010-Q1-K1-F11
cacgcgtncggattcatcaataagactgcaatcatttctgcgtctggtatgattcacagagcagacaagggcataggggctgttcttgaagactttcctctcctacagacaaaagtcacactagcatcctattaggtacttgctccactcaacaatttctactaaaggatggctgacgccaactatagtgcctgcgaccaaagcgtaattattgtgaccacacacaggagaaattttccacattaccttatcgatgacaagatatacttctctagcgggcactcaaaaatcctttacccacacaaaaaaaagcttgccttactttttgataatccacgtatagg

SEQ ID NO: 7602 - DNA, 328 bp, Zea mays
  Clone ID: LIB3137-010-Q1-K1-F12
cggtgctactgacggttgctctagatccgttcatcctggtggttttgtgaggtcgaaagcggcgagcgaattagaagatgctggacaagctgtgggacgacgtggtggccgggcctcgcccggagacgggcctcgagaagctccgcaaggccaccaccgcccgcccgctcgtcatcaacaaagacgcggacggcggcagctacaagcgggcgcagtcgatgccgtcgaccccgacgacgccggtgacgccgtcgtcgtcgtcgtcgtcgacgacgccgcgcggcgccggcaacgtgtggcgcagcgtcttccacccggggagcaacct

SEQ ID NO: 7603 - DNA, 374 bp, Zea mays
  Clone ID: LIB3137-010-Q1-K1-F2
cgcaaaatttttcccaaatcttctcctctttaggaaggcagcccgagcgggggctctggagtgggggactcgtcgtctccaacgagagtgattatggcggctaacgattcgtctctcaaggtgtacccgcacccctgcatcagatgtcgcaccgcctttgactggacgatatccaagatcgactggtccaacttctaggggctttcactttctcttcgtccacgttcagagtcgcgacgaggacggattttatgacatggataggatctattcttcgccggaagtactttaacaaataaagcaaagagacaaaataagaaggcttcatttgtgtaagtactttgttaaccaatgccatcaattagggataaaat

SEQ ID NO: 7604 - DNA, 407 bp, Zea mays
  Clone ID: LIB3137-010-Q1-K1-F3
cggacgcgtgggcgcaacgctcgcgactcccacgttccggtgctggcgccgcttccgagcgggttcgctgtgttcatggtgcacctggcgacgatcccgatcactggcaccggtatcaacccggcgaggagcctcggcgccgccgtcgtgtacaacaacagcaaagcctggagcgaccagtggatcttctgggtgggcccgttcatcggagcggcgatcgcagcgctataccaccagatcgtcctccgcgccagcgccagggggtacggctccttccggagcaacgcctaggaccatctcgtcggcgggctattcagctcttcctcctccgcagtttaaggtgaacggagaaggagagcgcaagggggtacggagcaacgtctaggctcacctcgcctttgcccccg

SEQ ID NO: 7605 - DNA, 417 bp, Zea mays
  unsure (1)..(417): unsure at all n locations; Clone ID: LIB3137-010-Q1-K1-F4
ggcagcagctaccatccctcactctcggtacctgacctgaccacgagagcaacatggggggaggacacgacatgcacgggcagcactacggccacaacggcggcgtgaagggctttgtgtccaacctcgtccacggcggcggcggccatggccatggaagcggctacggtcatggccatggaaacggctacggccatgggaatggcggctacagcggcggtcacgggtaccctcctcccgccgccggcgcgtaccctcacccgcacggcggccactggtacccttcttccgtcacctaccccgcgcactcggngcactacggtacgtgagccgtttctgaatcctgtgaccttttgccgtttgttacatgacatttccgcggccggccgcgcgcggtttgttatcctggctgcgtcg

SEQ ID NO: 7606 - DNA, 306 bp, Zea mays
  Clone ID: LIB3137-010-Q1-K1-F5
tcggccaccatcgatctgcaagtctcgctacgtagcagtgcaatacaaaaaaagcagcccgcgatgcgaacagcaacatgggcctcttcttcacgggccttgcccgcaagggcctgaacctgccgtcgtcgtccgccttcggcgaggcccgcgtgaccattcccaagaccgcggcgaaggccaatcctgcggcggcgttcgggagcccgtggtacggccccgaccgcgtgctgtacctgggcccactgtccggcgagccaccgagctacctgacgggcgagttcccgggcgactacggctgggaca

SEQ ID NO: 7607 - DNA, 402 bp, Zea mays
  Clone ID: LIB3137-010-Q1-K1-F6
caaaattttccccaaaacttctcctcttgaggaaggcagcccgagcgagcgcgctgcagtggcggactcgtcggcgccgacgagagtgatgatggcggtgaacgagtcgtcgctcaaggggtacccgcacccctccatcagctgtcgcaccgccttcgactggacgctctccaagctcgtccgctccaaccctgggggcttccacttcctcttcgtccacgttcaggtccccgacgaggacggatttgatgacatggatagcatctatgcttcgccggaggactttcaccaaatgaagcaaagagacaagataagagggcttcatttgctcgagtactttgtaaaccaatgccatcagttagggataaaatgcgaggcatggatcagacatggagatccaaa

SEQ ID NO: 7608 - DNA, 264 bp, Zea mays
  Clone ID: LIB3137-010-Q1-K1-F7
gcgtacgctggctgagtggaatacgttatatttttgctggacacaacctttacgtgctgcgaaagataagtgccaatacgttagcaggcgtatatgttaggggggcggcacatcttggttccatatgtggagcttgagcagacctgggacacgtcattgcaaaggccgtagcaactgcgctcccacaacatgatatgcatgcaattcacaaaatgtccatgctgatgcaacgcgctagatcgttgtagtgacagctcagggaga

SEQ ID NO: 7609 - DNA, 316 bp, Zea mays
  Clone ID: LIB3137-010-Q1-K1-F8
gctcgacggaactgactagaactagttcgtagatccaacactcgggacgaaattaaaagagacgacgcacatcaaccagcaggcatcgcgcggtcaccaccatggcggcgcacgagggcggcatgaggctggggtcgcacccgatcgcggggcacgactggcggctgccggggcactacacggcggatgggcatggcgcctagaaggacatgtcgccgtcgctggagtggtacggcgtgccctatggcgcgcggtcgctggcgctgctggtgcatgacatcgacacctaccccagcgtgccgtggacgcactgggt

SEQ ID NO: 7610 - DNA, 423 bp, Zea mays
  Clone ID: LIB3137-010-Q1-K1-F9
cggacgcgtgggcggagacgctggtgctgctgctcgtggtgcttctggcctccgcttcgacctccgcggcggcggcggcggcgggagaggaggaggaaagagtgatcaggctgaagcacagtgacggtggctattcttataaccatactctggctcatattcttgtcgaatacgcgtctgcggtgtacacatctgacttgacatcacttttctcatggacctgtccaaggtgcaaaggccacacaaagggatttgaggtcatagagatcatagtagatgtggagaactgcttacaggcgtttgttggagttgcacctgaccctcgatccataatcattgcttttagaggcactcaacagcacagtgtctcaaattggatcgaagatcttttctggaagcagcttgatgtgacatacccaggca

SEQ ID NO: 7611 - DNA, 422 bp, Zea mays
  Clone ID: LIB3137-010-Q1-K1-G1
gcgggaggaggagacccaccgtcggctcgcccgtgtcccgattcccactcacgacatcaaccggtccccatgcgatctcgcccgcgacgtttgatggagtctctcctcgcctcgcgatccattaggtcttccttctccgccgtcgccagcaccaggggcgccgcttcccccaggccctcgcgcgtggccaccctcgccagcgccggcgcccgctcccgcgcgctccgtgctggccacacggactcaatccttgaggtgctggcacaggacgatatgctgaacgcaaaggagctggtccaatgggagaatggcttgtcattcaatgacatagcggctaggcaggggattcgcattcgcagacactgcccgcccactgccttcttgaaggagatagaggaggagctgggagccccccttaacat

SEQ ID NO: 7612 - DNA, 335 bp, Zea mays
  Clone ID: LIB3137-010-Q1-K1-G10
atcgcgtttctggctgggatgaacgaccctgcatccgttccgcccagtgcctgagagctatggaatcgcctagtctcccatagtagagcttagattgtcagttgagtatatacacatctgtgttgctatttaggatgctactagggtgttgtattccctggcagcttctttctcggttgtcgtcagatcgccttctctcctaatgtgagcggagcagatgaataaatatcctgtgtgtggcaaatgttggttagcagttcaattagcccttcgatagtgtcaaaaaaaaaaaaaagaaaaaaaaaatattataacccaaaagtaaaatagccaac

SEQ ID NO: 7613 - DNA, 408 bp, Zea mays
  Clone ID: LIB3137-010-Q1-K1-G11
cggacgcgtgggggccgtgaggaccgtgctgacccatctgtacgagctgaacccgccgagctaccgctggttctacaacttcgtcgctgtcaacaagcctaccgacggcaagcatttcctccgtgctctcggcaaggagaggcaggagctcgcagagcgagtgatggtcaccaggcttcacctgtacgggaaatggataaagaaatgcgaccatgccaagacgtacgagaagatctccgacgagaacctggcgctgatgcgggagcggctgatggagacggtcatctggccaaccgacgacagcagcacggagaagatcggctgatgcctgatgcctgcggaggcgccgagtcctttcgggttgctgatcaagcttagctccttctattagcatgtagagcagcactc

SEQ ID NO: 7614 - DNA, 341 bp, Zea mays
  Clone ID: LIB3137-010-Q1-K1-G12
aaacgcgtcgcatccgctccacaggatcctctgcgccaccgcaaccgtgtgaccgcccgtgccgccggcgatcccgatccgccgacccgtcccagccccgctcgcagccatgtcgccgtcggagccgacgcgggaggagagcgtgtacatggccaagcttgcggagcaggcggagcggtacgaggagatggtcgagttcatggagcgcgtcgcgcgctacgccgggggcgccggcggcggggaggagctctcggtggaggagcgcaacctgctgtccgtcgcctacaagaacgtcatcggcgcccgcagggcctcgtggcggatcatctcctccatcgagc

SEQ ID NO: 7615 - DNA, 390 bp, Zea mays
  Clone ID: LIB3137-010-Q1-K1-G2
cggacgcgtgggcggactcgtggtcggacgcgtgggcggacgcgtggggaaaaaaatgaactctaacgggcgggtggcaaccaaccaccaagcggcgagggcgatggcggcgtccccgccgcggaagcggctccctgctgcgcgcctcatcttcgccctccttctcctgatgtcctccgtgctgccgagggacgccggggcggtggaactggggctgaagctgcccttcagtccgggggacgtgctccccgtcctgccgcggcaggtggcgtggcccgtcatgaacacgctccacagcgccgtcgacctactgccgtccttcgtcgccggcgtggcgcccgggtcgccggcgccggcggcctggaaaggcgcgtgcttctcggagaacga

SEQ ID NO: 7616 - DNA, 372 bp, Zea mays
  Clone ID: LIB3137-010-Q1-K1-G3
tcgcacacacacacacacacacacacacacacacggacacgcaccgaaactgccccgccttcggaggacactcgtcctcccatcgccgccttggggacgtcccggtccgcgacattcctgaccacggcgatggccgtcggcgccctccgcttctacgtacgccggttcctgcgtctcaccccggcagcctcgtcggctctgttcgccgctttccgcgcaccgccagggttgcaccgctctcacaccccatcgccgctctgtcaggtggcaacaatcctatctcatggaaactgagacgcttcttcagttcaaatgaaaagcacttgcctgcaatatctgatccagagatcgaagctgcatttaaagatttgt

SEQ ID NO: 7617 - DNA, 420 bp, Zea mays
  Clone ID: LIB3137-010-Q1-K1-G4
cgcaaagcgatggcgtcgctcaccatgatggcgtccttcgccgccgtggcggtggccgggccctcgcgccgaggcaccttcgccgtggtcaggtccgccaaggtcgaccgctgccaggagcccgccacgctagcagcaaccgaggccaggcccgccgccgacggacgccgcgccgtcatgctcgcggctgctgcggcggccgtggcagccatcggcggcgccggcgccgtcatggcgggccccaagaacgggacccccgaggcgaagaagatgtacgcggccatatgcgtcaccatgcccaccgtcaaggtctgccacaactgagcacgcccgcgttgcatgcagctgcagggccggggggtggtatataattaacgtacgtgccacggtgttgttgtccctattgttggttcgagcttt

SEQ ID NO: 7618 - DNA, 305 bp, Zea mays
  Clone ID: LIB3137-010-Q1-K1-G6
tcgtgatgatctaactgcgatgctgtcatttgatgcactagctgagacttgagagcttgcgggaaaatggctaccatttgctaagaagcacaacattgaacctatagctcctgaatggaacttttgccataaaacggagtacttgaaggacaaaattcacccttcatcttgttaataccggctggccatgaagacagaatatcaataattcaaagttagggtaaatgggcttgacgctaaagcacaaaaagctcctgaagtaagatggatcatgccagatgacgcaccatggccacgaaacaata

SEQ ID NO: 7619 - DNA, 406 bp, Zea mays
  Clone ID: LIB3137-010-Q1-K1-G7
ggaaacctctcaaaccctagccgcctcctgcaagtttcagagctcatgaatctgcgccatggcgagtgagacggagaccttcgcatttcaggctgagatcaaccagctgctctcactcatcatcaacaccttctactccaacaaggagatcttcctccgcgagcttatctccaactcttccgatgcgctggacaagatcaggttcgagagtctcactgacaagagcaagctcgatgcgcagcctgagcttttcatccaccttgtcccagacaaggccacgaacacgctctccatcatcgacagcgggatcggcatgaccaagttcgaccttgtcaacaacctcggtaccatcgccaggtccgggacgaaggagttcatggaagcccttgctgccggcgctgatgtg

SEQ ID NO: 7620 - DNA, 328 bp, Zea mays
  Clone ID: LIB3137-010-Q1-K1-G8
gcgaccactcctcactagcttaggacggttcagcggcacagacgtgcgacggacgatcacggcgactcatgctccacacatggcattccagctctccgacgtcgggccccggttccacggcctctggtgctacgccgcgcccaggtccgcggtggcggagctggcgcccgtgaggttgggcatgaagaggtcgtcgtcgcaaggcatccgatgggactacatcggctgtgggaccaatatgatcatggtgacgacgacaacactgatgctgttcgcgtgacggttctgactggcgccgtcaaggaaacgcactgctaaggccgggctg

SEQ ID NO: 7621 - DNA, 394 bp, Zea mays
  Clone ID: LIB3137-010-Q1-K1-G9
agatgaggtccttgttattgcacaagatgatgatacttatgctcctgcccctctaccaggggtgaataagggttttctgcctaacataccaacccctcccaaatatccagagaaaattttgttctgtggttggcgccgtgacatccatgatatgataatggttctggaagcatttcttgctccaggttctgaattatggatgttcaatgaagtgccggagaaggagagggagataaaactgactgacggtgggttggatatatgcgggttaataaacattaaacttgtacataaaaaaaggaatgctgttatcacgcgacacttggaaagcttgcctcttgagacatttgactctatgagtcagtagaggactccattgtacattctgattcgc

SEQ ID NO: 7622 - DNA, 387 bp, Zea mays
  unsure (1)..(387): unsure at all n locations; Clone ID: LIB3137-010-Q1-K1-H1
gcgtgcgggctgaccacattngggagaaagatggcttctgggctgttcttgcatggctttcaattggtgctttcaggaataaggacaaccttggaggagataaacttgtcactgttgaagatattgtccgtcagcactgggccacatatggtcgccattactacacacgctatgactatgagaatgttgatgcaggggctgctaaggagcttatggcaaacctagtaagcatgcagtcatcactttctgatgttaacaagttggtcaaggagatccggtctgatgtttctgaagtagttgcagctgacgagtttgagtacaaggatcctgttgatggctctgtgtccaagcaccagggcatccgatacctctttggagatggttcac

SEQ ID NO: 7623 - DNA, 280 bp, Zea mays
  Clone ID: LIB3137-010-Q1-K1-H10
ctggcccctgagggctcccacacggaccttccagagatgactctatcaacaccctacaaggggctagaatgttctgtcaatgccggaatgatttgctcgaaagaacgcgcttatcgccgctttttcttacaccattgctgactctatggcctcctcacccgccatcatgaacgacaggagcgctagacatgctccaaggactcattacactctgatcgcaagttgcacgaataccatctttggagaatgatgcgcatgagcactgattaccgatatttgt

SEQ ID NO: 7624 - DNA, 404 bp, Zea mays
  unsure (1)..(404): unsure at all n locations; Clone ID: LIB3137-010-Q1-K1-H11
cggacgcgtgggcggacgcgtgggcttctctcgacggcgccaccatgccgcctccgccctcaaccctagccgccagggcaacaacagtagcaccgcagggcgtaggcgacagagcaggggcgcggattccgactgacacttcgtcgtcaagctctcgccatttgtaactccttgctccgccgacctcgacgcaaactacaacttctcgctcgcgcctatccaggatccgctctcgccatggtaccgccctttttctcggtctgtgaatccacccccatctccctgctccctcctgcatttgctacggttcttggaagcaggttgcagggacggacccaaataggggaccaaacattcccttagagtttgcacgctngctgatgcagtgcaagcctgcaacatgc

SEQ ID NO: 7625 - DNA, 372 bp, Zea mays
  Clone ID: LIB3137-010-Q1-K1-H12
gtccgtgctgtgaaatgggtggatgatatcattccagatgcaccttatgccataactgaagaattcatgaacaagctattcaatgagtacaacatagactacattatccatggagacgatccttgtttgctacctgatggtactgatgcctatgctcttgccaaaaaggctggtcgatacaagcagattaagagaaccgagggagtgtcgacaacagacattgttggacggatgcttctttgtgttagagagagatcatctgatgcacataaccactcgtcactacaaaggcagttcagtagtggacatggtcagaaagttgatgatactggatctggaactggaacaagagtatctcattttcttcccaca

SEQ ID NO: 7626 - DNA, 397 bp, Zea mays
  Clone ID: LIB3137-010-Q1-K1-H2
ctccaaccgcacacggcacagacccgtttggcctcttcgaccgcgactccctccgaccgagctgcagtgcgcgtgctgcctgccttccactgttcctgcttccagacatggcggcgaggccggtcgctctggctctgccgctgctggccctcgtctgcgccctggcagcgtcggccgacgcgacgcatttcaaggtgggcgggcagagtgagtggagcgtgccgggcgccggctccgagccctacaacacctgtgcggggcgactccggttccagatcggcgaccagctgctgttcgtgtaccccaaggagacggactccgtgctcctggtggacgccgccgcctacaacgcctgcaacacctcgtgctacgtctccaggttcgacgacggcagcac

SEQ ID NO: 7627 - DNA, 295 bp, Zea mays
  Clone ID: LIB3137-010-Q1-K1-H3
aaggggtttaaggggtaatcaggattcaaaaagtaccttcttgaccgccaatataaaccagtgcaaaactcaggaactacacccaattgcaacgggctgatgataataggtgccacccagtccagtttgtgcaaaaatctgccccggaagttccctgactgaatatacttggatacgctcatggttctgcttcggtaccgatatatttacacgtcattttgaaggatgagttctggggagtacatgtatacaattgtcgctgggaacaaaaactaacggtaattgctgggggatt

SEQ ID NO: 7628 - DNA, 415 bp, Zea mays
  Clone ID: LIB3137-010-Q1-K1-H4
gcgctcgccatcacataaaaccagtgcaagcagaagcagcgcaatggcgagcatcaccatggccctctcctgcacagccttcgccggcaaggcagtgaacgtgccgtcgtctctcttcggcgaggcccgcgtgacgatgcgcaagacggcggcgaaggcaaagccggcggcgagctccggcagcccgtggtacggtcccgaccgcgtgctctacctgggcccgctgtccggcgcgcccccgagctacctgactggcgagttcccgggcgactacggctgcgacaccgcggtgctgtcggcagacccggagacgttcgccaagaaccgggagctggaggtcatccactcccgctgggccatgctgggcgcgttgggctgcgcgttcccggagctgctcgcccgcaacggacttaag

SEQ ID NO: 7629 - DNA, 249 bp, Zea mays
  Clone ID: LIB3137-010-Q1-K1-H5
attgaaggcgattaacgatgtatggatgctaatttaccagaggcctttgatgatgggggagctgtacatccatttcacggcggatttcccccactcgctggcaccagagcagtgctaggctcttgagacagttcttccaccaatgcctttattcaagctgacagacatggagatagatcaatgcgatgagacgactatgcatgatgtgaacaacatcgatgaagagatgcgcatgatgcaagctcacgc

SEQ ID NO: 7630 - DNA, 410 bp, Zea mays
  Clone ID: LIB3137-010-Q1-K1-H6
atcgtatcatctcaggacgtgccgccgccatggctgctatgggccggggcctgcccgtgctatcctgctcctcctactcaccgaaccggcggccgccaacgccgcggcagcgcccggcgacatgtccatcaacacctacaacgaggagcaccgcgcgcgacgtctggagcggacggaaccggacgtgcgggccatgtacaactctgtggctctgcggagcacggccgcgcatacaactcactgggcaatggcgagggcaatcgcgaccgacacttcctcgtctgctgggacaacctgcgactcgtcgacacacacaacgagcgcaccggctcccgcggctttcggctatgcatgaaccagttcgccgacctcaccaacgactagttccgcgccgcatacctcagcgccag

SEQ ID NO: 7631 - DNA, 398 bp, Zea mays
  Clone ID: LIB3137-010-Q1-K1-H7
accactccgcgctagctgaggacggttcatcggctcataggtgcgacgggcgacgacggcgactcatgcgccacacatggcatcccatctctccgccgccgtgccccggttccacggccttcggtgctactccgcgcccaggtccgcggtggcggcgctgccgtccgtgagggtgggcaggaagaggtcgtcgtcgcatggcatccgctgcgactacatctgctccgccaccaacctgatcatggtgacgacgacgacgctgatgctgttcgcgggacggttcggactggcgccgtccgcgaaccgcaaggcgacggcggtgctgaagctggatgcgcgcgactccggcctgcagacaggtgaccccgccgggttcaccctcgccgacacgctggcct

SEQ ID NO: 7632 - DNA, 418 bp, Zea mays
  Clone ID: LIB3137-010-Q1-K1-H8
gtggaaaagcgagcaaatgatggaatacatcaagaaactttgagaatgtatcaaaggggttcttgggacagaagacacaaatatttctgaaatcgagaacgagaagatcagtggtcatcttgaggcgacacacaaacaacattttgagatagatacaaaccttttgaaattattgcatcatatatacttccttctacatttctctggctaaaattttattatttcatacagcggctgacttgaagaatactattgaagatacaatagcaatatgtgaggaacttcaaaaacaatgcacatctctaaaagaggctctaaagatagtggaggtcgaaaatggaggcctctaatagatgaaatggaggcaaggatgggtgtggaattttcgcgtaatggacttttagaagatctgaacatg

SEQ ID NO: 7633 - DNA, 391 bp, Zea mays
  Clone ID: LIB3137-009-Q1-K1-B2
cggaatcgaccgcacgcgacccacgacgccaggtataatatgatctgctaaacgggatagtgaggtagcgaccctgcaacgtgagcgatgccctggagatcctcgtggggggagctggagtcaggcgcactgatgaggcatacactcatgcggcgtcggaacgatggatgtaccttgtatgaacacagcgttgggcgcactgtgagcttcctccccgatgggggagacggtgtggcgggaagcgctcaaagcaacgctgactcctcctgcttacccgagagcaccccgaataaggtcaccacgtgaaagcgtgcctatcggtacgtcaggtattcttcgagtgtttacaacctttggcttccgtccttgctatggctattgtctatttttc

SEQ ID NO: 7634 - DNA, 339 bp, Zea mays
  Clone ID: LIB3137-010-Q1-K1-H9
ggaggatgagaggaacacccagcagcacctgggcggttagcatgcccaggaccaggagaacgaggtgaaggacatgggactcctggacagccttctcggcaggaacaagctcgacgaccagtataagaagaaccagcatgaggaggaggagctcgcgaccggcatggagaaggtcacggtggctgagcccgaccacaaggaggatggacacgaggccgccgagtagaaggacagccttctcgcaagctgcaccgcaccagcttcagttacagctcgtcgagcgacgacgatgaagatgaggtgatcgatgagaacggcgaaattgtcaagaggaagaag

SEQ ID NO: 7635 - DNA, 257 bp, Zea mays
  Clone ID: LIB3137-011-Q1-K1-A1
catggatctgtacaaagaagcgtatttcgagcgtagccgtagctgatgtcttatgtagacacttgtgaagattatgtggtcatgtggcaatgcagatgttattaccttcactttgactttgtcgtcacatgttctatggtgaaggaaggaatcatccgtgtaaaccatggccagggcacgccctacttggctcctaattctatcgcaggctttggggttaacctattatgaatggaataataggatcttgatgaccg

SEQ ID NO: 7636 - DNA, 167 bp, Zea mays
  Clone ID: LIB3137-011-Q1-K1-A2
ctcgcgcatccaccgccaccgcgccgctccatgaaggacccgttcgaggcggccgtcgaggagcaggactcgccgccggagtcgccggcgccccccgatgaggaacccggcgccgcgggccccgctgacgacgccgaggactacgacgggggtccgcccccgcgcca

SEQ ID NO: 7637 - DNA, 113 bp, Zea mays
  unsure (1)..(113): unsure at all n locations; Clone ID: LIB3137-011-Q1-K1-A3
ngcacgcattcacccncacccctcctaccgatttatgttcaactcgatgcgtacgcccaagggcaccgttaccctttctgatcacatccacatcactattaagaacattcttc

SEQ ID NO: 7638 - DNA, 298 bp, Zea mays
  Clone ID: LIB3137-011-Q1-K1-A4
gccaaagaattccctcccctagccgccgccgccgccgctcgtctccctgagaggtgccgggaccgaggaactggccgagtactaggtagagaatcggtttttcttgtctcagcccggggtctgctgcgtctggtggtggtgaaggggagaaattcgtgagatctgttccggatcaggcgtgcgagctcgggaatcaggggtttcacacatagcttcgtcgatttgaaattgatgtactaatggagtctaagggtgggcaaaagtctagcaagtagtcgtctatgatgtatgaagctcc

SEQ ID NO: 7639 - DNA, 388 bp, Zea mays
  unsure (1)..(388): unsure at all n locations; Clone ID: LIB3137-011-Q1-K1-A5
ccgctcccctacctctccagcatctcccgtctccgtcgtctcgtctctgctcctcacctcgccgccagccatgggcaagatcaagatcggaatcaacggtttcggaaggatcggcaggctcgtggccagggtcgccctgcagagcgaggatgtcgagctcgtcgccgtcaacgaccccttcatcaccacggattacatgacctacatgttcaagtacgacaccgtgcacggccaatggaagcacagcgacatcaccctcaaggactcgaagacgcttctcttcggcgagaagccggtcaccgtctttggcatcaggaaccccgaggagatcccgtggngtgaggctggtgctgagtatgtcgtggagtccaccggtgtcttcactgac

SEQ ID NO: 7640 - DNA, 436 bp, Zea mays
  Clone ID: LIB3137-011-Q1-K1-A6
gttagcgccgctgatcccctccctaatcaccatccatccatccggtaggattccccagccatgtcggcgaccgcggtgaagtttcccgtggaggcgccgccgaggacagtgaaggtcaccaacgtctctcttagtgcaaccgtgcaagacattaaggagttcttttccttttcaggagatattgaacatgtggagatgcagagtggtgatgagtggtctcaaattgcatatgtcactttcaaagatgcacaaggcgcagaaactgcacttcttctttcgggtgccacaatagttgatctttctgtgatcattggacctgctccagagtatcagccaccccctattgcctctgcttcaccaatgagtggaaccagagttccagttggtggagacaacaacgttgtccacaaggccgaggatgttgtgagcactatgc

SEQ ID NO: 7641 - DNA, 85 bp, Zea mays
  Clone ID: LIB3137-011-Q1-K1-A7
aatgtactgaatcgaattttgagttttggccttttgggaactaatcaacccttgggtgcagggccacattggtttattttgtgct

SEQ ID NO: 7642 - DNA, 408 bp, Zea mays
  Clone ID: LIB3137-011-Q1-K1-A9
gcagcgccacctacaccgagcagccattctattaaacgaagacccatttcccccagcggaagagtaccatggcggtggcggcaccttatgcctgcctcaaagggaagcttggcgtctaggatgcccccgagctgcagctgaatcgcatccgcatcaccctctcatccaagaacgtcaacaacctggataaactttgtgcgcatttggtaaaccgagccaaggataatcatctgacggttaagggacctgtcaggatccctactaaagctcttcacatcaccacccacaaatccccttgcggtgaaggaacacacacatgtcacctcgctgagttccgcactcataacaaggtcatccacctgatcagcttccccaaacgggtgaaacaccatcatcttctattaccat

SEQ ID NO: 7643 - DNA, 384 bp, Zea mays
  Clone ID: LIB3137-011-Q1-K1-B1
agcgaaattaaagcgtaatgcacggaagagccctgcagtgccatttgagccttctcaaacaaacaccacgcattgaaaatgagaagacaagacggaatccaaggaaattaagtagcactcctgctgagtcagttcccgatggccagttaacagaacttgagaaggttaaacgtagccttaggaaggttactagttccatggttgaaacctcaaaggtgcctagcccaacaactgagattcctgaccgtcaagaggtacaatgtgagagaccactaagaagtgcaaagcaagctccaattcatgttgagaatcaagaacctcaaaatgttaatctatcggacaatgcaaagatggatattctggtaccagatatccagcctgacg

SEQ ID NO: 7644 - DNA, 423 bp, Zea mays
  Clone ID: LIB3137-005-Q1-K1-H8
ggacgcgtgggctagcgtcggctaccgcgactgcagcgtcggcggctgggaccagcggatgtgcgttcctctctctagaagctccgtccgtcttcacagccttttcctcccaacaacgcataatattagctagggtttcaacacatctgacggcggaagctagggcgtcgccaccgtcaatgtcttggcactcccgctctgttcatcaatcgcatcgacaggtgctccatgattctctataatatccgaaataaattaggattaaagcaagaataggaagttattcaaaactcaaaagtaaagggtttccggtcttccagttaaatgaccaaatgacctgtagaatgacagcaagcaagcaaaatatacggcagacatattgcaccaactcagagcagtgcatgccatgggaagaaaagcaaa

SEQ ID NO: 7645 - DNA, 335 bp, Zea mays
  Clone ID: LIB3137-005-Q1-K1-H9
tttcaatctccgatgaaaaaagaggtaataaaacaacattgtcaacttccagaaaatttggaggagtgaacaagaatataggcaccgttgtgcattgtttccaaagcaggttgtcgatgatagcaccatatgcagcatttggaggccaatttgtcctgatgggtatgtttctgttggtgatgtagctcatgttggcgtccattcaccgcatgttgcagccatctatcgagattctgatgaaaactttgccctccctgtgggctatgacctagtgtggaggaactgtgttgacgactatgcaactcctctgacagtttggctaccaagagcaccga

SEQ ID NO: 7646 - DNA, 439 bp, Zea mays
  Clone ID: LIB3137-006-Q1-K1-A10
gcagcttctgcttgctctggggggaaggagagagagagagagcgagagagagatctagtagggaggctagctaggtggtcctcgaacgaagatgttggcggtgttcagcgggcaggtggtggaggtgccggcggagctggtggcggcgggcagccggacgccgtcgcccaagacgaaggcgtcgcagctcgtggggcgcttcctggccgcctccgagccggccgtgtccgtgcagctcggcgaccacggccacctcgcctactcccacaccaaccaggcgctcctccgccccaggtcgttcgcggccaaggacgaggtgttctgcctgttcgagggggtgctggacaacctgggtcgtctgagccagcagcacgggctgtcaagcaagggcgccaacgaggtgctcctcgtcatcgaggcctacaagacgctgcgcgac

SEQ ID NO: 7647 - DNA, 435 bp, Zea mays
  Clone ID: LIB3137-006-Q1-K1-A12
gaactagactattacaatggttctggtgattcaaatttcctggatcttgactggggggcaggttcagacaatgaaaggtcaaaagccataagcactcctgatgtgaatatttcaactgatgatggtgttcatggtgtaatctctgggacaacggatgatcaagctgctgacatccaggctcacggattatctaaggattttgtgcagtgggttaatcaaggagaggcattttggtactgatattccaagatgggcgtaccatgtaaattcaagccacatgatggttgcacttgcaaaaaggtgggaaaataatgaagaagtctacatgatggcattccagaactcatttcaaagcatattaactcttaaagaccattgcaaggagggaccatcaatgtgcatgagattgcttgtcaaccatcatcaattcagcat

SEQ ID NO: 7648 - DNA, 278 bp, Zea mays
  Clone ID: LIB3137-006-Q1-K1-A9
catcaagctctatgtgcgcagggtgttcatcatggacaactgcgaagagctgatgggtgagtggctgagcttcgttaagggtattgttgactctgaggaccttcccctcaatatctctcgtgagactcttcagcagaacaagatcctgaaggtgatcaggaagaaccttgtgaagaagtgtgttgagctcttctttgagattgctgagaacaaggaggactacaacaagttttacgaggctctctccaagaacctcaagctttgcattcacgaggact

SEQ ID NO: 7649 - DNA, 368 bp, Zea mays
  unsure (1)..(368): unsure at all n locations; Clone ID: LIB3137-006-Q1-K1-B10
acggngaccaagcagagtgacgacgacgcgacaatcaagtccgnagcttcggcgggggactgtgatatggctttaggtcggtcggtccctcaacagggccatcgctggccgcccccaggccctgcaaggccggccttggcgaaccccggggacgattccaaacttaattgcttctttcaacctcggagccgactctgccgcctcaggcgaggcaaaccgccgagatgtcgccgtgtcggagcgctccgcccccaatcgccgcgggcatggcgagacctccgcgacttcaccccgttcagcctcgtggacggtctcgggagcgcgctgtcgcaggtggcggaaaccctgggccgcccgttggagcgcct

SEQ ID NO: 7650 - DNA, 444 bp, Zea mays
  Clone ID: LIB3137-006-Q1-K1-B11
cgcagctctctggcggcgtcggcggcgaccggggctcctcctccaccgccggcccgggccggcagcacagccaccacccacctcccccgccgccgcccaagatcctcctcgccaagccgccgctgccgcacgcctcgtcctcgggcgccgacgacgacggcgggaccggggccgctggtggccgcgcgcgccaggcgccgcagccgggttcgctcagcctcgtctccgacgcatgggaggcccacaccgacaagatccttccgtatctgacggagaacaatgatttcatggtgattggggtaattgggccgcccggtgtatgcaagtcgaccatcatgaacgagctttatggatatgatgccagctcacctggaatgcttcctccatttcctacacaaactgatgaaaccagattgatggggaaacactgtactactggtattg

SEQ ID NO: 7651 - DNA, 438 bp, Zea mays
  Clone ID: LIB3137-006-Q1-K1-B12
gccgctgctcctgaggcggatgtcgtcgaccgcaacaccgagacggaggtacgacgcgggcgtcgtcgtcactaccaccaccactgctagagctgctgcggctgctgtcacggttcccgccgccccgccgcatgcgccggcgccggcgccggtgccgccaaagcaagcggcggcacccgccgagaggaggagccgtccggtgtcggacaccatggcggcgctcatggccaagggcaagacggcgttcatcccgtacataaccgccggcgaccccgacctagcgacgacggccgaggcgctgcggctgctggacggctgtggcgccgacgtcatcgagctgggcgtgccctgctcggacccctacatcgacgggcccatcatccaggcgtcggtggcgcgggctctggccagcggcaccaccatggacgccgtgctgga

SEQ ID NO: 7652 - DNA, 439 bp, Zea mays
  Clone ID: LIB3137-006-Q1-K1-C10
actagccggacaagcgaacaaaaggtgtaagagcttacgaccgacgcggccaaatcgagataagagcaagatgacgtcgtcgacggcgttcagccaactgttcccttccgccgctgcggtatcccccgtccctcgctgcgtctccctgcagctcttctgcgccagcggtggagttgtccctggatggaggagaagatgccgccgcatggccatggtgcgcgcggccaccgtggatgctgcggcgcccgcctacacctccgattccctcatcctctacttcaaggcggagggcaccatggaggagagggccattcccaagatcacagaatctcttgagggtatggagggagtcaaggacctggaggtgctcattgaagaaggcatagggagcgttgtgttaacaaaggagacaactgtgcaagctactggagtagcctcg

SEQ ID NO: 7653 - DNA, 431 bp, Zea mays
  Clone ID: LIB3137-006-Q1-K1-C11
cgaagcccgtctccatccaggtgtggaaccccagcggcaagtaccgcgtggtgagcgccaagtgcatgccgggcacacgatggatccgcctgctcaccgacaacgactgccgccttgagatatgcaccgagcacaagaccatcctctccgtggacgacatcctggcgctcatcggcgatcgctgcgacggcgtcattggacagctcaccgaggactggggggacgtgctcttctctgcgctcaagcgcgccggaggcacggtcttcagcaacatggccgtcggctacaacaacgtcgatgtcgaggctgccaacaggaatggcatcgcaatcggcaacacgccgggcgttctgacggagacgacggctgagctcgccgcctccctctcgctggcggcagccaggaggatcgtcgaggctgaccagttcatg

SEQ ID NO: 7654 - DNA, 434 bp, Zea mays
  Clone ID: LIB3137-006-Q1-K1-C12
cgtcagtttcagtttggcacctccgaagcttccgtccgaatctctgcagcctccttgctcgggcaggcttgcgggcgatggcggcggagcagaccgccgagcagttccggggccaggcgcggctgccccacttcgcgtccccgcggcgctacgacctgcgcctcacgcccgacctccccgcctgcgtcttcactggctcggtggcggtttccatcggcgtggccgcgcccacccgcttgctcgtactcaacgcagccgagctcgacgtcgcgaccgggggcgtcagcttcgcgcctcatggctccgaccaggtgctacaacctttggaggttaccaacgtgccagaagatgagatcctgattattcacttcaatgaggtgctttctatcggggagggaactttgacgattgcattcaaggggactttgaatgat

SEQ ID NO: 7655 - DNA, 257 bp, Zea mays
  Clone ID: LIB3137-006-Q1-K1-C9
gctcatatttactcatctcaactgcgacggttgtagatctctactcatgaatatcggtacggggaacagtcacaaatacaggctcagactatttaacaacgattccacacatgaaaacacctgctgccttgactaaaatttctgacctataactaaagcacgtatactgagaaatgtataactactgcttctgatacgtcgtctgccaaagaacttctacaagacacatttctttgacctgacaatacacctgaacc

SEQ ID NO: 7656 - DNA, 432 bp, Zea mays
  Clone ID: LIB3137-006-Q1-K1-D10
ggttcaactcgatgaaactccctctgaacatcctgataaataatgcaggcgtgatgtgctggccttttcaactgtctaaagacggggtcgagatgcagttcgcgacaaatcatctaggacactttctgcttaccaatctcctccttgataccatgaaggccactgccaagtctacgggtatcgagggccgcattgtgaacttgtcatcagtcgcccaccaccatacgtatccgaagggaattgacttcgataacctcaacgatgagaaaaaatacaacgacaaaatggcttatggacagtctaagctggcaaacttgctgcacgcgaaagagctctctataaagctgaaggaaaaaagagaaaacatcacagttaacagtgtccatcctggattgatcatgaccaatttgatgaagcactcctttcgtctca

SEQ ID NO: 7657 - DNA, 363 bp, Zea mays
  Clone ID: LIB3137-006-Q1-K1-D11
ctttttcacatcagtaccttctggtagagttggctcttgccatgaagctgtgttcaggtcggatggagagtttaagaaggccatcttatcaagagagttggaagatattgcatctattgaagacaagttaggaaggtcacttacaaccatggagaaagatagaattggagtgggtaacttaagattatatttggaagagttgctgcagaagaggtacgttaagagtgttccattaatcattccacttcttgagaagcaacatcgaaatacaacaagtaaattgcgtgaaatcagtcatgaactcagtgatctggacgaagccaaactgaaggagaaaggtaactattccatgacacatttttg

SEQ ID NO: 7658 - DNA, 446 bp, Zea mays
  Clone ID: LIB3137-006-Q1-K1-E10
tatttataaaccaatacgggcaatgcttggtggacgtctaagatttgttctttgtggtggggcacctctgtcaagtgacacacaaagatttatgaatatatgtctaggtgtcccagtgggtcaaggctatggattgactgaaacttgtgctggagcagctttcactgaatgggatgatacaagtgtgggtcgtgttggtccaccactttcttgctgctatgtgaagcttgtctcatgggaagaaggtggttacaagatttctgattctccgatgccgaaaggagaggtcgtggttggtggacacagtataacaaaaggttatttcaacaatgaagcaaagacgaacgaagtatacaaggttgatgagaggggcatacgcttgttctacactgttgataatggtcaaatccattctgatgggtgccttgagattattgacaggaaaa

SEQ ID NO: 7659 - DNA, 315 bp, Zea mays
  Clone ID: LIB3137-006-Q1-K1-E11
acgctttcctcttcctcctcgcctccaccccttcccttccatctcctcccacccggcgagtcctgtgcctctctgccgcgccgatcgattggcccacccatcgatcgagcacggggaagaagattccagtccggagcggtttcaattccgtcgggttcgttgcccgtgtgggtgggcgctatggcggcgatggatgcctcggcagataagaacgccgtcttccgcaagcttcgcgccaaatcggacaacaagatgtgcttcgattgcaacgccaagaacccgacgtgggcgtacgtcacctacggcgtctttctc

SEQ ID NO: 7660 - DNA, 325 bp, Zea mays
  Clone ID: LIB3137-006-Q1-K1-E9
ctcgttgctgttgttgttgctgctcttctctagcttgctttcccccaattggcctggctgcgctcttgagcttctttggcttgttggacttggtagctgtggcgttgccgaaatgggcgctccctaccacctccaatcaccaagaaccatcataaccaaggtaatgagcatgaagcagctgccaccggccctgccacagctgccgccgccgccggtggatcagtccgaggtgaccgatcagacaccggtgctgccacggtcgcagccggtggatccacccacgataaccatgcatccacaggcgccccggcagccaacgcgggcg

SEQ ID NO: 7661 - DNA, 422 bp, Zea mays
  Clone ID: LIB3137-006-Q1-K1-F10
gctctacgtccgccatggtgggctcttccgaccccaacaagctcatgagcaaagcgcgacagactgtaattaggcttgcacagaagctaccaacaggggatctgcaggccatcaagaaagctgatgatggcgaggaatccttggacgaggatgacctgacttaaaacgatctcccgagccaaaaggtgcagagagcaaacgtcatagtttgccatcggtgggggaacaactgtaaaaagaagttatgcgagttacatactaaaaacttgtgggcagcattcccatatctataaacatgaaatttgtagggcccaattatattgtatccgtactggtggtttggtgttacggaaacaacgaaactttagtggtatgtttatggcgtcctgtgctacatgattcttgcaaatccagcatggtgt

SEQ ID NO: 7662 - DNA, 61 bp, Zea mays
  Clone ID: LIB3137-006-Q1-K1-F11
acgcgttcgtacagacgtgctcttttctttatcttgttaatttagatgctagttgttgagg

SEQ ID NO: 7663 - DNA, 383 bp, Zea mays
  Clone ID: LIB3137-006-Q1-K1-F12
cggacgcgtgggcggactcgtgggttgcaatcacaacgaacacaatctctctatcgcaccggcaccgatgaagaagagatcaatgtcttccgaacaggtactcgtgatcgcgtgccacagcaaggctgcgtttgacgcccacatgaccaatgcccatataagccggcaagctggcgcccattgacttcactgccgcctggtgcggtccatgccgtgccatcgccccactgttcgtcgaacactccaataagttcactcaggtcgacttcctgaaggtggacgtggacgaagtgaatgaagtcaccgaggcctacgaggtcgatgcgatgcctaccttccacttcgttaagaacggctagaccgtcgcgaccatcatgtgtgcc

SEQ ID NO: 7664 - DNA, 443 bp, Zea mays
  Clone ID: LIB3137-006-Q1-K1-F9
ctcctcagataggagcaacgtttctcaggggaaccacctgggttatgcgagaagcggatccgtggattccactggtcctcagttagctggtacgtctagctcaatgttgagtaggagaagtagcagacagggctcaaggggatccatcagcctctcaagggagatgggggactccatactgagctcaatgaggcattctcttcagtcggcggatcaattgctaggagacatcgatagctcagttctggctcaactcatcgaaagtggtcgagttctatcacccgaaggcgatgttgatgaggatacagtaagaatctctgaacatcataaggttggccctgttccagatgatgcaataaagcaaaccagtgacaattttgcatcagcacctatatcttcagcggagacaaaagacactatttctaacgtcctagcagattcat

SEQ ID NO: 7665 - DNA, 445 bp, Zea mays
  Clone ID: LIB3137-006-Q1-K1-G10
cgcctcggccgctgttttccacaagcatcattgacatcaaatctgtgtttgcgggtgctggtggcgtgctgcccaccgagccagctgggaagcctgttatcgcggcagaccgggagaagctggtgatcttgggtcttggggatggccacattgctatctataggtctaacttcccggtgtacaagccagagagcaatgctgttgtatggagtggaccagcgctgcttttcctcctgttcttgatcggcatttggcaagtatacgtgaaaaagaaggattctctgggatggacaccagaggagacatttaacacctctgtaacagcaccaacggggagccttttgaatcatccaactagtgatcgagcctttgcagacagcacagcaagaagcagtgaccggtgctatgttgatggaacatcaagagccagtgatagaagctatgt

SEQ ID NO: 7666 - DNA, 440 bp, Zea mays
  Clone ID: LIB3137-006-Q1-K1-G11
cgattcctggccaaagcgacggcgagacgttttcgacgcatgaggacggtgcgaggtcactgggtggcttcgcgaggtgacggcgggccggcgcctcgcatccccgactgcaagcctccccggcaccttctcaccggtgagtattgagctctcccatcctcatttttttcttgttcttgatggatatggaaggggggcgagagtagcgagcggtgtgcaggctgcggtggaggccgtccgtggccggtggtgacgaggatgagagggtatgcttccgatgaggaatgagaggagcacatccagtggcagagagatttctgttcctaggggatgcagagggtctaatcggattccagggagttcagtcgatgctttacgatggcactatgtccagaggcagcagcaacggtgatgagttagacgctgatgacgatgacttg

SEQ ID NO: 7667 - DNA, 405 bp, Zea mays
  Clone ID: LIB3137-006-Q1-K1-G12
cggacgcgtgggctcctctatataatcacctgcaggtggtcttcaaagaaaagaatgggaggaaaaacaggcgcaatatagcatcctgcatccaatccacagtagccgcggctactagctagctagtctgctccacgctgcagggcttttagcttaatggccgggctaagcgttctcctggagaaccacagcaagagctacaccgggaaggcggcggcggcgcacatcatcagcaaggccaccctcgtgacgacgacccacggccccaaccaccaccagcagcagcggaagatccctgtctctgcggcggctgcgggctccttcctgcagcgctgctgcctgtgccacaaagagcttgccgagggcatggacatctacatgtacaaaggcgaccgggcgttctgc

SEQ ID NO: 7668 - DNA, 449 bp, Zea mays
  Clone ID: LIB3137-006-Q1-K1-H10
gcgacggcggcggcggcgacgacgagcagccacctggggaagagcaggtagcaggaaatggcggcgttcctgaggtcaaaatgttcaccagttggacgtactttgatgggaagccttggaaatagtttgtttggggctgccaactcttctgttggggcaataacaaggccttctcattgcgatgctatcagtcagcaaatcagaacattcatccagatgaggactaacctgaaggtggtcgataactccggggccaagcgggtgatgtgcatccagtccctgagggggaagaaaggagcaaggctcggggacatgatcatcggatccgtaaaggaggcccagcctcgtggcaaggtcaagaaaggagacgtagtctacggcgtggtcgtccgtgccgccatgaagaaaggacgcagcgatggcagcgaggtccagttcgacgacaacgc

SEQ ID NO: 7669 - DNA, 396 bp, Zea mays
  Clone ID: LIB3137-006-Q1-K1-H11
aggacgcgtgaggtcgaccttcggttaagactcttccaagcgcaacccactcccgtgcgccgtcgtcttcaaccttgagtccgtgcttgctgcccaccgccctttctttgtcgaagtcaacaccgccgccgcagccgtcgaggttgaagcctcggctccagaggatgccccctctggagatggtgcccccgctgaggcccatcctgctgctgacctgtgccggggggatccggtccgtgggtctcgcggctctcgtcaacaccctcgttacctgcccccgctgcgacgttcacgtgtgtgctacctaatcggacaagccaacctgtggccactcaattaccatccgtgaaaccatcacttggacatcagtggatttcacaagtgctaaagcttttt

SEQ ID NO: 7670 - DNA, 440 bp, Zea mays
  Clone ID: LIB3137-006-Q1-K1-H9
agccgccaccaggtgcagagtctttcgtcatctcttctccggcgaagaacccccaggcgccggaccagatcacttgttaaactttgttgaggggtgatggcggtttctttcgcaaacctcaacaccgaggcagggcttaaaaagcttgatgagtaccttctcactcgcagctacatcactggctaccaagcttccaaggatgacttggctgtctacacttcgttttcgtctgctccctcgtccaagtatatcaacgtagcaaggtggtttaatcacattgatgcgctcgtgaggctgagcggaattactgcagagggccaaggtgtgaaggttgaatcctcagcagttccttcagccccaactccagatgttgctgaagcacaggccccagctgctgaggaggaggacgatgatgatgttgacctttttggtgaggagac

SEQ ID NO: 7671 - DNA, 288 bp, Zea mays
  Clone ID: LIB3137-007-Q1-K1-A1
gttgaggtgaagagcatagagctagctcacttgatatacatattgcatcggcataaaaactgaatttaccatggcccacttgatctcttctgcaatcgcaggcgcgggcaacttggtcgctgatggaatcagtggtgtcactggcgtagcgtcgcaggttgtagaaggcgtagaggacactttaggcagtatcgtagaagcaatcgaccaaggagtcaaggatgaggaccaactggatttgcccaagtacgtgtgtttcaagggagataacggtctgtacctgagtgc

SEQ ID NO: 7672 - DNA, 179 bp, Zea mays
  unsure (1)..(179): unsure at all n locations; Clone ID: LIB3137-007-Q1-K1-A10
accggcgcgacccacgcgnccggtgtaattaattcaattaccctcattttatactaccaacagaatcccaaccgccgttgtatttaaccatacaacttctcaaatcctaaatccccccaaacacaccctacattagacaacatctccaaagcaccaaaaacgacacatttaattcatca

SEQ ID NO: 7673 - DNA, 418 bp, Zea mays
  unsure (1)..(418): unsure at all n locations; Clone ID: LIB3137-007-Q1-K1-A12
gcgtttgctaatctggagattatggcattaaagacccccatgcttgaagcccatgcagggtagcctctcatgcgataaacatgttggtgaaactattgcaaatgttgttacctcacttcctttcattgttcttggactgcaaacaccaagttgtgcagaaagaacttgaatacaacactttatgctaactcattgattggagttggaatagcttctagcttgtatcatacttcacggggagacatcagaaaatatttgagatgggcagactatacaatgattgccacttcaactctatgcttatcaagagcccttcgggatgagaatccaaaatttctgatggcagcatcaacattgctcctaccatttcaacccctgatggtttcagctgtccacactgngataatggaggtttcat

SEQ ID NO: 7674 - DNA, 349 bp, Zea mays
  Clone ID: LIB3137-007-Q1-K1-A2
gttcggagcgcacacacacacaaccagatctcccccaaatccacccgtcggcacctccgcttcaagatgcagatctttgtgaaaaccctgactggcaagactatcaccctcgaggtggagtcgtctgacaccattgacaacgttaaggccaagatccaggacaaggagggcatccccccagaccagcagcggctcatctttgctggcaaacagcttgaggacgggcgcacgcttgctgactacaacatccagaaggagagcaccctccaccttgtgctccgtctcaggggaggcatgcagatctttgtgaaaaccctgaccggcaagactatcaccctcgaggtggagt

SEQ ID NO: 7675 - DNA, 247 bp, Zea mays
  unsure (1)..(247): unsure at all n locations; Clone ID: LIB3137-007-Q1-K1-A3
cgatcaccggatggtcatccctgcaggggacaaggaggtgcagacggaccaggccgcgcacatggtgtacgctgcacgccggcgacaaccccttcgacaccgtcaccgccgccgtcaaggcggtggagaagcacctgcagacgttccaccaccgcgacaagaagaagctgccgtcgttcctcgactggttcggctggtgcacctgggacgccttctacaccgacgtcaccgncgacggcgtcaagca

SEQ ID NO: 7676 - DNA, 416 bp, Zea mays
  Clone ID: LIB3137-007-Q1-K1-A4
cgataccgacgttctaccgcatctacaagagcaagtcgacggaaggcttccagtcggttccctacgtgggtgccctgttcagcgccatgctgtggatcttctacgcactgatcaagtccaacgagaccttcctcatcaccatcaacgccgccggctgcgtcatcgagaccatctacgtcgtcatgtacttcgtctacgcgcccaagaaagccaagctgttcacggccaagatcatggtcctcctcaatggcggcgtctttggggtcatcctcctgctcacccttcttctctttaagggtagtaagcgcgttgtgctgcttggctggatctgcgtccgcttctccggcaatggcttcgtcgcgccactaagcatcatgagacgagtgatccagacgaagagcggggagtacatgccc

SEQ ID NO: 7677 - DNA, 242 bp, Zea mays
  Clone ID: LIB3137-007-Q1-K1-A5
cgcacagtccgtctcgtctgccaacgccgctactcggcgcaccttggcttgctatttcgccaacaacctcctccctctttaccgcggcgtgccgcgtgcggcgggcgcggatggcaacggccgcctccgcctccccctcccccggcgcgttcggcgccaaaacccctgccccagcccgtgggctgagcacgcacccggtcctgaccccgagccccgcattcgcgaggtcttcgccgcgcacc

SEQ ID NO: 7678 - DNA, 434 bp, Zea mays
  Clone ID: LIB3137-007-Q1-K1-A6
gtctccctccataaaatggtggagcagaatgacttctaaatctactacacttggaagttttgggtctttgatttagtccagagttgtgttgattcaacaaatcttgagtaaacaggttgccatttgccatattcaaagaaggaacattcaaatgacaaccattatcacctgctgtctcaggagaaatattgactgacaacctcatgtcaaattttgatttccaagttatcaggtcttcttcagaaccaagctggtcggttgaaccacacttatcattgaagtaattaagcggctgtatttcattgttgatgtaatcaaaatttttagttccttcaaatataatagatgaatcattgctaaatctaacattgctgtcaatgttttcatagttccaagaacgaaaacatttatctgatgtcctgttaagtgtgtgc

SEQ ID NO: 7679 - DNA, 238 bp, Zea mays
  Clone ID: LIB3137-007-Q1-K1-A7
atggcttggtcttgtgctcgtccgatgagcatcgccctcgctgccgtcctcctgctgtgcggcggcgcgtggctgcagcaggcggcggaggcgcgcccccaccacatggacaccgacagcagcatcgacatggaccgcggcagcgacgacttcttctccatcgtggggtactcgccggaggacctgacgcagcacgaccggctcgtcaggctgttcgaggagtgggtggccaagtacc

SEQ ID NO: 7680 - DNA, 249 bp, Zea mays
  Clone ID: LIB3137-007-Q1-K1-B1
gaagaagtgatatgaagggtcggccccttggtggggccgtcaaatacttttggccttgaccagtgtgagaaccattttctgtgctggggatccaatttataagtttaaatagggcatactagctacccagaaatttcgatatttcactgcccaagcacagaatgaattggtactgacgcaatggacccactttacacatggtctttatgaagcatgcttctttgacaagggtggtcattggtcagtatg

SEQ ID NO: 7681 - DNA, 418 bp, Zea mays
  Clone ID: LIB3137-007-Q1-K1-B10
cacaaacccatcgcagggcattctcgagcatagcttctctgcctctctctcccctcctgtcctctcgtccactcctttgtccaaagcttcgagatggctcagcagcagaaggtggtggtcagggttccaaccatgacagatgacaagatcaagcagaaggccatcgaagctgttgcggacatttacggtattgactccatagcagcggatctgaaggagaacaagatgaccatcataggcgagatggatgcagtagcgattgccaagaagttaaagaagattggaaagattgacattgtgtctgttggacctgcaaaagaagaaaagaaggaagaaaagaaagaggagaaaaaggaggaaaagaaagaagagaagaaagaggagaagaaagaagagaagaaagaagagaagaaagaag

SEQ ID NO: 7682 - DNA, 145 bp, Zea mays
  Clone ID: LIB3137-007-Q1-K1-B11
cgaagcgtccgacgacccaataaggccttttagcaagtgcatgcacacgcgtagcagcgaataactgcccggtgcctgcctgtttgacatataaagagtacggtcgagaaagatataacttacatcgatggaagcgaagaagaac

SEQ ID NO: 7683 - DNA, 420 bp, Zea mays
  Clone ID: LIB3137-007-Q1-K1-B12
gtctcgttttctcccttcccctgcgggctggagagcggcggcgaacgaaacaaggtcggcggtgacgctcctcacctactccctgccgcctttcgctttccggcccggcgtgccgcaagctcgcgcgccgcctacatcgacccctccccgcgccgcaggccgcctcccacagacgcggggcagccaggccgcccggctcggagggattcagttcggcccgtcgtgctcccctccgcactcttctattggcctggagagaagcggagatccaccagcaatttggatccgcttctcctttttcttggatatacttggtctcctcggtgttggctaggcaatccagctttccaagtgtgatcggacaggtttattttggctctgagatggctgatgaggactcatccgacttcaccttctgca

SEQ ID NO: 7684 - DNA, 340 bp, Zea mays
  Clone ID: LIB3137-007-Q1-K1-B2
cctcctcctccttctcctggcactggcagcgaagatccaaagatagcacaatcgcatctcacacgccgagctatttctactttgagagaatccccttctcccacaaggagcgagtaatttgaggcagagaccgacacagatggcagcggttatggtgtctcgccaaggccgggagctgcagcggtacagcgcgagcacgggcgggcgcgtggtggtgggctgcgtcccgtaccgcgtgcgcgggggcgacggcgaggtggaggtcctggtgatcagctcccagaagaaaggccccgcggggggcgtgctgatccccaaaggcgggtgggagctggacgag

SEQ ID NO: 7685 - DNA, 267 bp, Zea mays
  Clone ID: LIB3137-007-Q1-K1-B3
aaattaatgtaggacagcgaattttggaaactttataaggacaatccagcaagctgtgcgattgtgatgaaaacttcagctggtcttgtatatctccttgcctgtctcctggaacctttcatgccttccttttcaaaagaagtatggtcctaatcattattgagtgttgagtttcttcgagtagcattctctcgccttcaaatctcactatgtgatatcttctataacgtgctacgtcaattaaacctgtccccagaagaaaatatt

SEQ ID NO: 7686 - DNA, 364 bp, Zea mays
  unsure (1)..(364): unsure at all n locations; Clone ID: LIB3137-007-Q1-K1-B4
atcatggagaagaacccaacggcacgtattgatgttctgaagctagacctcagctccctcaagtctgtcagggcttttgtggaccggttcaactcgatgaaactccctctgaacatcctgataaataatgcaggcgtgatgttctgcccttttcaactgtctaaagacggggtcgagatgcagttcgcgacaaatcatctaggacactttctgcttaccaatctcctccttgataccatgaaggccactgccaagtctacgggtatcgagggccgcattgtgaacttgtcatcagtcgcccaccaccatacgtatncgagggaaatgactcgataccctcacgatgagaaaaatacacgacaaa

SEQ ID NO: 7687 - DNA, 211 bp, Zea mays
  Clone ID: LIB3137-007-Q1-K1-B5
acgcgcatgtaccatcctctcgctcgccaggagaatcagccgcctctgcttcttccgcgggcagagaatgttttttttcgtgaagactcataataccaatgcgtatttcaaacgttttcaagttaaattcaagaaaaagcgggctggcaagacagactacagggccaggatattgctgattaaccaagacaaaaacaagttcaacacaccc

SEQ ID NO: 7688 - DNA, 67 bp, Zea mays
  Clone ID: LIB3137-007-Q1-K1-B7
accgcttcgtcccgaagcgatcttggtaaaagactgatgattcgtgttgccaaacgacacaattcgt

SEQ ID NO: 7689 - DNA, 104 bp, Zea mays
  Clone ID: LIB3137-007-Q1-K1-B8
aaccgttctctcccaaaccaactttgtaaaattcttatgaattctggtgccaaacgacacaagtcgttttttaatgagttgtggaacaatttttatataaatta

SEQ ID NO: 7690 - DNA, 420 bp, Zea mays
  Clone ID: LIB3137-007-Q1-K1-B9
gaccctcctcagctagtacctaccggccagtagtcgtcgcgtctgcaggcagatctgagttagccggcggatccgatccgtgcgcgtgctgctgtgtgtgtgtcggtggagatggccacagcttacgctcccatggcgagccaggtgatgaagagcagcctcgtcgtgcactcgaggccgaggggcctgtcaggcgctgctgcgctcacgaggcggcccggccggttcaccgtcaaggccatccagcccgagaaggcaacgtaccaggtggtgcagcccatcaacggcgacccgttcatcggcagcctggagacgccggtcacctccagcccgctcgtggcgtggtacctctccaacctcccggcctaccgcaccgccgtgagcccgctgctgcggggcgtcgaggtcggcctcgcgcac

SEQ ID NO: 7691 - DNA, 330 bp, Zea mays
  Clone ID: LIB3137-007-Q1-K1-C1
aattactgatgagaaagcaccaaaggaaggagattttgacaacctggtacgtcgaatctctcaagttgatatagaaacagaaattgtgtttaactgccaaatggggagggggcggacaactactggtatggttatagctacattggtttacctaaaccgaattggagcttcaggtgagaacaaaatttactctggttcctgcttctgttatctgtgtgcttctgttatctgtgtagatctgactgaaaaacagtagcatgagtgcatgaacacagacagtcgtgttgggaactgtcatgtggttgtggtcttttagtattacaaactgat

SEQ ID NO: 7692 - DNA, 262 bp, Zea mays
  Clone ID: LIB3137-007-Q1-K1-C10
aacctactctgacttgctctgtgtttatgttggcactggcgtccaattctttggcatgctcgtagttacaatgatctttgctgtgttgggtttcctttctccatcaaaccggggaggactcatgactgcaatgcttctagtctgggttttgatgggtctgcttgctggctactcttctgtccgcctctacaagatgttcaaaggttcagagtggaaaaaaataacccttgcaaacgcttttctatttccaaggggtggattt

SEQ ID NO: 7693 - DNA, 381 bp, Zea mays
  Clone ID: LIB3137-007-Q1-K1-C11
ctactttgtacagcatagctgggctagggattgctattgtaaatgatttcaagagtattgaaggggataggactctggggcttcagtcacttcctgttgcttttgggatggaaactgcaaaatggatttgtgttggagcaattgatatcactcaattatctgttgcaggttacctattgagcaccggtaagctgtattatgccctggtgttgcttgggctaacaattcctcaggtgttctttcagttccagtacttcctgaaggaccctgtgaagtatgatgtcaaatatcaggcaagcgcacaaccattcttcgtactgggcctactggtgacagcactggcaaccagccattaatgaaggcaaacttaaacagaacgag

SEQ ID NO: 7694 - DNA, 416 bp, Zea mays
  Clone ID: LIB3137-007-Q1-K1-C12
cggacgcgtgggcgaccaactataggccacgtataaacaagttggactctacaaaggagggggaacagaagtcggccgggtcctactactacctcgatgactaatgaggaagcacagattcttcttggagagccatatggcgcatagtctttggagggcgcccagggtgcggaaacgagaagctactgtgaagctaccactacatggcatgagacttggttgcaggagtagagtgcgccggttataacttataaagcagagcatgctgtgttgatactgttttttttccctttttggcttgacctatatgaagaaaaggatcggcgttaaaatggtattgtgaagggagaggtttttaagcaaaatgttgtaccgtcgttttgccatcgagtatatttgaccctcgattatataga

SEQ ID NO: 7695 - DNA, 322 bp, Zea mays
  unsure (1)..(322): unsure at all n locations; Clone ID: LIB3137-007-Q1-K1-C2
cgacggcagagaggacgcacccgagtcctacgaggaacgcgagcgtaccagggccgcagtaaccgaaggggagaagttcatcgggctgcagaacgcgccgccgaaccagctgttgctggagaaagacaggaaggagaaggacgcttccttctcgcagaaagagaagcggaagagggaccggngccaagccagcagggggaagaactacgtcgaggaggagaagcggctcctgaggggcagcggcgtgtactctggctttgacacttagcanataccaagagctctagcatgtgtgcataccgaggggtagctgcctttcatc

SEQ ID NO: 7696 - DNA, 261 bp, Zea mays
  Clone ID: LIB3137-007-Q1-K1-C3
gccgataattcgaatcgctgacctctctggtacttctggtgcgaataagatccgactaactggtggagaaggtaccgtacgaaaagatattgaagatatttgcttgcatctttctagatcgaaaggactggaaactcttgcaaagaccacaaatggaattggtctttcaaagaaactcccaaagttgaaagaatgtggactcaaagctttaaatataagtttagatacactagtacctgcacaggttgacttcatgacaag

SEQ ID NO: 7697 - DNA, 179 bp, Zea mays
  Clone ID: LIB3137-007-Q1-K1-C4
caaaaatctgggaacaaaatctgcctttggctaccagagtttattgctcccatatcattcgctgtccatttcactgtccattcgctgaacacaaaaatctgggaacaaactcattttcccagtgaacaggtagcacaatttagttcacaaaatctgggagcacaatttagttcaacaaa

SEQ ID NO: 7698 - DNA, 204 bp, Zea mays
  Clone ID: LIB3137-007-Q1-K1-C5
caaaaatctgggaacaaaatctgccttgggctaccagagtatattgctcccatatcattcgctgaccattttactgtccattcggtgaacacataaatgtgcgaacaaactcattttaccagtgaacaggtagcacaatttacttcacaaaatctgtgagcacaatttagttcacaaaatctggtagcaattaacatgttgcac

SEQ ID NO: 7699 - DNA, 290 bp, Zea mays
  Clone ID: LIB3137-007-Q1-K1-C6
caaaaatctgggaacaaaatctgtcttgggctaccagaggatattgctcccatatcattcgctgtccatttcactgtccattcgctgaacacataaatctgcgaacaaactcattttcccagtgaacacgcagcacaatttacttcacataatctgccagcacaatttagttcacatagtctggtagcactttacatgttgcacaggtagaacaaaatctgtgagcaatacactgccattccagatcagaattctcagctcgcatttcaagtcacatgctagttcacaat

SEQ ID NO: 7700 - DNA, 314 bp, Zea mays
  Clone ID: LIB3137-007-Q1-K1-C8
aaaaatctgggaacaaaatctgcctttggctaccagagtttattgctcccatatcattcgctgtccatgcactgtccattcgctgaacacaaaaatctgggaacaaactcattttcccagtgaacaggtagcacaatttagttcacaaaatctgggagcacaatttagttcacaaaatctgggagcaataaacaggttgaacaggtagaacaaaatctgggagcaataaactgccatcccaaaacaaaattcgcagctcacatttcagttcacaagctagttcacattttagtttccaggtaccacaatttagt

SEQ ID NO: 7701 - DNA, 249 bp, Zea mays
  unsure (1)..(249): unsure at all n locations; Clone ID: LIB3137-007-Q1-K1-C9
gttcggtcggaacgcagcgcagcggcggcggcgatagggagagaggagagagtctgcaggatccagcaggccgagggaggagtcagcggcgggccggagaatatgagcggcaacggcgcgaagaaggtggtcgatgcggcggtgaaggccggcaggacgatcatcgactgggacggcatggccaagttgctcgtcaccgacgaggcgcgcaaggagttncgccgcctccgccgcgctttcgatgacgtc

SEQ ID NO: 7702 - DNA, 462 bp, Zea mays
  unsure (1)..(462): unsure at all n locations; Clone ID: LIB3137-007-Q1-K1-D1
cgnntccgctcgtnntcgatctnngtgcagcacgatctgagggtcctcgggccgaccccgtgaagacanngcttctaatcgtnncggcgatggcgccctcgtannttgcatagnnntggggcntnnggaaacccaagaaaatgcctntnncaaagcaccttcatnntgctgnncagaataccacgtggcgaatcaagcggttgcacgttgtacccaagggattnnnttgagaatgcggtngggtctccaaaccaagaagcccctgagtntnntcttaagaatgaacncnncccttgggaaagggttcctggttctggagacccctcctgatggccctgtcttttgagagtaaaatgctatcgcaccgctactgttgctcgctttgaagggatgaccaaccctctttttggggtcttccccgtatttgaacaaagccccaacgttgagcaaatggatggattt

SEQ ID NO: 7703 - DNA, 423 bp, Zea mays
  unsure (1)..(423): unsure at all n locations; Clone ID: LIB3137-007-Q1-K1-D11
caattctcgttccatccctcgtctcttgtgtcccgcctccgttccataattcaccagcgtcgtcctacccatatctcctatcgtcttctccctcgcgccatcagcttccccaagccagcggcgaccatgatctccccggacaccatccgcacggccatcggcgtcatcggcaatgggactgcactcgtgctcttcctctccccagtgcctacgttcatccgcatctggaagaaagggtcggtggagcagtactcgccgatcccgtacgtggcgacgctgctgaactgcatgatgtgggtgctgtacgggctgccggcggtgcacccgcacagcatgctggtgatcaccatcaacggcaccggcatggcgatccagctgacctacgtggcgctcttcctcctctactccgcggnggctgcgcgg

SEQ ID NO: 7704 - DNA, 334 bp, Zea mays
  Clone ID: LIB3137-007-Q1-K1-D12
ggtctccataaggagtcccctgtattgggtctgacctctttcagacctttgtttccttccttcttaatataatgagacgcagctctcctgcgtgttcgagaaaaaaacgtaatgctgatggagataatatccatgccggtaggacagactggtgcttgaaacatgcacagttacaacgtcttcgtcacacctggacttcaaccaaagaaatgtaaagacactggtctctggtgatgcaactggtctctggtgatgcaactggtgcatcacaagttcacaatagaatactagaaagctaagtagataattggttttttctgtgatgaactgcatg

SEQ ID NO: 7705 - DNA, 389 bp, Zea mays
  Clone ID: LIB3137-007-Q1-K1-D2
acgcgtccgctcgttcgatctgtgcagcacatctgaggtcctgggcgaccgtgaagcagcttcaatcgtcggcatggggctcgtattgcatagtggggctggaaacaagaatgccttcaaagcacttattgctgcagaatacagtgggatcaaggttgagttgaccaaggattttgagatgggtgtctccaacaagacccctgagtttcttaagatgaacccccttgtgaaggttcctgttctggagactcctgatggcccctgttatgagaggtatgctattcgcactctttgttgctcgctttgaggatgacaaccctctttttgggtcttcccgtattgaacaagcccactttgagcaatggaatgattttgtcgcaacaaaaagt

SEQ ID NO: 7706 - DNA, 292 bp, Zea mays
  Clone ID: LIB3137-007-Q1-K1-D3
ctcccttcccccccttcttctctcccttgccgacgattacgccaggtgcccaggtcttcttcgggccgaggtcgctgccgccatacacttggtgcccaggtcttctccgggcccttcgccagcgtcgagcagcaccaggctgagctccacagtggttcttggagaggtctgtgatagactactaggctgaatacacctacacaaagaagagaaaaggggatcttggagaggtttgtgacacactactgtggtgaatagacctatgcagaagagaaaaagggaaagagagaat

SEQ ID NO: 7707 - DNA, 416 bp, Zea mays
  Clone ID: LIB3137-007-Q1-K1-D6
ctcgctccactctctctctcgccgagtgagggtaaggagggagagagaggaggcagggaagtggggagagcggcgaggacatggcggcgaaagcgagcagagcagccgcctccggcgcggcctacgaggagcagcgcaagaagcgggtcctcgagaacctcaagcatctggaggatttgggtatagcggagatgtctaagagcctgctccaggcggcgcgcctgcagaaactgaacaaggccggcgtgcgcgcgggccccaaggagaggaagaagttcgacgccaccgaggtgcggcgttcttcgagggcgaagaccacggtttcctacaaggacgatttccgtgaactagatgcttttctgcgtggcacaaagcgcagtggtggtaggaatacagaacatggaagagaatacact

SEQ ID NO: 7708 - DNA, 259 bp, Zea mays
  unsure (1)..(259): unsure at all n locations; Clone ID: LIB3137-007-Q1-K1-E11
gggcgacccagcgtncgcacacctcacagagctgcagcagcatcttctgccacctcctgcctctccttcctgggtgccttcctgcataggttgctacacgtatatattctgaagaagagatcgagatgaccagcgtgtggaagaccaaggttctgcctggcctcaacaagatctttgacaaggatggcaagaaggctgcagcttgcaggcttcttgaagtccttcaacaacgaggagtttgacaaggacattgaggaca

SEQ ID NO: 7709 - DNA, 419 bp, Zea mays
  Clone ID: LIB3137-007-Q1-K1-E12
cccgcctcatggacggtggccgagccgcagccgtcggcggcgacccctctcccatcggtgcggcttccaatcccccggcgctgagcagcaggcccgtcgacgtctccttgttcacccacaccccgtgctactgcgaagaaaatgtttacatgttatgtaacgagcttattagaaccggagtggctgatcctgcgggcactgatctttatgttgttttcatatccaacgaggaaaaaaaggttcctctctggcatcagaaagcaggccattctgatgatggatttatttgctgggattatcacgtgatatgcatccagtgtttcatggtacttcttgatgtgcatatggaagtctaggcgaagcaaagaagttcttgattctgtttgggatctggactccgatcttcctttcccttcccc

SEQ ID NO: 7710 - DNA, 226 bp, Zea mays
  Clone ID: LIB3137-007-Q1-K1-E3
gccgcccgggtatctctgtctcactaccacttgccgcccgccctgcccgttgccttctcctccgactcttatcctatacggtcctgtctctcgcacggcccggttcgctggctaccaccttacctgccgctgactcgctgcagagggcaagacctgctgcaatggacgtcgtgcctgcgtgggggcacggcagaagcactcatggacgcagtgcaaactgcactag

SEQ ID NO: 7711 - DNA, 425 bp, Zea mays
  Clone ID: LIB3137-007-Q1-K1-E4
gcaggggcttctaccttaagatgaagggggactaccaaccgttacctggccgagttaaaaaccggcgcggagcgcaaggacgccgcggactccacgctcgccgcctaccaggccgcgcaggacatcgccgtcaaggagctgccgcccacgcatcccatcaggctcggcctcgccctcaacttctccgtcttctactacgagatcctcagctcgccggaccgcgcctgctcgctggccaagcaggccttcgacgaagctatttcagagctggatagtcttggggaagagtcgtacaaggatagcaccctcatcatgcagcttcttcgggacaacctcaccttggggacttctgacatgcaagaggatgggggcgatgaaatgcgggatgcaaacaagcctgacgaggagcagtagtagtcgtcatg

SEQ ID NO: 7712 - DNA, 334 bp, Zea mays
  unsure (1)..(334): unsure at all n locations; Clone ID: LIB3137-007-Q1-K1-E5
cgatgaatttgcattaatcacttcagcctagaagcttatgcttttttttacaattattactgttgggcacagagttaacagtaccatatgctatggttatctatttgtgtttctgccaatatatagctaacaattctctgctgcatttagaggaagagcgagtggtaatgtggtataagcaagggcctagtctaggatttggtctttttctatgaagaacanaccaacaaatgaaaaatggtagaaatcaagccgtacattttgggatttaatctacaatgaccttgacggaaaacaatggttaaggttaataatggagggattggtttaattt

SEQ ID NO: 7713 - DNA, 248 bp, Zea mays
  Clone ID: LIB3137-007-Q1-K1-E6
cgatcccctccttcctcctagctaggtcgtcctgcgcctataaacgcacagacacagcctctgctttgcctgcctcccctcccctcccgcttgtggcttcgtccttcggtgcttctcgttttaggagtgaggcagccaacggggttgctaaaggcacagctagcgaagcttctgcagcacagcgtctcgtcgagaagtcgagaagctagctcgcttctgccagaggtaaagaacaagctagactactc

SEQ ID NO: 7714 - DNA, 333 bp, Zea mays
  Clone ID: LIB3137-007-Q1-K1-E7
caaatcccctgtcccgctagcggctagtccgaccaggcgatcccccccccaaaccctccccgaaaaccccagagcggagaagagcgcaagatgttcggcttcgggcaccacggccaccacggccagaacccgccggcgcaccccccggcgcacggcggcgtgcaccagcccaccttcaagatcttctgcaaggccgacgaggggtactgcctcaccgtccgcgacggcaacgtggtgctggcccccgccaacccgcgcgacgagcaccaacactggtacaagggcatgcgcttcaacacccaagtcaaggaccaggagggccacccttccttc

SEQ ID NO: 7715 - DNA, 445 bp, Zea mays
  unsure (1)..(445): unsure at all n locations; Clone ID: LIB3137-007-Q1-K1-E8
cgtgtgtatggatgttttctcactactttttactgttctaattagttgtggttttaaggagcatacaacaattgagagcaacagtgatactctttacaagatgtgtttgtactaatactgttggagataaaccacctgctaaagaaaaaaatgtaggacaatgttgatgaaagcattgtctttattgtgtaggacaagcctgagcctccaccggaaggccgccttcctgatgccacccaaggttctgatcacctcaggcaggttttctcgacacagatgggtttgagcgaccaggacattgttgcgctttctggtggtcacaccctgngaagatgccacaaggacaggtctaggtttgagggagccttgacgtctaaccctttgatctttgacaacttttacttcaagtccatgaccttccttgatactgggcttgactttgtta

SEQ ID NO: 7716 - DNA, 408 bp, Zea mays
  Clone ID: LIB3137-007-Q1-K1-E9
ctccctcctagtccagggggcaggggctccattaccgagtagtttaattagtgctaggtgtattaccattgttagtgacttaattaccctcacgcgaagcaccctacctttgctagtcctcctacgtctcctcttcgcttaatcttggtgatttgattcttcacttcttgcgcgcattgcagagggtgctcggtctgcagctatcttaggttaaccagtcgtgtgtggtctatcggtttcgatatactattactactgctctgttataatcagcggggaggaggaagatgacggtgacgccacgcatcacagtgagcgacaggcggctgacagtgcgcggccgtacggtgctcaccggcgtgccggacaacgtgtctgctgcgcacgctgtcggtgcggtgctcgtcg

SEQ ID NO: 7717 - DNA, 234 bp, Zea mays
  Clone ID: LIB3137-007-Q1-K1-F1
cctttctccattgttcacgtagtttttcgactgccatgattcactgcaatgcgaagaccttggcagccgggactacaggctattgactgcatctcaggcttggctgcggctacgctaggctcgtgcagaataaaaagcaacggccagtgcaggccgtcaggtcacacggcaatgtgcataaatatgctgtggtacaacacatcagcgctgacaagccagcactgctcgctgctg

SEQ ID NO: 7718 - DNA, 420 bp, Zea mays
  Clone ID: LIB3137-007-Q1-K1-F11
cccacgcgtccgcgacgcccagaattcacgagaacgcacccgcccgcctcctccttcgggccccatccagatgatgcttagggtttccgcgtctccggccgccgcggtggccaaccatctctctggtggggccgcggcgaccacggctcctgccagggtgacggcgcagcgcagcggcgtctcgctgtccgccgccgccgccgccggcaaggggaaggaggtgctcagcggggtggtgttccagcccttcgaggagatcaagggggagctcgccctcgtgccccagtcccccgacaggtcgctcgcgcgccacaagttcgtcgacgactgcgaggcagccatcaacgagcagatcaatgtggagtacaacgcctcgtatgcgtaccactccctcttcgcctacttcgaccgcgacaacgt

SEQ ID NO: 7719 - DNA, 230 bp, Zea mays
  unsure (1)..(230): unsure at all n locations; Clone ID: LIB3137-007-Q1-K1-F3
agcccacctccaccgactgggctccagggtgaactatataacctatgtaccacgcgccgnnacgacggcncgccgtggatcgagtgcgaccaacnncattctcgctcgtcnnngccgccggcccgcgatcaaatccgatcgtnncgtcatgatngaaatatctatcnnaatctacgccgtcgatcgatcgatnngactacttngnntctactgggctatgtnnactacta

SEQ ID NO: 7720 - DNA, 199 bp, Zea mays
  unsure (1)..(199): unsure at all n locations; Clone ID: LIB3137-007-Q1-K1-F4
cgtncgagcacctccaccgactgcttcatggtgaacttttaacctataccacgcgcgacgacggccgcgtgatcggtcgaccaaccattccgccctcgccatcggcctctatcatcgatcgtcgtcatgatgatatctatcaatctacgcctgatcatcgatgactactttgctactgctatgtactactaaataaaat

SEQ ID NO: 7721 - DNA, 232 bp, Zea mays
  Clone ID: LIB3137-007-Q1-K1-F5
cccacaccccccgagctgagcttatctccacttcagctccaatcacagtcgtgacggagagctgtagagctagctagagggccgtgaaaatgccgatcaataggatcgccctggggagccaccaggaggtgtaccacccgggcgccctcaaggcggcgttcgctgagttcatctccaccctcatcttcgtcttcgccggtcagggctccggcatggtctttagcaagcttga

SEQ ID NO: 7722 - DNA, 304 bp, Zea mays
  unsure (1)..(304): unsure at all n locations; Clone ID: LIB3137-007-Q1-K1-F8
ggttgagaagtcccccatgctaatgaaagatctgaagatcagggcccacaacatcctctgtgtgacgagggcnatcctcgtgacaccacgaatactataactcctttttacatttggatttctgatctcggctctgcatgatctatctcaaatgtcttacttatgggcgcgttatgttttgtctcacccttggcactttattagatctttcttgtaacttcctctcctctgattagcaaccttgtaataacattggctcttatcataattgacccgtagctgttgtattcgtggctcagactgt

SEQ ID NO: 7723 - DNA, 416 bp, Zea mays
  Clone ID: LIB3137-007-Q1-K1-F9
ctgggttctgcatcagatcctcgcatatataggtgacttcacaaatttagccaataagttgtatagccgagtgaagctatgtttgacctatgctacgacgagccaccatcacatttgcaacatgctaaagagcaaaatgacaccaaactaatggaaaatgtaatccatgttctatcaagatatttcttaccgctgcaaccaggcacaactgacatagtcttcagtcgatgccatgcagacggacatggaggttgtgttcgaggtgctgaagagcctagaggacgttgaggagctggaccccgagtggctgcatgatcctcacaagctgcacacgtgcgtggagaaggacacctccttgtcggactcgtgcggcgtcgacccatttcggctggtggtgatggcgcccgaaggcatgc

SEQ ID NO: 7724 - DNA, 215 bp, Zea mays
  Clone ID: LIB3137-007-Q1-K1-G1
atccactgtcagtggcttgtcaccggtaccctcaatggagcaagaaaggaaagacggcaagctatggagggagttgaacgatggtgtaaagctgagctggattgttgtcaacaagaagatgaagagggcagtgaacctgacgagctggcacccgctgagcgggcagaggcactggccgaccgatgctgacttcgttctgcggttcgggtctgtgc

SEQ ID NO: 7725 - DNA, 423 bp, Zea mays
  Clone ID: LIB3137-007-Q1-K1-G11
ctcgtggggaagtttcgctctcgccggcgtcgacggcctagggttcgaggaacgtccggccgtccgtccggggaaggagcggtagggacgcggagatgatcgaggtggtgctcaacgaccgcctggggaagaaggtgcgggtcaagtgcaacgaggacgacaccatcggcgacctcaagaagctggtggcggcgcagacggggacgcgccccgagaagatccgcatccagaagtggtacaacatctacaaggaccacatcaccctcaaggactacgaggtccacgacggcatgggcctcgagctctactacaactgagccgccgcccctctctccctctcgtcaggttggtctgaattctgaagtcatgggtgcaattcgcttcgcggtgatctcttaagctcatcacatatataaaagcaac

SEQ ID NO: 7726 - DNA, 402 bp, Zea mays
  unsure (1)..(402): unsure at all n locations; Clone ID: LIB3137-007-Q1-K1-G12
cgaccgacgcgtccggcagcttctgcttgctctggggggaaggtgtgagagagagagcgagagagagatctaggagagaggctagctaggtggtcctcgaacgaagatgttggcggtgttcagcgggcaggtggtggaggtgccggcggagctggtggcggcgggcagccggacgccgtcgcccaagacgaaggcgtcgcagctcgtggggcgcttcctggccgcctccgagccggccgtgtccgtgcagctcggcgaccacggncacctcgcctactcccacaccaaccaggcgctccttcgccccaggtcgttcgcggccaaggacgaggtgttctgcctgttcgagggggtgctggacaacctgngtcgtctgagccagcagcacgggttgtcaagcaa

SEQ ID NO: 7727 - DNA, 209 bp, Zea mays
  Clone ID: LIB3137-007-Q1-K1-G2
ggttgagaagtcctgcaagcaaatgaaagagcggaagaacagggccaagaagatccgcggtgtcaagaagaccaaagctggtgacgccaataagaagtaaacgttcgtttacatttgtattactgttctgggctctgggtggtctacctgcaatgcataattatggggcgggtaaggtttggttccacctttgcgattaaatgaatttt

SEQ ID NO: 7728 - DNA, 272 bp, Zea mays
  Clone ID: LIB3137-007-Q1-K1-G3
cgcgcgaccactctaagatctgcgacctggctgacaaatgtgtactagcatcttctggctttcagggtgatattaaagctctgcacaagaacctagctgccagagaattgctataccaacaccagcataacaaaaggatgagctgccctgccatggcacagctcctctccaataccctgtactacaagcgcttcttcccatattacgccttcaatgtgctcggtgggcttgacagcgaggggaaagggtgtgttttcacctatgatgcagta

SEQ ID NO: 7729 - DNA, 376 bp, Zea mays
  Clone ID: LIB3137-007-Q1-K1-G4
gcaaccggtccaacactttcacgctcagcttcagcaatggctgcctccaccatggcgatctcctccacggcgatggccggcacccccatcaaggtgggttccttcggcgagggccgcatcaccatgcgcaagaccgtgggcaagcccaaggtggcggcgtccggcagcccctggtacggccccgaccgcgtcaagtacctcggccccttctccggcgagcccccgagctacctcaccggcgagttccccggcgactacggctgggacaccgccgggctgtccgccgaccccgagacattcgccaagaaccgcgagctggaggtgatccactcccgctgggccatgctcggcgcgctcggcttgcgtcttcccgagc

SEQ ID NO: 7730 - DNA, 273 bp, Zea mays
  Clone ID: LIB3137-007-Q1-K1-G5
cgattcctggccaaagcgacggcgagacgttggcgacgcatgaggacggtgcgaggtcactgcgtggcggcgcgaggtgacggcgggccggcgccgcgcagccccgacggcaagcctccccggcaccttctcaccggtgagtattgagctctcccatcctcatttttttcttgttcttgatggatatggaaggggggcgagagtagcgagcggtgtgcaagcggcggtggaggccggccgtggccggtggtgacgaggatgaaagggtatgct

SEQ ID NO: 7731 - DNA, 382 bp, Zea mays
  Clone ID: LIB3137-007-Q1-K1-G6
gtgatgctacgtcaaacaggagtctgaggggcagaaacctgtcccacagaattctaaccagagtggccaaaattctgctcctgcaactggaatggaagcctctgcctccggcaatggtgatgctacgtcaaacaattcactcaattgtgcaccatgtacttccgcaccatcttcttcatctgttgttggtctcctccaaggctcagtaagttacagacaagaccatccaacaagcagtggcaatggtatctataatggcggaaacagtggtccagctgccaaggccaactcaacgaactccatgcaatcaaatggaccggcatcgtttcccttgccagcaccctcagcatcaaatggcaatatgatgcctgctccccagcac

SEQ ID NO: 7732 - DNA, 305 bp, Zea mays
  Clone ID: LIB3137-007-Q1-K1-G8
gctggcttctcctccccctcttaccaagtcctcctcgggttaggggtccatagggttatgcggaggggcgatggcggcggctgatgtggagtaccgttgcttcgtcagcagtcttgcctgggccaccagcaacgagtcgctggagaatgccttcgtctgctacggcgagatcctcgactccaaggtcatcaccgaccgggagacggtgaggtcccgcggcttcagcttcgttaccttctactacgagaactacatgctcgacgctatcgagaacatgaacggcaaggagctcgacggccgtaaca

SEQ ID NO: 7733 - DNA, 304 bp, Zea mays
  Clone ID: LIB3137-007-Q1-K1-H1
gtacaatgcatgccttaacacaatggctacaagaattgctacagtgtttgcatcattgagggaatttcctcgtgtgcactatcgcgtagccaggacaatcgatgcatctactctgacgacactacgagatttggtcccaacaaagcttgctgcttccctgtggaattcccttgtcagatttaagtcaacgatacctgaatttccacaaacagaaacatgtgaactacttattgatgaccggtcaatagatcagattgcacccattattcatgagtggacgtatgatgctatgtgccatgatcta

SEQ ID NO: 7734 - DNA, 319 bp, Zea mays
  Clone ID: LIB3137-007-Q1-K1-H11
ccctgagggcttgaaggatctccttatgataatgaagaacaaatacggaaacccacctggctacatcaccgagaacggaatcggggatgttgataccaaagagacacctctacccatggaggctgccttaaatgactacaaaaggctagattacatccagcgccacatcgctactcttaaggaatcaatagacttgggatcaaatgtgcaaggctacttcgcttggtctctgctggacaactttgaatggtttgccggcttcaccgaacgttatggcattgtctacgtcgaccgcaacaataactgcacgcgctacatt

SEQ ID NO: 7735 - DNA, 165 bp, Zea mays
  Clone ID: LIB3137-007-Q1-K1-H2
cgcgggcggtacaacacatgccttaacactaaccctacatataaatgcttcattctttacaatattcatagggacttcctgaagtgcactatcgtctcatcagcacaattaattcatctactttgactacacttcttgatttccccccaacaaaacttgttgata

SEQ ID NO: 7736 - DNA, 353 bp, Zea mays
  unsure (1)..(353): unsure at all n locations; Clone ID: LIB3137-007-Q1-K1-H3
caaatacttgcataagatggcaggttccgtggcaatcgtgggcatcttcgtcgccctcctcgccgtggccggcgaggcggctgtgttcacggtggtgaaccagtgcccgttcaccgtgtgggccgcgtccgtgccggtgggcggcgggcggcagctgaaccgcggcgagagctggcggatcacggcccccgcgggcacgacggccgcgcgcatctgggcgcgcacggggtgccagttcgacgcgagcgggcgcgggagctgccgcacggnggactgcggcggcgtgctgcagtgcactgggtacgggcgcgcgcccaacacgctggcggagtacgcgctgaagcagttcaaca

SEQ ID NO: 7737 - DNA, 351 bp, Zea mays
  Clone ID: LIB3137-007-Q1-K1-H4
cgctccgaaatcttgcataagatggcaggttccgtggcaatcgtgggcatcttcgtcgccctcctcgccgtggccggcgaggcggctgtgttcacggtggtgaaccagtgcccgttcaccgtgtgggccgcgtccgtgccggtgggcggcgggcggcagctgaaccgcggcgagagctggcggatcacggcccccgcgggcacgacggccgcgcgcatctgggcgcgcacggggtgccagttcgacgcgagcgggcgcgggagctgccgcacgggggactgcggcggcgtgctgcagtgcactgggtacgggcgcgcgcccaacacgctggcggagtacgcgctgaagcag

SEQ ID NO: 7738 - DNA, 98 bp, Zea mays
  unsure (1)..(98): unsure at all n locations; Clone ID: LIB3137-007-Q1-K1-H8
canatacttgcataagatggcaggnccgggcaatcgtggcctcttcgtggccctccttcggcgngggcgtggaagcngctgtnntcacggtggtgaac

SEQ ID NO: 7739 - DNA, 432 bp, Zea mays
  unsure (1)..(432): unsure at all n locations; Clone ID: LIB3137-007-Q1-K1-H9
cggntcggaaaaaccggcccgacccacgcgtccggatgaagaaaccctttccagttcttcattcagatgggttccaaagcgcctatctgggtgaggcttctcttgctgtacgccgcgccctgaggaccttctgaacatgccaacgatgctgtcgagctcccgcatcatggctcagacttgaaggaacatattacttcaaccaatattcctgcccatctcaagaggggcagcgaactatgctcggcctgtaaaaacttcacgagcgaagccgccacttatatctgcaaggaacacacacaggacagcatcgtggagtttcttcatgatgcttgcttgcaatcattctcctttgaacagaactgtatctagctgatggactcttatgcgactctcctgtttgacaacatcacagacatcataccggaatcgttt

SEQ ID NO: 7740 - DNA, 375 bp, Zea mays
  unsure (1)..(375): unsure at all n locations; Clone ID: LIB3137-008-Q1-K1-A1
gccgcagtccgcaccccctccccaatcacgccacccgacaccgcgctccgcanattggtagtcgccgctaggcttccggcgagatggacgtggtgaaggcggcgcacttgtcggggcggacgctggaacgggtagtggtgcatcccttggtgctgctcagcatcgtcgaccactacaaccgcgtcgcccgcgacacccgcaagcgcgtcgtcggcgtcctcctcggcacctcatcccgcgggtccgtcgatgtcaccaactcctacgccgtgccgtttgaggaggatgacaaggatcctaggatctggttccttgaccacaattaccacgagtcaatgttctccatgttcaagaggattaatgccaaggagcatg

SEQ ID NO: 7741 - DNA, 411 bp, Zea mays
  Clone ID: LIB3137-008-Q1-K1-A2
gctcgagcggcaccgcgttcatcgcgacgccgacggcgatctccccgccgccgtgacggccccgcttctcgcgcacccaccgtcgccggctgagccttggcctgcgaactttggttcatcggagataaccgacgaggagatcgacgccgcctccgccgcctgctgccgcatctgcctcgaatccgagtccgagcctggtgatgtgctaatatctccatgtatgtgcaaggggacacagcagttcgtgcatcgctcctgccttgaccactggaggtctgttaaggaaggaactgccttttcacactgcacaacatgcaaggcgcgattccatctacgggttgaatttctggaggatgacatttgtcgtaaaatgaagtttcggatgttcgttgcaagagatgttatcattat

SEQ ID NO: 7742 - DNA, 391 bp, Zea mays
  Clone ID: LIB3137-008-Q1-K1-A3
gcaatgctggtcaacagaaccatctgagcggccaaacttcacggaggttgcgaataggctgcgctccatggcggcatcccagaaggtacaacaacactaagggaccaccaccggcacctagaagttgtcccagggcaacagtcagtcaaacttgcaggttacatccatgggccgtcaattcacgccatccgccatatatgcctaggatctgatcataacccttcatttgttcgtatattgtaatcaaagttacccgccgtgtgtctacaacgtgtcgtcgcaatggacgcagcaggtgcctgcctattcattcattcataccgctatggtcgtcaagaggtgcgttcaataagttactaatccagtgtccgttataggggagtacggtagt

SEQ ID NO: 7743 - DNA, 395 bp, Zea mays
  Clone ID: LIB3137-008-Q1-K1-A4
cagacagcaccagcagtctgcgcgcactccgcagtcggtcgtggagctctcgagcaggagcgcgcgacatcgtcggagctagctacgcgtgcgctgcgcgctccggccggcggatcggattggatggcgtcgtccaaggcgctcctcctgttggctgccgccgccgtcgctgcggcgtgcctggtcggcgccgcggacgccaagttcggccggctgggacggctcgtcatcaccggcgtcgtgccctgcaacaccggcagcctcatcgacatcgccagctcccccgccttcccgaacgcggacgtggagctgcggtgcgcgggcagggtggtggcgggcgcgacgaccaacaccaacggcaccttctccatggagctggacatgaccaacgcgct

SEQ ID NO: 7744 - DNA, 381 bp, Zea mays
  Clone ID: LIB3137-008-Q1-K1-A5
actggtaaaaaaggcagctaatggaagaaaagccaatagaatattagggatcacggtatagaaagataggatgatgaaacaaataacatatgttgataacttgtatattgatagattaaagattaaaagtattgtacataatagggatgacgcggatatttttttataatcatcaaaggatggcattgacagtttgcatgaaaggctagcaagttagtagggcatttagtggggaagatgtagacaccttgcatgaagagagatatatagaacatctagtggggattagctttatagagtatatagataaattcataagcttccactattgctcgacgtaccggtgccccccccaccagctccgttcattatccttggtct

SEQ ID NO: 7745 - DNA, 374 bp, Zea mays
  unsure (1)..(374): unsure at all n locations; Clone ID: LIB3137-008-Q1-K1-A6
ccggcgccgcnatcgcccaaggtcccgaccgccgcggcctcggccgccggcgccaaggagcggaaggaggtgcagcggcggaagcagcgcgacgaggagggcctccacctgctgacgctgctgctgcagtgcgcggaggccgtgaacgcggacaacctcgacgacgcgcaccagacgctgctggacatcgcggagctggccacgccgttcggcacctcgacccagcgcgtggccgcctacttcgcggaggccatgtcggcgcgcgtcgtcagttcctgcctaggcctgtacgcgccgctgccgccgggctcccccgacgaggtgcgcctccacggccgcgtggacgacgagttccacgtgttcaacggcattag

SEQ ID NO: 7746 - DNA, 404 bp, Zea mays
  Clone ID: LIB3137-008-Q1-K1-A7
gcaatgctggtcaacagaaccatctgagcggcaaacttacggagttgcgaatgggctgcgctccatggcggcatcccagaagtacaacaacactaagggaccaccaccggcacgcagaagttgtcccagggcagcagtcagtcaaacttgcaggttacatccatgggccgccaattcacgccatccgccatatatgcctaggatctgttcataacccttcatttgttcgtatattgtaatcaaagttacccgccgtgtgtctacaacgtgtcgtcgcaatggacgcagcaggtgcctgcctattcattcattcataccgttttggtcgtcgagaggtgcgttcaataagttactagtccagtgtccgttataggggagtccggtagtgtcccgtataggggagt

SEQ ID NO: 7747 - DNA, 386 bp, Zea mays
  unsure (1)..(386): unsure at all n locations; Clone ID: LIB3137-008-Q1-K1-A8
ggcgaggcaaaagcattgcgaccacatacagcgcgcgcttcaaggccttggtttttgggataacaaggaggagatggcggtcacgatcacgtgggtgaaggcgaggcacatcttcgacagccgcggcaaccccaccgtcgaggtggacgtgggcctcagcgacggcagctacgcgaggggggccgtacccagcggcgcatccactggaatatatgangccttggagttgagggatggaggatctgattatcttggcaagggtgttcttaaggctgtcagcaatgtaaataacattattggaccagcaattgttggaaaggaccccactgagcaggttgagattgacaacttcatggtccaacagcttgatggaacctacaatgagt

SEQ ID NO: 7748 - DNA, 337 bp, Zea mays
  Clone ID: LIB3137-008-Q1-K1-B1
gtctcgtcttcgttcccctttcctcctgcgcaccccgtcttctcctcaccgcgtcgggccccagggcaaatcaaccgcccgccgcctccgctcccctcccgtcccgaatcagccgctgcggtgcccaatccggccgatcccccctcctatccgccgcagaggcggcgcctctgggcctaccccgatgtatagcaacttcaaggagcaggcgatcgagtacgtcaagcaggcggtccaggaggacaatgccggcaactacgtcaaggcgttccctctctacatgaacgcgctcgagtacttcaagacccatctcaagtacgagaagaaccccaagatc

SEQ ID NO: 7749 - DNA, 360 bp, Zea mays
  Clone ID: LIB3137-008-Q1-K1-B2
cggacgcgtgggcaaaatctcatttgagcgtgcaagctccttcgcctcgaaccctctggcgcttggcttgctttcactctccagggccccactcccacctcgccgccgcagccatggcgatcacagcgccaactcccgacatcctcggcgagcgccagtccggccaggacgtccgcacgcagaacgtgatggcttgcggggcggtggccaacatcgtcaaatcctcgctcggccccgttggtctcgacaagatgctagtggatgatattggtgatgttacaatcactaatgatggagcaaccatacttaagatgttggaagttgagcatccagccgccaaggttcttgttgagttggctg

SEQ ID NO: 7750 - DNA, 279 bp, Zea mays
  Clone ID: LIB3137-008-Q1-K1-B3
acccacgcgtccgctatcacataggcattgactctttttttcaatctatgtccataaattccattccttgcgaatggcgaattaacccagtaataagcgcattacaaaaagcacaagattgtcttcttcccattcaaattaccttttaaaatcttgcccatctatattgtgtaaccaggcaagatcaacatcaagcccacgattaatctcataagaaagcttcttcaaccacaatcttttgaaaattcaaggattacatcctccctcgtccaacaaaaa

SEQ ID NO: 7751 - DNA, 358 bp, Zea mays
  Clone ID: LIB3137-008-Q1-K1-B4
acccacgcgtccgatcacagccaccatctacacatttctttaccacctcaccaccaacgctaaccaccgtgttttttgcgtttttaccgaaggaggcagagccataaaaagcccctatctcagaaccaacagtcaactagatcctactcaactgataccaaatatacaggcagacacaaacattttcttcacaagatcaccatactctactcaaacatcttctaactaaactataccaagttgtccattcactcaccaccgaacaaactaatcacctcaccttcataacgctgatattccgcttgcaatgggcatacctagaaccaaatttgccacatacatttcctacatcatcatt

SEQ ID NO: 7752 - DNA, 418 bp, Zea mays
  Clone ID: LIB3137-008-Q1-K1-B5
ctcgcgggcacctccggctgcttcctttgccaccgcagcaccagcgctgtgcatgaagcccccgccgctctcctcgttgcaggaggagggggaggaggggcctaccgtcgaggactcgtccgtcttctccgcagccgttgtgccgcctcgccccgccacgcacagccactcgctccacaagtacgcgccgctggactggtccgcctacttcgacgaggagcgccgcgtagccatccccgacaccgacaacgttttcaatgcgtacacgaccggatcggaggggcccgtcgtgttctgcctgcacggaggcggttattcggggctttcatttgctctagcagcaagtcaaatgaaggacaaggctcgtgttgttgccatggatctaagggggcatggaaaatcaacaacgaatgatgat

SEQ ID NO: 7753 - DNA, 335 bp, Zea mays
  unsure (1)..(335): unsure at all n locations; Clone ID: LIB3137-008-Q1-K1-B7
cgataccgacgttctacctcatctactagagcaagtcgacggaaggcttgcagtctgttccctacntggttgccctggtcaacaccatgctgtggatcttctacgcactgatcaagtccaacgagaccttcctcatcaccatcaacgccgccggctgcgtcatcgagaccatctacgtcgtcatgtacttcgtctacgcgcccaagaaagccaagctgttcacggccaagatcatgttcctcctcaatggcggcgtctttggggtcatactcctgctcacccttctactcttcaatggtagtaagcgcgttgtgcttcttggctgcatctgcgtc

SEQ ID NO: 7754 - DNA, 394 bp, Zea mays
  Clone ID: LIB3137-008-Q1-K1-B8
cacgaaaccacgcgcagatccaaacgaatccgagcccttccaaaccctaagctcgcgtcccctcccccccaaacaccaccgcgcacctatggcgaagtacggcgagggcgacaagcggtggatcgtggaggagcgcgccgacggcaccaacgtccacaactggcactgggcggagcgcgactgcctggagtggtcccgcgcgcggctctcttccctgctcgcgggcctcaccatcctcgacggcgagggcggcctcagtctccgcaccgtcgcgctcgacaagcttgatggcgaggcctacgtcaacatccgcaagggcaaggtcatcccggggtacgagctctcgctcaccctctcctgggaggccgaggccgcctcggagtccggagctgcg

SEQ ID NO: 7755 - DNA, 391 bp, Zea mays
  Clone ID: LIB3137-008-Q1-K1-C1
cggacgcgtgggggccggcgacccgccccccggtccccggagcgaaccgagcctcggtcaccggcatgtgggccctcaacaacgccaaggccggcggaccctgcctcacgccgcggcacccagcgccgccctcccttgcgtcgccgtcgacggcatcggctgggcggaggttctggaggcgcagccccgtgtgggcgcccctggtggcggtgcgcgcgtcggggggcacgaggaaggacggctccgtcggtggcgaggccagcggcgaggaagccgatagcaaggcgtcgtctgccgggcatgatgatgcatctaccccaacaggggatacctctgctgggttgaaccaatcgcatgacgaaccaaaaacaagcaagccgattaatgtttc

SEQ ID NO: 7756 - DNA, 415 bp, Zea mays
  Clone ID: LIB3137-008-Q1-K1-C2
aagaaaccgctgcacgttgaagacgcgcccaggccccgggaggactcagatttggtgtgactgcgacaagcaacacgttttggaatagttcgccaattgattgtgcaataatttaagacaaggttttctcggcttttgggtatgttcataaaatagccacttttgaaaaggctgcaggttttcaggcattgatccagtaactgatgcggctactgcttcagctgctagagaatccttagatggaaggagcatctcaagttacttgcttccggagcatgtaacatcctattgcctgcgaatttctttttctgcacataaggatttgaacatcaagttttagtcaaaccacaacagagagtagagacatctctaattcacttgagttggtcaaatttgttaacggtatagagcaact

SEQ ID NO: 7757 - DNA, 423 bp, Zea mays
  Clone ID: LIB3137-008-Q1-K1-C3
cggacgcgtgggtgcatctgcgtctgcttctgcactgcttcgcgtctccctcccccgcctcctgccccgccccggcaaaaaagcaaaacacggccatggaaggctacgaccgcgagttctaccagttcagcgaccagctgcgcctgcagacggccgccttctcgggcctctccctcggcgactccatctggtcccccgccggccggcgcaacaacagcaacgacgtcctcttcgccgcctccgcgtcgcccgccgacgccgccgccaagagcaacgccgtcgtcgggctcaagctcaacgacggagggcccggcctcatcggctccgggaagctggccttcggcggcggcgccggaagcggcggcaccaacaaagccgaccgctacaacaacaacaacctgcccaacaccgacaacaagaccg

SEQ ID NO: 7758 - DNA, 369 bp, Zea mays
  unsure (1)..(369): unsure at all n locations; Clone ID: LIB3137-008-Q1-K1-C4
gttggcttctcctccccctccggttcgggttcgggttcgagaggttctccggagttgggtttcgtgggtgagcggatcgagatggcagcgtcagatgttgagtaccgctgcttcgtcggcggcctcgcctgggccacggacgaccactccctccacaacgccttcagcacctacggcgaggtcctcgagtccaagattatcctcgatcgggagacgcagacgtcccgcggcttcggcttcgtcaccttctccacggaggaggcgatgcggaacgccatcgagggcatgaacggcaaggagctggacggccgcaacatcaccgtcaacgaggcccaatcccgcngcggccgtggaggcagcggcggcggc

SEQ ID NO: 7759 - DNA, 405 bp, Zea mays
  Clone ID: LIB3137-008-Q1-K1-C5
gtcatggacactctgctcatctcggatgagcgcaaccaccacctccacgggttcttgtgtcgccggaagaaggcgttagcagcgtcacctcaatccacgcgcaactaccatgcgggcaactgccgggcgttccactccggcatcaccgtcggcatcctgccgtacccgcccgcgcaaagggttgcactgacccactcctctcctgagcccaagacaccgaaacatcagcttcaccatgggaaaaagcgcagccgagcaatctctataaacctttcgacgtcccctccctctcgccctgagctctgggctggcccggggttctgcaattagccgcctaccagctccctcccgatccccaagttctcactccaccagaagcgcagtgtctgacttgaatttccacct

SEQ ID NO: 7760 - DNA, 364 bp, Zea mays
  unsure (1)..(364): unsure at all n locations; Clone ID: LIB3137-008-Q1-K1-C6
acccacgcgtccngcttgaacaacacgctgattttaacctttttactagattttgccaaactggtcttcgtggttcttcgagtcaaaagaggcttaacatatcttaaaaactaatagcttcatggtgctaatgtcaacaagaaagacacgaccagttgcacacctatgcatagagctgctaccactagaaactcggatctgagagaattcctcatcgaggaacgtactgaagttgatgcttttgacaagacaccacaaacacctatgacgcatgctggtataccttagaacacatgaactgctattatgttaattagacatacatctgatgttaatatccacgacaaggaaggctacactgacc

SEQ ID NO: 7761 - DNA, 386 bp, Zea mays
  Clone ID: LIB3137-008-Q1-K1-C7
atccgctcccctacctctccagcatcttccgtctccgtcgtctcgtctcggctcctggcctcgccgccagccatgggcaacatcaacatcggaatcaacggtttcggaaggatcggcaggctcgtggccagggtcgccctgcagagcgaggatgtcgagctcgtcgccgtcaacgaccccttcatcaccacggattacatgacctacatgttcaagtacgacaccgtgcacggccaatggaagcacagcgacatcaccctcaaggactccaagacgcttctcttcggcgagaagccggtcaccgtctttggcatcaggaaccccgaggagatcccgtggggtgaggctggtgctgagtatgtcgtggagtccaccggtgtcttcac

SEQ ID NO: 7762 - DNA, 403 bp, Zea mays
  Clone ID: LIB3137-008-Q1-K1-C8
cacatacacaagcacaagcgcactctatcaatggcttctgaggttgtccggcctagcggcgccgagctactaaaggcacaagccgacatatggcggctcagcctctcctacctcacgcccctgtcactgaggtgcgccgtggagcttggcatccctacggcgatctaccgccatggcggggctgcctcagccgctgagctggtcacggcgctgtctctcccctccactaagctgccgttcctccgccgcctgctgcggctcctcgccgcgtcgggcgtgttcaccgtcgacaagcagagctcggaggaggagcggtaccgcatcagccccgtgtcctacctcctggtggacggcatccctcacgaggaccacatgaaccacaccgctctggtgctcacctgca

SEQ ID NO: 7763 - DNA, 79 bp, Zea mays
  Clone ID: LIB3137-008-Q1-K1-D1
agattttcgtatgtaatgatgcactggcaccaacgtgtatggaacatttttttttggctataaggcttgagcttctatt

SEQ ID NO: 7764 - DNA, 402 bp, Zea mays
  Clone ID: LIB3137-008-Q1-K1-D2
caccaactcaaaatttgcgatttcggaagtgctaaagtattggtcagaggagagccggacatctgctacatatgctcaaggtattatcgagcaccagagctcatatttggtgcaacggaatatactactgctattgatttgtggtcaacaggctgtgtcatggcagagctgcttctaggacaggctctgtttcctggagaaagtggagtcgaccaactagttgagatcatcaaggttttgggtactccaacaagggaagagatcaagtgcatgaacccaaactatacggagttcaagttcccacaaattaaagctcatccgtggcacaaggtttttcaaagaaggcttccacctgaagcagtggaccttgttagcaggtttctacaatactcaccaaatcta

SEQ ID NO: 7765 - DNA, 398 bp, Zea mays
  Clone ID: LIB3137-008-Q1-K1-D3
atttcttcttctgcacaatgttgtttcagatacttgcgttgcaatggaagagtggggtgctcatgcgacagaacacacagccctggacgaggttatcccctgcgtggagccagccacggcgaacgaatccctgtacagaagcaggcaggtgacgttcgagctggtgaacgtggtgaaccaggtgatcaccaacgtgtcgaacaggaacttccccccgcagctgacgcctttgtactacaaccagtcgggaccactgatgcctctgctctgcaaccccttcacccctgatctgagggaccgcaactgcagcagaggagaggttaccttggacaacgcaacccaagtctggaagaggtacgagtgccagagcaccaccgtctcaagaggaggcgagatct

SEQ ID NO: 7766 - DNA, 375 bp, Zea mays
  Clone ID: LIB3137-008-Q1-K1-D4
ctcgacgaatgaacgaacggacaggttgttgcacagaagcgccatggctttcgcgcgcaaaacgtcctcctcctcctcgctgtcctcggcgttgcaggcagctcagtcgccgccgctgctcctgaggcggatgtcgtcgaccgcaacaccgagacggaggtacgacgcggccgtcgtcgtcactagagctgcggcggctgctgtcacggttcccgccgccccgccgcatgcgccggcgccggcgccggtgccgccaaagcaagcggcggcacccgccgagaggaggagccgtccggtgtcggacaccatggcggcgctcatggccaagggcaagacggcgttcatcccgtacatcaccgcgggcgaccccgacct

SEQ ID NO: 7767 - DNA, 352 bp, Zea mays
  unsure (1)..(352): unsure at all n locations; Clone ID: LIB3137-008-Q1-K1-D5
gaacaaaaaccttgctcattcttctctcgtctcggttcagagcgggagcaaccaaagcgaacaacagggtaccaacacctaatccaaaggtagaacggacactaacacggtgacagaagcgaacggtaacacgatactatagatagataagataactcggccgaagccaggatgggcccacacatcagtccctccagccgccgccgccaccgccgccgtagccgccaccgccaccctcgcgccgaccgccgtagccgccaccgtcttcgtagccgccgccgccaccttcgcgccgaccgccgtagccgccaccgncgccataaccggcgtcacggcgcccggcaccataacc

SEQ ID NO: 7768 - DNA, 401 bp, Zea mays
  Clone ID: LIB3137-008-Q1-K1-D6
cttggtgaaaaaaagtcgccgcgttcctcttgcctgatgaaatcctcttctggtctggatctgaacctccgcgtggcttccggatcagatgcttggtccgatcgaacaacggtgagtcttgctctgttacttgattgttcgaaacgcatggttttgttttgtgatgatgtgcaggttccgatctgtttcgtttgattgatgagttgacgacgcatcagctcgaagcgagacgaggctgcatggtttttgtgcctggaggtttctgatccgcgtggttaaggaaactgggtgctacaatttgttgctacaagtgcccgatccgtcgaattgatgtctgccgaccttcagagctgcgacgttccgggaatctggggggatctggatcttggcggactggacaa

SEQ ID NO: 7769 - DNA, 430 bp, Zea mays
  Clone ID: LIB3137-008-Q1-K1-D8
tcggaagaccggcgggacccacgcgtccgcggacgcgtgggtaggtagtcttatgtttgcatctccctggcaaccgggggttgggggcaagtatcagagactgtgtgtaactccaattgcagttgattgttcttcgtcagtaaaattctctgtgaaaggtttcaatatagttcagccaaccacaaaattactttgtgtgtttgatgaaaaatatttaattcaagaagagacacaaatgctacttgaagattcaactatgcagcaaggccctcaatgcctgaccttatcttgttcctttccttgtacaagtggaagaggattcatagagattgaagactatgatcaaagcagcctttctgttccctttgttgtcacggacaaagatgtatgttctgagattcggatgttggagcatggattggatttagtt

SEQ ID NO: 7770 - DNA, 321 bp, Zea mays
  unsure (1)..(321): unsure at all n locations; Clone ID: LIB3137-008-Q1-K1-E1
cgcttcccggcagcgccctccctatacgttcccccatttcctgtgttgacggctggtgcgcgggacttcntgctcaacaccggcnccaagatcccctccgtggggctcggcacctggcaatctgaccccggcgtcgatggcaacgctgtctacgccgtcgtcaaggcgggttaccgacatatcgattgtgccagagtttacggcaacgaaaaggacattggtttggcgctgaaaaagctatttgaagagggtgtaatgaagcgagaacatatgtttatcacctttacactatggaatgatcataatgctcctgaagatgtg

SEQ ID NO: 7771 - DNA, 292 bp, Zea mays
  Clone ID: LIB3137-008-Q1-K1-E2
tgactgactgacacatgggaaagtagcactggaatactgctgcctatacacacacggcgcttggggaaaaaaatctgacgcaaaaaccgacccacagacatactcatgcatgatgcataaaacactactagtttgcattcgcaccgaacgaattctaacttgagagacactcctgtcggacaggacctggactaactacaaactggcagggaccatcctggtgcaagtatgacccacctggcttcctttactacttacagattatttaaagccatttccgatgcatacacca

SEQ ID NO: 7772 - DNA, 410 bp, Zea mays
  Clone ID: LIB3137-008-Q1-K1-E5
cccacgcgtgcgctccactctcactgactcagaggcgacccgcggccgaccatgcgggcagcagcggcgtccgtggcgttggtaccccgcctcgtcctcttcgtcctgctgctgtccggctccggcgtgccgactgccctgtcgaagtcaacgctggagtgctgcgcctcctccagcgcctgcccggcgctgctctcctacacgctgtacgcggacctgaagcttgcggagctggccgcgctgttcgcggccgacccgctggccatcctggccgccaacgccatggacttcgcggtcccggacccgggggaccgcatcctaccggcggcgctcgcgctgcgcgtgccggtgccgtgcgcctgctccgacggcattcgcaaggacacctccgcgcggtacgtggcgcgggc

SEQ ID NO: 7773 - DNA, 411 bp, Zea mays
  Clone ID: LIB3137-008-Q1-K1-E6
ggcgatgggacgagcggcggaggatgagggtgacgtggagtttgctgactacgaccgggacgacgaggacgccatggaggaggacggccgcgccgcccgtgcgctccccgtgccccgcatcgtctcccccgccgtggtgcgcacccgcgggcgcttcgttggtcgcagcccctccgttctcacctccagccgctaccgcttcgacttcaccactaacaacggagaccatggtccatcccactaccgcagcgctctatcgaaaggctggcaattctttgtttctggagttaaagacgatgctgaagaagatgatctttacaatgctttcagtgattttggtcatgtcaaggacttgcatctcaatctagaacgccgcactggatatgccaagggatacgcgctgattgaata

SEQ ID NO: 7774 - DNA, 409 bp, Zea mays
  Clone ID: LIB3137-008-Q1-K1-E7
cggacgcgtgggtcccgctccactccgcactgtgtcgagccgagcaagcggctggcgtaccttggcaccttgcccgcgcccgcccaagctccgacgctgcctgaagcagcaagtgacagctcccctgggcgagccggtttactaccagcacggtgagcttcggtcgggcggagcagacgacaggcagcgcaccaaggtagatcgacgggctctacacggacccgatctgcctctatgctgcaacctggcttttcttcttccaatcagcaccacagcgcaacgcctgaacggccgtcgctgccggctacgccaggtgctcaagtcttcttcggccccttcgccggcgacgagcgccaccaggatgcgtccgagactaagttgatgaagcagcctacttgggtcttctttg

SEQ ID NO: 7775 - DNA, 405 bp, Zea mays
  unsure (1)..(405): unsure at all n locations; Clone ID: LIB3137-008-Q1-K1-E8
tgtcactcacgctaccgccgtgaccgatcatctcccactctctcgtcagggcctctgcgctagctagttagctagctaggacagangagggaggggaaggcgctggctatggcgactgcggcggcggcggccatggaggagccggacgtcgtcaacggccgcgacgtggtgagctgggtggcgtccggggtggtgctgtggtcgaccgccttcttgctggtgcgggcgctgttccccaagcgctcctacgacttctgcaaccgcgccgtctccaccatgcacgccgtcgccgacgtgtgcctcgcctgcctctccgtcgacgactggtcgtgccccgtctgcccgctcgccgccgcatcctnccctcgccagatgaaggcgctggcggntacgctggcgtacatg

SEQ ID NO: 7776 - DNA, 240 bp, Zea mays
  unsure (1)..(240): unsure at all n locations; Clone ID: LIB3137-008-Q1-K1-F1
caagttaaaagaagcaccagtgcctgatcgatggcggcccangctctcctctccgggcggcaggtgctgggccgccccgtgcagtcggccgtctctaggtcgtcggcgaggaaggcgcccttcgtcgtcagggccagctccagccctccagccaagcaaggtgccgacaggcagctgtggttcgcgtccaagcagtccctctcctacctcgatggcacgctgcccggcgactatggcttc

SEQ ID NO: 7777 - DNA, 387 bp, Zea mays
  Clone ID: LIB3137-008-Q1-K1-F2
ctggtttctttccccttggccaagcccaagcccaaacccgggaaccccgtctttagggagtacagcctcgactcgtcctccgcattccccgtttgccttgtttaccattcctccccaaaacacatcctgcgatcctcgaagcctccgccgagcatcgatcatgtcggcctactgcggcaagtacgcggatgagctcatcaagaatgctgcctacatcggcacccctggcaagggtatccttgctgctgatgagtcaactggcaccattggcaagcgcctttccagcatcaatgtcgagaacgtggaggagaaccggcgggctctccgtgagctcctgttctgctgccctggtgccctccagtacatcagcggtgtgatcctcttcga

SEQ ID NO: 7778 - DNA, 210 bp, Zea mays
  Clone ID: LIB3137-008-Q1-K1-F4
cgacacattgggcccatataatcccaactaaccaacacggtcaacggacagtgggcgacaggaccggacaagccacgctggctctcgcctcactcaccgttccaatgaacctctaccaggctattacttacgggaacgtcaccagctaaccaactcgacttgatgacgccggctaccactacccataccggcacatgaacttgcgcaccc

SEQ ID NO: 7779 - DNA, 283 bp, Zea mays
  Clone ID: LIB3137-008-Q1-K1-F5
gtctagtccacccgccgttctcctagctcctctactcgccagtcgccatgggcacgggtaagatcggaatcaacggcttcagaacgatcggcacgctcgtggccagggtcgccctccaaagcgaggatgtcgagctcgtcgccgtcaacgaccctttcatgaccacagactacatgacctacatgttcaagtacgacaccgtgcacggacactggacgcacaacgacatgacactcaacgactacaagacccttctattcagagacaagccagtcaccgtctt

SEQ ID NO: 7780 - DNA, 215 bp, Zea mays
  Clone ID: LIB3137-008-Q1-K1-F6
cggagggacccgtggacccacgcatacgcggaccccttgggccccaaaaattcctcagccaacccaacacggtcacgggacaggggacgacaggacaggacaagacacgctggctctgccacaccatggttccaatgaacctgtacggggctattatttcgtggaacgtgacgaggtacgcaactgcacttgatgaggctggctccgactaccat

SEQ ID NO: 7781 - DNA, 371 bp, Zea mays
  Clone ID: LIB3137-008-Q1-K1-F8
acctactacgcgagcacgcgccggcgaatcgagatcggcatgtggccggcggcgacgatgttcgctctgggcttcctgctctgccccttccccgccctgtcgccgtcggcacgtaacctcaccgcgctgctgccggagctccgcgacctcttcggctccctctaccgccactgccggcaggagttcttcctgctggcgtctactcgacggcggcggcgtggttcgtagagggggtggcacaccgacggcgatgaatcatttcgtcgttagcaccgtttgttcaaatcctccgctgtaggacagttctgctctctgctgcagcgcatgtccggccctgtgttacttctttgtgaatgaacatccattcatca

SEQ ID NO: 7782 - DNA, 367 bp, Zea mays
  Clone ID: LIB3137-008-Q1-K1-G1
ctccctccttcctcggcctcctcgaccactccgacgcccacagcgcctccggcgagcgccacctgtccaccggcggcagcgaggggcgagggggctgatactgtaggcggaggaggagccgagccgagccgatggggcagcagtcgctgatctacgcgttcgtggcgcggggcaccgtggtgctggccgagtacaccgagttcaccggcaacttcaccaccatcgccgcccagtgcctgcagaagctccccgccagcaacaacaagttcacctacaactgcgacggccacaccttcaactacctcgtcgaggacggattcacgtactgtgtagttgctgttgaatcagtcgggcgacaaatccccat

SEQ ID NO: 7783 - DNA, 411 bp, Zea mays
  Clone ID: LIB3137-008-Q1-K1-G2
ccatgatgttgaacgacagaatccgcagtctcagtgctctgcaaggtgcgctgaggggggctggggagcacctgtccaccctacaagctgataccccatactctgaatttcaccacaggttccaggaacttggtctggagaagggttggggtgattgcgctaagcgtgcacaggagactatccacctcctcttggacctcctggaggccccacatccgtccaccctggagaagttccttggaacgatccccatggtgttcaatgtcgttatcctctcccctcatggttacttcgctcaagctaatgtcttgggttaccctgacaccggaggccaggttgtctacatcttggatcaagtgcgcgctatggagaacgaaatgctgctgaggatcaagcagtgtggtcttgaca

SEQ ID NO: 7784 - DNA, 359 bp, Zea mays
  Clone ID: LIB3137-008-Q1-K1-G3
tgccaaggagcatgttgttggctggtacagcactggcccaaaactaatggagaacgggttgggtgtccatgcattatgcaacagttatgttcctaatccagtcttggtgattattgatgtccaacccaaggagctgggtataccgaccaaagcgtactacgctgtggaggaggttaaagagaatgcaactcagaaaagtcagaaggtatttgtccatgttccttcagaaattgcagctcatgaagttgaggaaattggagttgaacaccttctaagggatgtcaaggacacaacaataagcacacttgctacacatgtcactagcaagcttgcagccttaaagggactcgatgcaaggc

SEQ ID NO: 7785 - DNA, 386 bp, Zea mays
  Clone ID: LIB3137-008-Q1-K1-G4
agccaccctatttttttttttaataccttaatgctgcataagctcaacgggatcagtgtgactactcaaaggggccctcataacaggaccagatcctagtacaccaaccactctttctacctttgcaacaacagtcatacaagcagcaaactcaactcacagagagaggggtacaagaaatcaaacatgtcacccttagtaattttaaccagggggccactttatctgccttccaccaagtacatgcatgtgcagatgatagacagattggcatccttcaactccattgttgatgacaacacggtacccactcgctacaccttccttatctgccactactttcgctgcgtaaagaagccggcccaagatttctgtatgccttggct

SEQ ID NO: 7786 - DNA, 407 bp, Zea mays
  Clone ID: LIB3137-008-Q1-K1-G5
gtttgctgagctcgttaccaagattgataggcgatccggcaaggagctggggaaggggcccaaatttctcaagaacggtgatgctggtatggtgaatatggttcccactaagcccatggtggtggagaccttttctcagtatcctcctcttggtcgatttgctgtccgtgacatgaggcaaacggtggctgtcggagtcatcaagagtgtggagaagaacgacccaactggagccaaggtgacgaaggctgctgccaagaagaaatgatctatctgtctggtgctgtgcttgcttgttggttacctcgtggaagcttaaaatatctcgtcttgttgacatccttgcagctgtcgcgtgaacaagtaatctatgatggcaatgtttgcctggtcatgaaatatattac

SEQ ID NO: 7787 - DNA, 410 bp, Zea mays
  Clone ID: LIB3137-008-Q1-K1-G6
caccaactcaaaatttgcgatttcggaagtgctaaagtattggtcagaggagagccggacatctcctacatatgctcaaggtattatcgagcaccagagctcatatttggtgcaacggaatatactactgctattgatttgtggtcaacaggctgtgtcatggcagagctgcttctaggacaggctctgtttcctggagaaagtggagtcgaccaactagttgagatcatcaaggttttgggtactccaacaagggaagagatcaagtgcatgaacccaaactatacggagttcaagttcccacaaattaaagctcatccgtggcacaaggtttttcaaagaaggcttccacctgaagcagtggaccttgttagcaggtttctacaatactcaccaaatctacggtgcac

SEQ ID NO: 7788 - DNA, 402 bp, Zea mays
  Clone ID: LIB3137-008-Q1-K1-G7
cgagctcgatcgacgttggctctgtgtggtgcgtgcgtgcatgtgccggggacgtgggcgtgtaaagctggagctctgaccggggcagtcaccggcgcggtggcgggcagggcttccgacagcggcggcgtcctgcggggagctggactgggggcggtcgccggagctgtcctctccattgaggtccttgaggcttctcgcgcttactggtgctcgtcggaccggctgggctcgcacggcggagcatcgtccatggctgatttcattgagcagcttcttcgtgcccggtttgtgcaagagcaatttactgcttcaggatatgcatcatatcgctggcagctcagcatatcatattttggtcaggatgacctatacgacatctttggggacatttcatctgaa

SEQ ID NO: 7789 - DNA, 379 bp, Zea mays
  Clone ID: LIB3137-008-Q1-K1-G8
ggacgacccacgcgacccacatatcaagcctcccttttttttttttttttaccttaaagcttcataaactcaattgttccaggggtgaattctcaaaggggccatcatcacaggggcagatactagtacaccaaccactctttctacctttgcaacaacagtcatacaagcagcaaactcaactcacagagagaggggtacaagaaatcaaacatgtcacccttagtaattttaaccagggggccacttcatctgccttccaccaagtacatgcaggtgcagatgatagacagattggcatccttcaactccattgttgatgacaacacggtacccactcgctacaccttccttctctgccactactttcgctgcgtaa

SEQ ID NO: 7790 - DNA, 339 bp, Zea mays
  Clone ID: LIB3137-008-Q1-K1-H1
atttgtacgtccacaaaaatattctgcagagaatttgagaacaaagattcaagatgggcatgccgttctctgccaacgggtggcaatggcgaaagacaacgtccacatgttgtaagctatatgtaattgtaacttaggtacaaagagtcgtccctgtgctgtgcggtcagggaaaatagtctggtggttgcgctgttttactctacaagatgtcttatatgatgtacaagatacagacacttctgggtgtagtgaccttgttcccacctcaccttttaaagtttgtggcgctgagtcaatatggatctaagtcaattgattgaagaaacattttcgact

SEQ ID NO: 7791 - DNA, 394 bp, Zea mays
  Clone ID: LIB3137-008-Q1-K1-H2
ccgacaccatcgacaacgtgaagcaaagatccaggacaaagaggcatccccccggccagcagcgtctgatcttcgctggcaagcagctggaggatggcgaccctacagactacaacatccagaaggagagcactctccacctgggctccgcctcgggtggtcagaagccatggtcatttaagctgctgctgtacctgggtatctgcgtcgactggtgccctctggtgtacctctatatggatgtcgtcgtctaataaacatctgtggtttgtgtgtcatgaatcgtggttgtggcttcgttggtttaatggacctgttgtgtcctctgtgttgtacccaaaactcttctgcagcagtatggcttgaatccttatgaagtttgatgtttgaactt

SEQ ID NO: 7792 - DNA, 338 bp, Zea mays
  Clone ID: LIB3137-008-Q1-K1-H3
cggacgcgtggggaaaggttcttctattacttgaactttgctaattgaagctgcagggggaacgtcgatagatcagcattgcgaggcacaacaacaaggttgcttaacaatgccaagaggccacagaaagaagccctcaattcctgaggtatgaagctgcgtatatccttaggtgaataaaacctgacgtctgttcgaagctgtacctaaagaaaaaaatgcataccaacccagaggtatgattctgtacctaaagaaaaaaatgcataccaagcctaatgtctgttgttcaccttacgtgaatcaaactcaatgtattatgtttaatgggtcttaac

SEQ ID NO: 7793 - DNA, 397 bp, Zea mays
  unsure (1)..(397): unsure at all n locations; Clone ID: LIB3137-008-Q1-K1-H4
atacatttattccgctggtttcaactcgagatatacaggcctactgcctggatttagactgtaagcaaaatatattgtgacacactaatatataggcagcgttatttacagttgattaattatgtatacaatatatataacttttacatatttcattgattaattatgtatacaatatatataaccttgtgtaggtttatgaggctactgcatccgattaacctccccaaggcgtgagctttatgcagtcatttagcctggagtttgtatccgtgtcacctagtactttacggtaataataagagactgtatctgtatgtttcggtaaaccagaattctggtcacctcttgtactcttttgtattttaatgacattanaatccgagtgtttctcttt

SEQ ID NO: 7794 - DNA, 242 bp, Zea mays
  unsure (1)..(242): unsure at all n locations; Clone ID: LIB3137-008-Q1-K1-H6
atttatttccaattntatataacttttaaatattcaggcctactgcctgnattttgcctgtttgcaaaatatattgggacacactaatatataagcaaccttatttacactttattaattatgtatacaatatatataacttttacatatttcattgattaattatgtatacaatatatataaccttgtgttattttatcaagctacttcatacgattaaccttcccaaagctttaacttta

SEQ ID NO: 7795 - DNA, 390 bp, Zea mays
  unsure (1)..(390): unsure at all n locations; Clone ID: LIB3137-008-Q1-K1-H8
ctttttcacatcantaccttctggtttagttggctcttgccatgaagctgggttcaggtcaaatggagagtttaagaatgccatcttatcaagagagttggaagatattgcatctattgaagacaagttatgaaggtcacttacaaccatggagaaagatagaattggagtgggtaacttaagattatatttggaagagttgctgcagaagatgtacgttaagagtgttccattaatcattccacttcttgagaagcaacatcgaaatacaacacgtaaattgcgtgaaatcagtcatgaactcagtgatctggacgaagccaaactgaatgagaaagctcagctattccatgacacatttttgaccaagttatctttgctattgaaagg

SEQ ID NO: 7796 - DNA, 148 bp, Zea mays
  unsure (1)..(148): unsure at all n locations; Clone ID: LIB3137-009-Q1-K1-A1
aaaaanaccacccacacgtacatggatgtatataaaatatttaatcaatcatctttttaatttatacaacacctaaataccttgttttttgtgactgtcatcattacaaacaaaaacaaaatattttcaacttcacaattctattaca

SEQ ID NO: 7797 - DNA, 337 bp, Zea mays
  Clone ID: LIB3137-009-Q1-K1-A10
cgttcgttgcgtagccaaatcgagatctccgtctcccccgtgacgaatcccacgcccacctgtccccgacccggctggccgcagcaacagcgcatcgcaccgggaggcgggagccgaagaaccaaacaggagatggcgtcggcgctgtcctccctgcgctacggcgacagcctctcggtggtgggcatctccgccgcgacggccgtgctctgcgaggccatctgctggcttatcatctaccgcaccgacacctacgactccctgcgcgcctgcatcgaacgccactcacgcacgctggacgccatgaaagccgctgcaactcctccgggctgactct

SEQ ID NO: 7798 - DNA, 398 bp, Zea mays
  Clone ID: LIB3137-009-Q1-K1-A11
gttgctacaagatggtatagggcccctgaactgtgtggatctttcttttctaagtattcaccagctattgacatatggagtatcggttgcatttttgcggaagtcttaactgggaagcctttgtttcctggaaaaaatgtggtccaccagttggatttgatgactgatctcttgggtactccatcacttgatacagtttctcgaattcggaatgagaaggcaaggaggtatttgaatagcatgaggaaaaaacagccagtatcatttcccggaaggttccctaaagcagatcctgccgcgctcaaacttttgcagaggcttttggcatttgatcccaaagataggccaactcctgaagaggcattggctgatccgtattttaaaggcctcgcgaaagt

SEQ ID NO: 7799 - DNA, 349 bp, Zea mays
  Clone ID: LIB3137-009-Q1-K1-A12
ctctccctccatctacctcgtcttcgagtacctcgagcacgacctggccggcctcagctccggccccgacatcaccttcaccgagccccagatcaagtgctacatgcgacagctgctggaggggctggcgcactgccatgcgcgcggggtgatgcaccgggacatcaagtgcgccaacctgctggtgaacaacagcggcgagctcaaggtggcggacttcgggctggcgaacctcttcgcgccggcgccggcggcgccgctcaccagccgggtggtcacgctctggtaccgcccgccggagctgctcctgggcgccacggcgtacgagcccttcgtcgacctctggagc

SEQ ID NO: 7800 - DNA, 456 bp, Zea mays
  Clone ID: LIB3137-009-Q1-K1-A2
ggaccggaacgaccgacgcgatccgatcgtgcatatattccactagatcattcttatgtcgacggcaatgactcgaccgcgctgcaacgggcgttgagtgagatagaaacatgggcaagaaagacaaaatgcctgctctcgcaattctattgaggacaacctactgttgcgaaaacgatgacaaagactaccgttgtttgatcactgacatcgacaaggggaagcgattcatgacgtcgccggagcttagaacaatatcggacagctatactggaatgccgtcatataccctgtcgccatgtatgccatacacgcagcattatattcacagctaatcatggatgattgggtcggaaccaattccactaaattggtgtatgtgattaatcattttatgcgaatcattgcacatgcacgtaatgtatcatatagtgcatacacaagggaataatacat

SEQ ID NO: 7801 - DNA, 99 bp, Zea mays
  Clone ID: LIB3137-009-Q1-K1-A3
cctcatcatcgcgcgcgaagcctttgtgcctttgtctccactcccgaccgcgatcacgcgcgcggcgttcgtggccacagacccagcaatgcctcgcac

SEQ ID NO: 7802 - DNA, 265 bp, Zea mays
  Clone ID: LIB3137-009-Q1-K1-A5
gcgcggacgcgtgaggtcccggccagtatgtgactgttactaccgacaatgggaaggggttcactggcatctgtcgctttgacactgacgtggagctggcgtacttcaaccatggaagcatcctcccttatgtcatccgcaacttggcagctgcgcataactgacgcaagatcacacaccgcttgacccacaatggcagtggcaggctccatgttcccagggctagcgacctgtatctcaatgtagtgacatttgtgatgcatct

SEQ ID NO: 7803 - DNA, 328 bp, Zea mays
  Clone ID: LIB3137-009-Q1-K1-A6
gttgctacaagatggtatagggcccctgaactttgtggatctttcttttctaagtattcaccgcctattgacatatggagtatcgcttgcatttttgcggaagtcttaactgggaagcctttgtttcctggaaaaaatgtggtccaccagttggatttgatgactgatctcttgggtactccatcacttgatacagtttctcgaattcggaatgagaaggcacggagggatttgaatagcagaggaaaaaacagtcagtatcattttccgggagggtccctaaatcagatccttccgtgctcaaacttttggggaggcttttggcatt

SEQ ID NO: 7804 - DNA, 441 bp, Zea mays
  unsure (1)..(441): unsure at all n locations; Clone ID: LIB3137-009-Q1-K1-A7
tggatggatgggtagattacatcaatcatcggtgtgggtgtggagcgacggcttgagacgtgtgtttttcggctgtaatcgggagaaagaaaaagagaatggttgaactttcaattctattgttttcatacttttgtttttaaaattatcacaaagacttcgtttgtttgtaagctgatttctctagtcggttgcgattcatgaggacacagcaacttagagaaatatgttttagttatactgttctttttttatatagcctgtctccatctatgtaatacaagcagcattatcttcgcagttaatcgtggatgatttggtgggaaccaattccactaaattggtgtatgtgattaatcattttttgcgaagcaatacacattcacgttatgtttcatatagtgcatcatttttggaataatacatagcggntggtacaat

SEQ ID NO: 7805 - DNA, 439 bp, Zea mays
  Clone ID: LIB3137-009-Q1-K1-A8
atttggaagaatgggggtttaccttagcactccgaaaactgagaaggtatccgaagatggggaaaatgataaacttaaattcggagtttcatctatgcaagggtggcgtacaactatggaagatgctcactcggctttgctagatctcgacaatgacactgcgttttttggtgtttttgatggacatggaggaaaagtagtcgccaaattctgtgcaaaatatctacacagagaagttctcaggagtgaagcctatgcagctggtgacctgggtgctgctgtccacagagcttacttcagaatggatgaaatgatgcgaggtcaaagaggatggcgggaacttcaagcacttggagataagataaatcagtttagtggcataatagaaggcttaatttggtctcctaaagcaagtgattcaaatgatagacatgatgat

SEQ ID NO: 7806 - DNA, 276 bp, Zea mays
  Clone ID: LIB3137-009-Q1-K1-B1
ggaacaagtacgagaacaccgcgaggacctggacccagaggtacgccatgtagggaggggtaccctacctggccctttgggggtccgccggaattgccgctgctgcgttgtgttcctggacctggacctggactggagactggacgtgtctccctgtattcgatcctgtgctgtataatgatggatcacattgggtttgcagtgcagtgcgccgtgtgaagatgaatgctgtattgcgtcgcttggaggctagaattctgaatgccaaaatactgg

SEQ ID NO: 7807 - DNA, 387 bp, Zea mays
  Clone ID: LIB3137-005-Q1-K1-H7
ctccgccgcctgccgcactctcctgcgacgccaccaccacacgttcacggtagcgagagcttatcgtcgtcggcggcgaagatggtgtcgctgaagctgcagaagcggctcgccgcgagcgtcctcaagtgtgggaaaggcaaagtctggcttgaccccaatgaagtcagcgagatctccatggctaactcccgccagaacatccggaaattggttaaggatgggtttatcatcaggaagcctcagaaggttcactctaggtcccgtgcaagaagggcacatgaggccaagcagaagggaaggcactctggatacggcaagcgcaggggtaccagggaggctaggctccccaccaagattctgtggatgaggaggatgcgtgttctg

SEQ ID NO: 7808 - DNA, 414 bp, Zea mays
  unsure (1)..(414): unsure at all n locations; Clone ID: LIB3137-009-Q1-K1-B10
gngaaaagagagatggtggaggcatcgccggagtccggcgccgcggcgaccggaggtgcctgtagtacggcggcggtgcggaaggggaagtcatgcaagggctgcctctactactcgtcagtgctcaagtcccgcggttacaacccaatctgcgttgggatcccccgctccatcccccaagttcctaactacgtggtggatgaacctaaggaggaggcgacggcgcangggcatgacctcaggcggttcaggtacgggtgcgcgggttactccatgttcgtggacaacagggacggccagggtggtgagagcgagggcaagacgttgttgccatattgcaggggcctcgagttattggtggacagcagattggtcgagagaaagccatcggcaactgaacaagctccagcacat

SEQ ID NO: 7809 - DNA, 308 bp, Zea mays
  Clone ID: LIB3137-009-Q1-K1-B11
cgcggagcggccctccacctttatcgccgccgccgccgttgctgtgttccgtctcttcgccgatggcttcggccaagttcggtgctgcccagcaggtggagaaccgaggcgcgctgtccaaaaggtcacgtaacgacgtgtctgtaagggagggggactggagttgtcctcagtgtggtaatgtcaacttcagttttagaaatgtttgcaaccgtggagcctgtggtgcaccccgtccatcaccgagtccaagtccaagaatgatgccaggacctcctgcttctggatatgactggtcacctctattt

SEQ ID NO: 7810 - DNA, 386 bp, Zea mays
  Clone ID: LIB3137-003-Q1-K1-F5
cacgtccaagcgtcgccacaaccaagggcggcttggttgcagtcaagatggggaaggacgtgtaatctgccaagctgaaggaggagaagaagtccaaggaagagatccatctgaaggtcaagagcaaggacgagcggtccggcgaggaagacggcaaggaggaagtcgaggtagagattgaggccaagtttgttgagaaggaagaggtcaaagactcgggtgacggtgcgggaggaaagggtaccaagaagaaggatacaaaggagaaagacaagaaaaagaaggaaggtggtgaggattcaaggaaggcagaggaagacaagaaggataaagcgaaggattcggaaggcaagggccaagtgaagaaggaaaagaaggatggtgct

SEQ ID NO: 7811 - DNA, 312 bp, Zea mays
  unsure (1)..(312): unsure at all n locations; Clone ID: LIB3137-003-Q1-K1-F6
gttgggcgtgttggtctacggcggcgcagatgacgaccctcgatcttatgggagggtacgggcgggtggacgagcaggtggccatccaggaggccgccacggcggggctgcgcgggatggagcgtctcatcttgcagctctcccaggccggcaccggngagcggtcgtcgtccccaccggcggtacaggcgcagcgccagcagcagcagctggagcagatccagcagcaggttgactgccgggagctcacggacatgacggtgtccaagttcaagaaggtgatctncatcctgaaccgcacggnggcacggc

SEQ ID NO: 7812 - DNA, 388 bp, Zea mays
  unsure (1)..(388): unsure at all n locations; Clone ID: LIB3137-003-Q1-K1-F7
gccagccatccactcagaagaggaaccggtgatcggcagctgcagcggccgacggcggagcgcgcgatgttcaagattatccggtttaaagacatcacatgaggctgctgcatggatatgataccaaagggtagagaagcctcggaatgacacgccaancagccagaatgtgatcagattcactactcaagggaggatgaagaactatatcagctatgggatgtcgctgcttgaggaacatggacatgatgagattagtatcaaggccctgggacgggccataaataagacagttatggttgttgaatngatcaagagaagggttggatgtctttatcagaacactgctactgaatctgttgatatcacagacacatgggaacctttg

SEQ ID NO: 7813 - DNA, 381 bp, Zea mays
  Clone ID: LIB3137-003-Q1-K1-F8
gccgggaacgtgcctgaatgtccgggacgtgccggcttacctgaagccgcgcttgaccttgtacaacgtcaagaagagcgccgaccaggccgtcgaccgctacatcgagaagtacatcgacacgagctcgccggaccctctctaccacgtctgcatcggagggatgatcttctcctacttcgtcaatctgccctgggagcgcgcccacctcgcccacctcgaggagatggagaggaccggtgggaagcactagatccgctgccccgtccctcgccggcagcgcgggaagacgggtgactttcaatggggtccatcaggctgatggcttctggtttcttctggctgtgaactactggaatcatgttaccttgggcggtgggt

SEQ ID NO: 7814 - DNA, 392 bp, Zea mays
  Clone ID: LIB3137-003-Q1-K1-F9
ctcgtctccccacggaggccgtcctctcctctcctctgcgtccgccactgcccaccgctcgcccgcgcgcgctccattacctcggcgggcgatggccgacctatccaacaccggctccacctaacacgagcagcgcccccgcctaggcggctggctggtcggtcgtcgagcagctagcggcggcagcgcccggaggccggccgtctcactctcctcgtcggggcggcaggagatggaggccatcgtggccgtccgcgcgccgccgcgtggccgtgcctgggccgccctcgagaagccgccgcgcgccgcttgccgcgccagagtcccgacggcgaggctcgcggtcgcggcggacaggccgcggaggctggtgctgctgggcgccgatacgc

SEQ ID NO: 7815 - DNA, 460 bp, Zea mays
  unsure (1)..(460): unsure at all n locations; Clone ID: LIB3137-003-Q1-K1-G1
gcgagcggccgccctttttttttttttttttttttttttttttttttttttttttttttttgttttttttttttggaggcgccgccaccaccctacgcgctgtttatatttcatactttcctatctcacgatcttcctgacaaaaaaactgaaggctctaaagttcaaactcttcaacgggagatcttttcagtttgacgtctgcaacgtggtcatggtggcaaggaacaccaaatntttaggaatgatcaaaaacccggaaaaacccaaaggcatctttgaagtcatccaccttcttcttggaaccttttgcatgctatgtctagctttctcctatttgttgtacaagaaaacataaaatggaatttaaattttgtggtcccaaaaatgtggaaacctgaagtcctgtaaaattaggcttaacattaatgcaaacaattttattttagtttaaaattaa

SEQ ID NO: 7816 - DNA, 447 bp, Zea mays
  unsure (1)..(447): unsure at all n locations; Clone ID: LIB3137-003-Q1-K1-G10
ggcgcctcccacgtctccagtccgacactccgactcactccccctcccccggcgcaacccggcgcaatggccgccgtctccgcagccccgaggccctcgatgcctccccgactcgccctccgtgcccacctcttctcctccgcctctccgctcccaatgcgcgcgctccccttactccgcagccgcttccgctccttgaccacggcctacgctgtcaagcaggacacggccctctggacccctgcacccgtctccgccatcagtgctgccaccgacgacggctccgtctccctcatcgccgtcgacctatctgacgccacggacctcgtggactcgtacacgaacccgggccaatacctcctgatccgcgtacccggcgaggagctcaagccggcgtacatggtcatctcctcgccgcctaaagcggngcccccggtcgaattcctc

SEQ ID NO: 7817 - DNA, 374 bp, Zea mays
  Clone ID: LIB3137-003-Q1-K1-G11
atctgcatctccaacaccaccagcagaggttccagttagttttttttagattagaaaaatggagtccaacagactcgccgcactgcgcgggatcgacctcgtcgcaactcccgtgtgcgccgccaataatggagacccgggacacggatgcgacgccgctcccctactcgtacacgccgctgccggccgccgacgccgcgtcggccgaggtctccggcaccggcaggacgcggagcaggcggcggcccctctgcgcggcggcgctcgtgctctccgccgcgctgctcctagccgtggccgcgctcgtcggcgtcggtagccggccccgcgcggtggggatgacagagtcggcggcctcgtcgccgacgccgagc

SEQ ID NO: 7818 - DNA, 319 bp, Zea mays
  Clone ID: LIB3137-003-Q1-K1-G12
gtggttcccaaggacgtgaacgctgctgtggccacaatcaagaccaagcgcaccatccaggtcgtggactggtggccgacttgctttaaagggcggattaaattacaagcttccaagggtcgtccccggcggtgacctggccaaggtgcagcgtgccgtgtgcatgatctccaactccaccagtgtgtgggaggtcttctcccgcatggaccacaagttagacctaatgtacgcaaagcgcgctttcgcgcactgacacttgtgagaggatatagaagagggagatttctcagggtctcgaggagatgtgtgtgctcta

SEQ ID NO: 7819 - DNA, 403 bp, Zea mays
  Clone ID: LIB3137-003-Q1-K1-G2
gccgggaacgtgccgtcgtcgtccgccttcttcgaggcccgcgtgacgatgcgcaagactgcggcgaatgccaagcctgcggcggcgtccgggagcccgtggtacggccccgaccgcgtgctgtacctgggcccactgtccggcgagccaccgagctacctgacgggcgagttcccgggcgactacggctgggacaccgcggggctgtcggcggacccggagacgttcgccaagaaccgggagctggaggtgatccactcccgctgggccatgctgggcgcgctcggctgcgtcttccccgagctgctcgcccgcaacggcgttcagttcggcgaggccgtgtggttcaaggccggctcccagatcttcagccagggcgggctggactacctcgggaacccca

SEQ ID NO: 7820 - DNA, 203 bp, Zea mays
  unsure (1)..(203): unsure at all n locations; Clone ID: LIB3137-003-Q1-K1-G3
cgcagctcgcaagcaaatcgaacgaacccattcgaagcgcgagctgagcaaggcggaggctgcgggaccggcgatggagcggctgcagcgcatctttggcgcctccggcatggtgcagccgccgacggactcgccgctgctcgactcctccgagcaggnctacatgtcctgcgtcgcgctnctcatgatgctcaagcacggga

SEQ ID NO: 7821 - DNA, 96 bp, Zea mays
  Clone ID: LIB3137-003-Q1-K1-G4
ggcgaacggcgcaaattaccctgctaacacttatctttacccacctaatcatggtcagctgcacaaacttcacgaaggtccagttgccttcattct

SEQ ID NO: 7822 - DNA, 219 bp, Zea mays
  Clone ID: LIB3137-003-Q1-K1-G5
cgcagctcgcaagcaaatcgaacgaacccagccgaagcgcgagctgagcaaggcggaggcggggggaccggcgatggagcggctgcagcggatctttggcgcctccggcatggggcagccgccgacggactcgccgctgctcgactcctccgagcaggtctacatctcctccctcgcgcttctcaagatgctcaagcacgggagggccggcgtgcccat

SEQ ID NO: 7823 - DNA, 452 bp, Zea mays
  unsure (1)..(452): unsure at all n locations; Clone ID: LIB3137-003-Q1-K1-G6
cacggtgtcaccaaacctgccccctccccttcccgctccgctccgctccacgcacggcgcgggatctgctgctgctgcggcggccggtggacgccgcgccgcgcgtgccggcggcggtgacgtgagcggcggatcctgcccggccgtgccatcccggcgacgatgacagcgtaagcgggcggcggacgaccgcgcccccccggcccctactcccgaggtcattggcgtgtgctccttggcagaaaatggcgatgatggtggatccccccaatggcatggcaagtcaaggaaagcattactatactatgtggcagacactgtttgagatcgacaccaagtacgtgccgatcaagcccatcggaagaggagctnacggaatcgtttgctcatctggnaaccggnanacccatgaaaaagtcgcgataaaaaagataacaacgtctttgacaacc

SEQ ID NO: 7824 - DNA, 392 bp, Zea mays
  Clone ID: LIB3137-003-Q1-K1-G7
gcagtgtcgccgtcgccggtgcggtgtgccgatgcggaggagtgcggcggaggaggcgccggcaaggaaatggaggagaccgccgtcgggcctgtgtccgactcggacctggatttcgacttcacggtcgacgacatagacttcggggacttcttcctcaggctagacgacggggatgacgcgctgccgggcctcgaggtcgaccctgccgagatcgtcttcgctgactttgaagcaatcgccaccgccggcggcgtcacggaccaagaagtgcccagtgtcctgccctttggggacgcggcgcacataggctccgtggatccgtgctggggtgtccttggccaagacaacgacgcagcgtgcgcagacgtggaataagggaaaggggagtg

SEQ ID NO: 7825 - DNA, 372 bp, Zea mays
  Clone ID: LIB3137-003-Q1-K1-G8
gcaagcggtccaacactaccatgccaacacctaggtttatccaacaaatcagggatatgtggcatacaataactatgtggcaccatgggcccaaacgggaccggttgcacagcctggggcatattcgactcaaacccagcaatatgtgtcgagcaatccggcacccccatgggctatgcctgcaagtgccaattcagctaatcctttccagcctgtgacataccaaacgccaaacactcctcctgctgcttctgttgccccttcagctgctccatcagcgcaacatgttccatctccagcaccaacaccggtgcaaagttacaacttctctattcctcaaacatacactggttcgaacgtggctacaaatgc

SEQ ID NO: 7826 - DNA, 448 bp, Zea mays
  unsure (1)..(448): unsure at all n locations; Clone ID: LIB3137-003-Q1-K1-G9
ggggagtgccccctttcatcatgttcccatgacttcttccgcactctgacgtggtggatagtgccgtgcctagccgtgaaggtgacccgggaggtctcccgcttcgcgcacatcctgcagcaggggtcgtcgtcggcctggacctggagggcctgcgcggtgctgttcgcgtccgtggcgtcgtggacgtacctgacgacgatcatcctgtcgtcctgcatgctcttcaacctggtgtgcagcctgcaggtcatccacttcgacgactacggcaagctgctggagcaggacgcggacccgctggtgtacctcaaggagcacctgcagctccgccacaacctgtccaagatcagccacaggttccgcgtgttcctcctnctgctcttcctcttcgtcaccgncggccagttcgccatcctcttcaagaccacggcgtacagcgggccga

SEQ ID NO: 7827 - DNA, 360 bp, Zea mays
  unsure (1)..(360): unsure at all n locations; Clone ID: LIB3137-003-Q1-K1-H1
ggacgtcggaacggggatcgtcggcgcgccgtcgtgcggggacgtcatgaagctgcacatcgtcgtctacgaggggtccggcaggatcgtcgacgcgcgcttcaagaccttcggctgcggctccgccatcgcgtcctcctccgtcgcttccgaatgggtcaagggcaagcaagtggaggaagtagtagccatcaagaacaccgagattgcgaagcacctgtctcttccaccagtgaagctccactgcagcatgctcgctgaggacgcaatcaaggccgccgggaaagattacgaggcaaagaaagggaagaagatggccaatgcagangagcaagacaccccatgcccctaagagcgaca

SEQ ID NO: 7828 - DNA, 130 bp, Zea mays
  Clone ID: LIB3137-003-Q1-K1-H10
ccgggccgaccgacgcgtccgccagttcatcgagtctctcgagtagcgtactttgtagcgagttatcgcgctgtgaaaattagactgtgcttgcgcgctgaataattttgctggctttgtcgttttggtt

SEQ ID NO: 7829 - DNA, 66 bp, Zea mays
  Clone ID: LIB3137-003-Q1-K1-H11
ccggccgaccgacgcgtgccatcgccaataatggagtttccttaccaccttcaccaccactgccat

SEQ ID NO: 7830 - DNA, 429 bp, Zea mays
  Clone ID: LIB3137-003-Q1-K1-H12
ctggggagccaccaggaggtgtaccacccgtgcgccctcaaggcggcgttcgctgagttcagctccaccctcatcttcgtcttcgccggccagggctccggcatggccttcagcaagctgaccggcggcggcccgacgaccccggcgggcctgatcgcggcggcggtggcgcacgcgttcgcgctgttcgtggcggtgtcggtgggcgcgaacatctccggcgggcacgtgaacccggccgtgaccttcggcgccttcgtgggcggcaacatcaccctgttccgggggctcctgtactgtgtggcgcagctgctggggtccaccgtggcgtgcttcctgctccgcttctcgacgggcgggcaggccacgggcacctttcggctgacgggggtgtcggtgtgggaggcgcctgtgctggagatcgtgatg

SEQ ID NO: 7831 - DNA, 191 bp, Zea mays
  Clone ID: LIB3137-003-Q1-K1-H2
gatcccggtcgccgagcgtcgagggcttccaacactttcacgctcagctctacttagcaatggctgctcacaggcgatctcctccatggcgatggccggtacccccatcaaggtgggctccttcggcgagggccgcatcaccatgcgcaagaccgtgggcaagcccaaggtggcggcttccggcagcccct

SEQ ID NO: 7832 - DNA, 225 bp, Zea mays
  Clone ID: LIB3137-003-Q1-K1-H4
tggtgcgcgtccacctttcgatgtcaccggctgtgcttgctgcactcgcgttcagcttttccacgagtattctactgcaaatactgtcatgcgctttctacaacaactggtggcccatgttagcagctctcatgtacgtccttgtaccaatgccatgcctgttttttggtggtggatccacacacttcttgaccagcagaaaaggtggagggtggattaatgctg

SEQ ID NO: 7833 - DNA, 364 bp, Zea mays
  unsure (1)..(364): unsure at all n locations; Clone ID: LIB3137-003-Q1-K1-H6
ggctgacatgacacgaacaaaagcgcatcgatctcgctgtcgtcactcctcgtcacccagggccgaacagaagcaccacccagcatggcccttcangcgggcccttctccatnccaccttttaatccgtccccaagaagtgcagcctcgccgtcgcggcgaaggacacggcattccttagcgtatcccagaagaaggtgcaggcggcgtcgctgtcggtgagaacgcgggtggcgacgacggcgcctgtgccacgccggggccacacggggccaagatggaagagacgtgcgaggcgtgtgtatcacgccgtctcggtggcctgcgcgcaagcctgcgaacgcagtgactgtatgctgccactc

SEQ ID NO: 7834 - DNA, 463 bp, Zea mays
  unsure (1)..(463): unsure at all n locations; Clone ID: LIB3137-003-Q1-K1-H7
ggagcgcgatcgacagcaacagcggccttcatgaactccagcttcatcgggctcaagcccggtgcggcagcagcccaggccaccgcggctgcctcatcgccgatgaagcagcaggtgcaggtcgcgcccgagggccgccgcgccgcgctgctcggcctggcggccgtcttcgccgccgtcaccgccaccacggccggatcagccaaggctgaggtcttcgacgagtacctcgacaagagcaaggctaacaaggagctgaacgacaagaagaggctggccaccagcgctgccaactttgcgcgcgcctacacagtcgagttcggcagctggcagttcccctacaacttcactgggtgccaggacctcgccaagcagaaaaaagtacccttcctcagcgacnacctcgaaatcgagtgcgaggggaaggagaagttcaagtgcggctccaacgttttctggaagt

SEQ ID NO: 7835 - DNA, 345 bp, Zea mays
  Clone ID: LIB3137-004-Q1-K1-A1
cggctctcggcttcttctacacgctaccgtctcacagccgtaaacgcccctcccggatcccgctagttcgccaccgccgcccgcccgcccgccgttcgcctcatcatggccgcctcgtcgaccgccacctccgtccacgacttcatcgtcaaggatgcgagcggcaaagacgttgacctcagcacctacaaggggaaggttcttctcattgttaacgtcgcatcccagtgtggcttaactaactccaactacactgagctggcccagctctacgagaagtacaaggaccaaggctttgaaatcctggctttcccatgcaaccagtttggtgggcaggagcctggt

SEQ ID NO: 7836 - DNA, 264 bp, Zea mays
  Clone ID: LIB3137-004-Q1-K1-A2
cggacgcgtgggctatgattgatggtttgggtgttgctggctggggggttggtggtatagaagcggaggctacaatgcttggtcagccaatgagcatggttttgcctggtgttgttggcttcaagttaactgggaagttacggagtggtgtcacggccactgatcttgttcttacagtaacacaaatgctaaggaaacatggtgttgttggcaaatttgttgaattctatggtgaaggtatgggtaagctgtctttagctgaca

SEQ ID NO: 7837 - DNA, 326 bp, Zea mays
  Clone ID: LIB3137-004-Q1-K1-A3
cagactaaggcaaaggaactcccgctactggctggtgaaagcaagatgtagatgggcgagattctggattacctataccagcagcagcagcgctgaagagctctcattctttagtacttacttatttactttccacagactctacatggcataaatgattcattaatccgttgaaagtgcttgtatgctcctttgccactatctcccaccacttagcaaaggatgcaacattggctttggaggacaagaaaaagtttctcaatccaatgctctctttcagatgtcattagtgaatgggcatatgatagggacatatgtagtgcaat

SEQ ID NO: 7838 - DNA, 336 bp, Zea mays
  Clone ID: LIB3137-004-Q1-K1-A4
cggacgcgtgggcggacgcgtgggcgagtgctcacactcgagcacgtcgagctcaaaggtgaggccgttagccaggaatcccggcaacaatgacttccctttcctccgccgtggcactgccgtcctcgtgccgggcccggccggcggggggaagccggagggcgcggatggtggtgacgcgcgcggcggcgtcgagcccgaagctgccgaacgggcggcggctgcgggtggcggtggtgggaggcggccccgccggtggcgccgcggcggaggcgctggccaagggcggcgtggagacggtgctgatcgagcggaagatggacaactgcaagccct

SEQ ID NO: 7839 - DNA, 394 bp, Zea mays
  Clone ID: LIB3137-004-Q1-K1-A5
ggcgtcttcacaaacgccggcgcaaactcttgcccgagcccgacagatctctaattcgccataccgtccaccgatcgaccttcacgccagtctcggtctcttccgaaggcgtcgcgcgcggttgtttgagaggagaggaggaagatgagggagtgcatctccgtccacatcgggcaagccggcatccaagtcggcaacgcgtgctgggaactttactgcctcgagcacggcatccagcctgatggccaagtgcctggagataagaccgcgggacatcacgatgatgccttcagcaccttcttcagccagactggtgctgggaagcacgttccccgtgcaatcttcgttgatctagaacccactgtgatcgatgaggtgcgcactggcacgtacc

SEQ ID NO: 7840 - DNA, 385 bp, Zea mays
  Clone ID: LIB3137-004-Q1-K1-A6
gcgggcctctgtcagctcacagctcagtcctcttcaaccccgtttcgccggccctagcgcaaatcccccacctactcgccgccggcgccgtctcagcctcatccttctccgctagccatggccgccgcgggtcccgggctctactccgagatcgggaagaaggccagagatctcctatataaggactaccacacggaccagaagttcacgctcaccacctacgccggcaacggagctgccattactgctgcaagcacgaggaaagatgaagctatctttaatgaaatccagagccagctgaagcacaacaatgtgactgtggatgtgaaagcaacttcagaatcaaatgtgataactacaatcacagttcatgagctgggcacac

SEQ ID NO: 7841 - DNA, 354 bp, Zea mays
  Clone ID: LIB3137-004-Q1-K1-A7
gcgagctgcgacaagttcgtctctctcgtggccacgactggccgccgcccccgcctgcgtcccctcgcagattcccaggtcttcgccgctcccttcgccgccaaagagcacccactaggttaaatccgccagggggaaatctccatcaagtggctcgtgctaattatgcgatcttcatgggctgactcagttgcgaacgccgaggaatcggcgcccgcgactgctgctgctaatggctctgttgcaactcatagcacctcgcgccctacgcgcagctcctacgtgcctccacatcttcgtggccgctcagctggtgctgctgttgaagctcaagcaggcttagtagcaccagca

SEQ ID NO: 7842 - DNA, 403 bp, Zea mays
  Clone ID: LIB3137-004-Q1-K1-A8
tcctgcttttccattgctctgcgtctgcgtctgcgtctgcgtctgcactgcttcgcgtgtccctccccccgcctccgcccccgccccggcaaaaaagcaaaacacggccatggaaggctacgaccgcgagttctaccagttcagcgaccagctgcgcctgcagacggccgccttctcgggcctctccctcggcgactccatctggtcccccgccggccggcgcaacaacagcaacgacgtcctcttcgccgcctccgcgtcgcccgccgacgccgccaagagcaacgccgtcgtcgggctcaagctcaacgacggagggcccggcctcatcggctccgggaagctggccttcggcggcgccggaggcggcggcaccaaggccgatcgctacaacaacaacaac

SEQ ID NO: 7843 - DNA, 332 bp, Zea mays
  unsure (1)..(332): unsure at all n locations; Clone ID: LIB3137-004-Q1-K1-B1
agcagagcggagctaggtcggtcgtcgtcgtcgtcgtcagccatgagcaaggacaagncaccacaagcacgagcaccacctgcggcgttgctgcgggtgcatggcgtcgtgcctcctggcgctggtcctcatcgtggccttcgtctcgctggtggtgtacctggcgctgcgcccctcgaagccgtccttctacctgcaggacctgcagctgcgcaggcccatctcgctgggcgacccgtcgctgacggcgtcggcgcaggtgacgctggccgcccgcaaccccaacgaccgcgtgggcatcttctacaagcgcctggacgtgttcgtcacct

SEQ ID NO: 7844 - DNA, 263 bp, Zea mays
  Clone ID: LIB3137-004-Q1-K1-B2
gggactctgcactcttacacctgtttaggcaccgtcttgttggaggactatacgatgtgttactatcgacacagtagtgtgccaatgcctggcatcatgcactgccgaccgatgggccatggccagcgccctaacctcaacgattcaagctgatggtgcaaatgcaaccgactgagctcacgcccaacatgattaagctctttgaaccgagtgcaccgttcgagtacataacctgcgctggagaagcacatattgcctgccta

SEQ ID NO: 7845 - DNA, 366 bp, Zea mays
  Clone ID: LIB3137-004-Q1-K1-B3
cggacgcgtgggcaaagctccctgctgacacaccatactcacaatttgcttataaattgcaagagtggggcctggagaaaggttggggtgatacagcagggcatgttttggaaatgatccatctccttctagatattattcaagcgccagacccatctacactagagaaattcttggggaggatccccatgatttttaacgttgttgtggtatcccctcatggatactttggtcaagctaatgtattaggcttgccagacacaggaggacagatcgtctatatactggaccaagtccgtgcactagaaaatgagatggttctccgtttaaagaaacaagggcttgatgtttccccaaagattctca

SEQ ID NO: 7846 - DNA, 383 bp, Zea mays
  Clone ID: LIB3137-004-Q1-K1-B4
gtagggtgctgtggactaggcgagctgttgaagggaagggaaccctcttgaccgccgggggataggggagatgccgacggagaggacgaggaaatcgaggactgaggagctgtgggagcgcgaggtcggcggtcttccacccaagcgcttaggcaactccgtcatggcctccaaggagtttgtgcagtctctcaacatccaaaagcggctactgaagcacaggagctgcgtcaacacgataagcttcagcgcggacgggaggctgctcctctaccggtccgactaccggaccctcttgctgtgtgactgggaggaggcggcgccggtcttgtagctacacactgggtttaggagcaacgtgtaccactcgctgttcatgcctg

SEQ ID NO: 7847 - DNA, 377 bp, Zea mays
  Clone ID: LIB3137-004-Q1-K1-B5
ccctaatcccacctccagtctttgggcaccaaatttccggcggcgatggcggcggctgtggcgaggtcagggttccggcgcatgttctccgtctctgccttcgcgccgccgaaggcgcccgccgcgcgccccaaggccgacccatcccccaacctcttcgtctccggcttaagcaagcgtaccacaagtgaaggacttagagaagcctttgcggagtttggtgaagttttgcatgctcgtgttgtgaccgatcgtgtcagtgggttttctaagggatttggctttgtaaggtatgctacgaccgaagaggcagccaagggaatagaaggaaaggatggaaagttccttgatggatgggttatttttgcggaatacgc

SEQ ID NO: 7848 - DNA, 385 bp, Zea mays
  Clone ID: LIB3137-004-Q1-K1-B6
gtcctctgttacttctccctacgccgccactccccttccattcaccgccaccgccaagtgcataccgtcctgcgccacctctgctgagagcgagaagagatggcaggcaagggtgatgggccggcaatcggcatcgatctcggcacgacgtactcttgcgtcggcgtctggcagcacgaccgtgtcgagatcatcgccaacgaccagggtaaccgcaccacaccctcgtacgtcgccttcaccgactccgagcgcctcatcggagatgctgccaagaaccaggtcgccatggaccccatcaacaccgtctttgatgccaagcgtctcattggcaggaggtttagtgatgcctttgtccagagtgatattaagcctgggcccttca

SEQ ID NO: 7849 - DNA, 357 bp, Zea mays
  Clone ID: LIB3137-004-Q1-K1-B8
ctacactcccggcggcggcggcggcggcgcagcagcggcagcagcatccgaagatggtgaagttcctcaagcccggcaaggccgttatcctcctccagggccgcttcgccggcaggaaggcagttatcgtgcgcgtgttcgaggagggcacccgcgaccgcccctatggccactgcctcgtcgcaggcctcgccaagtacccaaagaaggtgatccgcaaggactccgccaagaagactgcgaagaagtcgcgcgtcaagtgcttcatcaagctcgtcaacttcactcacctcatgcccacccgctacaccctcgacgtcgatttcaaagatgtcgccaccggtgggcccgacgcac

SEQ ID NO: 7850 - DNA, 375 bp, Zea mays
  Clone ID: LIB3137-004-Q1-K1-C1
gccacacttttgctaaaccctagtaaatatacgatacgaagcgcaaacgcttgcctcatcctcgagttcgccatggcgatgcccaccacctcgtctgcttccccatgccaggcaccgtcgcccgccgggctgcccatttcccctggcgcccgcgctaccatcctctcattcagccgccgcctccgccgctcccgtggcgccatcatttctgcgcccactggttgtctgtttcttggtcttcccaagtcgtgctgttctatcgcagcctttggtgaagtggcagcggtttctgatgattatgtagaaagctcgccctcaagcagtggatatctgaatagtactatggatgcttcatctcatgaagataatcaatca

SEQ ID NO: 7851 - DNA, 336 bp, Zea mays
  Clone ID: LIB3137-004-Q1-K1-C2
gcgctacgatcgcgaagcggccgcccttttttttttttttttttttaataatcatataacatcagtgccatttgagctttattatatcatcatagaaaaatagagacaatatcgaattataaatgtaccttcggcttggaaggagatgaaaatacaagtgtgacgcaaaagcaaatgtcaagtcagcctgaacagtacgggagtactgttcatctatttatagacgtgggacgcagcccatgtaaaattacattcatgtccactacatttgctaatgacttatgaggatctgtcaaagcctaagtagtcttttcatctttaagtcggttccccttt

SEQ ID NO: 7852 - DNA, 412 bp, Zea mays
  Clone ID: LIB3137-004-Q1-K1-C3
ggccaagtccattcaccatgctcgtgtcttgatcaagcagcgtcacatcagggttggcgggcaaattgtcaacgtcccatcattcatggtgagggtggagtctgagaagcacattgacttttcactgtcaagcccattcggtggaggccccgcaggaagggtgaagagaaagaatcagaagaaggcaagcggtggcggcgatgctggcgatgaggatgaggagtgaggatggacaagtagcgttacccaatataataatattatctagttttcttgaacttgttcgaatgatgagtgcttagctgtgtgatctgacgcagagttccctgtgctgactctgtgtcatggatggtccattttatcttgtggtattatcagcctttacataactgctatgtttggatatgttcaa

SEQ ID NO: 7853 - DNA, 372 bp, Zea mays
  Clone ID: LIB3137-004-Q1-K1-C4
gttctagttcattgctttgaagggaaaagtcggagtgccacagtcgtacttgcctatcttatgcttagagagggctttactcttgcaaaagcctggaacttactgaagaaagtactccgtcgagcgcagccaaacgacggcttcgcaaaggctctcctggcccttgacaagaggctgcatggcaaggtatctatggactggcaacacaagcggccagaaatgaaggtgtgtccaatctgcagcaagaatgttggtctaagtacgagttcactcaagctgcacctgcagaaggcacacaagcgtctatctgcaagcagtgtcgacagcgccatgaccatggagatccaaaaatcgatcgagtcactccagatc

SEQ ID NO: 7854 - DNA, 384 bp, Zea mays
  Clone ID: LIB3137-004-Q1-K1-C5
cttctcttctctactgcacatcctcctttcttcttctcctcctcgatcggcaagaagcgaaggaggcaccattgcttatcgtctgatccccgcggggcgcgtgtcgctgcacaagatgacgacggcaacagccggtggcagcgtcgccgaccgcatcatgccgcacctcctcaacatatatggatcgtccgcgacggcacgggacttcgagatttacgcgccaaatgcgacgtttgaggacccgctcatgcgagctcacggggttaagcagatcaaatcagcgttctacacgctgccaaaggtgtttggggaatccaagatcaccgagtacaccgtacaagagaatcccatggggccgggcaaaaccgagaacaagcagcacta

SEQ ID NO: 7855 - DNA, 190 bp, Zea mays
  unsure (1)..(190): unsure at all n locations; Clone ID: LIB3137-004-Q1-K1-C6
ctttcttcaacccctcctcgaccggggggaagcgaaggatgcaccatagcttagcaaaccatcccaccaatcgaatatcgcttcacacgatgactaccgaaacaaccgtttgcaaattctcccaccgcatcatgccncaccttctcaacatatatgtatcttgcccgacaacacaagacttcaaaattta

SEQ ID NO: 7856 - DNA, 425 bp, Zea mays
  Clone ID: LIB3137-004-Q1-K1-C7
gtccttaggaagaagggccactcttactcagagataattaacgagagcctgatcgagtgcgtggactcgttgaacccgttcatgcatgctcgcggtgtggccttcatggtcgataactgctccacaactgctcgtttgggatctaggaaatgggcaccacgcttcgattacatcttgacccaacaggcgtttgtgactgttgacaagaaagcaccgatcaaccaagacctcatcagcaacttcatgtctgaccctgtccacggtgccatcgaagtctgcgctcagctgaggcccactgttgacatctcagtgaccgctgatgcagatttcgtgcgcccagagcttcgacagtcttcataagcttgtatggatccgcagtgtgactgcaatggctagcttgtaaagacttaatatgcctgggcttt

SEQ ID NO: 7857 - DNA, 301 bp, Zea mays
  Clone ID: LIB3137-004-Q1-K1-C8
cggacgcgtgggcacgaaccaacccgtgctaccttcgattccctcgtcgggctttctgggaccttcgctccgactaatcccttgaccgggtcaagcccgaacgagactagggaggttccagcgccgccggtgggggagatggcgctggagctgagcctggcctcggcttcgacgccggcgggcggcgggttggtgcatccggcctccatcgccccactcaggaaggagctgctagtggtctgcatgtggattctactgcacatctccatgctcgtgctctcggacgcgctggggcacgtcg

SEQ ID NO: 7858 - DNA, 390 bp, Zea mays
  Clone ID: LIB3137-004-Q1-K1-D1
cgcttccaggcttactctccgctgggttcgtcagagaagaacctagcacacgacccgctcgtcgaaaaggtcccttactactacagttgaacccaagctcctaaactaaaactacatgctgctgttcctaggtctgactccaagcgtttaaaccacaggtagccaagaaactggacaagaccccggggcaggtgctcctcaggtgggcgctgcagagggggacaagcgtcattcctaagtcgaccagggacggaaggatcaaagagaacatccaggtgttcgggtgggagatccctgaggaggacttcagggccctgtgcggcatcaaagatgaggtgagtgagggatgccattgtccttggggtttaggctttagcgataactttagca

SEQ ID NO: 7859 - DNA, 220 bp, Zea mays
  Clone ID: LIB3137-004-Q1-K1-D2
ccgacacatgtgacaagcctcatgttatccgtgcatgaccaattagcttagcttcactgcggcatgggatgcatttccatacatcagaattctcactctccacagtaacaaggcgcacgagcagcaacaccagctgccaggaacaaaagacacatcacccatggccgttcgtccagtgtgcgtgcattgcgggacgcggagcaacccgtgccggggcaag

SEQ ID NO: 7860 - DNA, 418 bp, Zea mays
  Clone ID: LIB3137-004-Q1-K1-D3
ctccgccctcccaggctcccacagtcccactgcccttttcctcggtccatcgcaagctgctgcggtcctgcctacggcggcatccacccttctgccgcatcgtctttctcaagacgctgccccaggtccatcgcgcctagggttcgccgagtccggcggcgctaagataatgagtgggcaccgaaacagtcatggaaagcgctactctgattatactgaaactggaggcggtaagagaagaaatcctggtgatgatacctatgcccctggtcctgatgacactgtgtatcgctacctctgtgcctctagaaaaattgggagtatcattggcaggggtggagaaattgcaaagcagttgaggactgagacccaagctaagatcaggattggtgagagtgtccctggatgtgaagagcga

SEQ ID NO: 7861 - DNA, 209 bp, Zea mays
  Clone ID: LIB3137-004-Q1-K1-D5
caaatctaaggggcttgcttcatctgctgtccgatcgtggtttggtttctcggggctggcacggtcaagagctcacctgaattccaccgaaatctgccagtgccacggtagttcttgcctaggtgtgtcgttggtcgttgccttgtgacccttgcggattttcttgtttctttttgagttgcgatctttgcaggttagtctcccccccc

SEQ ID NO: 7862 - DNA, 414 bp, Zea mays
  Clone ID: LIB3137-004-Q1-K1-D6
catcccctttgcaagtatagtctctctgctaagcgaagcgaagcttcaagctagtctcggcggctctagaagacgatgggcaaggacgacgtgatcgagagcggcgctggcggcggcgagttcgctgccaaggactacacggaccctcccccggcgccgctgatcgacgcggcggagctggggtcctggtcgctgtaccgcgccgtgatcgccgagttcatcgccacgctgctgttcctgtacatcacggtggccaccgtgatcgggtacaagcaccagacggacgcgtcgggcgtcggcgcccaccccgcgtgccgccgccttggccttcttggcaatccctgggccttcggcgggatgaacttcgtccttgtctactggaccggcggcattttgggggggcacattaaaccc

SEQ ID NO: 7863 - DNA, 386 bp, Zea mays
  unsure (1)..(386): unsure at all n locations; Clone ID: LIB3137-004-Q1-K1-D7
acaaaacccagtcctttgttcttcccccggcacgcctagcgccagtcaccaaccttccactccctccctccgtcgccatggcgcgcaagaagatccgggagtacgactccaagcgcctcctcagggagcacctcaagcgcctcgcgggcatcgacctcaccatcctctccgcccagatcacgcaatcaacggacttcgcagagcttgtgagccagcagccatggctgtcaaccatgaagctagtggtgaagcccgatatgctgttcgggaagcgtgggaagagcggcctcgtggctctcaacttggatttcgatcaagtcaaggagtttgtcaaggagcggctggnggttgaggttgagatgggtggctgcaaagctccaatcacg

SEQ ID NO: 7864 - DNA, 360 bp, Zea mays
  Clone ID: LIB3137-004-Q1-K1-E1
cccatccacccctctcctctcgctctcgctctcccgcgcctgcaccgatcagttgccatatattccgccaccctccctatctcaagcacctaccccgggccttgcgtggcgatcgagttgccaccagacaactcggctcggctcgtcgcccaccgatcctcctcctcgctccaagcttccctctcccctcccctccccctccgtcagctggggagggcgccggcggctgatcgaccggacagacagctgaacggccggaaatggcggcggggcgcgcgccgtggctcgccgccggcctcgtggcggtgctgatggtggtggccgcgcccgtgcccgcgcgcgcgcggttcgtggtggaga

SEQ ID NO: 7865 - DNA, 405 bp, Zea mays
  Clone ID: LIB3137-004-Q1-K1-E2
gccaaatgaaaagatgtactctattttaatttatggttggtgcaaggtgaatcggagggacatggggaagaagttcctaaaagatatgcttgttcatggcatagaaccaaacattgttacatacaacatccttctaaatggtatctgcaggcatgcaagcttgcaccctgattaccgatttgatagaacagttcatgcagcagaggatctcttgaaggagatgcgtggcaggggaattgaaccagatgtaaccagttattcaatcattctgcatgtttacagtcgcgcacataaacctgacttgcgtctctgcatgttccgctcgatgaaagaaagaggcatttgccccacagtggcaacatacacttctgtgataaagtgtctttcctctcgtgggagattgga

SEQ ID NO: 7866 - DNA, 427 bp, Zea mays
  unsure (1)..(427): unsure at all n locations; Clone ID: LIB3137-004-Q1-K1-E3
ctctacatttcttctctctctgctccttcgcctccgcctgatccatccaagacagggagcgccatgtcggactcggaggagcaccacttcgaatcgaaggccgacgctggggcgtccaagacctacccgcagcaggctggcaccgtccgtaagaacggcttcatcgtcatcaagaaccgtccctgcaaggttgtggaggtttctacctccaagactggtaagcatggccacgccaaatgccactttgtcgccatagacatattcaatgggaaaaagcttgaagatattgttccttcatcacacaactgtgacattccgcatgtgaaccgtactgagtatcagctgattgatatttctgaggatggatttgtgagccttcttacttcagatggcnacactaaggatgatcttagactcccaactgatg

SEQ ID NO: 7867 - DNA, 413 bp, Zea mays
  Clone ID: LIB3137-004-Q1-K1-E4
aaaggactggctcaaggtaccttccgaggagctggcttctgcctttgatgagcctctcagcataaggcatcctcagggtcacactgtccctaggcttgacgacgtgtctgtgaaacagctttctgaatggagctcacgcgtcctggaagacctcaagagtgcagatgttcctgaggccttagattcaggcaaaccatctgataaggaggctgctggtgcggaattcacagaaaacctggtgaaagcttgaggcatgcccacttcagccttgttcggttattcctatcttacatggattggatgggattgaaaaattttaagaaagattttgatttgctatggatttaaacccatccaatcttgtccaatccatatggattggcaccgaaacgaataaaccctttcatggcatg

SEQ ID NO: 7868 - DNA, 301 bp, Zea mays
  Clone ID: LIB3137-004-Q1-K1-E5
gaagaccgagcgagcgacgcgtccgcagaatagtctctgatcggtttgttgctagcacatctgagaaatccatgggaagcttgccggtctaagtatctgatgcggctaacttgcttatcacggatcggtctggggggcaccgaacatcacaaactgtcttaagatctgactgatcctacaaacaagagcagctcttctctgctgtcccattgctctggcacaagctcataggtcgtccccagatgcatatagctgcagacagctcatcaggtcaccaatgatggaggaacggcgccgatgc

SEQ ID NO: 7869 - DNA, 416 bp, Zea mays
  unsure (1)..(416): unsure at all n locations; Clone ID: LIB3137-004-Q1-K1-E6
gttaggtatgggagattggtcaggctttatggacaagattcatgaagtgatgcctacggatcaacagcctgaccttctgcagaaactgtctgaaggaagctttagtctcaggcttatgtatgagcagttccagaaccttcttaaaatgggtcctattggccaggtcttctctatgttgccagggtttagcgctgaactaatgccaaaaggacatgagaaggaaagccaggctaagattaagcgctacatgacaatgatggattccatgactgatgcagagcttgacagcacanatcctaagttgatgactgaatcacggatcattcggattgcacgggggtctgggcggcctgtcagggatgtcatggacatgctggaagagtacaagcgacttgctaaaatctggggcaagatga

SEQ ID NO: 7870 - DNA, 431 bp, Zea mays
  Clone ID: LIB3137-004-Q1-K1-E8
cgaccattaaagttgatgctgagcaatcagatttgaggttctgtttcagagttatctggcccacaaagatctacacattgcaggcagagagtgcagtacatcagatggactggattgaaaaaataactggtgttattgcctctttactgagctcacaatcgccagaacagtgttttatgtcaagccctaagggcagtggtcatgataggagtaccagtgatggaagctcctttacaagttcagtggaatttgaaccttccgtaatcgatgatttagtactggagaagtactctggaaatgggcagcatgatgtaacaagaggcacacatcatcacagaaccagcatgaaacctgaaaaaccaattgacttgcttaggaaagttgatggcaataatatgtgtgctgactgtggtgctttggaacctgattgg

SEQ ID NO: 7871 - DNA, 368 bp, Zea mays
  Clone ID: LIB3137-004-Q1-K1-F1
caacgccacagcttgcgcccgcaatggcactcgtctccgcctcctcgtcctccaccaccgccgtcacggcgctccccaggaatgggcagcgggcgtcgtcctccttcctcggcggcaagacgctgctgagacaggccgaggcggcccggccgtcgttcgccgtgcgcgccgcggcggaccccaacaggccgatctggttccccggcagcacccctccgccgtggctcgacggcagccttcccggcgacttcggctttgatccctggggcctcggatctgacccggagagcctgcggtggaacgtgcaggcggagctggtgcactgccggtgggcgatgctcggcgcggcgggcatcttcatcccggag

SEQ ID NO: 7872 - DNA, 363 bp, Zea mays
  unsure (1)..(363): unsure at all n locations; Clone ID: LIB3137-004-Q1-K1-F2
gtcggagcggtggaggaggatggccgacttgcaggtagacaacgaagcacttctggaggacgacggtgttccccgacgacgggcccttagatacggaggagggaggtggaggagaacccatcatcggaggcgacgaggaagaggaggaggacgtcgacggcctcgccagcttccttgagtcggagatcctctccggatccagcgacgaggatcctattgaccggcagcagaaggaggaaggtgatgctgcgaagaataagcggaagcagggttcatgatcggacggngatggctgcagcggcagcgagggggagcatactaacagggcgaggagggaagagaagaggaagcatgctaaaagga

SEQ ID NO: 7873 - DNA, 353 bp, Zea mays
  unsure (1)..(353): unsure at all n locations; Clone ID: LIB3137-004-Q1-K1-F4
ggggactatggacacggtggctccccgcctgagtcgctcctctacgcgatacgggccgatcagcagcagtgctgcctccttcagtgggcccgtccggaagtggcgcaaggcctgggtgcccctcaccggcaccggcaccggcaccgccgggtccgggggagggagctcacgaggagacaacaaggtggttctgtttagatggacgccggtgaatggttgttcaggaggagggggaggcaccgacgggggcatggagctcgctgctgcgggggcctccacatgcaggcggcgctacgtcccggctgcaggggaggcgcanagcaccaccaaaaaagggcaccagcagcgagctc

SEQ ID NO: 7874 - DNA, 371 bp, Zea mays
  Clone ID: LIB3137-004-Q1-K1-F5
cgagcctcgccaatcttgacctgagctcgaatctgttgaaggtccttcctgattgtttaggaaagttgaaaaacttgagaaggttaattgctgagacgaatgagcttgaggagctaccctatactattggatcgtgcacctctctcgtggagcttagactggattttaatcagctcaaagccctcccagaagccattgggaagttggaaaacctggaaatcctgacgttacactacaacagaatcaaaggcctgcctacaacaattggccatcttaccaggttgagggagctggatgtcagtttcaacgaagttgagactatacctgagaacatttgctttgcagccagccttgtgaagttgaatgtcagc

SEQ ID NO: 7875 - DNA, 401 bp, Zea mays
  Clone ID: LIB3137-004-Q1-K1-F6
ggaaaatctatcatgatttgaatgcttatagggtactttttgatgaggaaggtgatccgcgcttgtcaagttttggattaatgaagaacagccgtgatgggaaaagttatagcactaacctggcttacactccaccagagtttctacgaactggcagagtaattccggagagtgtgatctatagctatggaactgtcctgttggatcttttgagcggaaaacacattcctcctagtcatgccctagatttaataaggggaaagaatatactgttgctgatggattcttccttaaaagggcagtatgctaatgaagatgcttcgaaattggttgatcttgcatcaaaatgtctgcaatttgaatctagggatagaccgaacataaagaatcttctgccttct

SEQ ID NO: 7876 - DNA, 383 bp, Zea mays
  Clone ID: LIB3137-004-Q1-K1-F7
gaagaacttgagattgcttctaggctaaaatcacagttatgggatcagaaagagaacagttttcagagttacatggataatcaacaattagttatcaaggacataagaatattgtcacagtcatatgaaaatgatatgtatgcacttcaaatgcagtggagaaatgaaatctctaacttaggatctgggttaaaatgtttggttgatgccgctgaaaattatcataaagtcctgacagagaaccaaaagttatttaatgaagtgcaagaactaaaaggtaatataagagtatattgtcgtgttaggccatttctttccggtcaagataaaaagtccaccacaattgactacatgggggaaaatggtgagcttcttatatcaaa

SEQ ID NO: 7877 - DNA, 342 bp, Zea mays
  Clone ID: LIB3137-004-Q1-K1-F8
ctactactcgaggaacagctacatgggccgcgttcctcggcattgtcctttgcgcggcgctcttccacaggaccttccttgcgcgcggccggcgccgggccaacaaccccccgcccggccccaagccatggccgatcatcggcaacctaaacctcgtgggcgagctcccccaccgctccatgaacgagctctccaagcggtacggtccgctcatgcagctccggttcgggtcgttgcctgttgtcgtcggcgcgtcggttgagatggcaaagctcttcctcaagaccaatgacgcggcgtttctccgaccgggccgagggttcgcagtccggcaagtacatc

SEQ ID NO: 7878 - DNA, 346 bp, Zea mays
  Clone ID: LIB3137-004-Q1-K1-G1
cttgcccctctcaggcgcgacacagcatcggcgactagcgatgacaggatatcgcaggcgcagtccgagccgaagctacagcccacggaggcggtacagccggagccctcttaggcgcaagcgctacgacgacccacgcgaccgctaccgctgggccggggccggcggaggcggggaccgacgtggttacggtcggccgttggcgcagtccggtctcctcatccgtaatatctccctcacagccaggccagaagatattcgtgctacatttgagcaattcggccctatcaaggatgtttacctgccaaggaatttccacacgagggaaactcgtggttttggattt

SEQ ID NO: 7879 - DNA, 367 bp, Zea mays
  Clone ID: LIB3137-004-Q1-K1-G2
cgggagtcggcactcgggtctcgacgtctcgtctcgtctcgtctcgcctgcccgcagccccttggcgtcgttccatccggcttctcggcggcggcggagaggagggggatggcgcaccggctgctgcgggacgcgcaggcggacgggtgggagcggtcggacttccccatcatctgcgagtcatgcctcggcgacaacccctacgtccggatgttaagagctgaatatgacaaagaatgcaaaatttgtgcacgtccttttactgtattccggtggcgtcctgggcgagatgcaaggtacaagaagactgagatctgccagacatgttgcaagctaaagaatgtctgccaggtctgcctgctggatc

SEQ ID NO: 7880 - DNA, 312 bp, Zea mays
  Clone ID: LIB3137-004-Q1-K1-G3
ggctagcctcccagtcccagcagagaccagagcttcttcttcttggccttctctgcttcgctgttcttgttcttgagatcgcgctttctgaccggggagtgccgtgccggagatcctgaaaagagattgcgcgcgagaaggggggaaacatcggcttgaaccttcaccgacaacaggtactaaccgaggcatggacagggagcagatgaggatggccatcctgaaccaagaacggatcttcagacaacaggtacacgagctgcaccggctgtaccacgcccagaagcagctgatgatgcagcaggcgcagac

SEQ ID NO: 7881 - DNA, 388 bp, Zea mays
  Clone ID: LIB3137-004-Q1-K1-G4
atccgaattcccaggcaggcaggtcggcgaggagggcaggaagaccgaagaccgagccgtgcgggggctcgggacgggaacgggacaggaccccaaaatctcagatccttcctgcccgcccgcccgtgcccgtcgacgcgtcgttcttgccggccgcgccccacctacgccctctcctcctccaggggaatcggatacgccacaagctgcgcgatggtgctgtgggtcttcggctacggctccctcatctggaacacccgcttcgacttcgacgacaaaatcctcggcttcatcaagggctacaagcgcacctttaatctcgcttgcattgaccacagaggcacaccggagcattcggcgaggacctgcacgcttgagaccgacgacg

SEQ ID NO: 7882 - DNA, 230 bp, Zea mays
  Clone ID: LIB3137-004-Q1-K1-G5
ggttcttttagttgaggtcttaatgatttagatcgacttctatactgcgactaaaaatgatcgatatcacaagagtggataaccgtgtctaagccatttcgtccttcaaatctgggagtcaaattgtgaaagcttatgcagcagtctcaaataccatgatgtaaattctggcgtatgacagcatgtctcacacatttgtatcaatacatttcgaatcaatgagatttccc

SEQ ID NO: 7883 - DNA, 374 bp, Zea mays
  Clone ID: LIB3137-004-Q1-K1-G6
ggaaagcacatgggttcagagcttgtgcagagggcagcaatcaatgacatcgctgagagtgtaatgggattcaatacgaattacaaggacactggtctttttggtgtctatgctgttgctaaggctgattgcttggatgatttggcttttgcaattatgcatgagatgagcaaattgtcataccgggttacggaagaagatgttatccgtgcacgtaatcagctgaagtcctctatccaactccaccttgatggttcaactgctgttgttgaggacattggccgtcagctgctgacctatggacgaagaattcctacccccgagctttttgcaagaatagatgctgttgatgcaagcactgtgaagcgtgttgc

SEQ ID NO: 7884 - DNA, 330 bp, Zea mays
  unsure (1)..(330): unsure at all n locations; Clone ID: LIB3137-004-Q1-K1-G7
cttacataagcatcggcgggagtaagtactgtctagttattgtggatgattattctcgcttcacttgggtgttctttttgcaggacaaatctcatacccaagaaaccttaaagggattcttgagacgggctcaaaatgagttcggcttaaggatcaagaaaattagaagcgacaatgggacggagttcaagaactctcaaattgaaggcttccttgaggaggagggcatcaagcatgagttttcttctccctacactccacaacaaaatggtgtagtggagaggaagaatcgaaccctattggacatggctagaaccatgctngatgagt

SEQ ID NO: 7885 - DNA, 346 bp, Zea mays
  unsure (1)..(346): unsure at all n locations; Clone ID: LIB3137-004-Q1-K1-G8
gccctgtgaccgtgaggcgacacgacgccgagagatcacccgccccccgcatcgagtcggccccgtttgggattgtgaggtaaagcgtgatggcagcgccgccggcgagggctcgagccgactacgactacctaatcaaactgctcctcatcggagacagcggcgttggaaaaagttgcctcctgttacggttttcagatggatcattcaccactagcttcattaccactattggcattgacttcaagataagaactgttgagttggatggcanaaggattaagttgcagatctgggatactgcaggccaagaacgtttncgcacaattaccactgcctactacag

SEQ ID NO: 7886 - DNA, 329 bp, Zea mays
  unsure (1)..(329): unsure at all n locations; Clone ID: LIB3137-004-Q1-K1-H1
ctttccctttcccttccccagtcagccgcgagcctcgtaccggcgcagccatggcggaggagcccgccatcgtcgtcgccgcctcctccagctgcgaggtcgacctcggcaacctcatggcgtacgacccgtgtcaccacgtcgcagccgccgcctccgcctccagggaggagctgaggcaggagtgcctgcggaaggggacggagctggcgcaggcggtggccgacgccctcttcgcgctgccgcccaccgaggaccgcgacggccccatcgtncaccttccgccacacaccgttcgactcccgcgcgagaagcatctacccaagccc

SEQ ID NO: 7887 - DNA, 373 bp, Zea mays
  Clone ID: LIB3137-004-Q1-K1-H2
gccaccgaccaagtgggagctgtttgcaaaggcgaaaggaattaccaagcgcaaaaagaacaagcgtgagtgggatgagcaaactcaatcctggaagcggactcatggctatgaccgtgttaatgatgacaaagacattccaatcattgaagccaaattgactgatgagcctggtgttgatccatttgcgcaaagaagggatgagaagaagaagagggttgaaaagcaagaaaaaaacagactggataacttaaagaaagctgcaaaggttggcgctttgccaagtcatatacagcttgctgcgaaggcgttgcccatcacaggaacaaaagctgaccttccaaaaaaatctagaaaagaggatcttgagagt

SEQ ID NO: 7888 - DNA, 330 bp, Zea mays
  unsure (1)..(330): unsure at all n locations; Clone ID: LIB3137-004-Q1-K1-H3
aaagctccagatctcatcagatactgagattgacaattgaaagttctgcacgggagttgctagggaaggacaagtcaactacacttgtcgctagtgctaactttgttgatctagcaggaagtgagcgtgcatctcaggcgttgtctgctggcacgaggctaaaagaaggctgccatattaacagaagtttacttgcccttggcactgtcattaggaaactaagcatggggagtaatgcacacataccatacagagattcaaagctcacacgcatattacaaccttctttaggaggtaatgcangaacggctattatctgtacactgagcc

SEQ ID NO: 7889 - DNA, 447 bp, Zea mays
  unsure (1)..(447): unsure at all n locations; Clone ID: LIB3137-004-Q1-K1-H4
ccacgcgnntccgcggactgccgtgggctgggtgattctcacgagagtcccgctcgtcgtggtaggggaagggggaaggagaggcgcgaagcgggaggcgacgattgggggccggcccgaatcctgtgcccggagaacctctcatancacagacattcaccgtcgaagggacttgcaacaggcaagtgaagtggagcctctggaaacctacaagggganaggtcctctcttgttgttatacgtcgcctccaaatgtgggttcacggagaccaattacacgcagctgacggagctttatcagaagtacagggacaaagacttcgagatattggcattcccttgcaatcagttcttgcgacaggagccaggtactgatcagcagatacaagactttgcttgcaccagatttaaagctgaatacccagtttttcagaaggtgcgcgtaaa

SEQ ID NO: 7890 - DNA, 322 bp, Zea mays
  Clone ID: LIB3137-004-Q1-K1-H5
agaagactgaagagaagggaagacatggccgtgacggcggaagcggcggcagagatggtgttggagcggcgggcgtacgcgcgggtggggctcctcggcaaccccagcgacgtgtacggcggcagggccctgtccttcgccatcgccgacttttccgccaccgtccacctccgcccttcgcccgagctgctcatccagccgcatccgcaccacgacctcgtcgccttcccctctctccctcaactcgtgagccgtttgcaaagtgaaggatattatggaggcgtccggctgctgatggctatctgtaaaagtttctacaact

SEQ ID NO: 7891 - DNA, 360 bp, Zea mays
  Clone ID: LIB3137-004-Q1-K1-H6
cggacgcgtgggtgtgatacagcaacaggcaattcctattatttcctaccgtgaaggaggggaacaacgtggtctgcgcgggcatggtgggcgcgtggaaggagaagtcgttgaaggcgccgccgaccgcagctcggctgtcgtcttgctgtcgtcttgctgagactgagacgcgatcaggtcggcggcctgcttccagtcgaacctctgcgccgggatggcgccggtggtgggcgacgcgaagaagttcgaggaagagtggagcgggacgggcgagtccagcagctcggcggggctgagcccgggcgggatggagaagtaggaggagggcgacatcggcggcggcgagatgggcaggct

SEQ ID NO: 7892 - DNA, 383 bp, Zea mays
  Clone ID: LIB3137-004-Q1-K1-H7
agagcaccgcatccacaacctgcctctctcgtcccctggcggcgtccgcggcaggatggcggaatctacggcgaggacggtgaaggatgtcaacccgcacgagttcgtcaaggcctactccgcccacctcaagcgctccggcaagatggagctccctgagtgggttgacattgtgaagactgcgaggttcaaggagcttcctccttatgatcctgactggtactacatcagggctgcatccattgcaaggaagatctacctaaggcaaggcatcggtgtgggtggctttcagaagatctacggtggccgccagaggaatggctcccgcccaccacacttctgcaagagcagaggtgctgttgcacgcaacatcctgcagcagc

SEQ ID NO: 7893 - DNA, 429 bp, Zea mays
  Clone ID: LIB3137-004-Q1-K1-H8
ggagaaggggtgtgctggcaagtatacactactcagagatgaaaaacccacggggcaatctttgagaggcggcttccttgctgtggttgtgggataggatggtcttcttttcttttagggttcttgtgtcctttgatttggtactttgcagccactctttactgctgcaagtactacaacaaggatcctcgagagcgccctgggctagctgcatcagctgttgcggcactcatcttcacagtcctggcactcatcgctctctctgtggcactgataatctatatataaaacgaggaatgaacttgcgcttgcttgaaatgcgtactcaggcactcatcttcacagtcctggcaaccatccatagctctctgtggcacagacatctgaaacccaaagcgaggaaaacgcggtagctggacctggcattca

SEQ ID NO: 7894 - DNA, 376 bp, Zea mays
  Clone ID: LIB3137-005-Q1-K1-A1
caccacacctgcagaaatcacagcggcaggtgcagcaaaaatctccatgcccccgctcggctagatctccgacgagccggcccctcgcggtagcagattcgctccccgatcccgaccgatgggcggcgaggtgccggagccgcgccggctgagccgcgcgctcagcttcggctgcggcggcgtccccgaggaggcgctgcacctcgtgttcggctacatggacgacccgcgagaccgggaggcggcctcgctcgtgtgccgcctctggcaccgcatcgacgcgctctcgcgcaagcacgtcaccgtgggcttctgctacgccgtggagcccgcgcggctgctcgccaggttcccgcggctcgagtcgctcgcgctc

SEQ ID NO: 7895 - DNA, 145 bp, Zea mays
  unsure (1)..(145): unsure at all n locations; Clone ID: LIB3137-005-Q1-K1-A10
atactcatctcncttcattaatctctttctcttcctatccaccttcttacttttaaaaaccttctttttctntcctttcccccctaactaattctttcaatttttccttccatcatcacttactttaacttctctaatattttcc

SEQ ID NO: 7896 - DNA, 480 bp, Zea mays
  Clone ID: LIB3137-005-Q1-K1-A11
ggagtttgaacctcaaactgtgatcgtagtcaggttcagtttccttcaatatctgtgatcctaatcaggttcagtttcctccaatatcttttatcttggataacagctcaatttctggataatgatttatatgctctcaagcaactgtaacatggggtgttgaaagtaagaattggaggacattgaacatcattggtaatccttattgcctggaagggttcaatttcctctaatatcttatcttcaacaactgcataattttttttcttgaatctcaataatatatatccttttatggaacattttgaacacatatgtattcgtttttcctgatctgattggtttggatgacgatttgatttttcgatccaatcttgctaatgttcaattgctataaaaacccctaccaaagttcacaaaagatagtatagggtcttattcctgtatcaaacactcacataatcatacttctaagtgttt

SEQ ID NO: 7897 - DNA, 469 bp, Zea mays
  Clone ID: LIB3137-005-Q1-K1-A12
gttctagatcgcgagcgccgccctttttttttttttttttaaagcttcaagtacccatcagggactaatattaacatgaagttcaaaccaacatccatcacaaaccaactacccttaactggcactaagtttttagggttcaagaaaagaaagcatctaacagaccaaacataacacactagcagatggagtcccagtagcacaatcaggccctttcacccctgatccggcgagccagctgaatgtctttaggcatgatggtcacacgcttagcatggatggcacacaagtttgtgtcctcaaacagacccacaaggtaagcctctgctgcctcctgaagtgcaaggactgcatggctctggaatcgcacatctgtcttgaaatcctgagcaatttccctgacaagcctctgaaatggcagcttccttatgagaagctctgtgctcttctggtacttcctgatttcacg

SEQ ID NO: 7898 - DNA, 449 bp, Zea mays
  Clone ID: LIB3137-005-Q1-K1-A2
ctgatttgcgtttccagagccatgcggtgcttgccctccaggaggctgctgaggcataccttgttggcctgtttgaggacaccaacctgtgcgccatccatgctaagcgtgtgaccatcatgccaaaggacattcagctggcaaggaggatccgcggcgagagggcctaatcgccacctcaaacatcgtgacaaaaacatgaagtcctggggttattgttaatctggtgccattgtaaggacatatgagtagggtttgttttgtggatcgcaagtttctcttctgctactggtgctgctacctttgctggtgttattgctaggggcgaatactaaagtaactatgcgctgacagtctggactagcagtgttatgtgcgcttgttgaccttgcgcgccatgcttggggccgattggtccgttatgtcaaagaatggcgtacaaggcgggt

SEQ ID NO: 7899 - DNA, 392 bp, Zea mays
  unsure (1)..(392): unsure at all n locations; Clone ID: LIB3137-005-Q1-K1-A3
attaacttgagaggtcttgatggcatccaatgaccagtttatgtcggaactggctgtgttttcaaccgaacagctctatatggttatgagcccccaattaagcagaagaagggtggtttcttgtcatcactatgtggcggtaggaagaaggcaagcaaatcaaagaagggctcggacaagaagaagtcgcagaagcatgtggacagttctgtgccagtattcaaccttgaagatatagaggagggagttgaaggcgctggatttgacgacgagaaatcacttcttatgtctcanatgagcctggagaagagaattggccagtccgcagcgtttgttgcctccactctgatggagtatggtggtgttcctcagtccgcaactccggagtctct

SEQ ID NO: 7900 - DNA, 247 bp, Zea mays
  unsure (1)..(247): unsure at all n locations; Clone ID: LIB3137-005-Q1-K1-A4
antgaatttcttttacaaagacatgctgtgcttgccctttaataagctaactaggcataccgtgatgggctgtattatgacaccaacctagcccccatccatgctaagcatggtaccatcattccaaatgacattcaactggcaaagaaaatccgccactagaaggcctaatcgccacctcaaacatcgtgacaaaaacatgaagtcctggggttattgttaaaactcttgccattataaggacata

SEQ ID NO: 7901 - DNA, 342 bp, Zea mays
  Clone ID: LIB3137-005-Q1-K1-A5
gccgtgcccgccctgccctccaccttctcccggcgcaataaacaagtcgagtcgaggcgaggcggcggcggcggcggcggcggcattgccgagatttccgtgattcttgcgcttgttagttgtgctgtgtatagttgggccggccgggggtggttccgtacttccgttcagttccttctctgttggagtagtcggcggcgatgggtatcctcgcgctcatcaccggcaaggcgggcgccagcgggtttgggtcggcgtccacggcggagcaggtcaccgacggcgccgacgccagtcgcctcaccgtcgctatcacaggaggagctagtggcattggtctgg

SEQ ID NO: 7902 - DNA, 383 bp, Zea mays
  Clone ID: LIB3137-005-Q1-K1-A6
gctgcctcatccattccagagctgcgaggcagacagagagacagacagacagacagacagacagagagagggatcgacggagcaaggcggggccgtgtccggtcacacgagcgagccctctcggccgcgcgtttgtgaatggtgaacggcgagcagcgggcggacgcggagtgcacgcgggcgtcgctgctggggaggtatgagatcgggcggaccctctgcgagggcaacttcggcaaggtgaagtacgcgcgccacatcgccaccggcggccacttcgccatcaagatcctcgaccgcagcaagatcctctccctccgcatcgacgaccagatcaggagggagatcgggacgctcaagctgctcaagcacccgaatgtcgt

SEQ ID NO: 7903 - DNA, 399 bp, Zea mays
  Clone ID: LIB3137-005-Q1-K1-A7
cggacgcgtgggttcgccacgaacaaaagcgcatcgatctcgctgtcgtcactcctcgtcacccagccacgaacagaggcaccacccagcatggccctgcaggcggcgctcctcccatccaccctctcatccgtgcccaagaagtgcagcctcgccgtcgcggcgaaggacacggcattccttatcgtatcccagaagaaggtgcatgcggcgtcgctgtcggtgagaacgcgggtggcgacgactgcgcctgtggccacgccggggtccagcacggcggccaaggatgggaagaagaccgtgcggcacggcgtggtggtgatcacgggcgcgtcgtcggggttgggcctggcggcggccaatgcgctggcggagaccggcaagtggcacgtggtgatg

SEQ ID NO: 7904 - DNA, 433 bp, Zea mays
  Clone ID: LIB3137-005-Q1-K1-A8
gctccagctcctatcctcttggctccgcccgtccgcggtccgcgtgtgtgcgctccatccttctccaccacctgtcgccgggccaaccgcaccgccctctgatgactgggccgggcgaggagctggccgagctgctgtgggaccgtggcccggcgctgcggagggcgccgccgtcgttccagcccttcacctgcagcgccgccggcagcagcaggtcgcaggagctgaagcggcatgcctcggacaccaccaaggcgtcagcgttcgtgaccgccgtctccgtcccgctgggcacgcacgacgccggctccgggctcgggctcgccggcctccccgtccacgacgacgacgacgccgtgccgtggttgcattgccccgtcgccgacgacggcgacggcgacacggcgccgctgccgccggagttctgcgccgg

SEQ ID NO: 7905 - DNA, 356 bp, Zea mays
  Clone ID: LIB3137-005-Q1-K1-A9
acgataggctcggtcagcccaccccagacctttccctttccgtccccggccgggccaaacgcggtccagtgagccgagggcggagacggtcacggtgggcagagtgacacgccgcacgcctctccgccccgctccgctccagattgcgcgcacccacccatggcgctcgccgcttcccaccacggcttcctgcccttcgcccccgctgccacgcctaccccgtcacgggggcacctgcgcttccgcgccgcgcgccttctgccccgccccgcccggagaatttgttgccaatctatcaactcagctaatgtgttgggagcttcttcaacgacatctgatgaagcagtcccagtccc

SEQ ID NO: 7906 - DNA, 441 bp, Zea mays
  Clone ID: LIB3137-005-Q1-K1-B1
gcagcgggcagcggcatgggcaccagccccgtcatccctgcgacgatgctcttcgtcgctcttcttgtcgctgtctgcttcggcgccaccgccgccaggtccagccacgcccgccacaccgacgccgacgacgcgattcgtctccccaccagctttggcgctggtggtcgaccgtggaattgctgcgactccgctatcaagaacgccgagctgccggcgtggcgctgcaacgacgtggtggacaagtgctccgccgactgccaggactgcgaggcgtcgccggccggcgacggcttcgtctgcggtgactttatcttaagcctgaccgagccctcggtctgcacaccgaggccgtgggactgctgcgacagcgtggcctgcacaagggactacatccccaactgcatgtgcctggacatagtggagtcgtgctcgagcaac

SEQ ID NO: 7907 - DNA, 465 bp, Zea mays
  unsure (1)..(465): unsure at all n locations; Clone ID: LIB3137-005-Q1-K1-B10
gatcgcgagcgccctttttttttttttttttttggatacaacaaaaacaaagacgataaatgtcatatttatacaattccgtcccgcatacaaaaactgcatcatcaactggctgaagattgcagaagtggacgcatttcatggtttgctacatttctggaaacacaagaatttcaagaaaatcgacacactaacaccaagatgatctaatatagattcaaataaatgcaatgcagactcgaactactaaggagaagagtacaccacgcgcctgttaatcagaattgagaattactaaggaatgtaaccatgcatcgactactttgaaacattttatctattctctgccaaaccgagctctgaacttccagaagccgtctggccttctcctgtaacttcgtctgacaccgcaatgtttcaccatgtatcttgagaaacaatctgataacagctngaatgaactca

SEQ ID NO: 7908 - DNA, 435 bp, Zea mays
  Clone ID: LIB3137-005-Q1-K1-B3
gcgccggcgtgcttgtgatctcaacccaagtcgtgcctccgctccggtcacccgtcgctccacgcaactatgtcgaggaggaagaccagggagcccaaggaggagaacgtcacccttggacccactgtccgtgaaggagagtatgtctttggtgttgctcacatctttgcatccttcaatgacaccttcattcatatcactgatttgtctgggagggaaactctggttcggatcaccggtaccatcctaaaaccttggctgtgcacgacctatgtggcagctgtatatggttttaactgagatgtgctaaacctgaaccctgtaggtggcatgaatgtgaatgctgaccgtgacgagtcgtcaccttacgctgctatgcttgctgctcaagatgtcgcacagcgctgcaaggagcttgtcattactgcactgcac

SEQ ID NO: 7909 - DNA, 404 bp, Zea mays
  Clone ID: LIB3137-005-Q1-K1-B4
gccaagttgcatcgactcctccccggtcctccaccgcccgccgccgatggatgtggatgtggacgaggccaccgccacccctgcctccgcctctgccaagcccgcttccaacggcgaggccccctccggcgcccgcgaggtggatgtcggcgaggagtacacgctcgccggcgttctgcgcagcttcgtcgacggcgtctggtacccggacgagccgctgctccggcggctccgggcggcgtcctgcgaggccgcgccgcggctgaagggggcgtctcggaactcagcgcgggatctgctcgagtggacaaggcagggcagcggcctccgcgccatcctcgtcatctcggtcgggacaatcatgcctatagcattgactggccttttaatcttcatgttccttc

SEQ ID NO: 7910 - DNA, 445 bp, Zea mays
  Clone ID: LIB3137-005-Q1-K1-B5
ctcatacatatgttggaagaggttgatcagtaagtatcctacatgtgttttacactatccataaatgttacacgacattttcacttttattttcagttattctcttaatttttagtacaccatgtttaccatgccatgcacaacaatctgtgataaatgtgaaccttgatccattgccttgagccacttggctatatccaccccttatctagttaaatgattttatcttttttccattaatcattgttctatttgttttgacttccatacctgatcgagatagtggacataggatgccactctttaaaatggaaaaggagtaatcagttgtgacacggaaaaaaacgacttcttttgtagctcgacatttattggagaaattcaactgtatctttggtttgaagaatctttgttttcaactgcaaaaaggcctctagttaagttg

SEQ ID NO: 7911 - DNA, 300 bp, Zea mays
  Clone ID: LIB3137-005-Q1-K1-B6
caaatggattgaacttctgaagcaaagtgacgaatattgggaaatgggtgacatcgtgcacaccttaacaaatagaaggtggcttgaaaagtgtgtcacttattgtgaaagtcatgatcaagctcttgttggtgacaagacaattgcattctggttgatggataaggatatgttgagcgcgtgcgtgcgtgccctgatcgagcaccgattgccatggactctactacgacgacagctccgctgctgcatccggccgccgccgccccgagcaaggaggagccggcaccggcgtccccgcac

SEQ ID NO: 7912 - DNA, 461 bp, Zea mays
  Clone ID: LIB3137-005-Q1-K1-B7
gtcccaaggctgctgccgccgcctgccgctaggggatcgcttgctttcctcggaccactctgccgaccacatctacaccgcatcaacggtccttccaagtgagctccaatcccctgtctgtagatggagagggtgctaaaggatgacgccgtcgaggagaagggcgagcgcgccaggatggcatcgtttgttggggccatggcaatctcggatttggtgaagaccacattgggcccaaaaggaatggacaagatcctgcaatcaactggcagaggacgtaatgtgactgttacaaatgatggggctaccattttgaagtcacttcacattgacaatcctgctgcaaaggtccttgttgacatctcaaaagttcaagatgacgaagttggtgatgggacaacttctgttgttgttctagctggagaacttttgaaggaggctgagaagttaattaacatgaa

SEQ ID NO: 7913 - DNA, 458 bp, Zea mays
  Clone ID: LIB3137-005-Q1-K1-B8
gctgttcgatgaggtgcagaaggtccagtggatgggtgctgtatccgtcggaatccttgcgcatactggcacggcagaccaactacggctcactgaggaggacaagcagaatatgcctcttccagtccagggccctgcttgcaactcctcagggcatctgattggatggcacacgttcaactcattgcccttctctgggaagacggccacagttgttggtgaagcagcccctgttctgcccaggggtttggagtgggctggttttgtgttgaactcaaggatgctgtggaaggaggctgacggcaagcctgactgggtgaaagatcttgatgctgtgggcgagaatggcgaggagattgagaacccacttactctgttgaatgatccgtcctctgttgagccactgggcaactgtgggaagaaggtcctactgtggtggcttcgtgttgaagcacggg

SEQ ID NO: 7914 - DNA, 453 bp, Zea mays
  Clone ID: LIB3137-005-Q1-K1-B9
acggttctagatccctagcgccgcccttttttttttttttattaaagcttcaaatacccatcaagcactattattaacatggagtgcaaaccaacatccatcacaaaccaactacccttaactggcactaagtttttagggttcaagaaaagaaagcatctaacagaccaaacataacacactaccagatggagtcccagtagcacaatcaggccctttcacccctcatccggctagccagctgaatgtctttaggcatgatggtcacacgcttagcatggatggcacacaactttgtgtcctcaaacagacccacagggtaagcctctgctgcctcctgaagtgcaaggactgcatggctctggaatcgcacatctgtcttgaaatcctgagcactttccctgacaagcctctgaaatggcagcttccttatgagaagctctgtgctcttct

SEQ ID NO: 7915 - DNA, 341 bp, Zea mays
  Clone ID: LIB3137-005-Q1-K1-C1
cctctatcttctttcctgaatgaagtcttcataaagttggatggtgtttggggtctgcttgggactgctgctttcgcattcttctgcttctatcttcttattgcagtgattgctggggagatgatgcttggattgaagctagtttttatcacaattcacccgatgaaatggggaggcactttaatgaactccttcctgtttaatgttgggctcatactactttgctccatcagtgtgattcagttctgtgccacggcttttgcctactacgcacaagcaactgcagctcaagagatatttggccacactttgcaatcccttcgtggaattaagtatcttta

SEQ ID NO: 7916 - DNA, 475 bp, Zea mays
  Clone ID: LIB3137-005-Q1-K1-C10
cagtacttacaaggggaaggtccttctcattgtctatgttgcatctcaatgtggcttgactgactctaattacactgagctgagtcacttgtatgagaagcacaaggggcaaggtttcgagattcttgcttttccctgcaatcagttcggagcgcaagagcctggaaccaacgacgagattgtagaatttgcttgcactcgcttcaaagcggagtaccccatctttgacaaggttgatgtgaatggggacactgctgcgcccatctacaagttcctcaagtcgagcaaaggcagcctctttggcgatggcatcaagtggaacttcgctaagtttcttgttgacaaagaaggccatgttgtccatcgctacgcaccgaccacctctccactgagcattgagaaggatatcaagaaactgctctgagtctcttgagctctttgatgtccttatgttgttactctcttccaagctttt

SEQ ID NO: 7917 - DNA, 477 bp, Zea mays
  Clone ID: LIB3137-005-Q1-K1-C11
gctggacacaagcgcactacaaatccagaaccatattcgcccccccaactctaccgactcggtcccattctcatcgggataaagatccaatcttttccgccaagcgactcggatcggtcctgaactccggcgatgtcaacgccggcgaggaagcgcctcatgagggacttcaagcgcctgcagcaggaccccccagcggggatcagcggcgccccaatggataacaacatcatgctgtggaacgcagtcatattcgggcccgatgatacaccgtgggatggaggcacgttcaagctaacactgcagttcacagaggactatcctaacaagccgccgactgtccggtttgtttctcggatgttccatccaaacatctatgcagatgggagcatttgcttggatattttacagaatcaatggagtcctatatatgacgttgctgcaatactgacatcgattcagtctctcctctgcgac

SEQ ID NO: 7918 - DNA, 440 bp, Zea mays
  unsure (1)..(440): unsure at all n locations; Clone ID: LIB3137-005-Q1-K1-C12
acaatctcactacatttccataaccattttcncccccccaactctacctactcagtcccattctaatcggggtaagcatccaatcttttcctccaatctactcncatctatccttaactcctactatatcaactccatctaggaagctcctcattatttatcttaatcgcctgcatcaaaaccccccatcttatatcatcttctccccaatgtataacaacatcattctgtgtaactcagtcatattctttccctatgatacaccttagcatttattcactttcaatctaacacttcatttcacagaggactatccttacaatctctctactatccatattaattctcacattttccattcaaacatttattcattatttagcactctctttgatattctacataatcaattatttcctatttattcctttcttcattac

SEQ ID NO: 7919 - DNA, 232 bp, Zea mays
  Clone ID: LIB3137-005-Q1-K1-C2
ggcacatcgagatcaccatcgtgcacactggcacgtgcactagcttaagataaaccacagaccaccaagccgtgcacgcattatgcagtacggtcagcatggtctgcgcgaacaccgcgccactggacttgtacaccagtacgggcacccagtaggcggagttatcaaggcacccgaggacgaggcacgctcgagaacacacgaggatgggccactagggagcacggatgac

SEQ ID NO: 7920 - DNA, 391 bp, Zea mays
  Clone ID: LIB3137-005-Q1-K1-C3
ctcccaagccagtaccgagtcctacgagcagtcgcacgcaagtgtcaagagacgaaacggtcgacatggctcgcacgcaatctgccgtagcggtcgccgtggtggccgcggtgctgctgctggcagcggcggcgacgacctcggaggccgccatcacctgcgggcaggtgagctccgccatcgcgccctgcctctcctacgcccgcggcacggggtccgccccctccgcgtcctgctgtagcggcgtcaggaacctcaagagcgccgtcagcaccgccgtcgacaggcgcgccgcctgcaactgcctcaagaacgccgccaggggcgtcagcggccttaacgccggcaacgccgccagcattcccttcaagtgcggcgtcagcattcccta

SEQ ID NO: 7921 - DNA, 198 bp, Zea mays
  Clone ID: LIB3137-005-Q1-K1-C4
ctcccccctaccctaccccccacacggccacacacacaccgtcgcgtccgacccccacgccgtcgactgctcgaccggtcggctccgatggggtacgtgctgtcggcggtgggcagggtgctggagcagcccacggcgtggggggcggcctgggagatggcactcctcgcggggcccctgtgggcggcggccctcctc

SEQ ID NO: 7922 - DNA, 319 bp, Zea mays
  Clone ID: LIB3137-005-Q1-K1-C5
ctcgcaccacaagcgagcgagggacccggggcggaagaagagagagaagacgtctctctcctctcggcgtccccgttccccaacctctcgtctgctgcctgcctgcctgcctgcctgcaaaaaggagtttgtcatggcgtctaagcgcatcctcaaggagctgaaggacctgcagaaggacccccccacatcatgcagtgcaggtcctgctggtgaggacatgtttcattggcaagcaacaattatgggaccacctgacagtccctatgctggtggtgtttttttagtgaacattcatttcccgccagattaccccttc

SEQ ID NO: 7923 - DNA, 450 bp, Zea mays
  Clone ID: LIB3137-005-Q1-K1-C6
gttccgctttacatcaaggtacagtaacgcttagacaaatgaccctccctttaccaaaaaatatgaaaagatcggcggagatatatttctatgcggcttttcgttgtacttgtgttcttcttacctgattgcttgaagaactgacatctatctaatggttatacgcataggcatgttctgagccctgttgagtgtaacaatctgcaagttgaggggaagcagattacagtctgcctatataatctagaatggttgttcaacttgcagattggaacatgcctccatctgactttgtggaccctaattgcatttagcttcaaatttcccttctcatacctgatgaatacttatcctcatgcttctgaaaattccaaatttgcttagtgagcctcatgtgccttttgaatctatcgacatggcaaatggtattttccagattcatgttcaatt

SEQ ID NO: 7924 - DNA, 415 bp, Zea mays
  Clone ID: LIB3137-005-Q1-K1-C8
ctctctctctctctctctccacccgtgctgctacgtaggatcaatggtttggcttgcactctagctgctccaccggacaagcgagtagtgatggttctttgatgtgtactccaggggggcggcctgtccgagttctccgggctcaggagctccgcgtcgctgcccatgcgccggaatgccacctccgacgacttcatgtccgccgtctccttcaggacccacgcggtcggcacgagcggcgggccgcggcgggcgccgacggaggcgaagctgaaggtggccatcaatgggttcggccgcatcgggcgcaacttcctgcggtgctggcacgggcgcggcgacgcctcgcccctcgacgtcatcgccatcaacgacaccggaggcgtcaagcaggcgttccacctgctcaagtacg

SEQ ID NO: 7925 - DNA, 149 bp, Zea mays
  unsure (1)..(149): unsure at all n locations; Clone ID: LIB3137-005-Q1-K1-C9
tcggtccttccggggaggggacttcgctcggcttcaactttccctcgtgccttcccccnggcccggtcgccaccggggtggcctcatctcgacgccaagcgtgccaggccgtcttgccagtatacctggcgaagagcgggcnncggagc

SEQ ID NO: 7926 - DNA, 458 bp, Zea mays
  Clone ID: LIB3137-005-Q1-K1-D1
gaaaaaaaacacgagaaaaatcaaatcatgatacggtgatttcagagagcccctgtcgggtagggaagggatggagaggcgaagcggaggcgacatgggggcggccgaatacgtgccggagacctccatacacgaattcaccgtcaaggattgcaacggctaggaagtgagcctggaaacctacaaggggaaggtcctccttgttgttaacgtcgcctccaaatgtgggttcacggagaccaattacacacagctgacggagctttattagaagtacagggacaaacgtccgatctttgcctgatgtggctcatgatccgttgttgcgcctgaaatgtgaatctctctggaaattggtgcgtaaaaatgggtaattggagtagtgcacgtttatgcttgttggaacagtcgtacttgtcttctgttcgaagtgggatggcaaaaaatcacgaaaaata

SEQ ID NO: 7927 - DNA, 481 bp, Zea mays
  Clone ID: LIB3137-005-Q1-K1-D10
gccaacactagagcagttgccacttagggtttcaagttctcaacaatcaagctgcaaaatcgagtacatcaagatggtggagattctgttcgaggatatcttcactgtcacccagctcgatcctgatggaaagaagttcgataaagtgtcgagaattgaggctgtaagtcagcaattcgacatgcagatgcagctggatgttaatactgagatctatccccttagtgtggggaagaagtttactatggttttggctccgacgctgaatttggatggaactcctgataccggatactttattcagggagggagaaaatcgcttgctgataaatttgagtatgtcatgcatggaaagctgtttaaaatctctgaagagtctgccagtggacctaatgtgaaagtggagatgtatgcttccttgggaggtcttctgatgatgctgaggggcgacccgtcaaatgcggccaatttcgagctggat

SEQ ID NO: 7928 - DNA, 391 bp, Zea mays
  unsure (1)..(391): unsure at all n locations; Clone ID: LIB3137-005-Q1-K1-D12
cccacgcgtccggttaccctgtgagaactcatggtaatgatgagcacaaagctccactggaacaaatgctctgactaatttctgatttcagcatccttgttcctcaattgctctgattcaccctggtggtttgataagatggacttctgctgctgatgatgtcgggaaaacacataaagcaaaaagataaagagtacccttgaggtgcttctttcgacatttgatcttttgcgaggagtcccatgctgaagcaggaccgttgattttcaggataaaagaagttggaaccatctgaagtgtcttctctttaccgaataataggcaatgaaacatcatcaggctgcantcgggaagtatcatgcatcaggtgatctcttggcttgaatctact

SEQ ID NO: 7929 - DNA, 327 bp, Zea mays
  Clone ID: LIB3137-005-Q1-K1-D2
ccgaccgcgagcaagcggaccaaatcctcctccatattctatcgcgtgcacgcatctggccgcctcgaccctcggcggcggcggcggcgacgacgacgatggggctggagatggaggcgatggcggggtcgatcggcgtgtcggtgcccgtgctccggttcctgctctgcttcgcggccaccatcccgacgggcctcctgtggcgcgcggtgcccggcgccatggggcgccacctctacgcggggctcacgggtgccacgctctcctacctctccttcggggccacgtccaacctcctcttcgtcgtgcccatgacgctcggttacc

SEQ ID NO: 7930 - DNA, 397 bp, Zea mays
  Clone ID: LIB3137-005-Q1-K1-D3
ctcactcccaatcttccttgctgctccaatccgctcttttattactcggccagcggaaggggagagaggagggcgagatgacggtggagaaggtggacgcggggctttccgacttcgacgcccacttcgatcgcctcttcgcttccccggacgccgactccgacggcaaggtgaagctgctgctcttcctggccgaccgcaagcctgactcctccctctcctggtgccccgactgcaacgtggcggagccggtgatctacgatcggctggaggcactggatggcaaggacgcggtgctcctgcgcgcctacgtgggggacaagcccacttgtcgtgacccggcgcacccgcggagggtggaccccaggttcatgctcaagggcgtgccaacgctgat

SEQ ID NO: 7931 - DNA, 225 bp, Zea mays
  Clone ID: LIB3137-005-Q1-K1-D4
ctgacacataggctagatcacacatctgcttctagctgccaggctgtcgcgatgcatataagcctacctctagacgcttactcctgacgctgcgcgatactagtgtaataatgatatatatatctactgatgcttcaagcgtacgggtgatgtttaacggcatctacggctgctgctgctgagccacagtaccttactgtttctgagacttgtctctcccacact

SEQ ID NO: 7932 - DNA, 354 bp, Zea mays
  Clone ID: LIB3137-005-Q1-K1-D5
gtcaggatcaacatcagtagcacatgagaatttagctacaaagacacgtgtggggggttgggtcaagacccacaagagcaatgcatacttcaagcgtttccaggtgaagttcaagagaaggcgcgctggcaagacagactacagggccaggataaggctgattaaccaagacaaaaacaagtacaatacacccaaatacagatttgttgtgcgatttaccaacaaggacatcacagcacaaatcatctctgctagtatagcacgtgatatggttcttgcttctgcttactcgcatgagttgccacgatatggtcttgaagttggtctgaccaactatgcagatgcctactgcac

SEQ ID NO: 7933 - DNA, 337 bp, Zea mays
  Clone ID: LIB3137-005-Q1-K1-D6
cggccgatgagttcaaagctgccgtcgatgccgccaggacggccttccccggctggcggaacacgcccgtcacgacgcggcagcgcgtcatgttcaagttccaggagctcatccgggctaacatggacaagcttgcagagaacatcactacggagcaggggaagacgctaaaagatgcttggggcgacgtgttccgcggcctagaggtggtggagcatgcttgtggaatgggaacactgcaaatgggcgaatatgtatcaaatgtttctaatgggattgacaccttcagcattcgggagcccactggtgtttgtgctgggatatgcccatttaattt

SEQ ID NO: 7934 - DNA, 423 bp, Zea mays
  Clone ID: LIB3137-005-Q1-K1-D7
cggacgattaatacaaagctgccttcgatgttttaaggacggccctcccttggtggcgggagacgcccttaacgacgcggatatacgtcatgtccaagtttcatgagctcatccggcctatcatgtacatgcttgcagagaacatcactacctaacaggggaagacgctaaaagatgcttggcgcgacgtgttccgagaactataagtggtgagagcatgctcgtggacatggaaacactgcaaatgggcgaatatgtatcaaatgtttctaatgggattgacaccttctgtatttgtgagccactcggtgtttgagctggaatattcccatttaattttcctgctatgatgtccctattgatgtttaccatatcagttacgcgtggcaatactcttgttcataattcatctgaaaacgaccc

SEQ ID NO: 7935 - DNA, 406 bp, Zea mays
  Clone ID: LIB3137-005-Q1-K1-D8
gcgagaggtagccatcaaaggtttctgggacttgtacgacccacagggctactcggtgtggttctgtgactacaagtacaatgatgagaacaccgtctcctttgtgaccctgaacaaggttggtggattcctgcagcggatggacctgtgccgcaagtacgcctttgggaagatgctcgcgataggctctgagccacccttcaagctgaagggcctttggctcttacgtggccaggatgtttccaagtttgtaatggatgacgtctatgacatggagctctaccagtggtccaaggtggacatctctgatgaggcccagaaagagcgtgtcaatgcgatgattgaggaccaggagccctttgatggcgaagcctttcttgacgcgaaatgctttaaatgaatgtgc

SEQ ID NO: 7936 - DNA, 481 bp, Zea mays
  Clone ID: LIB3137-005-Q1-K1-D9
cggacgcgtgggcgactggccatggaagtccgacttcttgcctcggcacgtccaataactggtctcaatggaagtggaggccaatcaggtaatttctcatcacttttggtgccagccgcaaccgtgggggcattaggttatggatatatgtggtggaaaggcctctcattctccgaccttatgtatgtgaccaagcaaaatatgtccaatgctgtttcaagcatgacaaagcatctcgaccaagtgtctgctgcccttgctgcgacgaagaaacatttgacacagcggattgagaatttggatgggaaaatggacgagcagaaagcaatatcatccgaaataaaaaatgaggttattgatgctcgtgataaactcactgatattggttataacctgaactctctccagcagctcgcttggggtctcgatgggaggtgaatgctatagagaccaagcaggattttgcatgcgctggtgtgat

SEQ ID NO: 7937 - DNA, 353 bp, Zea mays
  Clone ID: LIB3137-005-Q1-K1-E1
ggtcatggcgatgtctctaagctgatgccgactgatatcgcaattgagtcacttcataagatcgagagtttcgtcatcgagcacgctgctgataatccagctagcgactcgcaagctgagtcacagatccaaaggatacagaccttgtaatatcttaatccttctgttttgtaccgaagcgtaccccctagagcatcgttggtttatttgttcgttgaagtgtcacgagggagagaaaaaaaaccctgaagtatttcttcttgtaagttgtaaaggaatggaataaaggagctaataatccgaagtgtaccgttggctgggaaaaaaaaaatttttataaaaatataaaaatt

SEQ ID NO: 7938 - DNA, 481 bp, Zea mays
  Clone ID: LIB3137-005-Q1-K1-E10
gcgaagaaagcgagcacagcggcgccggcggcgatttcctcgccgaggaagaccaggagtggcacctccggcaagcgggtggcgctggtgtctgcgccgccgaaggcggcggtcgccaagaaggtgaaggcttcggcggcgaagggcaaggccaaggagccggccggctcgaaggccaagggtaatggggaggcaccctcggcagaggggtcggccaagaccatcatcgtggaggcctgcaaacaatgttcttccttcaagataagggctgaggcggtgaagaacggcttagaaagcgctgtcactggaatcactgttgttattaatcctgagaagcacggcgtggatgctttgagattcgtcaactggtggtgaagtcttcgtctcacttttggccatgccaagacctttcactaagatgaagagtcttgatatggatcaagtcatttctgatattgccaagaaacttgcttgaatgagg

SEQ ID NO: 7939 - DNA, 502 bp, Zea mays
  Clone ID: LIB3137-005-Q1-K1-E12
cgtccgtattcccggtcgagcacgcgtccggcatccggtccccctctcagatctcaacctccatttatcaacaaggtaaatctctgattcgttaccgttttctaggggtgtcccgaggtgtaacctgatggatcagagcccgccggagttcgattacttgttcaagctgctgatgatcggcgactccggggtcggtaagagcagcctccttctcaggttcacctccgactcgttcgaggatctctcccccacgatcggtgtggactttaaggtaaagatggttacaattggtggcaaaaaactgaagcttgctatttgggacacagctggacaggagaggttcaggactttaacaagctcatattacagaggagcgcaaggggtcataatggtttatgatgtaacacggagggagacattcaccaatctttctgatgtatgggcgaaagaagtcgacctctatgtaactaatcaggactgtatcaagattgctggtggtaac

SEQ ID NO: 7940 - DNA, 182 bp, Zea mays
  Clone ID: LIB3137-005-Q1-K1-E2
gcaagaggcaagagggccctcaatcgctaagcgctagctcccggcttaactagtaagcaggcatgaatttccgtgggaatggcaacgcgaccatcccgtgcaagtactggaaggcgagcctgagcgtgatccccggcgagcgcgccattcagtgcgcgcaatgcaactgcgtgacgcgcatt

SEQ ID NO: 7941 - DNA, 394 bp, Zea mays
  Clone ID: LIB3137-005-Q1-K1-E3
cacatacacaagcacaagcgcactctagcaatggcttctgaggttgtccgccctagcgacgccgagctactaaaggcacaagccgacatatggcggctcagcctctcctacctcacgcccctgtcactgaggtgcgccgtggagcttggcatccctacggcgatctaccgccatggcggggctgcctcagccgctgagctggtcacggcgctgtctctcccctccactaagctgccgttcctccgccgcctgctgcggctcctcgccgcgtcgggcgtgttcaccgtcgacaagcagagctcggaggaggagcggtaccgcatcagccccgtgtcctacctcctggtggacggcatccctcacgaggaccacatgaaccacaccgctctggtgc

SEQ ID NO: 7942 - DNA, 439 bp, Zea mays
  Clone ID: LIB3137-005-Q1-K1-E4
ccgctggtggacaaaaagaccgaagggaccgaccgtcggctgctctctcgtggccatggccgtggcggcggcgttcctctccagctccctcctccccactactcccggctcccacctcaccccattcactctgcgctcccgtctccgcctcttcacacggcgcgccgtcgtggtcaacgccgccgccgccacactccgcgaggtctgctccggccgcgtcccggaccacgtcctgcagagggctgaggagattggctatgtcgtgcccaccgagatgcaggagcaatccctgccgcttctgctgtccggccaggattgcattctccacgcgcagacaggctccgggaagacgctggcctacctcttgtccatcttctccgccatcgacttcagcaggtcctcggtgcaagcgctggttgtcgtccccacgagggagctc

SEQ ID NO: 7943 - DNA, 301 bp, Zea mays
  Clone ID: LIB3137-005-Q1-K1-E5
acgccatttcttcccagccgccacagccttcttcctcctctccccacacgcacagctctctcctgccctgtacatggcgcagaaaaatctccagccatggcgtgagcaccattcccatggccgagctcacctgcctgccgcgagtttgccagcaacccccacgcggatctccatttcccctagctgtcgctcgccgcagagttctctgctggcttcctcctcgtcgcgcgcagggcacctttggcgttcgcccctgcgagctccatagcctagccatggtggccagcgagctccctgctcc

SEQ ID NO: 7944 - DNA, 418 bp, Zea mays
  Clone ID: LIB3137-005-Q1-K1-E6
ggaaggacggtttgcctacctctggttccggcggccatggcggtggcggcccctggccagctcaacctcgacgaggccccgtcatggggctcccgcagcgtagactgcttcgagaagctcgagcagatcggcgagggcacctacgggcaagtgtacatggcgaaggagacgggcaccaacgagatcgtcgcgctcaagaagatccgcatggacaacgagcgcgaagggttcccgatcaccgccatacgcgagatcaagatcctgaagaagcttcaccaccagaacgttatcaagctcaaggagatcgtcacctccccaggcccagagcgggacgagcaagggaagccaattgacggtaacaagtacaaggggagcatttacatggttttcgagtatatggaccatgatctcaccgggc

SEQ ID NO: 7945 - DNA, 308 bp, Zea mays
  Clone ID: LIB3137-005-Q1-K1-E7
acgaaaatggatgctggcgtacatgatgcaactgttaggatagacgccctaaccgggggcacggtggatctgcacgaggccacagattgtatatgatccaggacaacctgacacccgcatatcttgaaacagacctattacgcttgatttcgtacttacattgagcatgacattgggtcccacacattcggcgagcacaagaagactctaattgtctacgtgaggataccgacctacaaacgtccttacgttgaatctaccactgtgacacacgatgcaacggattcgtacaaaacttctgagaaaag

SEQ ID NO: 7946 - DNA, 344 bp, Zea mays
  Clone ID: LIB3137-005-Q1-K1-E8
ccgggaggttgccatcaaaggtttctgggacatgtacgacccagagggctactctttgtggttctgtgactacaagtacaatgatgagaacaccgtctcctttgtgaccctgaacaaggttggtggattcctgcagcggatggacctgtgccgcaagtacgcctttgggaagatgctcgtgataggctctgagccacccttcaagctgaagggcctttggctcttccgtggccaggatgttcccaagtttgtaatggatgaggtctatgacatggagctctacgagtggaccaaggtggacatctctgatgaagcccaaaaagagcgtgtcaatgcgatgattg

SEQ ID NO: 7947 - DNA, 463 bp, Zea mays
  unsure (1)..(463): unsure at all n locations; Clone ID: LIB3137-005-Q1-K1-E9
gagagatctgaagcacgatgcggagcagtcgaatcctctaagattaatggagtagaaggacgaagatgaagaaaatggtggtcctttatagctctttgatgacgtggctaccaaggaaggaccttctggagcgtaagctgatagcgagtctttcttggcacacaaggaccgtggagtgcaagatatgctgcgtcaatcttacgtgactttcttctataaagagggatggttatggaagagctcgataatttcggacccaaggggtccaaatcctgaagatattgtgagactgggacttggtcctcgcggaggacaagntcggaagagtgttggcttgcctcttcatagagggcacgtagggagtgaagtcaagttttctggaggacatgtatagagttggggtttaatgaatgtatttttagngtgtcttatgctggaagtccttgagctggaatcttacttc

SEQ ID NO: 7948 - DNA, 430 bp, Zea mays
  Clone ID: LIB3137-005-Q1-K1-F1
cctaaaccctcctagtcctctccatccccatcccctccaatggcggcgactgccacgtccttcgccactctcgccgtcgcgcgctcggcggggcagcggtccctccttgcctccaaggccgccccctcgccgctcctctccctccgcggcgcccgcctcccctcgcagggcgtctccttatctgggggcctcgcggcgtcgccctctcatagccgcgcgcgcttcgccacatcagccagcgccgagcccaaggaagcagaccttcagtctaaaatcacaaacaaggtgtactttgacataagcattgggaaccctgtgggcaagaatgttgggaggatcgtcatcggcttgtacggggatgatgttccacagacaacagagaacttccgtgctctttgcactggagagaaagggtttggatacaagggat

SEQ ID NO: 7949 - DNA, 409 bp, Zea mays
  unsure (1)..(409): unsure at all n locations; Clone ID: LIB3137-005-Q1-K1-F10
acggtctgctctcctttcacntatgagctgcctcttttttgtatcgggatgactacactacggggtgagcatatatggcgggtcgccctctcttctagggatgcagtagagtctgtctctactcaacactctatctctagcatttcaaggtagagcaagcccatattgtctctacgaatgtatgctcaatcaagaaataggtttaggccctcaatggctaacacttgccatggagattcatattaccacacccatattaactgcaaacaacataccagggtcgaaagatgtatcttctatcgaagctgcaaacgactagcgcatgtatgaagctaccatggaaatgcacccgcaacttgaaccactacacatcatcatgccgccaaagaacaactatatgcttgcatag

SEQ ID NO: 7950 - DNA, 435 bp, Zea mays
  Clone ID: LIB3137-005-Q1-K1-F11
ctctgatgaagatcctcaccgagagaggttattcctttaccactactgcagagcgggaaagggtgagggacataaaggagaaacttgcgtatgtggcacttgattacgagcaagagctggaagcagcgaagagcagttcctctgtggagaagagctatgagttgccggacgggcaggtgataaccatcggtgctgagcggttcaggtgccctgaagtcctcttccaaccatcgttggttggaatggaagctgctggtatacatgagaccacttacaattccatcatgaagtgcgatgtcgatatcagaaaagatctgtatgggaatattgtgctcagcgggggggacaaccatgttccctgtatcggtgatcgcatgagcagggaaacactgccctgccctagcacatgagatagggtgtcgcccgctgacggaa

SEQ ID NO: 7951 - DNA, 279 bp, Zea mays
  Clone ID: LIB3137-005-Q1-K1-F12
atctaataaaaatactaacaaaaaaaaaaaaaaatttttaccaatactaaaaaaccaaccacgagaaattatacataaaggagaggctttcacatgccccactttatttctatcatcaacttacctcaccccacttcacttcctctctttttatgacctctgacccttccttaccctcaacttgtctccatttaacctcctcgcttcacctacccccttgtcctctcccaaccttctctttttgccccttacccttctttcttcattcccctacttacc

SEQ ID NO: 7952 - DNA, 213 bp, Zea mays
  Clone ID: LIB3137-005-Q1-K1-F2
tgctattagtgactacaaatgggcaatgcgttgctggggctggcatggctggagccatcgatttttataaacccgtagagcttgggacactggacatgcggaacgagtccctctctctgagtgacacatctgggaggacgtgccctacactattgtccggcccatgatacttgtgatcaatgtgatcattcctgtgccacacaggcgtgacac

SEQ ID NO: 7953 - DNA, 398 bp, Zea mays
  Clone ID: LIB3137-005-Q1-K1-F3
aagaaaaagagactcgtccagtcgcccaactccttcttcatggatgttaagtgccaggggtgcttcagcataaccactgttttcagccactcccagactgttgttgtgtgccctggctgccaaactgtcctctgccaacccacaggaggaaaggcaaggctcactgagggctgctctttccgcaggaagggagactagagcggatgtggtcttcaagttttgctctatgccagatactagcgtcatgaactgcctttagctaagattttccataagttgttctcgagcagctatgtgttgcatgttggcttacttccaaactatatctggtttggtttggattgtgatgaactaatggctctttgaattatattatgatcgtgacgatatttggtgaa

SEQ ID NO: 7954 - DNA, 309 bp, Zea mays
  Clone ID: LIB3137-005-Q1-K1-F4
cgagattaagtcttggcttgcttttgctgcccagaaggttgttgaggttgatgctcttgctaaggcattggctggtcaaaaggatgaggcttacttcgcagcaaatgctgctgctcaggcctcgaggaaatcctcaccccgtgtgaccaatgaagaagtccagaaggctgctgctgctctcaagggctctgaccaccgccgtgcgaccaacgttagtgctaaattggatgcccaccaaaaaaagcttaacctcccaatccttccaacaattacaatgggttcgttccaccaaaccgttaacttaagaag

SEQ ID NO: 7955 - DNA, 409 bp, Zea mays
  Clone ID: LIB3137-005-Q1-K1-F5
ggcaggcgataccgtaccgagagagttgaagctgagaaagaatggcggggctctacgagaagcagtcggagacgtacgccaagaagcgtccgcagtaccccaaggagtggttctccatgctggccagcctcaccgcggggcaccagcgcgcctgggacgccgggtgtggcaccggccaggccgccatcagcatggcggagcactacgagagcgtggtggcgactgacgtgagcgaggggcagctccggcacgccaccgcgcacccgaaggtgcggtacctccacaccccggagcacctctcggaggacgagctggtgtcgctggtcggcggcgagggctccctggacctggtcgtggtggccacctccatccactggttcgacgtcccgctcttctacgccgtcgtgag

SEQ ID NO: 7956 - DNA, 198 bp, Zea mays
  Clone ID: LIB3137-005-Q1-K1-F6
atcaactttgagatacaagagtgtggaacgcattaaggcagttggcaagcatagcatcattggagcaagcggagagttcagtgacttccaggagattttgcgctatttggatgaactaactctgtctgatcatatgtgggatgatggaaactcgctgggccccaaagagatccacagctatttgacaagagtgatgta

SEQ ID NO: 7957 - DNA, 396 bp, Zea mays
  Clone ID: LIB3137-005-Q1-K1-F7
cattgttggacgcgttcccctcctgcacgcatcctcatctcgtcctccacatccaggatgggcgtcctccttgagaccttgcctccccgagtgctctcggtgagctactttgtttcgatttatcaggaaatccgtttgcttcatgttgtgcaggctcatatctgattgctggattcggcaaacccgcgttggatcctgtatcggttagtccttgcctgcaaggttcttgttgttttgttttggtggtcgagcatcgcatgttctgcttctggatccacatctggagaaatcgcgaagtcgtcgtcgttcggttcggagcggatctgaggcgacgatagatggaggcggggggatcttttcgtctgcagtcctgctccaacctggatggatgatgtc

SEQ ID NO: 7958 - DNA, 387 bp, Zea mays
  Clone ID: LIB3137-005-Q1-K1-F8
cccacgcgtccgcctcgctgtcgcaggtggagctagccaagcggctcgttgaagtgtcgttcgcggaccgcgccttcttcgccagcactggcacggaggccaacgaggcggccatcaaattctcccgcaagttccagcgggccgcgcacccggagagctgcgacccgcccacggagttcctggcgttcagcagcagcttccacggccggaccatgggcgccgtcgcgctcaccagcaagtcgcagtaccgggagcccttcgcgcccgtcatgcctggggtgaccttcgtggattacggcgatctggaggcggccaagaagttcgtacggtccggcagggtcgctgctgtcttcgtcgagcccgtgcagggtgagggtggcattcaca

SEQ ID NO: 7959 - DNA, 396 bp, Zea mays
  Clone ID: LIB3137-005-Q1-K1-G1
acttgagctcacacaatcacgctacagagcgcagagctgcacgctccaccggcgaactcacctcggccgccctcctctgccagatagcctccctctactattcaagcccaaaccctaaatcctcggttcccaaatggcgacgccgccgactgcgctgctgttgctcctcgcggcggcagcggcattccacggcgcgacggcgaagacgacgatcgagccgtgctctggcgcggacgcgtgcccggctcttctgggctacaagctctacgcggacatgaaggtgtccgaggtggcggcgctcttcggcgccgacccggcagcggtactggctgccaacgcgctcaacttcgcctttcaaggggccgccaaccgattcctcccgggggaaccaccctt

SEQ ID NO: 7960 - DNA, 450 bp, Zea mays
  unsure (1)..(450): unsure at all n locations; Clone ID: LIB3137-005-Q1-K1-G10
ccctaaccctaatctcccctcccttctccgatggcccgcaccaagcagacggctcgcaagggcaccggcggcaaggccccccggaagcaactggcaaccaaggcggcccgcaaatccgcccctgccacaggcggcgtgaagaagccccatcgcttccgccccggcactgtggctctccgtgagatccggaagtaccagaagagcaccgagttgctgatccgcaagctccccttccagcgccttgtccgtgagattgctcaggatttcaaggcccgatctccgcttccagagctctgcctgtgtcggcgctgcaggaggcngtcggaggcctacttggtggnnnctgntcgaggataccaacctctgcgcgattcacgcaagagggtgactatcatcncgaaggacatccagctggccaggagatcccgggcgagagggcttgacatgtct

SEQ ID NO: 7961 - DNA, 483 bp, Zea mays
  unsure (1)..(483): unsure at all n locations; Clone ID: LIB3137-005-Q1-K1-G11
cccacgcgtccgcggacgcgtggggttgatgaggatgatggcccggtgaccagcgtaagcggggctcccgatgggaggcacatcgccatcggtctcaactcgtcggacatccagatgtgggatactagctccaacgccctgttgaggactttgaggggtgttcaccaatctcgagttggatcactcgcctggaacaacaacattctgactacaggcggtatggacggagtaatagtgaacaatgatgtgcgtgtgaggtctcacattgtgcagacctaccgtgggcaccagctagaagtctgtggtctaaagtggtctggttcggngcagcagttggctagcggaggcaatgacaatcttctccacatttgngcattgtcgatggccacaaattcagtgcctggtcagaaccagtgggtgcaccgcatggaggaccatacggctgcagtcaaggcgcttgcctggtgcccgttccagagcaat

SEQ ID NO: 7962 - DNA, 359 bp, Zea mays
  Clone ID: LIB3137-005-Q1-K1-G2
ggagcatagaacataagaggagagaccgcactacacacctcacgcctgaaggccagatctaagccttctcgtcctcgcccaaggacaacgataaacatctaagaaccaaacaaaacagagcacgaccatcggtctctaagcaaaacgcgcagcacgccgggcgctccacgcacgtaggctagcagagcgcgcatggggcttctggaccagctgtgggacgacacggtggccgggccgcgcccggactccggcctcggcaagctccgcaagcacgcgttcttctccccctcgtcggccgcgccgtcgccgaccgcggagggcgcggcgccgcccgccgtgacgcggagcatcaccatgct

SEQ ID NO: 7963 - DNA, 296 bp, Zea mays
  Clone ID: LIB3137-005-Q1-K1-G3
ctgaagagcaaattaggcaaatgattgctgatgttgacaaagatggcagtggagcgatcgactacgaggagtttgagcacatgatgactgccaaaatcggagagagggatagtaaagaggagctttcaaaagcattccgcattattgatcaagatggaaatggaaagatttctaacattgatatccagaggattgccaaagagctgggtgtaaatctcaccctcgatgagatccaagacatggtgcaagaggctgatagaaatggtgacggtgaaatagaacttgacgagttcatc

SEQ ID NO: 7964 - DNA, 364 bp, Zea mays
  Clone ID: LIB3137-005-Q1-K1-G4
ggagaggagagcgagagctaagaagatgaccggcaaggtcctgcttgtggccgtcctcttggtgggcgtggcctctcgatgctcgggcagtaggggcctgcagggcgatcacgttgctgaacagaagttcggtggcggtggctatggaggtggcggtgggtacggaggctacggtggcggtggaggaggaggtggcggtgggtatggcggtggcggccgcggcggcgggtacggaggcggtggcggctacacacccggctactctggcaccggcacctgcgactactggaagagccacccggacgccatcatctcgtgcatcgggtcgctgggcagcatcctcggctccttcggcgacgtgtgc

SEQ ID NO: 7965 - DNA, 375 bp, Zea mays
  Clone ID: LIB3137-005-Q1-K1-G5
accggggaaccctacccgagcatcagccatggcgatcgcggcgcgcgtcctgcgccgcctcccgctccacctctacccctcgctcgctcgctctttctgcgcagtttccccggccgccgcctcggccgccccggcgtccgcctcggccgccccggcgtccgccaaggtcgccgatcgcatcgtgcgcgtcctcgccatcgatctcgagggggcgcgccgcgaggtcgtcggcctctccgggcagacactcctccgcgcgctcgccaacgcggagctcatcgagccggcctcccaccgcctcgaggatatcgacgcgtgctccgccgagtgcgaggtccacatcgcgcaggagtggctcgacaagctgccgccacc

SEQ ID NO: 7966 - DNA, 403 bp, Zea mays
  Clone ID: LIB3137-005-Q1-K1-G6
gcctagttgatcgggaacacgccgctggtgtacctcaacaaggtgaccgatgggtgcgtcggccgcgtcgccgccaagctcgagtccatggagccctgctccagcgtcaaggataggattggctacagcatgatcacggacgcagaggagaaagggctgattactccaggcgtgagtgttctgattgaaccaactagcggcaacacaggcattggactggcctttatggctgctgccaagggctacaaacttacactcacaatgcctgcctccatgagcatggagaggaggatcatattgaaggcttttggtgctgaacttgtccttactgacccactcttgggaatgaaaggagctgtcaagaaagcggaagagatacaagcaaagacacccaactcgtaca

SEQ ID NO: 7967 - DNA, 356 bp, Zea mays
  Clone ID: LIB3137-005-Q1-K1-G7
gcgcatactgccggccttggttcggcaccgcgcgttagatcccagggccaactaggttgttctctaattcctaatttcttggccttttctcttccactctccgccattttagctgtcgcctcggttgttttagcttgccggcgtggacagactggcagatctggagctcggcgcgaccagatccggtgctgctgtgcccgatggcagaggagatctctctggtttactctgctaagagtcaaagaggagctgatgacgacaactaagcttgggttaccgataattgagcctgttctctgcacgagaagaaatttccggcctcacctagtactaataagtatggctggatagtcccc

SEQ ID NO: 7968 - DNA, 429 bp, Zea mays
  Clone ID: LIB3137-005-Q1-K1-G8
caactgtcttggttgcgcaagcaccaagcaggtggaagatgatggaggtggcgggggctcaggcccgcgcggttcccctcctgctccgcaacaccgcctccctgcggacctccgtctccgtctcctgcacgggctcccgccggagctgggtggcggcggccacggcggagggggacgagacccgcggcttcgacaaggtgcccatggacacccccggcgcgtaccgcctggtagaccgggacaccggccgcagcgtcatcgtgtggggcggcaccgacgacagcgacgaggcctccatgccgtccccggcggtgctctcccggaccaccgaccgccgccacagccaaggtgttgggggaggtacaggtatcgggaatttcggcaggttcaaggcacagaaaataaaatccttggtcacgaggtcagctc

SEQ ID NO: 7969 - DNA, 486 bp, Zea mays
  unsure (1)..(486): unsure at all n locations; Clone ID: LIB3137-005-Q1-K1-G9
cggacgcgtgggcggacgcgtggggcgccaccgcatggtgctccgggataacatccagggggtcaccaagccggcgatccggcgtctcgctcggcgcggcggcgtgaagaggatcagcggcctcatctacgaggagacccgcggggtgctcaagatctttcttgagaacgtcatccgtgatgctgtgacctacaccgagcatgcccgccggaagacggtgacggcgatggatgttgtgtatgcactcaagcgccaggggcgaactctgtacggctttggcggctgaagggccgagcgtttggtccaggactaggcgtttctgctttggcttagtagttcgtgggctgtcttcggagtatggagggctttgngggaacgtagacttgtanggatnggcagatatcttatctgatatggtaatggaggaaagtttgagttaatgttttcttgcgttatctgatatgtgattaaatgtatattctgaaa

SEQ ID NO: 7970 - DNA, 242 bp, Zea mays
  Clone ID: LIB3137-005-Q1-K1-H1
caaccaggtcatcgctgactcgctcatcaccgagggcctcatcctcgtcacgtaatcatgcttttgttttggcttcaaatcgatcagactacacaaaagtcgtcgttcctaaacgtatactatgcctgtaaatttattcctcttgtttttcttatttgcgttgattaatgttttcggaagtataagcaacaacatgaatgaatgaatgaatgaatgaatggactcctattgttgtcaagttc

SEQ ID NO: 7971 - DNA, 243 bp, Zea mays
  Clone ID: LIB3137-005-Q1-K1-H10
acgcttcaacctccattaacaaacgcgtaataaaacataatatcaactcccacaaaattcataggagagtttaaaaatatagccacggttgtgcattgtttccaaagctaatctacagacatagcaccatatgcagcatttagcgtccaactcgacctaacaagcatatttatcttcaagacactcaaacaaacgaccctgcatccaccaatcttatcgacctcatatcatatctcattatta

SEQ ID NO: 7972 - DNA, 408 bp, Zea mays
  Clone ID: LIB3137-005-Q1-K1-H11
ctgcacgcgaggaaacatgctggtctaccaagatctgatctccaatgatgagctcctctctgattcatttccctacactgagattgaaaatggtatgctgtgggaggtggaagggaagtgggttgtccaaggagccctcaatgtagatattggtgcaaatccctcagctgaaggtggtgaagatgatgaaggggttgatgaccaggccgtaaaggtggttgatattgttgacaccttccggcttcaggagcaacctgctttcgacaagaagcagtttatggcatacatgaagcggtatgtcaagcacttgacgcctaaacttgatgccgagcagcaggtgctatttaagaagcacattgagggggccattaagtttctgctttcgaagctcagtgatctgcaattttt

SEQ ID NO: 7973 - DNA, 410 bp, Zea mays
  unsure (1)..(410): unsure at all n locations; Clone ID: LIB3137-005-Q1-K1-H2
gcggcaggaggggggatgcatggatagtcatccacatgaactttcagagttgcagtatcagttttttcttatgcagaattcattgactatcatgaatgaaatgagttcctattgatgttgtttcttgaatcataggattgttctgtgtaccttatggtactttgtgttgtagggactgttatagaacattagatcagctctatgaagaattataattggaaccatggtaatggagtgtttgttttcttgtaactttttccagccctatgaatcgtattgcttgctcactttggttcattctttccaggtgactcgtaagactatctttgtgatgctaagaaaatttacatctgactctctctcccncccagcacacacaaacaactaattagatagaaaagaagtgaaaa

SEQ ID NO: 7974 - DNA, 369 bp, Zea mays
  Clone ID: LIB3137-005-Q1-K1-H3
gtcgctcacatctttgcatccttcaatgacaccttcattcatatcactgatttgtctgggagggaaactctggttcggatcaccggtggcatgaaggtgaaggctgaccgtgatgagtcgtcaccttaagcctgctatgcttgctgctcaagacgtcgcacagcgctgcaaggagcttggcattactgcactgcacattaagcttcgtgccaccggaggcaacaagaccaagaccccaggacctggtgcccagtctgccctcagggcgcttgctcgttccgggatgaaaatcggacgcattgatgacgttaccccggtcccaacggacagcactcgcaaaaagggcggtaggaggggaaggaggctgta

SEQ ID NO: 7975 - DNA, 374 bp, Zea mays
  Clone ID: LIB3137-005-Q1-K1-H4
cggacgcgtgggatctcgctcgtcggcaacgtcttgaagcgcttgtcgaccgcggaactgccgttggcggtcccattgccgttgcctccgccgccgctgttgttgttgctgccaccgccactgcttttcccgccggcgtctttcccgttcgcgctgctggagtacttgttcaccccgacattcatcttgaacgcgttgacattggcgttggcgttgctccccttggggtacatcgggttgacgttgtagggcacgccgcggaaggggagcttcatgacggcggcagcggcggcctcgttcatcttgagatcgttcatcttgaggctgaggccgacgtggtggtccatcctgccctcgtcatggtgctggtagga

SEQ ID NO: 7976 - DNA, 372 bp, Zea mays
  Clone ID: LIB3137-005-Q1-K1-H5
ccagccgctcctcgagcacccccgtcccgcgccgcctccggctccggcgagatgtcacgcttcggtcgatccggcccgccgccgccgatccgcgacacgtactcactcctcgtcctcaacatcaccttccgcacaactgctgatgacctcttccctctcttcgacaagtacggcgagattgtcgacatctacatcccaagggaccgccggactggtgactcgcgcggattcgcgttcgtgaggtacaagtacgaggacgaggcacagaaggcagttgaaaggctcgatgggagattggtagacgggagggagatcatggtgcagtttgccaagtacggcccaaatgctgaacggattaataaagggagaata

SEQ ID NO: 7977 - DNA, 411 bp, Zea mays
  Clone ID: LIB3137-005-Q1-K1-H6
ctggcttctcctccccctcttaccaagtcctcctcgggttagggttccttagggttttgtggaggggcgatggcggcggctgatgtggagtaccgttgcttcgtcggcgggcttgcctgggccaccagcaacgagtcgctggagaatgccttcgcctcctacggcgagatcctcgactccaaggtcatcaccgaccgggagacggggaggtcccgcggcttcggcttcgttaccttctcctccgagaactccatgctcgacgctatcgagaacatgaacggcaaggagctcgacggccgtaacatcaccgttaaccatgcccagtcccgtggcggtggcggtggcggcggtggctacggcggcggtcgcggcggctgcggcggttatggtggcgggcgccgtgacggcggt

SEQ ID NO: 7978 - DNA, 457 bp, Zea mays
  Clone ID: LIB3137-003-Q1-K1-F4
gctggctgcacgcccggacggtgctgcacctcgccgtgttcgtgctgtcagacttcggggggtaccctccgagggtagctagcttggagaaggatgtcattgcgccctacaagcacatggctaagacgtacgccaatgactcggccgggttcgatgaccggccgaccctgttatacttccggggagcaatttacaggaaggagggagggagcattcgacaggagctatattatatgctcaaagaagaaaaggatgtttacttttcctttggaagtgtccaagaccatggggccagcaaagctagccaaggaatgcactcatcaaaattttgcctaaatattgctggggacaccccttcttccaatcgtctgtttgatgcgatagttacccactggtgccctgttatcatcaatgacgacattgagctaccttatgaggatgtgttggattattcaaa

SEQ ID NO: 7979 - DNA, 360 bp, Zea mays
  unsure (1)..(360): unsure at all n locations; Clone ID: LIB3137-001-Q1-K1-G3
cgcaggcgcgcgcgatgcacgaagagtgcaagcagcagctggaggcgagccgggccaccatggatgggctgctcaccgacgggtccaagctgatggactcgttcagcctcgtggtgaaggagctcgaggagtcgcgtgccacggtcaaggctcttgaggacgagatcgcggagacgtcgtcgaaggccgcaagcgaccgctgcaactgctcgggctcggagtcngaggccgccgagctgagggcggagctggaggccgcggaggagaggtaccaagaagagaagatccttagcaccgtcgagacgcagtgcgcgtacgagctcatggaccagataaagacagagtccgacctgcggcacg

SEQ ID NO: 7980 - DNA, 273 bp, Zea mays
  unsure (1)..(273): unsure at all n locations; Clone ID: LIB3137-001-Q1-K1-G4
gcgcgcttcttcacaccgnacacgcacgcacgaacgcgcttccacccccttccgccggcaccggcggcagaaccccggcccgactcggcgtgcttcgccaaccttcttctgggcagcgccggcgggggatatggcatctgaagacgtggtgggcaagagcaggggcgacacggccgtcaccaccatcgtcaacctggcggaggaagccaagctcgcgcgcgagggggtcaaggcgcccggccaccagatcctcaccatctgcaagtcgctcgt

SEQ ID NO: 7981 - DNA, 254 bp, Zea mays
  Clone ID: LIB3137-001-Q1-K1-G5
cgctccctcacactatacacgcacacacaaatccgcttctaccccctcacgccgccaccggcgtaggactcctaaccagactcggcgtgctccaacaaccttctcatgctcaccgccaacgacctatatgacatcagaagacctcacaaccattatcaggaccaacacgcccatcaccaccatcatcaacctggcgaacgatgccaatcttacgccccagagtgtcaaggcgcccagctaacagatcctcacca

SEQ ID NO: 7982 - DNA, 326 bp, Zea mays
  Clone ID: LIB3137-001-Q1-K1-G6
gaagatggccggactcgacaccttcctcttcacctcggagtccgtgaacgagggacaccctgacaagctctgcgaccaggtctcagatgctgttctggacgcttgccttgctgaggaccctgacagcaaggttgcttgcgagacctgcaccaagaccaacatggtcatggtctttggtgagatcaccaccaaggccaatgtcgactacgagaagattgtcagggagacatgccgcaacattggtttcgtgtcgaacgatgtcgggcttgacgctgaccactgcaaggtgcttgtgaacattgagcagcagtcccctgatattgctc

SEQ ID NO: 7983 - DNA, 448 bp, Zea mays
  unsure (1)..(448): unsure at all n locations; Clone ID: LIB3137-001-Q1-K1-G7
ccccgaccccgactgccaaaccctaatacacggcggtgaccttgcggcctccgttgcgctgcgctccgtctgagttgctgatctgggataatcttgttctctttgagtgaaccaagatgtccgggaatgatgataagccacatgctgctgcggacagaataaaggcagccacattatcagtggccaagggtttgagcagggctcaagctgaacgagctgcggctgctgctgcccgcaatgtcaatgcctatgggcaaaaggaagagggaccaagccgctggcaggagaggaaggaagccaagagacagatgtatttgatgagtacagagaaggctgcgaagctgggcactgtgaagctaanagcttcagagactagttccgttggcgcgtatacncaatgccagaagtgtttccagcatggtcactggacgtatgagtgcaaaaatga

SEQ ID NO: 7984 - DNA, 447 bp, Zea mays
  Clone ID: LIB3137-001-Q1-K1-G8
gtcaagtccagcaacatcttgctcgactcggagctcaatgccaaggtcgccgacttcgggctcgcccggatgttggtccaggccggcacgaccgacacgatgaccgccgtcgccggatcgttcggctacatggctcccgagtccgtgtacacgaggaaggtgaacgagaaggtcgacgtgtacagcttcggggtcgttctcttggagctgaccaccggtaggttggccaacgacggcggcgagcacggctccctggccgactgggcgtggcggcacctgcagtccggtaaaagcatcgccgaggccgcagacaagtccatcgcggacgccggttacggtgaccaagtcgaggccgtcttcaagctcggcattatatgcaccggtcgccagccgtcctcgcggccgacgatgaaaggcgtgcttcagatactgcagcggtgtgaacag

SEQ ID NO: 7985 - DNA, 344 bp, Zea mays
  unsure (1)..(344): unsure at all n locations; Clone ID: LIB3137-001-Q1-K1-G9
ctcctgccggcgagacgatggagcgggagccgtcgcgttccactgacatgtgggctaggtgtgcgcttcgccggcgacgtgatgcggcacggggctggtggaccctggtgccgaaccatcggtttgtggacgttctacccgaaggcgggctccggcggcgcctcatgcgtataggacctgcgcgttgcagggggccatcccggcgaactcggcggagcccttaaccaccttccactccaccacttngtnctcgacgccgtggacgccgggtaacacggcggcggtggatgcggcggcagaaaccgtgcccacggcgacgtcgagcccggcgccgacgacgtata

SEQ ID NO: 7986 - DNA, 221 bp, Zea mays
  unsure (1)..(221): unsure at all n locations; Clone ID: LIB3137-001-Q1-K1-H10
tcaccaccagtcaccaattcccaatggttctcttcccncgagncngcggctgggcggccttcgatgccggcctacgccaggtgccaaggcgaccttcaagcccttggctggcgacgagcaccagtgcaccaccaatactctgagcctggctgccgaaagtctcttttggggttcttgtaaacaagatacattacgattcatttttgatgactccaatcaat

SEQ ID NO: 7987 - DNA, 307 bp, Zea mays
  Clone ID: LIB3137-001-Q1-K1-H2
atcccccctcccctcgcttccacaccttccttctcgtctcccctctctctctctcacacacgcacacacacactcattaggtcgggacgggaggggaggggaggtctcgtgcgcgtccggctttcctctcctcgccgcacgacgcgcgcgcggtcccggtcgccgatggccaagtcacgcatgccgccgttcgccgccgccgagcggttcctcggcttcccccgcggcgggccctcgccgggggccgtggcgccggcgcccgcccgccttgacgacctgccggaccttgccgaggccgacctctggt

SEQ ID NO: 7988 - DNA, 286 bp, Zea mays
  unsure (1)..(286): unsure at all n locations; Clone ID: LIB3137-001-Q1-K1-H3
acggctagctccatagcacttgttccagctagctaggagagagagctttgtttaagccgcngcgagatgagacaggaagccaggagactgggactgcaaggcgtgccaacacctcaacttcagccgtcgggatgcatgccagcgctgcagtgaaccacgtggagttggtgatcgtagcggcggtggtggcgacttgggtgggcgtggtggttcctccttctgcggtggctttggtgctggctctgatgtccggcctggtgactggtactgctcctgcggcgcacac

SEQ ID NO: 7989 - DNA, 378 bp, Zea mays
  Clone ID: LIB3137-001-Q1-K1-H4
cgcgtccggctttaatatgctccgccgcatgtacgaaacctttattagaagactcaatgttgctcataggtctgtgtgtgttccgcatcatctctctcatgatttcagggttcctagcagcttcgagtgtttggcggaggacgcctgcgatggctgtgtatggctctcgcagctccggtgatatggttagactgctgcctgtagctgtgtacttggtgtactgtcttcccgcgtatgtggatttggtgaaaacttctgtatgagcagtggtgtgccacagatcaccgtgtgctttgacatcgacgccaacggcatcctgaacgtgtctgccgaggacaagacaacggggcagaagaacaagatcacaatcaccaacga

SEQ ID NO: 7990 - DNA, 361 bp, Zea mays
  Clone ID: LIB3137-001-Q1-K1-H5
gcggtcattttcattcacaagctctaacagagaaagttgtggcagatgttcatctttaggagcagccagtgatgaatcattctcaggcgataataatgataagcagaatttgacagtcaaggctttggctacgcctgtaagacaaaaccagaggcaaagccagaggaaaccgattgagaaagctaagcagaagaagattcaagccctatggaagaagattaagcgcgaaaaggtggagatgggggacagcctatcttcgcgtttgaagatgtgcctagggcaatctccgcagcacaagaggaatagatcgtctggaaccattacaacttcatagctctgacaactctactgaaccactgat

SEQ ID NO: 7991 - DNA, 311 bp, Zea mays
  Clone ID: LIB3137-001-Q1-K1-H7
cggctccgtcgtcgcgtgccatcctagggtttctttccccgtcggcgcctccccagatttggccgccgccgccgctgacccaggttgtcttgatggcgcccgctgtagaagccgtgaaggagacaggcaccttccagaaggttcctgccttgaacgaaaggatactgtcatccatgtccaggaagtctgttgctgcacacccttggcatgatctggagataggtcctggtgctccaaccatattcaactgcgtcattgagataccaaggggcagcaaggttaaatatgaacttgacaagaaaactggactg

SEQ ID NO: 7992 - DNA, 406 bp, Zea mays
  Clone ID: LIB3137-001-Q1-K1-H9
ctccccgctcaccaccagtcaccaacgcccaccgggcctcgtccctcgtggcggcgactgggcggccgtcgctgccgccctacgccaggtgccgaggcgaccttcaggcccttggctggcgacgagcaccagtgcaccaccaatactctgagcctggctgccgaaagtgccttttggggttcttgtaatcttgttacattaggattcatttttgatgacttcatcaagaagcaagagcaagagcagaagtaggagccgcagtcgcagcaggagcaggagccgcagtcctcggcgaagagatagattgcgcagtgaacgtgcaccccaccgcagtcgcagccggagccgtagcccataccgtcgcagagaacgacgtggtcacagggattttgcatgcaagaactgc

SEQ ID NO: 7993 - DNA, 163 bp, Zea mays
  Clone ID: LIB3137-002-Q1-K1-A1
cgtgagtgagtagaaaatggtgccatggagcggttcaccgcgacggctgaatctggcttacgaccccagcattgaacgtattatcacccctcggattgctctaacacagcggaatatttggcatatgaatgttggaagcatgtacttgttatcttgacagata

SEQ ID NO: 7994 - DNA, 456 bp, Zea mays
  Clone ID: LIB3137-002-Q1-K1-A10
gctcatgcacgaaagggaaaaataaaggcatttacatcttactgtggtggattgccatctgcagctgcagcaaacaatccgcttgcctataaattcagttggaacccagctggtgcactccggtcagggaaaaatcctgcagtctacaaatttcttggtgagacgatccatgtagatggtcataacttgtatgaatcagcaaagaggctcagactacgagagcttccagcttttgctctggaacacttgccaaatcggaattccttgatatatggtgacctttatggtatctccaaagaagcatccaccatatatagggctactcttcgttacgaaggttttagtgagattatggtaaccctttccaaaactgggttctttgatgctgcaaatcatccactgctgcaagatactagtcgtccaacatataagggtttccttgatgaactactgaat

SEQ ID NO: 7995 - DNA, 423 bp, Zea mays
  Clone ID: LIB3137-002-Q1-K1-A11
gcagggttccaggtctgccactcgctgggaggaggtacaggttcaggaatggggaccctggtcatcttcaagatcagggaggagtacccggaccggatgatgttgacattctctgtcttcccgtcgcccaaggtgtctgatactgttgtggagccctacaacgccacgctctccgttcaccagctcgttgagaacgcagacgagtgcatggtgctcgacaacgaggctctctatgacatctgcttccgcacgctcaagcttgccacaccaacctttggtgatctcaaccaccttatctctgcaaccatgagtggtgttacgtgctgccttcgcttccctggtcagctgaattctgacctccggaagcttgcagtgaacctgatcccctttccacgtgtgctcctttttatggttggatttgct

SEQ ID NO: 7996 - DNA, 424 bp, Zea mays
  Clone ID: LIB3137-002-Q1-K1-A12
ctggcttctcctccccctcttaccaagtcctcctcgggttagggttccttagggttttggggaggggcgatggcggcggctgatgtggagtaccgttgcttcgtcggcgggcttgcctgggccaccagcaacgagtcgctggagaatgccttcgcctcctacggcgagatcctcgactccaaggtcatcaccgaccgggagacggggaggtcccgcggcttcggcttcgttaccttctcctccgagaactccatgctcgacgctatcgagaacatgaacggcaaggagctcgacggccgtaacatcaccgttaaccaggcccagtcccgtggcggtggcggtggcggcggtggctacggcggcggtcgcggctgcggcggcggctatggtggcgggcgccgtgacggcggttatggcggcggtg

SEQ ID NO: 7997 - DNA, 364 bp, Zea mays
  Clone ID: LIB3137-002-Q1-K1-A2
ggtgggttggcttctcctccccctacggttcgggttcgggttcgtgaggttctccggggttcggggtcgtgggtgagcggatcgagatggcggcgtcggatgttgagtaccgctgcttcgtcggcggcctcgcctgggccacggacgaccactccctccacaacgccttcagcacctacggcgaggtcctcgagtccaagattatcctcgatcgggagacgcagaggtcccgcggcttcggcttcgtcaccttctccacggaggaggtaatccggaccgccttcaaggccatgaccgccaagaacctgaacggccgcacattaccggcaaccaagcccaatcccgaggctgaccatgaagcagc

SEQ ID NO: 7998 - DNA, 440 bp, Zea mays
  Clone ID: LIB3137-002-Q1-K1-A3
cggacgcgtgggcgcgctcgcaatcaccgggtccctgcatcacattgatagagacctcctcggatggtggctctgtgagcgccagtgtaaagacggaggacttaatgggcggcctgagaaactagctgatgtttgctactcgtggtgggtgctatcgagcctagtcatgattgacagagtgcattggattgacaaggaaaagctaacgaaattcatactgaactgtcaggacaaagagaacggcggcatttcagatagaccagataatgcagtcgatatctatcacacgtactttggaattgcagggctttcatttattgaattaccccggggtgaagccttggaatccggctatgcactaacattgcacgttggcaatcggattttcttgaaaaaatagaacattccattcgatctgcggcgcacagatatgctgagat

SEQ ID NO: 7999 - DNA, 312 bp, Zea mays
  Clone ID: LIB3137-002-Q1-K1-A4
ggaaggagcccggcaaggtgccgtcgccgctgtacccgcagcacgagggggagcgggagtgggtgccctggctcgtccccgtcatcttcgtcgccagcatcaccgtcttcgtcgtcaccatgtacgccaacaactgccccgcgcgcgacaccaacaagtgcgtcgcccgcttcctcggccgcttctccttccagccgctgcgacagaacccgctcttcgggccctcctccgccacgctcaccaagatgggggccctggtgtgggagaaggtggtgcaccgtcaccagggctggcgcctcctttccagcatgt

SEQ ID NO: 8000 - DNA, 310 bp, Zea mays
  unsure (1)..(310): unsure at all n locations; Clone ID: LIB3137-002-Q1-K1-A6
ggctccaaccccggcacatcacaggaggaggaggacgacgcgcccaccatggccatggcgacggcgcttcgcaagctctccgccaacgctctgcgccgncagccgctctcccgcatcacgccgctctactacatggcgtcccttccggcgacggaagagagatcccgaatcacctggactaagcagttgaacgcgccgctggaagaggtcgaccccgagattgctgacatcatcgagcacgagaaggcccgccaatggaagggtctggagctcatcccgtcggagaatttcacgtcngtgtcagtgatgc

SEQ ID NO: 8001 - DNA, 304 bp, Zea mays
  Clone ID: LIB3137-002-Q1-K1-A7
gcggcttccagctctctctctatcttgggcatcctgcacctcggctggctcagctcagctgctaggcgggtacctacctgtctgcctgctgacccgggccctgatcctgatttccccaatcgagagtccgagacccgataggaggcacaggcacctgcgctagctgcagctgcaaatcgtcttccccagatccggcgccgactagatcgctcctgctcgggacagcgcccagagccgtccgcgtgcgcccgcagagatcgcttcggggacagccgatcagagcagagcagagcatagctgactc

SEQ ID NO: 8002 - DNA, 255 bp, Zea mays
  Clone ID: LIB3137-002-Q1-K1-A8
cagccgataacgatcgctatgtcaggaactgtcgcaatgggaggtcaccaaaggagaccacgtggtggttccatgacgacactgtgtgatgggtgtttccggctgttgtcctgcccgcattttagttgccagactacatgggagatgatcttggcatatttcaagcgacccatttgaccagaaactaacacgcttcttctggtttgtaaatgagtgtgcatcagcgtcaggtctctgtacttgttgacccttaca

SEQ ID NO: 8003 - DNA, 437 bp, Zea mays
  Clone ID: LIB3137-002-Q1-K1-A9
gttctgtgccagtattcaaccttgaagatatagaggagggagttgaaggcgctggatttgacgacgagaaatcacttcttatgtctcaaatgagcctggagaagagatttggccagtccgcagcttttgttgcctccactctgatggagtatggtggtgttcctcagtccgcaactccggagtcacttctgaaagaagctatccatgttataagctgtggctacgaggacaagactgaatggggaactgagatcgggtggatctacggttctgtgacagaagacattctcaccggattcaagatgcacgcgcgaggctggcggtcgatctactgcatgcccaagcggccagctttcaaggggtctgcccccatcaatctttcggaccgtctgaaccaggtgctccggtgggctcttgggtccgtggagatcctcttc

SEQ ID NO: 8004 - DNA, 356 bp, Zea mays
  Clone ID: LIB3137-002-Q1-K1-B1
gcgatgactcagcaccacctcccccatcctcctctgtcctcgtataaagcgccgcagtccacgacgtgtacggcgcccatgggagctggagcaccagcacacgccgctgccccggctctgcgccgcgaaccctagccgaccgcctcatggccgccgagtcctgcggcagccgcggcgcctcgcccccgccgcctccctccgctggcggcgcggccgggaggcgccgcaaggcggaggcctacgccgaggtgctccgccgcatccgcgctggcgccggcggctacggtgctgcccgccccgagttgaggaccagctctggcccaacttccaaggcctaccggccaaataggcttgga

SEQ ID NO: 8005 - DNA, 452 bp, Zea mays
  Clone ID: LIB3137-002-Q1-K1-B10
gacgacttgtttcattgattcttgaagagatcgagcttcttttgcaccacaaggtcgaggatgtcttgcagctgcggatcaagctgcggctgcggctcaagctgcaagtgcggcaagaagtaccctgacctggaggagacgagcaccgccgcgcaggccaccgtcgtcctcggcgtggccccggagaagaaggccgcgcccgagttcgtcgaggccgcggcggagtccggcgaggccgcccacggctgcagctgcggtggcaactgcaagtgcgacccctgcaactgctgatcacatcgatcgacgaccatggatatgattattatctatctagcttgtggtggtggttgaacaataataagcgaggccgagctggctgccatacataggtattgtgtggtgtcactggtgtgtgtgtgagagagagagaaacagagttcttcagtttgcta

SEQ ID NO: 8006 - DNA, 376 bp, Zea mays
  Clone ID: LIB3137-002-Q1-K1-B11
cacaaatcgtgctcatcgaaccagccgctagctttattggaataatgaaaaggcatatgccgcgagggaacatggctgtcatctatactttgttgaaaacagggaaaaaatgaactgagaaatgcaacatccacactgctcaatttgctggagctttaaatcaatttgctgtagcttcctagtcatactttccctggacatggtacttgcacatctttttctgggcgcagttgatgagaatttcagcggagtcgatacctgaaagataggctccatggacatagccattgtagtgctcgctggtgtgctcaccggtgaagtatacccttccaaccggtgccctaagctggtcgtattcgtagcggttgacgccaac

SEQ ID NO: 8007 - DNA, 451 bp, Zea mays
  Clone ID: LIB3137-002-Q1-K1-B12
gacaaacttgaaggcttccgtgcaacaaaagagaactttaaaggtttgagttttcctacagtttcatctgtgggaccaaatgcagcagttattcactataaacctgaagcaagcacatgttcggaaatggatgctgataaaatatatctttgtgactctggggcacagtacctggatggtacaacagacattacaagaactgtacattttggtaaaccctcagcacatgagaagtcatgctacacagcagttttgaaaggccacattgcactagacattgctgtgtttcctaatgggacgacaggacatgctcttgatattctttcacgagcaccactctggagagagggtcttgactatcggcatggtacaggccatggaattggatcttatttgaatgtccatgaaggtcctcatctaattagcttcagaccttctgctcgaaatgtac

SEQ ID NO: 8008 - DNA, 325 bp, Zea mays
  Clone ID: LIB3137-002-Q1-K1-B3
ctcgcagccgcaaacgcgaaaccctagcctcgagctctatctccggccacagctggtcaggttagcggcgaaggatgagcaggcgctggagccgcacgatctacgtcgggaacctccccggcgacatccgggagagggaggtggaggatctgttctacaagtatggtaaaattgttgacattgacctgaaggtccccccaagaccacctggttatgcttttgttgagtttgaagatcctcgtgatgctgaagaggcaattgctggacgggatggatacaactttgatggacaccgtctaagagtggaggctgctcatggtggtag

SEQ ID NO: 8009 - DNA, 295 bp, Zea mays
  Clone ID: LIB3137-002-Q1-K1-B4
ctactgcgtattaggtagcctctcgcattgacaagccagccggtggtttggttcgctttgctttgcttacgtgctgcgctgcgcgctccgaccaggcccgccccgaccggcgatgcagcggtggctcccggcgctcctccgccgcgcggcgcccggcggcggcgcggcgcggctcctcgccacgtcctccctcctcttcgacgacacgcaggagcagttcaaggagagcgtgcgcaagttcgcgcaggaggccatcgcgccgcgcgccgcggccatcgacgcctccaaccacttc

SEQ ID NO: 8010 - DNA, 337 bp, Zea mays
  Clone ID: LIB3137-002-Q1-K1-B5
gcgacggcatcttcgccgtggacggcgacaagtggaggcagcagcggaagatcgccagctacgacttctccacgagggcgctgcgcgacttcagcggctcggtcttcaagaggaacgccgcgaggctcgccggcatcgtctccggcaacgcggcgtccgggcagcccatggagttccagggcctcgcgctcagggcgaccatggactccatcttcaccatcgccttcggcctggacctagacacgctgggcggctcggcggaagggagccgcttcgccgcggcgttcgacgacgccagcgagttcacgctgctccgctacgtgaacgcgttctggaa

SEQ ID NO: 8011 - DNA, 137 bp, Zea mays
  Clone ID: LIB3137-002-Q1-K1-B6
tcgtggacgcgtgggcggacgcgtgggcggacgcgtggccggacccttggccacattcgtcaacttgcgaacctctaattcccccatgagccaaggccttccccaaccaagggccaatcaataacttccaaaccgtc

SEQ ID NO: 8012 - DNA, 242 bp, Zea mays
  unsure (1)..(242): unsure at all n locations; Clone ID: LIB3137-002-Q1-K1-B7
gcgtctcgacgaggcagcantngcaccagtcccaccaggtccggcgctctgcccanataatctcctgcgtnncccccccccaccagtggcctggccttctttgtcggacgaacgggcgccgacgaaacctcccgcgcgcnncacctcccaccccttcgannctccgacgacttcggncgccgccgcagcccgacgaccgcttagtcgccggcgggtacccgcctccttcgcnncgacggtgg

SEQ ID NO: 8013 - DNA, 344 bp, Zea mays
  Clone ID: LIB3137-002-Q1-K1-B8
caaggatcagatttacgacatcttccagcttctcccagccaagattcaggttggagtcttctctgctaccatgccccctgaggcccttgagattacccgcaagttcatgaacaagccagtgagaatcctcgtgaagagagatgagctgactcttgagggtatcaagcagttctatgtgaatgtggataaggaagactggaagctggacacactgtgtgacctgtacgagacccttgccatcacccagagtgtcatctttgtcaacacccgccgcaaggtggaactggctcactgacaagatgaggagcagggaccacactgtttctgccactcatggtgacatg

SEQ ID NO: 8014 - DNA, 144 bp, Zea mays
  Clone ID: LIB3137-002-Q1-K1-B9
cgcctctcaaggctaacgcgcggaagggcattgggcacgggcagccaccgcgccgttcgcgtccacgtgaaccccaccgccgccaccacccgccgcggcacgcccaacccacaaaaacccaaccgcccaccacccatacccagc

SEQ ID NO: 8015 - DNA, 466 bp, Zea mays
  Clone ID: LIB3137-002-Q1-K1-C1
cggacgcgtgggctggtttggaatctgagttgcagcagcttagggatttgagcagggtcaatcaggaactacttgttcagactgaagagcttatacagaaggaggcgaatgaagacgctcagtttcgtacacaatttgggagtcgttggactagacctcaatcaagcaccctaactaagaacattcaggatagattgaatctgtttgcttctaatctgaagaaagctgctgatagtgattctctgattgaacgaggcgtgaaggagaactatcccttgatgtctatcccttgacaaagaccgattgagtctgcacttccaagtatttccaggcctatcatgtccttggatgggaatgaagatgccattgttggagccctgaaacaaagcttgagacaactggaatctcttggagcgcatagggcaggtcttgaagacatgctcaaagaaatgaaaagaaaggatga

SEQ ID NO: 8016 - DNA, 450 bp, Zea mays
  Clone ID: LIB3137-002-Q1-K1-C10
gaagaagccagtcaatagcgagttctactactagtagctagcctgctgatctgttctgtgggttagttcgcaaagccttctgtttcggcgaccatggaggatgagaggaacacccagcagcaccagggcggtgaggcccagcaggacgccgccgatcaggtggacgtgaaggatagggggctcctggacagccttctcggcaggaagaagcacgacgacgaccaggagaagaagaagcagacggatgagctggcgaccggcatggagaaggtcacggtgtccgagcccgagaagcacgggcacaaggaggaggagcacgaggtcgtcggcgagaagaaggagggccttctcgccaagctgcaccgcaccagttccagctccagctcgtcgagcgacgaggaagaggaggcgatcgatgagaacggcgagattatcaagaggaagaggaag

SEQ ID NO: 8017 - DNA, 450 bp, Zea mays
  unsure (1)..(450): unsure at all n locations; Clone ID: LIB3137-002-Q1-K1-C11
gccgactaatgcatcaaagttagcctacgaaaagtctgtttttactaaaactgtaaagacaaatgcacggacagaagctgagataacattgtttgatggttatattgtcgtttacaagtttgtacatgaccttcacttttttgtcaccgctggagatgatgagaatgagctcatcttagcaagtgtactacatggtttttctgattctgttggtcttctactcagggttgatgttgagaagcggactgcgcttgagaacttggatttgatacttctctgcattgatgaaattgtagatgggggaatcatcctggaaacagatgcaaacaccattgctggtaaggttgcaaccaatgctgttgatggttctgtgcccttttctgagcagacgatatctcangcactagccacagctagggagcaccttgcaagatctttactgaaatgaac

SEQ ID NO: 8018 - DNA, 450 bp, Zea mays
  Clone ID: LIB3137-002-Q1-K1-C12
cgcacgcatacacagcacagagtgaggtaagcatccgaaaaaagctgtgatctgatcgacatggccgccgccaccatggctctcacctcccgcgcgctcgtcggcaagccggcgaccagcaccagggacgtcttcggcgaggggcgcatcaccatgcgcaagactgctggcaagcccaagccagcggcgtccggcagcccctggtacggggccgaccgcgtcctgtacctgggcccgctgtccggccagcccccaagctacctgaccggcgagttccccggcgactacggctgggacaccgcggggctgtccgccgacccggagactttcgccaagaaccgcgagctggaggtgatccactgccgctgggccatgctgggcgcgctcgggtgcgtgttcccggagctgctcgcccgcaacggcgtcaagttcggcgaggccgtgtggttc

SEQ ID NO: 8019 - DNA, 278 bp, Zea mays
  unsure (1)..(278): unsure at all n locations; Clone ID: LIB3137-002-Q1-K1-C2
acactgtctttctctgcctttctttccctagcgccgcgccggcgacgccattcgatcaggccgcttcgccggcgacagcatattccaggtcggttggttttggcacttcggaccggcggccatggcttccgacggcatcggccccagagatgtatgtgttgttggggttgcacgcaccccaatgggcggtttccttggtgccttgtctcccttgcctgctacgaaacttggctctatagtaattcaagctgctctggaaagagcanacgtggatccag

SEQ ID NO: 8020 - DNA, 270 bp, Zea mays
  Clone ID: LIB3137-002-Q1-K1-C3
caccttttcgctgtactcactcgccacacacaccctctctacagctccgttggagctccggacagcagcaagcgcggggcggtcacgtagtaagcagctctcggctccctctccccttgctccaaattgatcgtgcaacccatcgagctacgcgcgtggactgccttccctgggtcggcgcaagaagggatcggaaggatggcggcgtcggtttccagggccatctgcgttcagaagccgggctcaaaatgcaccagggacagggaagcg

SEQ ID NO: 8021 - DNA, 319 bp, Zea mays
  unsure (1)..(319): unsure at all n locations; Clone ID: LIB3137-002-Q1-K1-C4
cacctggttcgtgtctgcgtgaataaagccagtagtctgtccaggcggaggcaagctgttgtggctgcgacacaaacactgggtacacataccatctctccaccatcctctgtccagacgaccagaccaaattaaaaggagaagcaaagagagatctggccatctgggtgggggtgggcggcgagagagcaggaggagaagaccattgccccttgaaggcgggctccagagcgagcttctncgcgcgcccttctctgtttgccttgcctgcttgcctctactcgtccggcccagccatggccacaatcctggagaccat

SEQ ID NO: 8022 - DNA, 445 bp, Zea mays
  Clone ID: LIB3137-002-Q1-K1-C5
ggttcatggaggataaataccaatatctggaaagagcccattgcatttctgtctactcttttggaagcagatgatcgtgctgttcggatggctgctggtgaagcattggttttgtgctttgagttaaatctgcttgatgtttcttctcgtgaggacgatgatgttaacacaggaggaacagctggttctaagaacaagcttttcttggatatgcaagcattaaaagcaaaaatatcaggtctggccactaatctctctgctgaggctggggggcaaggtgcagacaagaaaaaacttactgaccaaggagactaatttcaaaggatctaaaatttggccaggattggtacctgccttgaggattcattcagaatggttgaaaaccttatggtttaagggtggcctcatggtctgaattaattcaagtggttggtttctctcttct

SEQ ID NO: 8023 - DNA, 360 bp, Zea mays
  unsure (1)..(360): unsure at all n locations; Clone ID: LIB3137-002-Q1-K1-C6
agcgaatccaatcgatccgaaggcgatggaccagcagggtgcgggcggggacgtggaggtgccggcggngctggggctgacggcggcggagtacgagcagctgcgtccgacggtggacgcgcaccaccgctacgccgtgggggagggccaatgctcctcgctgctggcgccagcgcatccacgcgccgccggccggcgtctgggccatcgtccgccgcttcgactgcccgcaggtgtacaagcacttcatccgcagctgcgcggtccggccggacccggacgccggcgacgcccttcgncccggccggcttcgcgaggtgtgcgtcatctcgggccttcccgncagcaccagcaccgagc

SEQ ID NO: 8024 - DNA, 426 bp, Zea mays
  Clone ID: LIB3137-002-Q1-K1-C7
ggagaggagatctcaggttttgggtggagtgccatgtctggagagttaattttaagacgaagacgaagtccaagcacaacgtttgctaggtgttcgatgatttgtttgagccaggaatcttcgtcgatctcgtggtttcgagtttggtttagttatggtatgttaattaatcgcgtgatgtgaaggacaagagctggattgatctcaaggtgatactgatgaatgaacctgaagatggatgatctgattagatgccaggatgggagatgctcgccaagcgagtatcatgtcccaccactgactaagggtattccaaggtcctaggttggtgctgctgtggatggtgctaatgccggtgggctcgacctttctatttattagtagctcttctatcttcttttttgaagattggcacttaagctagca

SEQ ID NO: 8025 - DNA, 253 bp, Zea mays
  Clone ID: LIB3137-002-Q1-K1-C8
ctctcattcctcacacacgcgaagctgagagaccaaagaaggagaagaagaaggagaaggagcgagcaagcagaaagttagctagctgctagcgtggaagtgcccaaggcgagagagagagacaagctaggacggccgcgacaggctagccagccagctgctagctagctcctgcggacgagccgatggctggcgccgacgtcgacgtcgggacggaactccggctcggcctgccgggaggaggcgccgcggc

SEQ ID NO: 8026 - DNA, 265 bp, Zea mays
  Clone ID: LIB3137-002-Q1-K1-C9
ctcaattccaaggctaactcgccgaagaggatggcacaaagacagaagaccgagccttggggtggatctgaacgggaacgggacaagaacccaaaatgtcacatcctacctacaaaaacgcaacgtgcccatcaactatacccatcttggcgttagtatccaacgtcggcgctgtcgtcctctagggagatctactactcctcacgctgaccgatagtcctcgggcgtctacagatctagatctgaatctggaagaccagattat

SEQ ID NO: 8027 - DNA, 398 bp, Zea mays
  Clone ID: LIB3137-002-Q1-K1-D1
acgtgctatctctcctgaggcgcagcggtgcggtggtgtagggccgaatggggagcggcattgcgagctcacaccacctgcggcgcggcgatcccgggccaccggctatcgggctatgtgatgatccgggccgtgatctcgacggctattcgcggctgaacgggcggcagcgatgaacggagcgagcgccggtgccggcggtgaggcgccgctggtgtacaaggcctgcaaggggaacaatgtgtttctactgaacgggaggttcatatttggccctgatgcaagatccgtgcatatcagcatgttccttattgtcgcgcccgtatcaatcttctgcgcgttcggcgcgaaggaaccgatggattagttctcttatggtctgggattgccggttatga

SEQ ID NO: 8028 - DNA, 435 bp, Zea mays
  unsure (1)..(435): unsure at all n locations; Clone ID: LIB3137-002-Q1-K1-D10
ctccgctcggccaccagctttgaccgcctcccctcccctccgctcctgttcttccataccgcactcccccgcaggagcggcgcggcggcggcaaaggcaaaggcaagatgttcgggcgcgcgccgaagaagagcgacaacaccaagtactacgagatcctcggggtgcccaagtcggcgtcccaggacgacctcaagaaggcctaccgcaaggccgctatcaagaaccaccccgacaagggcggtgaccccgagaagttcaaggagctcgcacaagcctatgaggttttgagtgatccagagaaacgtgagatttatgatcagtatggtgaagatgcccttaaggaaggaatgggtggtggtggatcccatgctgatccatttgacattntctcatcattctttggaccctctnntggagganngtgtggaagca

SEQ ID NO: 8029 - DNA, 458 bp, Zea mays
  Clone ID: LIB3137-002-Q1-K1-D11
gcggtctagcccatactccgcatgcaaacaacctctcggcctcatcaggcccgctgccctgcgcctccgcctccgccgatcccctccgctgaatcgaatagaagaatcgagcgccgctactggcgaggggctagcggtcggcgcacagcgcggtatggcgagcggcagcagcaacggggagccaagcacggcaccgcaggcgaaccggtggtacgacctccggctgggctcttcctgccgtgacccctcccccaccgccaagttctgcaccctccgttatgaatttaagccagcatcaattgacaagacacaagctgggtctctgcaaagcaccaaagataaccgggttactgtggaattccataataatcagcctggcaagccaaaggtgacatttgagggaagccaagaagagtacaaggataatgatggtgtcttattttttgatggtgagacct

SEQ ID NO: 8030 - DNA, 290 bp, Zea mays
  Clone ID: LIB3137-002-Q1-K1-D12
gcaggacagtataaccgccatgatcagcactgaaccaactgccaactgaatcattgtttgatgcatattttcccccttggtcatcataacgttggttctaagctgactctttattcttgcaactcttctattgcaggtacaagaacactatagcatggcaacataatcttacagtgtgcaggtgacaagtcggctaaatctaacataacagcaaacatgataactgcaaaacatttattcactcagcccgagaaaatctttgggcaaatattcatcaaagataggttttc

SEQ ID NO: 8031 - DNA, 256 bp, Zea mays
  Clone ID: LIB3137-002-Q1-K1-D2
aaactacagaaaatgctagatgctgaagctagccagaaagagaaacttgaagaagaaataggtgttgtgagaagccagttattgcagatgagtatggaagccgatgagacaagaagtcttgataaaggagatgggccaggaaaaatatttcctggtttagattcattggtgtctcatactcgaggttcacaacccagagagcatgacaatggaccagaagcaaccgattgccaaactctttgaacaagttgggtta

SEQ ID NO: 8032 - DNA, 465 bp, Zea mays
  unsure (1)..(465): unsure at all n locations; Clone ID: LIB3137-002-Q1-K1-D3
agctttcgcctccggcgctagggtttcgcctccctcctagttcggtccgcgagtgtaccaggaccaggtgatttcttcccctttgatctgctgtgacgtgggagatgccgccgaagtctaagaggggtggcgctgccgccgcgaggaaagcgccggtgacgaggggccggatggggagggcgcaggctgcttcggaagcggcgcttgttgcggaggagatggaggcgcctgctgaggaggtgaaggccgncgacgaggtcccgaaggtgccggaggcaccgaatgtcgtttaggactcgaacgtggtcgaggagtcgaaaccctcgcctatgatgcgcgaacagtctgtggccgtggtggagaaagactccgatatctcagccaacggtgccaacccaggtgaagatgacagagctgcataagaaatatatgaagaagaggacaaaggtgaacggctggagtttg

SEQ ID NO: 8033 - DNA, 302 bp, Zea mays
  Clone ID: LIB3137-002-Q1-K1-D4
agccgatgcttattatacaatacattccaggacagttgggttccgtgggtcatcagactggaggagacgtatcatcgatctctgtacccaatctagactagagcctggctccatccagtccaattccatcagagccagtagtggactgatgcaaagcaaagggagagattctttgggtcgtcggaccgatgctgctgagtcaagctgagagtatctgactctggctctgctctagcccttgatgagggagaagctgaatcgctcttggatctctcttcttgaattgggtgcgtaggttcctg

SEQ ID NO: 8034 - DNA, 449 bp, Zea mays
  Clone ID: LIB3137-002-Q1-K1-D5
cccccagccagcctcgcctcaccgactccccgatccggtccctcccttcgccagctatgcatccgtcctccggcgcgggggactacgccccttactacccaccttatccctccccggccgcgccgcctcccgccgcctacccgtcggtgtccgccccggcttctgcgcccccgtactcgtcgtaccccgcggacttcgcccccgcgccttcgtaccccgcgtacccgcccgccgacctcccccactacgcgccgccgccggctgcgcccgcgccccggaagccgacctacccttacaggccgcgcccgcgccggcggtggcggcgtgcccggacaacccggtgccctcttcggacccgtcgctggatcgggcggggagctacgggtacggatctggccctggcttcgggtaccggcaggagctgtacaccgccaagccggcgggcgggt

SEQ ID NO: 8035 - DNA, 286 bp, Zea mays
  Clone ID: LIB3137-002-Q1-K1-D6
aaactacagaaaatgctagatgctgaagctagccagaaagagaaacttgaagaagaaataggtgttttgagaagccagttattgcagatgagtatggaagccgatgagacaagaagtcttgataaaggagatgggccaggaaaaatatttcctggtttagattcattggtgtctcatactcgaggttcaacacacagagagcatgaaaattacatgatgcaaccgattgccaaaactctttgaacaaagttgggttacaaaagatattgtcattgctggaatctga

SEQ ID NO: 8036 - DNA, 440 bp, Zea mays
  Clone ID: LIB3137-002-Q1-K1-D7
gtgccctccagtttgtaagctcgtttcgaaaagagctctagagccgacacacacacacacacacgccatggcaccgcgttctctgctggcagtgctcgccgtcgccgccctcgcgttcttgcacgccgcctcggccaagtcgtcgtggcttgacaggaggttcaccacggacggcaccgtccgcacgggatacgacgattcgggccagcaggtggtgatgctccgcctcgaccagcactccggcgctgccggcttcaactccaaggagcagtacctttacggcgagttcaccgtcaaaatgaacctaatccggggaacctcggccggaacggcttgggcctctaactttttttcggcgaccgggaccggcgccacaagatccacatggagttcatgggcaacttgagcgggcagccgcgggtgctgaacaccaacgtgtg

SEQ ID NO: 8037 - DNA, 458 bp, Zea mays
  Clone ID: LIB3137-002-Q1-K1-D8
acccatcctcgactatgctgattagacttgactgcctgaaacagccaactcaagacaggactctgatagagagtgtgcctcaagccggagatggatgctcatgcacagtccatatcggataacaagatcccgtcaacgcagtaacagtgattcttccgaagacatgagagcttggctcagagtctgaatagagtccgattgatgatcaaactgctgaggacatcataaaccagtaacctagacagcaagtcgtacggactttgactgccacaagtgcacatgtagcatcctttaatctcaaggggggccacaacttggggacctttagcttcttcaccatagttcttgggaagcaacaggttgatgcacatatttacttgtggaaatggaatgctaaaattgtgatatctgatgtggatggcaccataacaaggtctgacgtgctgggtcaagtcatg

SEQ ID NO: 8038 - DNA, 432 bp, Zea mays
  unsure (1)..(432): unsure at all n locations; Clone ID: LIB3137-002-Q1-K1-D9
ctgcaagctaaggcgagcgtgatcaccaacagctagtgctagccccccttccttccatccatccatggcatgcgtcagcaccttccagagctgccccattgccagaagagcaaagatcaacacgagggccaggggctgcagcagtagcgtggcgaacgggtcaccaccaccagccttccagttccagtgcagggcgtcgactttcgcggcggacaccagcctgcggctcgagctggacgagaaccccgaggcgatcatctcgggtgcgtgacccgggaactgctccctcctcagctactacgacctccgcgcctacctcgagtcgcatgagacggcagtccaagcagacggtcagcgcgaggtgtcgctcctgagcgagaccatgtncacacccgtgctggtagccacagcataccataccctggaggacgt

SEQ ID NO: 8039 - DNA, 409 bp, Zea mays
  Clone ID: LIB3137-002-Q1-K1-E1
agcaaagcgaagcgcgcgcacagagatctagctgaggctgagctactagctagcagctgctgctgcaggtctcctgacatggcgaagcaggacatcgaagcatcggggcccgaggccggcgagttctcggccaaggactacaccgaccctccgccggcgccgctcgtcgacgcggatgagctcaccaagtggtccctctaccgcgcggtcatcgccgagttcatcgccacgctgctcttcctctacatcaccgtggccaccgtcatcgggtacaagcaccagactgacgcggcggcgtcaggccccgacgcggaatgcggcggcgtgggcatcctcggcatagcgtgggccttcggcggcatgatcttcatcctcgtctactgcaccggcggcatctcaagtgggcaca

SEQ ID NO: 8040 - DNA, 288 bp, Zea mays
  Clone ID: LIB3137-002-Q1-K1-E10
gtgcgatccttgacaaacttgctcagggtgatgtttcatacggtaatgttattgcatatgtgactcgcggaaatgatcagcacgtttgcttctatgacgaagacgatatgttctggcacgctcggaataatagctactgctgctattactaccagaactgtagtgagccaaaatccttgtacgatgattacatctgcaccttctacacgaggaacgctctcaagaaccattcgtacaagagaccattaccatatgaagggactgagctctatacgcctacgaggtgtt

SEQ ID NO: 8041 - DNA, 453 bp, Zea mays
  Clone ID: LIB3137-002-Q1-K1-E11
catccattctcctcctccgttgcagctgcggcatccatccagtagtccgaccgatccatggcttcagcgttcgggaccgcctccacttgcggcattaaacatgcacctgccggcgttgcgcttgctgcgcccatgaagcacctttccctcgtctcgccctcgctggtttcgcttccgcgcaagatgaggccgcgaaggaagtacaacttcagggtaaacgctgcaaaggagctgcatttcaacaaggatggctcggctatcaggaaaatgcaaaatggggtcaacaagcttgcagatctcgtcggggttactcttggaccaaaggggcgaaatgtagtcctcgaaagcaagtatggctcacctaaaattgtcaatgatggtgtcactgtggcaaaggaggttgaacttgaggaccctgttgaaaatattggtgctaaattggtccgccaagct

SEQ ID NO: 8042 - DNA, 439 bp, Zea mays
  unsure (1)..(439): unsure at all n locations; Clone ID: LIB3137-002-Q1-K1-E12
ctgatgggtgtcttcgggacctcgcgtcctgcctccgtcaccctctgcgcctgcctcacgttcctcaacctcttcgccttccttctcgccgtcggcgccgagcgccgccgcagcaccgggaaggtggtgccggacgagtacgacgagcggtcctactgcctctacgacaccgacgcctccacggtctacggcgtttccgctttcttcgtgctgctgctccagcaggccattgtcaccgccgccacgcgttgcctttgcttcggccccgtgctctcctcccgcggctgcgccgtcaccgcattcgtcctctcctgggcaacgtttctcatcgcagaagcctgcctcataggaggatcggtgaggaacgcatagcacaccaagtatctaggctactacacgaagcatgacctggtgtcgtgcgccaccctncgcaagggag

SEQ ID NO: 8043 - DNA, 381 bp, Zea mays
  Clone ID: LIB3137-002-Q1-K1-E2
ggactggacccttaacccaacaacagcagcaggaacaggaaaaagaaaaaactctctcccattccgatctcgccttccaccttcttcggcttgccgccgcggcaggcaccgtcaccaatcttctcttccgccccctcgttcgttcgctcgctcgctcgccaggagatcgactcgaggccaggcccttgaagtccgtgctggtgaccggcggcgtggtgagcgggctcgggaagggcgtgacggccagcagcatcggcgtcgtgctcaaggcctgcggcctccgcgttacgtctatcaagatcgatccatacctaaacaacgatgctggaaccatgtccccatttgagcacggcaaaaggttggttttggacaatggtggta

SEQ ID NO: 8044 - DNA, 453 bp, Zea mays
  Clone ID: LIB3137-002-Q1-K1-E3
gcaaaactacctgatgcccgtccactgattaatgtttgtgattgctttggttttgtgccagatcgcactcactatctgtacacaaacaacatgcttcgatatatcgaaggctatgttcagaaggtgaatcccgggaatgctccattggtagtgcggcaattacttgatgatgaatgccctgaagattttatcaagtgtttgatcctctctgttcgttctctcctccctgttgagcctttggttgatgaatgtgagaagaggaaccgcctacgtttgctcactcaattcttggagcacttgtgagtgaaggtagccaagatgtgcatgtccataatgctcttggtaaaatcatcattgacagcaacaacaatcctgagcatttccttactaccaacccattttacaactctcgtgttgtgggtaaatattgtgaaaagcaggatcctacacttg

SEQ ID NO: 8045 - DNA, 145 bp, Zea mays
  unsure (1)..(145): unsure at all n locations; Clone ID: LIB3137-002-Q1-K1-E4
aattcccggggtcgacgccacgtcgtctcgcgtccccttcgcttcgctttccgcaattctcgcatttcgccttcctatcncnnttcgcccgtccaactctttcggcgggtcgagggcggtnngtttcgcgcgtgggnngctgtgg

SEQ ID NO: 8046 - DNA, 454 bp, Zea mays
  Clone ID: LIB3137-002-Q1-K1-E6
gcttcgccaagcacgtgaagaacaagagaataaaatccatgagacagttgctaagaagtctaaagaattggagtctgagaagtttgagctccagcaccatattgctgaactcagtaagcagttgcaagccacgaaactagaagctactacggtgcgtgtccagcgtgatctgcaggaaaagcttcagatagtggagaaagaaaacaaagacctcaaggtagaattactcgcacttgccaagggacctgaagatacttgcacgggaaagagacctgagcaaccaagcagcatgaacaggcaagcaaactttactggaaaggggtgaaaaggttaccagaagtgaagcaaaatgccttaaagtgcgtcatttaacgcggcgtacgttcttgaccaatgattcaaggctgataactaacagtgcttgcatggaatctcagactgacagtcagtctga

SEQ ID NO: 8047 - DNA, 327 bp, Zea mays
  Clone ID: LIB3137-002-Q1-K1-E7
cggacgcgtgggcgaagcggcaggagccgcgacgctcgccacctgcagccggcgaggccgaggccaccgtgaccgcgctctaggtaccagtagtaaatctaaatcgacagaggctagctcctgcctctgctgtgtgtaattactgtatgtgagtgaccggattacgttcgtcttgtggagacgctgcgtgatcgcgcgattggtttcgtttcgccgccttgtttttgcacgaggaggttctgctagtgcgtacgggaagaataaaagcggcattcctgctgtccaaaaaaaaaaaaaaaaaaaaaaagggcggccgttttaaaggat

SEQ ID NO: 8048 - DNA, 472 bp, Zea mays
  Clone ID: LIB3137-002-Q1-K1-E8
cggacgcgtgggtgcatctcgacctcaccggcgtccggcggtggtatcacgatggtggcgttgctgggccggcggatcggggtggctgcggcagctgccgcgttcatcgccctcgtggcgttcggatccgcctcatactcgcccaagtccttcgtgaagttcatcgtctacgcacacgacgagacagtgttcacatacatactctgctcgtcagctgaggatcgatcgctcggtctaatgagctcgaagtgaggaacgagccatatgttggcgatcatgatccatcgagaggatgcttagagattcaagatgccctacttgagatagttggcaagcgtactgtcccttaagtttttgtccatggaaagcacctgggtggttctgacgatactgttgactcctacgaaagtggaaaactggctagacttctaaacatcggagtcaaggacgacctttgagtgacatgctacat

SEQ ID NO: 8049 - DNA, 321 bp, Zea mays
  Clone ID: LIB3137-002-Q1-K1-E9
ctgacacctggcttcaaactgttccgtgagaccaatactgtggactctggctcagcagcgggctcaaaggactacgttcacgtgcgcatacagcaacataatggtcgaaagagcctgaccaccagccatagattgaagaaagagttcagatacagcaagattatcactgatctgacgaccgagttctgctgcaatgatacagtgtgccacgacccagaactcggacaggtcattcatcttcagggagatcagaggaagaacgcctataatatcatactgcaggccggcattgctaatactgagcacatcgagattcatgga

SEQ ID NO: 8050 - DNA, 255 bp, Zea mays
  Clone ID: LIB3137-002-Q1-K1-F1
gcactacacaaaccaaccataacttctcttgttctcgttctcttccctgcgtgaaccgtggaccgggaagaatcgggcgttggggactttgggatttgaaagcctacatattattatttctctaattcaggagtggtccgtgctggtagggaacggatttgcgttgctttttggagaatcctttctgatcgttccaagatgctttccttttgctgctttgtttttgtccgaggatgatttgtctaattcggtcgt

SEQ ID NO: 8051 - DNA, 427 bp, Zea mays
  Clone ID: LIB3137-002-Q1-K1-F10
cccacgcgtccgctttccagacccgaccgcagcagcccggggcaacaagcgaaccgacgggggcgatggggatcggtgagcacttcgagggcgtcaagcagcactgggcgagcaacttcgccttcctcgactacttcaagaaggtctacggccgcgccgagcccctccccaagtggtccgacgccgacgtcgacgagttcatcgcatccgacccggtctacgggccccagctcaaggccctgcgggagtcgaggaagttcgcgctcgccggggccctcgtcggcgccgcccacctcggcggcgtcgcgctcaagtactccaaggcgccgcacggcgttctgctggcgaccggcttcggcgcgatcaccggcgccgtgctgggatccgaagtggcggaccactggtaccagctctacgagatggacaa

SEQ ID NO: 8052 - DNA, 456 bp, Zea mays
  Clone ID: LIB3137-002-Q1-K1-F11
ctggcttctcctccccctcttaccaagtcctcttcgggttagggttacttagggttttgtggaggggcgatggcggcggctgatgtggagtaccgttgcttcgtcggcgggcttgcctgggccaccagcaacgagtcgctggagaatgccttcgcctcctacggcgagatcctcgactccaaggtcatcaccgaccgggagacggggaggtctcgcggcttcggcttcgttaccttctcctccgagaactccatgctcgacgctatcgagaacatgaacggcaaggagctcgacggccgtaacatcaccgttaaccaggcccagtcccgtggcggtggcggtggcggcggtggctacggcggcggtcgcggcggcggcggctatggtggcgggcgccgtgacggcggttatggcggcggtggcggctacggcggtcggcgcgagggtggtggcggc

SEQ ID NO: 8053 - DNA, 446 bp, Zea mays
  Clone ID: LIB3137-002-Q1-K1-F12
cggacgcgtgggtttttataagcacatcataataatatagttaatataggaggagtcctgacttaattaatgccttttttttccgcacgcacactacagtccagcaggccggcggtacgacggtaggcaaaggtgaattattgaaccagtgtcgagctcgctttcaatcatagacggcagcaacacactatacacacgcattgccatagagttcgactgccagaagcatatatatactagatataggagagacaaaacgatagcggatggcggatgcaactgcctctcgccctctcgtctcgtctccagctagcagcgccaacacattttttttttcttgcggttctcaataagcaccagctgctgtcagcatgagcagctcgtcgaggctccagatatccccggcgctcgtcccatactgtggagctggagcatcatcagcctgc

SEQ ID NO: 8054 - DNA, 156 bp, Zea mays
  Clone ID: LIB3137-002-Q1-K1-F2
cttctgctccagtgatcagccccctcccctcctggcctcctctccccccggccaaaaactgatctgtttttttcggttctggtaccatagctattagtagtcgtagcggctaacttgcaagccgattgtctctagcacgcaagtgtttttccctcc

SEQ ID NO: 8055 - DNA, 332 bp, Zea mays
  Clone ID: LIB3137-002-Q1-K1-F3
ctccgctcggccaccagctttgaccgtctccgcttccctactgtcctgtgttcctccatacgccagtacgcctgcaggagcggcgcggcggcggcaaaggcaaaggcaaaggcaagatgttcgggcgcgcgccgaagaagagcgacaacaccaagtactatgagaatcctcggggttgcccaaggtcggcgtcccaggacgacctcaagaaggcctaccgcaaggccgctatcaagaaccaccccgacaagggcggtgaccccgagaagttcaaggagctcgcacaagcctatgaggcattgagtgatccagagaaacgtgagatttatgat

SEQ ID NO: 8056 - DNA, 412 bp, Zea mays
  Clone ID: LIB3137-002-Q1-K1-F4
tcatttcacggtggagttccccgactcgctggcaccagagcagtgcaaggctctcgagtcggtacttccgccaaagccttcgtccaagctgacagacatggagatcgatgaatgcgaggagacaaccatgcatgatgtgaacaacatcgaggaagagatgcgcaggaagcaggctcatgctgctcaggaggcgtacgaggaggacgatgagatgcctggtggagcccaaagagtgcagtgcgctcaacagtaagcagactaccataatgggattcaaggcactttggttgctcttcaataatgcaagtccccctgtgaacggattggtccaatggtttggctgcccttaacctccaaattaggaacttaatccccccttgcttttgaagccggggaatggattccttttttg

SEQ ID NO: 8057 - DNA, 330 bp, Zea mays
  Clone ID: LIB3137-002-Q1-K1-F5
gcaacaggacacgccgaagctcttcaaccgctggaccttcgatgatgtccaggtgaacgacatcgggctgaacgactacctcgctgtgaacgcgacgaagcacgcgatgtacctgccgcacaccgcggggcgctactccaagaagcggttccgcaaggcgcagtgcccgatcgtcgagcgcctcacaaactcgctcatgatgcacgggcgcaacaacggcaagaaggtcatggctgtccgcatcatcaagcataccctggagatcattcacctgctcaccgatgccaacccaatccaggtcgtcgtcgacgcgatcatcaccagtggacc

SEQ ID NO: 8058 - DNA, 263 bp, Zea mays
  unsure (1)..(263): unsure at all n locations; Clone ID: LIB3137-002-Q1-K1-F6
actggcgataagacgaagacgaaggcgacaggagggctcaccggtcgcgaaccctcctgcttcagccacgcctcgaaacggcgtctgggcctgcgcggcgagtccatggctgatcgcttcattcccaatgactttcctgacttcgtcgccgaggctgaggcctacgacggcgaggggcaccgncccgcagggcttcggggcctgctctcgcttccgtacaccaggctctgcgaccacttcgtccgcgccgcgcgccgcctcaa

SEQ ID NO: 8059 - DNA, 361 bp, Zea mays
  Clone ID: LIB3137-002-Q1-K1-F7
ccaaaagatcattcactacgatctaaaacctggcaatgttctctttgatgaggttggtgttgcaaaagttacagactttggcctcagcaagattgtggaggatgatgttgggtctcagggaatggaactcacttctcagggagctggaacctattggtatcttcctccagaatgctttgacctcagcaaaacaccatttatttcatccaaggtggatgtttggtcagctggtgtaatgttttaccaaatgctttatggaaggcgtccttttggtcatgatcagactcaggagagaatacttcgggaagatccatttttcattgcacgaaaagtgaagttcccttaaaagccagttgattca

SEQ ID NO: 8060 - DNA, 416 bp, Zea mays
  Clone ID: LIB3137-002-Q1-K1-F9
gcagcgcgccgcggcagcagagggggagagagagaggcagagcgagcgagcgagagagcgctggtcatggcgtcactgtctgtcgccgccgtggcggccaccatagcgatgccaagcagcagcggtgggagagggcgccgtctcagggtcgcgtccatggccacccagaagggccagaagccgacgcccaagaccgtctccggcacgagaagatcgggcacgacgacggtgttcccggtgggcgagccgggcccgcggccggcgacgacgagcggcaaagcgccggttaagctgctgacgaacgtggagaagctgcggctgctgaccaaggcggagcgcgcgggcctgctgtcggcggcggagcgcgcggggctgtcgctgtcggcgatggagcggctgggcctactgtccaagct

SEQ ID NO: 8061 - DNA, 295 bp, Zea mays
  unsure (1)..(295): unsure at all n locations; Clone ID: LIB3137-002-Q1-K1-G1
tcccgggctcgactccacgccgatctcgcgttcgatcccgtcccctggcacgtcntggaagaaggtggtgtggtggaggtcttaccggaccgcgggtagctcgggggcggtgcgccccaactcttgccgataccgannggtgtccgcttcctttatttcattcgnngtccattccgcctctcggaaagagttgagaagaggagtaagggaaggcgaaggacctcggcgccccgcgatgggccggcgaacctgtaccgccctcgaacttcgacnggcgtctttgtgcgacaagctg

SEQ ID NO: 8062 - DNA, 459 bp, Zea mays
  Clone ID: LIB3137-002-Q1-K1-G10
cttcagccgccgtcgcgcgtagcaagcaggatcagcaaggatgccggctggccgcgggctgggctcgcggacgcgcgacctgttcgcgcgccccttccgcaagaagggctacatcccgctcaccacctacctccgcacctacaagatcggcgactacgtcgacgtcaaggtgaacggcgccgtccacaaggggatgccgcacaagttctaccacggccgcaccggtcgcgtctggaacgtcaccaagcgcgccatcggcgtcgagataaacaagcaggtgaatggtcgcatcatcaggaagcgtatccatgtccgcgtggagcatgtgcagccgtcccgctgcacagaagagttccgcctgaggaaggtgaagaatgatcagctgaaggcggatgcaaaggagcgcggcgaggtcatcagcaccaagaggcagccgttgggtcccaagcctggcttcat

SEQ ID NO: 8063 - DNA, 457 bp, Zea mays
  Clone ID: LIB3137-002-Q1-K1-G11
gcacaccctgtctctgaccgaagctctatgtgggttccaatttgttcttacacatctggacaacaggcagcttctgatcaaatcaaaccccggcgaagttgttaaacctgaccaattcaaggcaataaacgacgaggggatgccgatttaccagaggcccttcatgaaggggaagctctacattcatttcacggtggagttccccgactcgctggcaccagagcagtgcaaggctctcgagtcggtacttccgccaaagccttcgtccaagctgacagacatggagatcgatgaatgcgaggagacaaccatgcatgatgtgaacaacatcgaggaagagatgcgcaggaagcaggctcatgctgctcaggaggcgtacgaggaggacgatgagatgcctggtggagcccaaagagtgcagtgcgctcaacagtaagcagactaccataatgggatt

SEQ ID NO: 8064 - DNA, 462 bp, Zea mays
  Clone ID: LIB3137-002-Q1-K1-G12
cgtttgcctcttctccctcttgccggtcccgaataaagagcagcagcgcaagaggtcggtagagcgagaagaaggcaatggcggccgagagcttcctgttcacctcggagtccgtgaacgaggggcaccccgacaagctgtgcgaccaggtgtcggacgccgtgcttgacgcatgcctcgcgcaggaccccgacagcaaggtggcctgcgagacctgcaccaagaccaacatggtgatggtgttcggcgagatcacgaccaaggcgaccgtggactacgagaagatcgtgcgcgacacctgccgcgagatcgggttcacctccgacgacgtgggcctcgacgccgaccgctgcaaggtgctggtgaacatcgagcagcagtcccccgacatcgcgcagggcgtgcacgggcacttcacgaagcggcccgaggagatcggcgcgggcgaccagggccacatgt

SEQ ID NO: 8065 - DNA, 327 bp, Zea mays
  Clone ID: LIB3137-002-Q1-K1-G2
gatccaattgtcacttgctctccctccaacaagctaattaaggccggtcatccctcttctagctggtttgattatccatggcggaggagaagcaccaccaccaccacctgttccaccacaagaaggacgaggagcagctcgccggcggcgggtacggcgagtccgccgagtacacggaggccacggtgacggaggttgtgtccacgggcgagaacgagtacgacgagtacaagaaagaagagaaagagcacaagcacaagcagcacctcggcgaggccggcgccattggccgccgcgccttcgcactctacaagaagcacaaggcaa

SEQ ID NO: 8066 - DNA, 335 bp, Zea mays
  Clone ID: LIB3137-002-Q1-K1-G3
acagtacaattcacctttttttattaactttctttcggtaacaaatctcacaaaccgtaaagaaaaaacagagagaaagaaggaaacattcaagggcactagtagtgtataaatgtgcggcaaaatgtacatggaacggaaggcaacaacatctgtcctgttgccctgtcctgtgcatccatccatcaagaacagcggtgacgaacaaacaccattgatgattaattagatgaggaacaggaagcaagaaatcgtccgggggggcagggcaaggcactgtgtgggacggacggcgacgaccgcgcgaacagatcggggacacaaacaaaccaatg

SEQ ID NO: 8067 - DNA, 349 bp, Zea mays
  Clone ID: LIB3137-002-Q1-K1-G4
gcttccgacaaatgatcaagccagtggcatttgagcttggcattcctcctgaaaacatcactgcaaaccaattgttatttggcacattgggggagtacgccagatttgatcccacagagcccacttcacgcagtgggggtaaagcaaaagcagtgcagcaaataaaacaggaccatggctacaagacagttgttatgattggtgatggcgcaactgatctggaggctcggcaacctggcggagcagacttgttcatctgttacgccggggttcagatgagagagccagtcgcagcacaagctgactgggtggtttttgattttcaagagctgatcactaagttgccatg

SEQ ID NO: 8068 - DNA, 462 bp, Zea mays
  Clone ID: LIB3137-002-Q1-K1-G5
cgtgcgtccgtcccctggccgtctggagaggtgggtggggagtctaccggacgcgggtagccggggcggtcgccccaccttgccgatacgaggtgtccgctcctatttcattcggtccattccgcctctcggaagagttgagagaggagtaaggaaggcgaggacctcgcgccccgcgatgggcggcgacctgtacgccctcgacttcgacggcgtcttgtgcgacagctgcggggagagctccctctcagccatcaaggctgcgaaggtgaggtggccgtcgttgttggaccaggttgcccccgccttgaagaattgattgtggaaccaatggtcacccttcggtccatggtgggaaccgggtatgaaaacttattgcttgtaaggttgcttggtgagatccagatacactctgttcgaaaatcatcaatgggcttagcatccaagaaatattggagaact

SEQ ID NO: 8069 - DNA, 336 bp, Zea mays
  Clone ID: LIB3137-002-Q1-K1-G7
aagatggccatcgatgaggccagtggtgacgccccagagggcgcagaagagcttgaccctgcgctcgaagaggagacgccgatggaggagacgatccgtgtgacgcgcgccaagctaaggagacgcatggccaccgaagatcctgctgggaattagctgcaggccattgtttttccttcccctgcacattgtgttggtgttttttttggggggggggggttaggctgtcatgttgtttggtgggatggagatgtactgttgaattggttctttgtgacacagctgattactggaccttggattctatgctttcttagtgcccttgtgatttaggtt

SEQ ID NO: 8070 - DNA, 269 bp, Zea mays
  Clone ID: LIB3137-002-Q1-K1-G8
tcagagccacccgtactgttccaagtctcatggaaagagtccgtcaccgactaacacgactgtgctcagtaagcagaggcgatcagcttagcatcagcgcaggaagaccctgccgggaaagacgatcacgctctaggtggacagcatcgacactgtcgaccacgtccaggccaaaatccaggactaggaagggattcccccagatcaacaattactgatattcgctggcaagcagctggatgattgactcacgctggcttactacaaca

SEQ ID NO: 8071 - DNA, 411 bp, Zea mays
  unsure (1)..(411): unsure at all n locations; Clone ID: LIB3137-002-Q1-K1-G9
gcaaaactacctgatgcccgtccactgattaatgtttgtgattgctttggttttgtgccagatctcactcactatctgtacacaaacaacatgcttcgatatatcgaaggctatgttcagaaggtgaatcccgggaatgctccattggtagtggggcaattacttgatgatgaatgccctgaagattttatcaagtgtttgatcctctctgttcgttctctcctccctgttgagcctttggttgatgaatgtgagaagaggaaccgcctacgtttgctcactcaattcttggagcacttgtgagtgaaggtagccaagatgtgcatgtccataatgctcttggtaaaatcatcattgacagcaacaacaatcctgagcatttncttactaccaacccattntacaactctc

SEQ ID NO: 8072 - DNA, 452 bp, Zea mays
  unsure (1)..(452): unsure at all n locations; Clone ID: LIB3137-002-Q1-K1-H1
tgtagacgccactaccaccaccgcaagcgacgacggggagatgtttctgcgacggatcctgaccggcggatgtggcctggcggcgctgagggcggcgcgcgccgtgaaggagacgacggggatcgtcggccttgaggtggcgcccaacgcgcgggagggtgttaatcgggctctacacgcgtacgctcaaggagatcgaagccgtccccaaagacgagggctaccgcaaggccgttgagtccttcaccaatcaccgncttcagatctgccaggaggaggacgactggaagcgcatcgaggaccgaatcggatgcgggcaagtcgaggagctcatcgaggaggccgaggacgagctcaagctcatcgcccaaattgatggaatggatccgtggggtgttcctgatgactacgaatgtgaggtgattgaagacgacaccccaattcctaagcat

SEQ ID NO: 8073 - DNA, 456 bp, Zea mays
  Clone ID: LIB3137-002-Q1-K1-H10
cgaaggcacagccgccgccgtttcttcatctcccatcttcgtcgtcttcgcagcaccggcgctccattttccgctctcggcacgcaggcgacggcggcggcgctcaggcttgggatcttaacgacggagtcagcggtttcccctccccctctcgccagccgcctcgcgccttcgcctccggtcctccgcacaccggctggtgaccctgcgtgcgtgcctctctctctcctcccgccttcggtggatcgtcaacgccgccaggccccggcatctgagccgcgcgcggcctgagggcagcgagagccagcagatgctgctccaccaaggtggtcgcgcatgcccaaagcgaagcgttacccgtcctcttagcgctgaagcgtgcgcttagtgccggcttttggaaccctgtatcataccgaattgcgcattatagaaattggctaggactaccctggg

SEQ ID NO: 8074 - DNA, 455 bp, Zea mays
  unsure (1)..(455): unsure at all n locations; Clone ID: LIB3137-002-Q1-K1-H11
cccgtcttcttcccaagctgccacgttgcctccctccgctccagcggcccatggcctccatggcgttcgccctggcgggggccttcaagggcctctccctggcgcccaccaccaccacctcttccttcccgcgctgcgaccgcgcctcgctctccgtcggcggcgcagcgggcgtgccggcggtgccggtgccggcgcggcggctcaccatccagatggcgcacaagaagggggccgggagcaccaagaacggccgcgactccaagggacagcgcctcggggtcaagatatacggcgaccagctcgccaagcccggtgccatcatcatccgccagcgcggcaccagggtctatcctggaaataacgttggaatgggcaaggatcacacactctnttctttgatagatggactcgtcaagtttgagaagtatgggccggacaagaaaaggttagtg

SEQ ID NO: 8075 - DNA, 461 bp, Zea mays
  unsure (1)..(461): unsure at all n locations; Clone ID: LIB3137-002-Q1-K1-H12
acctgccccagcaggatttcataagaatgcacccgaaatgtataatttgcttgattcaatggatgtggatgtcaagcctcctcctttggtcagctctgacagcaccggcgagatgccattgtatggcgataaagttcaccgctcaacctccttaccaagggtctcgaagggagtggggtttttttgctgtagatagagatgatgacgacgataagtcctctgggtgcactcatcccagcaccaccactaacaaggatttcaggtccaattgtacagctgagtatagtagggtaaggaagttgctcaccagtaagtacaggaaagttgctccagcgagggtttacaaatctgatctttcctatagtgatgttgatcggaagccttctttccggaacaaaaaaatgcattatacacgacagaggacacaaaggagtacattcaagcgtangaagctctttgat

SEQ ID NO: 8076 - DNA, 390 bp, Zea mays
  unsure (1)..(390): unsure at all n locations; Clone ID: LIB3137-002-Q1-K1-H2
accggtcctaanntttgggcacgcgtccgctactgttccaataataataaaaagattctcgattcgatttactcgccaattttcagtgagcggcggcgatcggcttcggatcggcgcagcgcggcggagcggagatggttgccgtggcggtggatggcctgatccgcggtgcggacgccgtgccggcggcggagagggaagcggtgagggcggcagctgcggaggcggcggccaagggcggtgagggggaatcggggaaggaggaggtgagggagtatgagagcgacatgaggaagctggaggacctgctttctaagctgaacccttcggcggaggagttctggccgaattccggccgccccttgaccggcgggcttcccggcttttggg

SEQ ID NO: 8077 - DNA, 306 bp, Zea mays
  Clone ID: LIB3137-002-Q1-K1-H3
cggcggccatggaggagccggacgtcgtcaacggccgcgacgtggtgagctgggtggcgtccggggtggtgctgtggtcgaccgccttcttgctggtgcgggcgctgttccccaagcgctcctacgacttctgcaaccgcgccgtctccaccatgcacgccgtcgccgccgtgtgcctcgcctgcctctccgtcgacgactggtcgtgccccgtctgcccgctcgccgccgcatcctcccctcgccagatgaaggcgctggcggttacgctggcgtacatggtgtacgacgcggcgtgctgccacc

SEQ ID NO: 8078 - DNA, 313 bp, Zea mays
  Clone ID: LIB3137-002-Q1-K1-H4
aggcgacccggaaatttaatgcttgtacagtggccactgtttctattgactagcaagatcatgtcggcaaatgactatgcgttctgactgcaaagactcgcagcatgagctatgggatagaatatcaactgatgaatacatggcttatgccgccaaagaatgttactacagcactgaaaaaattcttcactctttagttgatgctgacaggcatcactgggttgtaaggcttttccgagatcttaatgacagtataacacacgggtcactcctagtgactataaatctgaggaagctgcagatagtacagtct

SEQ ID NO: 8079 - DNA, 227 bp, Zea mays
  Clone ID: LIB3137-002-Q1-K1-H5
cggcggtcatggcggagccggacgtcgtcaacggccgcgacgtggtgagctgggtggcgtccggggtggtgctgtggtcgaccgccttcttgctggtgcgggcgctgttccccaagcgctcctacgacttctgcaaccgcgccgtctccaccatgcacgccgtcgccgccgtgtgcctcgcctgcctctccgtcgacgactggtcgtgccccgtctgcccggtcgcc

SEQ ID NO: 8080 - DNA, 382 bp, Zea mays
  unsure (1)..(382): unsure at all n locations; Clone ID: LIB3137-002-Q1-K1-H6
acgcgtacgtgaaaattccatggaatggcaatagctgcactccaagcttcagaggaatttctaaaagagagcagaagggtttcagaagccttccatgcaactccttcaacatcgaggagtcccaatccattcggaacagcaaaatatctgtttgacaagatcccaagagatgcttccagcaaggttcgaatcaaccaggacctgtatactcaagaaaaggtcattggagcgccacccccattaccagattttgcattggcgctaacacctgaagaatatgatcttcctccactagatccattttggaacanagaagacacaagccattaagtgtatatgcagcagaatggttgcttctggcannaaatatggctcttgagag

SEQ ID NO: 8081 - DNA, 301 bp, Zea mays
  unsure (1)..(301): unsure at all n locations; Clone ID: LIB3137-002-Q1-K1-H8
tcgttgacaaggagcaagcctgatcccagaaccccacggtcgtgagaccctagctgccgtcgccgccgccgccgccgccggtgaccggcgacggcgatctagatgggggcgtcggcctccgtgctctcgttcccaacggccgtcgcgttcccagcagccgccaccgccgtcgccggggccgccggctgcttcgcgctcggctacctcctggccttcacccgcctcccgcgccacgccgncggcccaggttcgggagggacctccgatgacgattccgaggatgactcggaagaagatgatg

SEQ ID NO: 8082 - DNA, 429 bp, Zea mays
  unsure (1)..(429): unsure at all n locations; Clone ID: LIB3137-002-Q1-K1-H9
cggacgcgtgggcggacgcgtgggtgcgcctacaaatccaacgcaccaacacaccgcgcgcgtcctcatcctcgcttcaggtctgcagcccccaactacccccagcctcggaaggaaccttccagaagcgcaagactctaaggccgtcaccttcccattcttcctcgccgcgggggtcgcctgagatcacataaacaatggtgaaggctgttgctgtgcttggtagcagcgatggtgtcaagggcaccatctttttcacccaagagggagatggccctaccgctgtcaccggaagtgtctctggcctcaagcctggcctncatgggttccatgtacatgcacttggtgacaccaccaatggatgcatgtcaactggaccacactacaatcctgcgagcaaggagcatggngcaccagaagatgagaacc

SEQ ID NO: 8083 - DNA, 193 bp, Zea mays
  unsure (1)..(193): unsure at all n locations; Clone ID: LIB3137-003-Q1-K1-A1
ggtctcgccggcgcctccctggccagccgcccggcgttctccaccagcttcacgcggngcagccgggtgtcggcgaggaaccccctgatgagcaggaacctggagaggaatggcaggatcacctgcatgacgtttccccgggactggctgcggagggacctgagcgtcatcggcttcggctcatcggctggat

SEQ ID NO: 8084 - DNA, 193 bp, Zea mays
  unsure (1)..(193): unsure at all n locations; Clone ID: LIB3137-003-Q1-K1-A10
tccgattgagtggctcaccttctttcccattcagcacgagcttgcaagcaagcgagctccggagatttcagctcgcttctcctccagaggtctagcagaccagactcctccgaccgaagctctaccacttcccagttatcctgtccaggaactgcttggccggagatccaaacanacctctgtgttgtggttc

SEQ ID NO: 8085 - DNA, 455 bp, Zea mays
  Clone ID: LIB3137-003-Q1-K1-A11
tggagctaggaggtgcagctatagcagacgcagagcaatggaggccgccgaggctcttaagtatgacagtattgtcaacagggatgagatcaccgacgctgcagctgcagcgttcgccaacccggagcaggtcccggagaagtacgtccggacggaggaggtccttgacggcgtcgtcgtcggcgcggacgagagctacgagctgccggtcgtcgacatggccaggctcctcgacccggagctggcgccgtcggaggtcgccaagctcggcgacgcctgccgaaactggggtttctttcagctgacaaaccatggagtggacaaagcggtggtgcagcggatgaaagacgccacggtgcagttcttcagctccccgctggacagcaaggccaaggtggcggtccgagggaacggcttcgaaggattcggacaccactacagcagaagcgtcagcg

SEQ ID NO: 8086 - DNA, 401 bp, Zea mays
  Clone ID: LIB3137-003-Q1-K1-A12
cgacattccccttctccttcccacgttttccttcaagcacgccccccatcctaccccgctgccgtgtccgtgatcgcccgtcgacttttgcgctgccgtagcgggttgaagcggagatccatcgcctgacctgccgcggagtcagtcccaccccacctgagatggcttcggaactatctcacggcactaggagagacgtatgcatcgagtccatggcgcggcctatcgccgtggaccaccgcataagcatccactactatttccgcatcgctgacaacctcctccgccaggctaatgtgtatcgagaagagaagaatgttctggacctctacatcctcctcctgagatactcgagcttgttgcttgagaccatacccaaacatcgcgattataatgcattt

SEQ ID NO: 8087 - DNA, 342 bp, Zea mays
  Clone ID: LIB3137-003-Q1-K1-A2
atcgattcggatcgccgttacttctcggatatgaagactggatcactgccctgcatcgtatgtgacaagtgaaactaaagttgataaaaggaagctagtgtaggacaagtgaatgctctagattaggcaaatctagattcaggaaaagtacttaacttgtgaagtaaaattttggcataaggatccactactagtatgcttttcggcaaaaacgagtctttgaaatttgatgagccttaccttgattcccaataaaccagcatacccttgaaagtcttttctttagtcgggtaagtcttgcttaataattgcgtactcagggtttcattccctgttgttttt

SEQ ID NO: 8088 - DNA, 231 bp, Zea mays
  unsure (1)..(231): unsure at all n locations; Clone ID: LIB3137-003-Q1-K1-A4
ggttgttcgacgtggtggaccgcgccaaggcgtccctggaggcgcggtgccccggcgtggtgtcctgcgccgacatcctcgccgtcgcggccagggacagcgtcgtgctcaccggcggcctcggctacaaggtgccgtccggacgccgtgacggccggatatccaatgccacgcaggccctgaacgagctgcccncgcccttcttcaacgccacccaactcgtcgacaact

SEQ ID NO: 8089 - DNA, 189 bp, Zea mays
  Clone ID: LIB3137-003-Q1-K1-A5
gtcggagctgacggacaactggttcgggaaagactcttattgctcgtgctgttgcaaatgagactggagcctttttcttcctgatcaatggtccagagattatgtcaaagctggcaggcgagagcagaaagcaatctcagaaaggcctttgaagaagcagagaacattgctaggtatatcattatcatt

SEQ ID NO: 8090 - DNA, 343 bp, Zea mays
  unsure (1)..(343): unsure at all n locations; Clone ID: LIB3137-003-Q1-K1-A6
actaactactcaaaggggggtgtgagtgatcagggccgctttggtagcatccaggagcctgagctacagccaagctgcttctcgcgaacactgangcttcagaagaagctgttgtcttctggcgcatcgcacaccatctgtctgaggatccagccgcataacaagatggaattcctacctaaaaaggaatttgatacgtacttctgcgcgtatgagccttacgagcagtgtccaagataagtttcaagggctacttacagttcaagagatgatgacttgtggagcaagaattcacggttcggttcaaatctactctgctgaaaagccccaaaacaacccatgt

SEQ ID NO: 8091 - DNA, 386 bp, Zea mays
  unsure (1)..(386): unsure at all n locations; Clone ID: LIB3137-003-Q1-K1-A7
catactcgtggggccacaaagcccatctcacagccccgcagcctcttctcctcgtccatcggttccgcctccctccccgcgccgccgttcgccgaagccccgcgtcgcgtcgcgtagagtgcttgatggctgccgcaaggggcattaaccagcttctgaagagaattctccacaaccagtccgctggtccatggctgctntcttcatttcggggaaatcatgaagagtcctctgctggattgagagcattggcgcttcttggagttggtgcctccggtcttttgagttttgctacaatagcatctgctgatgaagctgagcatggtttggcagccccagattatccgtggccacatgctggcatcatgagctcttatgatcatgca

SEQ ID NO: 8092 - DNA, 160 bp, Zea mays
  Clone ID: LIB3137-003-Q1-K1-A8
cagcgttgccatcgtgtgggggatgcctgaaggggctgtctacctgtggactctgcccatggtccattgcaatggttggtgctacacttgggcgctggcagcgttctgcggaacaagcatatgtcttcgccaggtgagcacaaaagctatataccaaagc

SEQ ID NO: 8093 - DNA, 389 bp, Zea mays
  Clone ID: LIB3137-003-Q1-K1-A9
ggcggaagaagagagagaagacgtctctctcctctcggcgtccccgttccccaacctctcgggtgctgcctgcctgcctgcaaaaaggagtttgtcatggcgtctaagcgcatcctcaaggagctgaaggacctgcagaaagacccccccacatcatgcagtgcaggtcctgctggtgaggacatgtttcattggcaagcaacaattatgggaccacctgacagtccctatgctggcggtgttttcttagtgaacattcatttcccgccagattaccccttcaaacctccaaaggtttctttcaagacaaaggtcttccatcctaatatcaacagcaatggaagtatatgccttgacattctcaaagagcagtggagccctgctctgac

SEQ ID NO: 8094 - DNA, 232 bp, Zea mays
  unsure (1)..(232): unsure at all n locations; Clone ID: LIB3137-003-Q1-K1-B1
cggactcctggttccacaaatcccatctnatttccccgcatcctcttctactcgaccatctgttccgtctacaaacccgcgccgccgttcnccnaaaccccacttcgcatcgcttacattccttgattgctcacacaaacatcattaaccagcttctgnnaagaattgtncagaaatatanncataatccatagctgctttcttcatttcggggaaatcatgaacagtcctc

SEQ ID NO: 8095 - DNA, 326 bp, Zea mays
  Clone ID: LIB3137-003-Q1-K1-B10
cccgttcctctctatctcacacacaggcacaccgagtagaaggcggcagttgcgagccaggacaagcagagcgcaacccgtgggcggcagcggcacgcaatggtgtcggagaggcagcaggcggcggggaaggtggccgccttcaacctcacggaggccgggttcggcgacgggtcggacctgctggacgacgacgggcgcgagaggcgcacggtgaccctggtgacggcgagcgcgcacatcatcacggcggtgatcgggtcgggcgtgctgtcgctggcgtgggcgatcgcgcagctggggtgggtgatcggccccgtggtgct

SEQ ID NO: 8096 - DNA, 417 bp, Zea mays
  unsure (1)..(417): unsure at all n locations; Clone ID: LIB3137-003-Q1-K1-B11
cgggccgaccgacgcgtccgccacgcgctttgagagggggatttaaccttttagggcaggcagganaagcggcgcaccaaggtgacttctccttgggcggccggctacttaaataaatcccctcgcctcgcctgcggctgcctcttccctttttccttccgcgcaaatcactcaagtgccagttgcgcggcggatatcgcctctaataccacaccgcaggcaagtggtccgcggaactcgtaagtgcatgtaacatcccattgctgcggctgtcttcgccggtggctgtgcgtaagcaggactcgcatatcgacggatggactcgctgatcgtccagctgttgaatgctctgctctttgcccattaccttggttccgtccattgtagagaacgactactacctcccgcaggctcaca

SEQ ID NO: 8097 - DNA, 430 bp, Zea mays
  Clone ID: LIB3137-003-Q1-K1-B2
ctcgccattctcagtctcaccttcgcttgcgtcgccatcgctcgtccgaattcgtcctcgcgtgcacgagcaaagcaagcaacttgttcgatcgttcgcaaaactcgatccatccgctgaccgcgcgccgacatggggcagggcaaggaggtgaagacgcgaccggaccccgacgtggagatccaagagaagggcgagatcttcttcttctaccgacccaaagtgggcaaggacgaagcgcacggccccgacgacgtgcagcgcatgtacatcgtcctgcgccccgagtccggccgcgccgtcgaggagaagcaagcgccggactccggcaaggaaggccgcaagcgccgccggcagggagacggcgggcagggaagaagcgaggagaaaggcgtggaaagcggtcacggcaagcaggaggtgaacatcg

SEQ ID NO: 8098 - DNA, 290 bp, Zea mays
  unsure (1)..(290): unsure at all n locations; Clone ID: LIB3137-003-Q1-K1-B3
gcagtgtcagtcattgtaacctagatagcgtattacatctggcaccacatggcattctacggtgcgaagctctctctgctcgcagccatggcgaagaattacccaaccgtgagcgccgagtacagcgaggccgtcgagaaggccaggcgcaagctccgcgccctcatcgccgagaagagctgcgcgcccctcatgctccgactcgcgtggcacttccgcgggacgttcgacgtgtcgncgaggaccggcggtcccttcggtactatgaagtgcccggcggactggctcac

SEQ ID NO: 8099 - DNA, 97 bp, Zea mays
  Clone ID: LIB3137-003-Q1-K1-B4
gtgagtcatgggccgatttcacaggaaacatctagaacgacgacctaccctgtctgcggtcgtcctgcaaccacacgcactggaagcatcgtgcggg

SEQ ID NO: 8100 - DNA, 305 bp, Zea mays
  unsure (1)..(305): unsure at all n locations; Clone ID: LIB3137-003-Q1-K1-B5
acgccaggttcantcattgtaacctanatagtgtattaaatctgtcaccaccagtttcctgaagctgaagcttgttcttaagtgtgccatagtggtcttcgaaacttgttgaggctagctagcgccgtttggccatattgacatctatccgtgagggcctgattcctcggcagcctgtatgtacatctagatttgcaccaagcgcgcaatcctcaatcctgactacggcatcacgcctgtaagcatatactccgtatgtaatacatntgtgttagttcgtacatggctttgtggtcgttactttg

SEQ ID NO: 8101 - DNA, 142 bp, Zea mays
  Clone ID: LIB3137-003-Q1-K1-B6
ccgtctccttcctgtcgtctccccttctccaatcgcttccccttctccaatcgcttcccgaggccagccaatatctcagacggaatcgatccaaagctatcctatggttccgccgtcccgtccagatcccggctcgtcgaat

SEQ ID NO: 8102 - DNA, 301 bp, Zea mays
  Clone ID: LIB3137-003-Q1-K1-B7
cccagacccagcagctattgtgggcgatctcaagcctttgcatcacctcgcattactctgaagccattggtgcctacatttccttgctttgcaaaaatccttgtctcactcatggagaagccacatgttgactttgggctaaaacttcttggagcagatgtaatggctattcctggtctttacagatttgttcaggagaccatcaagaaacaagtagcaagcatgtatttgtggccgaagacgctagaagtacctataatggatccctcaaaagcatcaaaaaggcctggtggaattctac

SEQ ID NO: 8103 - DNA, 53 bp, Zea mays
  Clone ID: LIB3137-003-Q1-K1-B8
gcgagtcatgggccgatttcacaggaaacatttagaacgacgacctaccctga

SEQ ID NO: 8104 - DNA, 380 bp, Zea mays
  Clone ID: LIB3137-003-Q1-K1-C1
gtccccctcttggcctcttctttccggcgatgggcgccggcgtcctcctcggcgacgccgggcgcctgggggcccacctcgccgtacaccgccggaggacccacctctaccttcgcaactgggcctccaagcccctgcgcccctcggtctggctcggcgtggccgcctgtgtttcacaaaatcgcgaccgccgtggccacatgaccaggttcttcgccttcggctcgagcggcagtgacgagcccggggagctgtccgaggatgaagcgcagagggagtgggaagcggagctgaatcgccgcctgaaggaggccgaggagattgaggagttggagcgcaccgccgagcagctgcaaagccaggccgccgccaaggccccc

SEQ ID NO: 8105 - DNA, 380 bp, Zea mays
  Clone ID: LIB3137-003-Q1-K1-C10
ggctcctcctcggcaagcccttgtagtcgtcgtcgtgcagctcgtccgacgagaacctgtgcaagagaaccggcgcggtatggacggcgatggcgcacatcatcacggcggtgatcgggtccggcgtgctgtccctggcgtggagcgtggcgcagctggggtgggtgggcggcccggcggcgatggtgttcttcgccggcgtcaccgcggtgcagtccaccctcatcgccgactgctacatctgccaccacccggagcgaggcgtcgtcaggaaccgctcctacgtcgacgccgtgcgcatctacctgtgcgacaagagccatttgttttgcggcttcttcctcaacctgagcttgtttggcacccggtgtggtgtacac

SEQ ID NO: 8106 - DNA, 441 bp, Zea mays
  unsure (1)..(441): unsure at all n locations; Clone ID: LIB3137-003-Q1-K1-C11
cggacgcgtgggcgagtacagtcggctaggtaatctggtggtacgacgacatggcggccgccagcagcaagtcgtcgtcgtcctcgagctcggcgcagcgggcagctgccgcactgctcgtggccgccgccgtggcggtgtccgtcctggtggtgggcgcggcggcggtgtgcgacatgagcaacgagcagttcatgtcgtgccagcccgcggcggccaagacgacggacccgccggccgcgccgtcgcaggcgtgctgcgacgcgctggcgggggcggacctcaagtgcctgtgcggctacaagaactcgccgtggatgggcgtctacaacatcgaccccaagcgcgccatggagcttccggccaagtgcggnnctcgccacgccgccgactgctagcagtgtgctagccaagccaagccaagcaggaaggcccccggca

SEQ ID NO: 8107 - DNA, 293 bp, Zea mays
  Clone ID: LIB3137-003-Q1-K1-C12
atctggctcgcgtctcttttcttcctctggttcggcgggccccggccccaaactagccaagggcggggagatccacatccagcgcaccggacccggacccgcccaacgactgcggccactgtttacttactagccagcggcggcgaaatgacagatctacatagcaccggacccggacccgaccgtcccggtggaacaggatgttcggacttcaggcgagcggcgcggcggcctcgtgggtggtggggcggatgggcaccgacgcgcatctctacgacgaccgcgacgacgcc

SEQ ID NO: 8108 - DNA, 53 bp, Zea mays
  Clone ID: LIB3137-003-Q1-K1-C2
cgagcttctgattatgggttcagagcaagtttctggattaacctccccaaaaa

SEQ ID NO: 8109 - DNA, 398 bp, Zea mays
  Clone ID: LIB3137-003-Q1-K1-C3
gcgagggttcatcttcccacaccgagcgtactccatggatcgcgagtggggctccaagcccgtcagcggcggtgccgcctccgcccagaatgagctattgaccggcgggagcgtctccgccgcctggccctcgagaccatcgacctcgccaaggatccctatttcatgcgcaaccacctcggcagctatgagtgcaagctgtgcctgacgctgcacaacaacgaggggaactacctagcccacacgcaagggaagaggcaccagaccaacctcgccaagcgcgccgcccgaaaggccaaggatgcccccgcccagcccaagccaaccaggcccaggcttgccccccgaaggtttgttaaaatggccaaacccggttttaaagtacccaaccattttaa

SEQ ID NO: 8110 - DNA, 434 bp, Zea mays
  Clone ID: LIB3137-003-Q1-K1-C4
aaaagaacatccatggcgacggaggaggcctgccgtgccctggcgacgaaggcgaagctgggggcggcggtgctggtgctggagctgctcgtcgcgggcttccacgtcgtgtcgagggcggcgctcgacatgggcgtcagcaagatggcgttcctcgtctaccggaacgccgcagccctgctcgtggtcgcccccgtcgcctacttcctcgacaagaaagataagccgcccttcacgctacgcttgctgatggacttcttcttgctggctgcagtcggggtaaccttcacacaggggctctacatcctcggcttgtactacctgtcaccaacctacgtctctgtcatccagaactcagtccctgcgatcaccttcgtcatggccgctagtttgagaatcgaacagggtaatgtgaggagcagatacgggcttgc

SEQ ID NO: 8111 - DNA, 445 bp, Zea mays
  Clone ID: LIB3137-003-Q1-K1-C5
gtccgcctcttggcctttgctttgccggcaacctcgagctgattgcagcgagaaggcggggcaaatcgatctcccctagctggctacacccgatggagccgagggttccttgcgttgacggcggcggcgacggcctcgagctgagggccgcgagaaggcatcgacgggagggcgggcgaatccacgtcctcgatgcgcaaatcctggagcctcagcgacagagatcgaatccattcaggaacatctttcatctattaactcaacgagaggtcttacctcgaacgaaacaccatgctaaaaggatatggaataacctctccaaatatgatcctcatttaattgagttaaagttttcagatgcagatgctaaacttggtattttatcttgggcagaatcactgtccctgcattgctggtctggcaagtattggcctcttttgccacc

SEQ ID NO: 8112 - DNA, 153 bp, Zea mays
  unsure (1)..(153): unsure at all n locations; Clone ID: LIB3137-003-Q1-K1-C6
ccagagtcattcatccgaagcaagaaaagcattcggctttggaagttggaatccatggcgtggacctcgtgcttcctccaccagtccaccncccgcgtggccgcaccgtctccgcacctcgccgccccacctcgcagcgcgcaactgttcgtc

SEQ ID NO: 8113 - DNA, 292 bp, Zea mays
  unsure (1)..(292): unsure at all n locations; Clone ID: LIB3137-003-Q1-K1-C7
gccagccatacagccaaccatacagaccgtattccatagcaatggcgctcgccaaggccaaagagatcgttgcctccgctccccgtctcatcttcagcaaaacttcctgccctttctgcgtccgtgtgaagcagttgttcgagaagctcggatcaagctacaatgccattgagttggataaggaaagtgatggagctgagctccagaatgccctgaaggagtggactggacataagactgacccatatgtcttcattaatggtaancatattgacagctgtgatgatactat

SEQ ID NO: 8114 - DNA, 439 bp, Zea mays
  unsure (1)..(439): unsure at all n locations; Clone ID: LIB3137-003-Q1-K1-C8
gcgcgagcaacgatgttcaggtgccccagcaatggctacggccaaccgcaccccaccgcgagctaccaccgcacccactccggcgaacacgtcaccaccaaggtcgcccagaaaccctgccatgccggcggcgccgtgcagcagcaccacgttgtccacaaggagtcgtcgttcaaggagctggacggnggtaaccgccgctgcttcgacaactatcccatgaacgctgctaacaacgcgaaccaccaccgctacgaagcctacgaggaaacctacgaggagaccaactgcgaggaggagacgtacgcgtacggcgccggccgtcaccatggtcacggcagcggcggcggcgggcgccgcttccagtaccagacccacgaggagacctacgaggaggaggaagaggaggtcgtcgtgggcggtggcggcggcgccggct

SEQ ID NO: 8115 - DNA, 350 bp, Zea mays
  unsure (1)..(350): unsure at all n locations; Clone ID: LIB3137-003-Q1-K1-D1
cccaggcgtccggtttcatgtcagtttcatctgctcgcctagaggatcgtggatttgaaacggccactgtagcagatgtcttgaagtctaaagggaagagtgctgatggatcttggctctggtgcaccacagaggatagcgtctatgacgctgtcaaatctatgactcancacaacgtgggagctttggtggttgtcaaacctggacagaataaatcaatcgctggcattgtcactgaaagagattatctccggaaaatcatagtccagggaaaatcttccaagtcaactaaggttggcaacttcttgactgaaaaaaacaacctgtcaccagggattcccacccccaag

SEQ ID NO: 8116 - DNA, 391 bp, Zea mays
  Clone ID: LIB3137-003-Q1-K1-D10
gccagagtcctcacggatggcctcgccagctatggtcccgctgcggcagctcttcgtcgagggcgagtggcgcccgcccgcgcagggccgccgcctccccgtcgtcaaccccaccaccgaggctcacatcggcgagatccctgcgggcacagcggaggacgtggacgccgcggtggcggcggcgcgggcggcgctcaagaggaaccgtggccgcgactgggcgcgcgccccgggggccgtccgggccaagtacctccgcgctatcgccgccaaggtgattgagaggaaacctgagctggctaagctagaggcacttgattgtgggaagccttatgatgaagcagcatgggacatggatgatgttgctgggtgctttgagtactttgcggat

SEQ ID NO: 8117 - DNA, 361 bp, Zea mays
  Clone ID: LIB3137-003-Q1-K1-D11
gccgcatcctctccccatcggcagtcttccctaagtcgtctaaaccccaatccctaaatccgggacgcagaccacacgacgcgcacctccgttcacgaggcggaagcatgagtcgccatccgatcactaagtgggcacagaggtccgacagggtgttcttgacaatagagctgcccgacgccaaggatgtgaagcttaacttgaagcctgaaggccatttcaacttctcagctaagggctcagatgacttgccctatgagtttgacattgagctgtttgatgctgtgaatgtggaggagagcaaagcagctgttgccccaaggaccatatgctacctgataaagaaagctaagagcgggtg

SEQ ID NO: 8118 - DNA, 324 bp, Zea mays
  Clone ID: LIB3137-003-Q1-K1-D12
aacttatatcaccacctccgagcccgagtggaaagggaaggcaggaatcgacccgaacgcgcgctcatccgcctgacggcgaccgcccacatgccgaccgcctacagcctacgcgcgccgacattcaccgggcaggagcgcctaaggctgacatcgccggcgctgccgatatgcccgacgggaggaggggcctgccctccgtatgagggttgacatactagcgtccgcgtgcgcgtggcccttcgactagctgtacgcacggaggaggcacacacattgacccttcaagaaatacatgctctgaaactggatccaggatataca

SEQ ID NO: 8119 - DNA, 443 bp, Zea mays
  unsure (1)..(443): unsure at all n locations; Clone ID: LIB3137-003-Q1-K1-D2
cagagaattcccatgcaaacaaacagggtatatggagaggagaggagaggagaggagaggtggagtctgggacaccatggctgcgatgaagctgtacggggcggtgatgtcgtggaacgtgacgaggtgcgcaacggcgctggaggaggctggctccaactacgacatcgttcccatcaacttcgccaccgacgagcacaagagccccgagcacctcgttcgcaacccgtttggtcaggttccagctctgcaagatggtgacttgnacctcttcgaatcacgagcaatctgcaagtacgctgcttcgcaaaacaagccagaagctntgaaggaaggaaacctctaggaggcagcaatggtggatgtttggatcgaagtggaggctaaccagtacaccgctgcactgaaccccattctcttncaggtcctcatcagtccgatgc

SEQ ID NO: 8120 - DNA, 455 bp, Zea mays
  Clone ID: LIB3137-003-Q1-K1-D3
gtgatctacgaagaggatggattccagagtctccctcctctgccccctcgccttcccttcgtccttcttgaattgcccaaaatccaacgtaattaccccccacttcttaaaggcattaacaactacaggtccttgctcaaggtcccggcgcttgcccagaacaagaaccccgcgtgcctggccgagcagctcgcgaggcagttcaagggccaggagtgcaccaacacgacgggcgccaacaccgtcatcggcaccaaccagcaattcccgaactacccaaggaccctgaaccgttgccacctcaccccttcggtaaccaagaccggccagttaatcccgccttccttcccggcccttgcccccgccgtcttccttgcaaattacacaaagtcgaagaccaaccggtccttaaacaacagccagtcttccgcccccggatccccaaccaaggccaa

SEQ ID NO: 8121 - DNA, 184 bp, Zea mays
  Clone ID: LIB3137-003-Q1-K1-D4
cggacgcgtgggcggacgcgtgggagcatgtacacccagaggccagagctagtgatgacttgtgactgacgagcctctatagcatacagcaccgcgcgcggcggagccaaagccaaggacggtccggtcgtatgaataagtatcacccccaccagaaccccaagccacacaccatgcacgccag

SEQ ID NO: 8122 - DNA, 293 bp, Zea mays
  Clone ID: LIB3137-003-Q1-K1-D5
gcatggatcatcacaaactgaatcatattaaccaactgccaaataagttttcatctggtcacttctgtattttctggggttttactcctccatctgtgactccttcagtttcgcagttgaaccttccatcctgttcagcagtcttgccttctctggtgaacagtaagccagtagctctacctgactccaccatgccatctctctccactgccaagcctgtgattgtacctgatgcttcagtgcttacctatctatcatctcagccaccatctgctaatgatgtttctccagtc

SEQ ID NO: 8123 - DNA, 450 bp, Zea mays
  Clone ID: LIB3137-003-Q1-K1-D6
cacacgcctccgctccgcccacgggtccactccaactctccgatctccaggaatccgcggctgaggcgccggcgatggcggctcccatggtcgacgccgaatacctgcgccaggtcgacagggcgcgccgccacctccgcgccctcatctccaacaagggatgcgccccgatcatgctccgcctcgcatggcatgatgctggaacttatgacctgaagacaaaaactggtggtgcaaatggttcgattagatatgaagaagagtacactcatggttcaaatgctggtttaaagattgctatcgatctccttgagcctatcaaagcaaagaatccaaagataacatatgcagacctgtatcagcttgctggagtggttgcagtcgaagtgactggggggccaactgttgaatttattcctggcagacgtgattcgtcggtgtgcccccgtg

SEQ ID NO: 8124 - DNA, 281 bp, Zea mays
  unsure (1)..(281): unsure at all n locations; Clone ID: LIB3137-003-Q1-K1-D7
ctccgatcggattcggtgggacggtggcatctatgcgcccgtcgcaccgtcgctcaaacggtataaacctgcgcccgaacacttcgagctcacccgcaacctcctccgggaagcgcgatcgccgtctcgaaggagctgaaatccaagattccaagctcttctgtcagttgagggaagttgaagcaaaagtctaagcaaaaatgttttacgggggatatgcttaccatggcaactcgnttgagcaaacataccgttgttatccagcatcgttttttgataag

SEQ ID NO: 8125 - DNA, 373 bp, Zea mays
  Clone ID: LIB3137-003-Q1-K1-D8
cacactcctcgccatcacataaaaccagtgcaagcagaagcagcgcaatggcgagcagcacgatggccctctcctccacagccttcgccggcaaggcagtgaacgtgccgtcgtctctcttcggcgaggcccgcgtgacgatgcgcaagacggcggcgaaggcaaagccggcggcgagctccggcagcccgtggtacggccccgaccgcgtgctctacctgggcccgctgtccggcccgcccccgaactacctgaccggcgagttccgggcgactaccggtgggataccgcgggggctgtcgcggaccccgaaccgttcgccaagaaccgggagctggaggtcatccacttcccgctggcccatgctggggcg

SEQ ID NO: 8126 - DNA, 455 bp, Zea mays
  Clone ID: LIB3137-003-Q1-K1-D9
tctagctagctagcagggggggaaatggcttcacttctcgccgcagccatgaaccacgctggccatccagtccttagaagccatctaggacccaacaatgagagtttctcacgacaccacctatcttcttcaccgcaaagcagtaagcgaaggtttaaccttagctttacgccacgatctgcaagagtaggcaatcaaaatggagtccaattgttgagcccttcggaaatccctcgaagggactggttcccctccgacttcatctttggtgccgccacttcagcgtaccaaattgaaggtgcttggaacgaagatggaaagggggaaagcaattgggatcacttctgccacaattttccggaaaggataatggacgggagcaatgcagacattggagcgaattcgtaccatatgtacaaaacggatgtcagattgctgaaagaaatgggcatgga

SEQ ID NO: 8127 - DNA, 157 bp, Zea mays
  Clone ID: LIB3137-003-Q1-K1-E1
cgcagactcaggggaggcgcgcgcaagcaagtaccacgagggagcagcgggcaggcaggcatgcagccatggggaggtctccgtgctgcgagaaggcgcacacgaacaagggcgcctggaccaaggaggaggaccagcgcctgatcgcctacatcag

SEQ ID NO: 8128 - DNA, 442 bp, Zea mays
  unsure (1)..(442): unsure at all n locations; Clone ID: LIB3137-003-Q1-K1-E10
cctttggccatcctaggtctcgtgtacagtcgtcccctccgctcctcgcctcctcctctcgcgagtcccgaacggccgatcccgacgccggctgcgtggctcgcctcagagccccagccgtatcctgccacccttgtccgtgagcgcccgctatcagcgcagctagtccctccctccgcccgctatcttgagcggtggtgatggagtttactttcgaggatgcagcggaactgtgcgcgctcgtttcgaatcagcaatcccacgtcgacgagaagcggaggtggctggagtcaatgatcctcagaccggatggctgcatcaggcgcgcgaagcgacccangtttttggattgaagtgtaagcgtgcgccaagttctgggatgcgagtagtggtctaattcaggccttttcttggtctctttaaataagtggcccgaagttag

SEQ ID NO: 8129 - DNA, 445 bp, Zea mays
  Clone ID: LIB3137-003-Q1-K1-E11
gcgggggcggcaagcaaccacgggcggagctcggagcgtcctcctcctcccgtctataaagggccctccttttcttcctccatatataggggccatcacatccaagaagagggaaaagcaccaaggaccttcggcgcccgttcaggatccacatcttcccgagcgagttcttggttgacctcttcccccttcggaccacctacaaggctcttggtgtagcttgccactctcaccaatcaagttttcatgtctgatctcgacattcagatcccaactgccttcgatcccttcgctgaggccaatgctgtggactctggtgcggcagcagggtcaaaggactacgttcacgtgcgcatacagcagcgtaatggtcgcaagagcctgactaccgtccagggattgaagaaggagttcagctacagcaagatccctcaagatctcaaga

SEQ ID NO: 8130 - DNA, 63 bp, Zea mays
  Clone ID: LIB3137-003-Q1-K1-E12
caaaaatgtagcacatgcaacttggcttatttcgtgccgattgtgtgcttgcatttggggagg

SEQ ID NO: 8131 - DNA, 404 bp, Zea mays
  Clone ID: LIB3137-003-Q1-K1-E2
ttttgttttttttatagactatagaggatagtatagatggattagatagatagatgacacggcacaaacaaattaaagtcgcggacagatcgaacaggggcatggcccgatgctgtactgcacactcggcccacacagcacaacacaacacaacacagtctgactgctagatgagccccaggaaggacatgacaggacaggacacgacacgacacggcgccaacatctcggtacaattattcgttcccccatcagtaccaccacttgagcaaggcgatggaacaaatagagcgaggcatgctatgccatgggccaatgcacgcggctgactgtctgactgaactcgacaaaacacaacaaacgacactgctagaatattatatactagctagagcttattaatt

SEQ ID NO: 8132 - DNA, 399 bp, Zea mays
  Clone ID: LIB3137-003-Q1-K1-E3
aggcagggcactgcactgcacgcatgcactgtcctgacgacgcgcgccacagtccactccagactcaggcatggcgatgggcgccgcttccatcctactgatgatggtttcgctggaggccctgcttctcgccgccgccgccggcggcgggaccatccgtctgcccagcgatgtcggaggcgttgctgcagaccttgtcacggcgatggcgagggcgagggcaagggcaaagcatcagcttcgcgacgaggagaggccgtggggggaatgctgcgacttggccgtatgcgtcaagacgtacccgctaacttgctcgtgcttcgatcgggttgagcgctgctccgacgcctgtaaagagtgcgtggaaacggaagactcgcgccacgtctgcgtcgacag

SEQ ID NO: 8133 - DNA, 282 bp, Zea mays
  unsure (1)..(282): unsure at all n locations; Clone ID: LIB3137-003-Q1-K1-E4
atctgactccccggatctgtgcgccccatcttccatggaaggggagtcagacgcccctgagctgctgctagagaggaccgtgcgaacgggactcatacgccccgggcttgtaacattgagcggcgcattctacatagaaatcagggaagagacgacnacaacatatacattatcacaaancggtttcaggtttttcaggagtcgactctacctgttgtttaatactatgacaaaanggggaagctctgaaaaataataatttgccgttgctcttattttttc

SEQ ID NO: 8134 - DNA, 266 bp, Zea mays
  Clone ID: LIB3137-003-Q1-K1-E5
gtccggctcgtgctcccgctgcgctgccttgtcgccgcacgctgcgctcccgctctcctctctcctcgccccctcgccctctgccgcgcgccctcgatccgcgcccctctcgtgcgcagctcggccgtgcaggggccacgcggcggcgtcagcgttgcacggcgcggcaggtcggaggcccccgagcgtggcggcgatgtcgtcgtcgacgccgccgccgggatccgtgcagaaatcggaagaggagtgggaggccatcctcacgc

SEQ ID NO: 8135 - DNA, 458 bp, Zea mays
  unsure (1)..(458): unsure at all n locations; Clone ID: LIB3137-003-Q1-K1-E6
ctccgaaccccaccagaccttcaaccgctacatttccgtcactaccggagccgccactcccgcgaacgcgggcggcggagcggaagcgaaccagttatctagtggagttgcctccttcaagctactctaatgtcctttctattcaagtctagcaatggcggcaccactgaaaaaatcccatccccagaagaacagcgagaaaaaataaatgaattacgcagggagcttggtgaacactcatcaacaagcattaagaacttcttttcaaatgcctcgtaggcaaaattctttcaagcaggaactggaatggggaaaaaggctggtaaaatgtgaaagcagctgggaagtggcggcttggattcaaacctgaaaacatcttgtgggatgatattgcanaagaagcanaaactggaaagatatatagggcggattataaggacaaacatggcagaactgtt

SEQ ID NO: 8136 - DNA, 367 bp, Zea mays
  unsure (1)..(367): unsure at all n locations; Clone ID: LIB3137-003-Q1-K1-E7
gtcgggcacgacgacgccattgcgagatttgttaacctgtaggatccttgcgatctcgtggggcgcgtactttgcatatggtgtacgcctgtctgatatgtctgtaaacctaccggcgaattcatactcttttcggggtcggagcaccggccggcggaccggaagcggtggatggcggatctgggcgccgacaagctgcgcgtgcaccaggtggtgtggcccggcacgcacgactcgggcaccaacaagatcggcgtgccgcttgngacccggcccttcgcgcaatgccagtccatgtccgggtaccagcagctggccatgggcacgcgcgtcgtccacgtgcgcgtgcaagaggagcgccgggtct

SEQ ID NO: 8137 - DNA, 216 bp, Zea mays
  Clone ID: LIB3137-003-Q1-K1-E8
agcagctgcaaagcagcaagctctactcttcttctgtactgaacgtgtgactagataacaagaagcgtgaaccatggcggacgagtacggccgcagcggctacggcaggtccggcgccggcgacgactacgacagcggctacaacagcaagtccggcactgatgactacggccgtggcgaaggtggctacaacaagtcgggcggcgatgacgacta

SEQ ID NO: 8138 - DNA, 440 bp, Zea mays
  Clone ID: LIB3137-003-Q1-K1-E9
ccgctgccctgctctccacctcctccaccatggacgagccgccgctccatccaccgcccctggcccatgccctcaccaccgccgagtaacacctcctcgccgccgcccttgccttgacggattcgaataattcgtggaagagaagttcttattcccttgccttcagccgtactgcggcggcggaatctctctctggacttctccccgatgtccgtggcggccgagcaggaggtggcgccggccgtcgtggccgtggccgaggcggaggagtgggaggtgtgcgcctgctgcgggctcagggaggagtgcacgccggcgtacgcggccggcgtgcgcgcgcggtacggcgggcgctggctgtgcgggctctgcggcgacgccgtgggcgatgaggtcgccgccgggggcggctcggtgcctgagctcgaggccacgatcgc

SEQ ID NO: 8139 - DNA, 401 bp, Zea mays
  unsure (1)..(401): unsure at all n locations; Clone ID: LIB3137-003-Q1-K1-F1
gctacccatgatgaggagactgcaaattacttccatggcacggacgtcaactgtgtcctgtgccctcgcaaccctgatgattctggcagctttgtccaggacctgcagatatcaactatgttcacgcaccatcagaagatagtagtggtagaccatgagttgccaagcgagggctcccagcagaggaggatcgtcagcttcgttggcggaattgacctttgtgatggaaggtatgatacccagtatcactccttgtttaggacactngacactgtccatcatgatgacttccaccagccaaactttganggtgggtcaatcaagaaaggtggtccgagagagccatggcatgatatccactcacggctggaaaggccaattgcttgggatgttctttacaa

SEQ ID NO: 8140 - DNA, 269 bp, Zea mays
  unsure (1)..(269): unsure at all n locations; Clone ID: LIB3137-003-Q1-K1-F10
cacaaagntnctcctcgatcctcatcttctcctactcatctcctccccctccctccctcggtctctcgagtcaagagcagagcacctcccaaccagctttccctttgcttccaccttgggctgaccccccacctgagcgcaccgactcgcttgctgctgggccagacacacacacgcactggaaaaagcgcgcctcgcgggcacgccttggacacgaccagagcgagctaggccacacgcgcgggactgacttacacacacaaccgcgg

SEQ ID NO: 8141 - DNA, 216 bp, Zea mays
  unsure (1)..(216): unsure at all n locations; Clone ID: LIB3137-003-Q1-K1-F11
cggccgacgacgcgtccgacaaatacacacaacttcctttgtcattattngaaaaaaccacaacagggattcggtgatgacctaggcgctcaggaaacccaaaaggatacccaaccacccaaatggacagacagaggtaatcgcctaccgtaaccgcgagatcgagaatccaggcactgtgaaatcaaaaagagagcacctaccccaccacgagga

SEQ ID NO: 8142 - DNA, 459 bp, Zea mays
  Clone ID: LIB3137-003-Q1-K1-F12
ggctgatgatggtggatcaggtaaagatatgatgagaaaacatcgccggcaagtgctattgagtggtattatcactgctgttggaattagcttgcataatcttccagagggaatggctgtatttcttggatctgtcaagggtcttcatgtgggcctgaacttggctgttgctattgccttacataacataccagagggggttgctgtagctcttccaatctattttgctaccaaaagcaaaaaaaaggcattttatacggcagcattctctggtttggctgaaccactaggagtggttgctgtagctttgttgtttccaagcagtttgaatcctgacattcttgaaggcctacttggatctgtgggtggtgtcatggctttcctcactttgcatgaaatgctgcctcttgcatttgactattgtggccagaagcaagctgtcaaagctgtctttgtggg

SEQ ID NO: 8143 - DNA, 455 bp, Zea mays
  unsure (1)..(455): unsure at all n locations; Clone ID: LIB3137-003-Q1-K1-F2
gttggcccggtgacagcgtgttccggctggtggtgccagtgctcaaggtcggaagcataagggggcggaagggcgagctcatgaagcgcctcgtcgaggagaccaaggccagggtccgcatcctagagggacctgtcggcgccaccgagcgtatcgntttggtttctggagaagaacatccaggcttggagctacctccagccatggatgctctcatgagagtttttaagcgtgtcactgggataacagatggagctgctganggcactcaagccgctgctactcctgatgtatgtgctgcccgantgttggttcctggaactcaagcaattaatctaattgggaagcaaggtgcaactatcaaagcaatccaggagagcacgagtgcaacaatncggggaatatcagtagatgaacatgaacgaccattctatgtaactgacgatgaaaggata

SEQ ID NO: 8144 - DNA, 349 bp, Zea mays
  Clone ID: LIB3137-003-Q1-K1-F3
cgacccgatggcgcccaaggccgagaagaatctagcggagaagaagccggcggccgaggagggtgcggataagacgaccgcagggaagaagcccaaggccgagaagcggctgcccgcgtccaagtcctccggcaaggagggcggcgagaagaaggggaagaagaatgccaagaatagcgtggagacctacaagatctacatcttcaaggtgctgaagcaagtgcaccccgacatcggcatatcctccaaggccatgtccatcatgaactccttcatcaacgacatcttcgaaaagctggccggcgaggccgccaagctggcgcggtaccacaagaagcccaccatcacg

SEQ ID NO: 8145 - DNA, 411 bp, Zea mays
  unsure (1)..(411): unsure at all n locations; Clone ID: LIB3137-001-Q1-K1-G2
cgtcgcctncctttncccttgcctccctccctctccccgcgggccgccagaggcaatttcgggctggattcgaccccgattcgtccggccgcgaccgggatttcctccgccaagcgcggatctgaacgctgcgctccgtgtcgccgctcgaatccgccatgaagggggccaaatacaagggcgccgccaaggccgatgccaagtaagaaaaacgaatctccggntctcttcttccttggtcgtcccgcggatctgttccgtggcgtccgaagcattcgatttctgttattatgacatccgccgccgcgagtagattttgaccttttttttttcccgtcgacgttgttttgctgtcgctgtctctgtcgtcgtcgtcgtcgactcgattgctttggcatctgcaggctggcg

SEQ ID NO: 8146 - DNA, 393 bp, Zea mays
  Clone ID: LIB3137-001-Q1-K1-A1
cggacgcgtgggcggacgcgtggggtgccatcaaggccatcgacaagcttcctcttctgcgtggtgtggcttgagattgttggaattgggtatacagggtggttcacataccgtaacctcgtcttccagccagacagggaggccctgatcggcaaaatcaagagcacttacaaagaaatcaccgggagcagcaactgatcgaacatcatttacaagatgggttcttaagcatatggtagaattgcatccgtaagcactgaagctgccatgcaagtgaaagtgcttctggtcccctgacctcaatcagaaaaaaaaaaacttctgcagtgaactttactttggtttagtgtaataattatgacgtattcccaggtcttttttcggactactggt

SEQ ID NO: 8147 - DNA, 221 bp, Zea mays
  Clone ID: LIB3137-001-Q1-K1-A11
gctcctcttcctctcctcgcgttcccccaccaaaccctaatccgagcacccagcccgtacgcgcttccgctcgcgccggcctttggggctctcaccctgagcggtaggaatccgcagggctccggttgggtgccagaagcatccaagtcgttggcgggagaccgggaaatggcggaaaaagagggggcgaaggttggggcgaaaaaaatggaaaaccggaa

SEQ ID NO: 8148 - DNA, 180 bp, Zea mays
  Clone ID: LIB3137-001-Q1-K1-A12
cccggggccacgcccacgcgcaactccattacttcgctcgcagccagatctgagtgctcactgtgtctcttcctcagggccggcattagcgctcaaaccctaacacgccacgcgatcccgatgcgcaagggtctgggcagcgaggcatctttgcgccggcagcgcgggccggcgcggctt

SEQ ID NO: 8149 - DNA, 150 bp, Zea mays
  unsure (1)..(150): unsure at all n locations; Clone ID: LIB3137-001-Q1-K1-A2
gtatcaccccggtgctgaaccgtangaggtgactggcggacgtctctatggccnanccgtangtggaggcggcacctcggcgccgtgggagatggaggacgatgacaacgagggtgtaggcgagagcacttgttcccccgccggcgaccg

SEQ ID NO: 8150 - DNA, 262 bp, Zea mays
  unsure (1)..(262): unsure at all n locations; Clone ID: LIB3137-001-Q1-K1-A3
gacctgctgcacatgccaacgatgctgtcgagctcccgcatcatggctcagccttgaaagaacatatttcttcaaccaagattcctgcccgtctcaagaggggcagcggactatgctcggcctgtgaaaacttcacgagcgaagccgtcacttatcttcgcaaggaacagacacaggacaggatcgtggagttccttcatgatgcttgctcccaatcattctnctttgacagaaatgtgtcgagctgatggactcttatgcg

SEQ ID NO: 8151 - DNA, 322 bp, Zea mays
  unsure (1)..(322): unsure at all n locations; Clone ID: LIB3137-001-Q1-K1-A4
ctagcttcttctagctctagctaggctcgtctgctgcaagaaagtaacagcgcaagcatggaggggaaagaagaagacgtccgcctgggcgccaacaaggtctcggagcgccagcccatcggcacggcggcgcaaggcacggacgacaaggactacaaggagcccccgccggcgccgctctttgagcccggggagctcaagtcctggtccttctaccgcgccggcatcgccgagttcgtcgccaccttcctcttnctctacatctacatcctcaccgtcatgggcgtctccaagtccaccttcaagtgcgccaccgtcggca

SEQ ID NO: 8152 - DNA, 432 bp, Zea mays
  unsure (1)..(432): unsure at all n locations; Clone ID: LIB3137-001-Q1-K1-A5
gcgcccccaattaccgctccccacgcacccagacacgccgagcgggagaggaagcgacagccagcagccgaggcggccagcgccagcgcaagcatgaccactcccactcccagtgccgacggctcgcccccgggctcctccgacctcgtgccccctttctaccccgagatgatcgtcgccgcgatcaccgccctcgccgatgagaacggctccagacaggccgccatcgcgcgccgcatcgaggcgcaggcccgcggcgacctgccggtctcgcacccggcgctcgtngccgcccacctctcgcgcatgtccgccgcaggggagctcgtcgccgtcgcggggggggaagtacgcgctgnccccgccgncggcgcagncggcgccggagtcacccggctgacgacggcgaagacgacgacgacgacgacgact

SEQ ID NO: 8153 - DNA, 435 bp, Zea mays
  unsure (1)..(435): unsure at all n locations; Clone ID: LIB3137-001-Q1-K1-A6
ccttcctccatcttccttctccactccactcccaagtccgcaccacccacaaccccgtctctgcacgtgcggagcaagcttcgcttcggctccnctcggctcgagcagaagaaaatgcaacgggcagtgcaggccgtcaggtcacacagcaatgttcttaaatatgctgatctacaacacatcaacgctcccaagccagcaatgcttcctgctgccttttctcggttcatgtcagcttcatctgctcgcctagaggatcgaggatttgaaactgccactgtagcagatgtcttgaagtctaaagggaagagtgctgatggatcttggctctggtgcaccacagaggatagcgtctatgacgctgtcaaatctatgactcagcacaacgtgggagctttggtggttgtcaaacctggacagaataaatcaatcgct

SEQ ID NO: 8154 - DNA, 335 bp, Zea mays
  Clone ID: LIB3137-001-Q1-K1-A8
ctagtacagtctgctaggtaatctgttggtactacgactgaccaccacatgactgagaccagcagaaagtcgtcgtgggcctggacctcggtacaaccatcaatatctgcacgacttactcttgcgttgtcctgtctcatcacgaccgcgtcgagatcattgccaacgaccaacgtaaccgcacaacgccctcatacgttgccttcaccgactacgaacgcctcatcggagattcggccaagaaccatgtcaccatgaaccccatcaacaccggctttgattccaagcgtctcatcagcaagaggttcagtgatgcgtctattcagaatgatatc

SEQ ID NO: 8155 - DNA, 275 bp, Zea mays
  Clone ID: LIB3137-001-Q1-K1-A9
cggacgcatgggcggacgcatggtcgtactcctgggcgccaccacgctatattggcgacggcgatgccatcacgccgggtaagactacccgatcgatcgcccagctcgcctgcctgtgatcgaccgggtcgctgcctccgatcctcttgctgcccagcaccctggctacttcagccagctagccaggttgagaccgactagctcgatctagctgctgacgcgtggccatggagggcgaggacgaccgcccggagtggatgatggaagtgggcggc

SEQ ID NO: 8156 - DNA, 379 bp, Zea mays
  Clone ID: LIB3137-001-Q1-K1-B1
gtttttctagacctccggatcgctcagagattgagtcgtagtcgtagccgactggtcgccgcgtcccgctttccccgcgcagcagcagagcaccacccggtgaccgagcaatggaggcggggggcgtgggcctggcgctgcagacgcgggcggcggccttcggctccggccagcgccggggcggcctacagtcgcccatcgggaggctgagagtcgctgaaccggcgggagctgcggttgccgtgcgggttcgcgggtccaagcccgtcgtaccgctccgtgcgaagaaatcatccggaggtcatgaaaacttgcataactccgttgacgaagctcttctgttgaagagaaaatcagaagaagttcttgtctacttaaa

SEQ ID NO: 8157 - DNA, 79 bp, Zea mays
  unsure (1)..(79): unsure at all n locations; Clone ID: LIB3137-001-Q1-K1-B10
tcggggactacagacttatcgcaaaagccgtggactaagcgtaccgggcggtggaatgcgacggcggcnggtacccctt

SEQ ID NO: 8158 - DNA, 446 bp, Zea mays
  unsure (1)..(446): unsure at all n locations; Clone ID: LIB3137-001-Q1-K1-B11
cggacgcgtggcgtatgtaagctcgtttcgaaaagagctatagagccgacacacacgcacgcacacaccatggcaccgngttctctgctggcagtgctcgccgtcgccgccctcgcgttcttgcacgccgcctcggccaagtcgtcgtggcttgacaggaggttcaccacggacggcaccgtccgcacgggatacgacgattcgggccagcaggtggtgatgctccgtcttgaccagcactccggcgctgccggcttcaacttcaaggagcagtacctttacggcgagttcagcgtcgagatgaagctcatctcggggaactccgccggcaccgtctcgtgcttatacctctcttccggcgacngcgacnggcgcgacgagatcgacatggagttcatgggcaactcgagcgggcagncggtggtgctgaacaccaacgtgtgggc

SEQ ID NO: 8159 - DNA, 321 bp, Zea mays
  Clone ID: LIB3137-001-Q1-K1-B12
cataaaaccagtgcaagcagaagcagcgcaatggcgagcagcaccatggccctctgctccagagccttcgccggcaaggcagtgaacgtgccgtcgtctctcttcggcgaggcccgcgtgacgatgcgcaagacggcggcgaaggcaaagccggcggcgagctccggcagcccgtggtacggccccgaccgcgtgctctacctgggcccgctgtccggcgcgcccccgagctacctgacgggcgagttcccgggcgactacggctgggacaccgcggggctgtcggcggacccggagacgttcgccaagaaccgggagctg

SEQ ID NO: 8160 - DNA, 173 bp, Zea mays
  Clone ID: LIB3137-001-Q1-K1-B4
caagctctgctcctcctttttcactgctctgcgtctgcgtctgcgtctgcgtctgcactgcttggcgtgttcctccccccgcctgcggcttcgccccggcaaaaagcaaaacacggccatggaaggctacgaccgcgagttctaccatttcagcgaccagctgcgcctgcaga

SEQ ID NO: 8161 - DNA, 383 bp, Zea mays
  Clone ID: LIB3137-001-Q1-K1-B5
gcaagcccaagtgcccaatcaacaaacccagaccgccagacggcaaccgttgtcatctctcgctccacggcgccggccatcgtcactcacacgcccagcaccgcagcacgacaccatcgcgccctggccatcctcccgttcacgtgcacctaccgcacgcaccaccgcggaaagtaaccccgagatccagcgccatcggcacgaccaggcctgtccaaggatggggcggagaggggagccctactacgtcgaagcggcgccgccggtggacgtgaacaaagacacagagtggttcatgtacccgggcgtctggaccacctacatcctcctgctcttcttcgctgggctctcgtcctctccgtctctgggtgctcccccggagc

SEQ ID NO: 8162 - DNA, 329 bp, Zea mays
  Clone ID: LIB3137-001-Q1-K1-B7
gaaaagacagtctttccatggcagcccaatgtgatggtgaagtcgtcaaggctcctggaaagctggtcatcagtacttacgtgacatgtcctgatataacattgacagtaacccctgatttgaagcttggtaatgatggcatccttcttcatattgacctcgctaaaagaaatcgccgtcttggtggttctgctcttgcacaagcatttgatcaaattggaaatgattgcccagacattgatgatgttctgtacctgaagaaggtatttgaggccattcaggaattgctcagtcagcgtcttatttcagcaggccatgacataagcgat

SEQ ID NO: 8163 - DNA, 299 bp, Zea mays
  Clone ID: LIB3137-001-Q1-K1-B8
ggacgacgaggccggcacctcaacgccgagtgttgcggcggcggcggccccggccggggcgcctgccccgaggccatgcaccgacgcgcccatgggcgcgctgcgggacgaggagtgcgctaatctcctggccctggtatccaccgtctcgcgcccgctcgaggacgccgtctcggatttcctcgcacgcgtgccccccgatcgccgtctacggttcggcaccttcatcagcttagtcctcgaggacaagatgatgcttcaacctgcttagcgtttagttgcaattgcaattctacatc

SEQ ID NO: 8164 - DNA, 335 bp, Zea mays
  Clone ID: LIB3137-001-Q1-K1-B9
cccacgcgtccggaccgagtgccccttcgcgcacccgggggagaaggcgcggcggcgcgagccgcgcaagtaccactactcgggcgccgcctgcccggacttccgcaagggcgggtgcaggcgcggcgacgcctgcgacttcgcgcacggcgtcttagagtgctggctgcacccggcgcgctaccgcacccagccctgcaaggacggcacggtctgccgccgacgagtctgcttcttcgcgcacaccccggaccagctgcgggtgctcccgcccacgccgcagcagtgtagcgccagccccaggggcgccggcgccctgaccgagtcctacgacg

SEQ ID NO: 8165 - DNA, 335 bp, Zea mays
  unsure (1)..(335): unsure at all n locations; Clone ID: LIB3137-001-Q1-K1-C1
gaggtgggttggcttctcctccccctccggttcgggttcgggttcgtgaggttctccggggttcggtttcntgggtgagcggatcgagatggcggcgtcngatgttgagtaccgctgcttcgtcggcggcctcgcctgggccacggacgaccactcccttcacaacgccttcagcacctacggcgaggtcctcgagtccaagattatcctcgatcgggagacgcagaggtcccgcggcttcggcttcgtcaccttctccacggaggaggcgatgcggaacgccatcgagggcatgaacggcaaggagctggacggccgcaacatcaccgtcaacg

SEQ ID NO: 8166 - DNA, 218 bp, Zea mays
  unsure (1)..(218): unsure at all n locations; Clone ID: LIB3137-001-Q1-K1-C10
gaaggacccgttccgggtgcccaccaaggacaacatccggatggcgatgcantggctggtgcaagggtgcaacaacggcgactccctggtgttccacttctctgggctgggcgcgcaagtcgccgacgcggactgcgacgagcaagacgggtacgacgaggccatctgcccggtggactcgttccaaaagggccccattctggacgacgagatcaacg

SEQ ID NO: 8167 - DNA, 355 bp, Zea mays
  Clone ID: LIB3137-001-Q1-K1-C11
gtgcactacacaaaccaaccataacttctcttgttctcgttctcttccctgcgtgaaccggggaccaagaagaagcgggcgttggggactttgggatttgaaagcctacatattattatttctctaattcaggcgtggtctgtgctgggagggaagggatctgtggggctgcaaccccatccgggctgagggttgaaggatccggccctttggtgtgctcccccaatcgggttattatttctctaattcgggcgtggtttgtgccgggagggaaggaatccggggggctacagccccatccgggctgagggttgaaggaaccggccctttggtgcgctccccccaatccaggaaa

SEQ ID NO: 8168 - DNA, 440 bp, Zea mays
  unsure (1)..(440): unsure at all n locations; Clone ID: LIB3137-001-Q1-K1-C12
gcatgatgaccatgacaaaaggacggcagagagatgaaaaagaatggagcgagctgttcggggaagcagggttcagcgaatacaagatcctgaaggaatttggagctcgtgttgccttcgaagtctatccgtgagattgcacctggactatacatatatatttacatacatatatgtatgtgtgtgggtgccttgcgtggcttggcgtgatgatgtcataaataaagagggtgggtgtgcttgcggtattcatggatggccatggatctgagcacatgacgttggatgctttcttaaggctctcgtggatcttctattatttcggaagaagctgtaaaataatatatcgccatctantgttggcgttggcttgtatgtactttgtaccttgcttttgtattttgtgtaatatcgagtaacctaatgtatacttgcttact

SEQ ID NO: 8169 - DNA, 398 bp, Zea mays
  unsure (1)..(398): unsure at all n locations; Clone ID: LIB3137-001-Q1-K1-C2
atcacttctgttaactacattcgcagcggcagcgggagggaagaccagcggcagcgtcgagctgggggtggtgcgcttcgggttcggcgaaaggcgacatggaaagcacgctcaaagggatacgcggcaacgatgcgccgtgcgttctggacctggacgacgcggccaccgtggcgggcggcgtcgaagacacctacggcgaggatcgcgccaccgaggagcagctcgtcacgccctggaccgtcttcgtcgccagcggttacaatctgcttagggatccccgttacaacaagggacttgcgttcacagagagggaacgtgagacgcactacctncgtggccttctgccaccagctattgtatcccangagctccaggagagaaagatcatgaataat

SEQ ID NO: 8170 - DNA, 375 bp, Zea mays
  unsure (1)..(375): unsure at all n locations; Clone ID: LIB3137-001-Q1-K1-C3
ccgaattccggtcgacccaccgtcgggcaccaaccgaaacggtgcagatacacattgacattggattgagcgaatctagggctgagatcttcttaacccagagatatatacaacgacttaccactctttgcaagtgtattgacagtgcatccatcatctcaatcgacacaggagggctctttatagaatattgtcctgtctggaggctcgactatgttcaaagatttccataggaggttacagcgggacctaaagaagatagtggatgcacgagtccgtgcatctaatagccggcttattagtggggatgctaaggcccagcctatagaagtgaacgtggtcagtcatcctattcagagatatgncggtatggtt

SEQ ID NO: 8171 - DNA, 163 bp, Zea mays
  Clone ID: LIB3137-001-Q1-K1-C5
acggggagggaagaagctcctgagctacttccagtgctgtatcaaggcctgaaaaggagctgccgcgaggctatgtctgtgtgcctgtgctttgtcgcaacaaaacactcgtgagcaactaagtcccggctttgttaagtattcaaaaaatgtgcaatgtatt

SEQ ID NO: 8172 - DNA, 356 bp, Zea mays
  Clone ID: LIB3137-001-Q1-K1-C6
cctagcttgagattgcaagaggtctccaagaggagggtaggggagccgagcgctcagctctgaatggctccatctattgctaacagctctggccaatcatataaaaaaacgttggttacaagccaaatggcacttcctggtagctgctgattttctatcgacaagatcagagctcagacctcaggcaagggaggtacaatgccaagagcaaatgagatgttgagggcagattcaagaatgatggtggtctttggtgccttgtcatcgaaaccagagcaactgacatttgaagaatccctcatatttgtcaagaaagttaaagcccgggactacatgctgtacctgtcattattcga

SEQ ID NO: 8173 - DNA, 357 bp, Zea mays
  Clone ID: LIB3137-001-Q1-K1-C7
tgatcttccacctgaaaaactttttcttggtcaagactgagaaagacagggaagaggcaagggaccctggaagtattggttttgactcaagcgaacctcaaattcagctgtatttcttacttggtcttgtctatgcggcagtgacaccatttttgctcccttttgtattgatattctttgggtttgcgtacgttgtataccgccaccagataataaatgtgtataatcaagaatacgagagtgcagcagcattttggccaagtgttcatggacgcataatcacagcgttgattgtatcacagctgcttctccttgggttacttagcacaaaaggcgctggccagtcaacacctgtgc

SEQ ID NO: 8174 - DNA, 347 bp, Zea mays
  Clone ID: LIB3137-001-Q1-K1-C8
gcaggatcaggccaagctggctgcctcctctatcgacagcatcgtgaacggcagcgacgccgtcatggagccggttgttgctggcagcaacacggtagtagctgttgcccaagttgagttgcaaacaatgaacgtgcagcagcccgctgatgttgccggacccagcgagggggtggcggcgatctccaaaggggggaaggtagggccgaaccggtgcagcgcctgcaggaagagggttggacttacgggattcaactgccggtgtgggaacttgtactgcgcactccaccgctactccgacaagcacgactgcaagttcgactaccggactgctgccagggacgcca

SEQ ID NO: 8175 - DNA, 354 bp, Zea mays
  unsure (1)..(354): unsure at all n locations; Clone ID: LIB3137-001-Q1-K1-C9
cggcgagcggggcttcctggaagctgccgttgaccccgacccggaggcataagcataactagggtgtaggggggccggcctgtantgtancgccccccgactcccgagcagcaaccaaccagcaaccgagccagccatgtcgcccacccctgcgccggccgcccgcgccggcgaggagctgccgtccactgaggtggtggtggtccggcacggcgagaccgcgtggaacgcctcccgcgtcgtccagggccaaatggacccggagctgaacgaggccggcaggcggcaagccgtcgtggtggcccgccggctgtcgagagaagccaagcccgccgccgtgtactcgtctgatct

SEQ ID NO: 8176 - DNA, 354 bp, Zea mays
  unsure (1)..(354): unsure at all n locations; Clone ID: LIB3137-001-Q1-K1-D1
agggttttgccattggctctgcagccttggtttcccttgcactatttggtgcgtttgtaagccgggctgctatctccactggtgatgttctgactcctaaagtattcatcgggcttattgtcggtgctatgctcccgtactggttctcggcaatgaccatgaagagtgtgggcagtgctgcgctcaagatggtggaagaagttcgtcggcagttcaacaacatccctgggctcatggaaggcaccacaaagcctgactacgcaacttgtgtcaagatctcaacggatgcatccatcaaggagatgatccccccaggtgctcttgttatgctcacaccactgatcngtgggattc

SEQ ID NO: 8177 - DNA, 299 bp, Zea mays
  unsure (1)..(299): unsure at all n locations; Clone ID: LIB3137-001-Q1-K1-D10
gtcccaccaagctgtcccccgaccactccgccgcccgctccaatggcggcgccggccagctgctcatgctttcacccacgcgcgaccgncagcccgncgtcttctctcaagtcgggcgcttcctccctgcttctccgacccttcgcaccctaaaccctacccacactgaggctccggcttctctgtttccccccacctcttgcagcgtcggcaccaaagtcttcgtcgggctcagggcgcaaaccaagctcggttcgtcggagtcgtcatgcccgaatgtcagcgctgggttccacact

SEQ ID NO: 8178 - DNA, 383 bp, Zea mays
  unsure (1)..(383): unsure at all n locations; Clone ID: LIB3137-001-Q1-K1-D11
cacccaccagaggaaaagggcaaaagccaaaaggcatcaccgccgcgacgacgacgacgacgacgatggcagcctcgctccaagccgcggccaccctgatgcagccggccaagatcggcggccgggcgccctttgcctcgctgccgtcccgcccgtcgtcgcaactcgcctgcagggcgttcggcgtcgacgccggcgccgccaggatcacgtgctccctgcaggacgtcgccagcaggtgcgtcgacgccgcgaagctcgccggcttcgcgctcgccacctnggcgctcctcgtctcgggcgcgagcgcggagggcacgcccaagaggctgacctacgacgagatccagaggcaaacgtacatggaggtgaagggcacgggc

SEQ ID NO: 8179 - DNA, 327 bp, Zea mays
  Clone ID: LIB3137-001-Q1-K1-D3
ccttataatttttattcttttttttttttttttatcttttttttctttcattatataataacttttttcttcttctcaattgtttcttttcaaattttttttaaataacctttttttttataatatattatttttttttttataattatttttttctcatttttttttttttatatttttttctctttatattttattcttttatttttttttcactttcttttttttatttttttttttacttttatttttttcttattattttctttctctttctttattttattttccttattataattattcattttcactttattcattttt

SEQ ID NO: 8180 - DNA, 433 bp, Zea mays
  Clone ID: LIB3137-001-Q1-K1-D4
atgatatcaagggtgacgaaaatatgatcgctatgagttacaagaaactgcctgttgacgtgaaggctggaaatgtcatactctgcgcagatggtactatctctctggccgttctgtcttgcgatcctggtgctggaactgtgcggtgtaggtgtgagaacactgcaatgcttggtgagagaaagaactgcaatttgccaggaattgttgtggatcttcctacattgactgagaaagataaagaagatattttgggctggggtgttccaaatgacattgacatgattgctctatcctttgtccgtaaaggatcagaattggtgactgtcagacaggttcttgggcagcatgccaagcgcattaagttgatgtcaaagggtgaaaaccaagagggtgttgtaaactttgatgagatcttgagggagactgatgc

SEQ ID NO: 8181 - DNA, 238 bp, Zea mays
  Clone ID: LIB3137-001-Q1-K1-D5
aacatatcaagcctcactcaaacatgatcgtcatcttttacatcaaactccctcttcacgtgacggccttaaatgtcatactcgaggcacatcctactatctctaatacctttctcaataaccatactggtcgacctactgcatcgtctacaccccacaacacttaactgcttgttcattcaaataacagccatcacacatccattgtcccgacttttaatacataaattccaaacca

SEQ ID NO: 8182 - DNA, 299 bp, Zea mays
  Clone ID: LIB3137-001-Q1-K1-D7
acggtgagatgctcaccacatggacgttatctttctaacactaacgtatcgttataccaggtggggcttttgttctgttgtggatggtgctaaatgccggtgggctcggccttcttatataagtatatcccatctttagcttctttattgaggattgtcacttaagctagcatgtatcttcaaatttacaaatattttataacatttcaaatttgtaattcttttgaatcattttctcttgtaatcactccgataattgtataatgtaaaattattgtaacatgtaatcattttgtaat

SEQ ID NO: 8183 - DNA, 299 bp, Zea mays
  unsure (1)..(299): unsure at all n locations; Clone ID: LIB3137-001-Q1-K1-D8
ttcatcaactccggcggcttggagaagacgaagctgctccagaatccgataggaagtttggtgctcgcgtgttgacgggttgatttcngtgccgatggggcaagcgttccgcaagctgttcgatgccttcctcggcaccagcgagatgagggttgtgatgcttggtctggatgccgccggtaaaaccaccatcttgtacaagctgcaaatcggggaggttttgtcgactgttcccacgattggtttcaatgtcgagaaagttcaatacaagaatgtgatgtttactgtttgggatgttg

SEQ ID NO: 8184 - DNA, 385 bp, Zea mays
  Clone ID: LIB3137-001-Q1-K1-D9
tgcagatcttcgtgaagactctgactggcaagactatcacccttgaggtcgagtcttctgataccattgacaatgtcaaggccaagatccaggataaggagggcatccctccggaccagcagcggctcatttttgccggcaagcagctcgaggacgggcgcacgcttgccgactacaacattcagaaggagagcaccctccacttggtgctgcgtctcaggggtggcatgcagatcttcgtgaagacacttactggcaagacgatcacccttgaggtggagtcctcggacaccatcgacaatgtcaaggccaagatccaggacaaggagggcattccaccggaccagcagcggctcatctttgctggcaagcagctggaggatgg

SEQ ID NO: 8185 - DNA, 437 bp, Zea mays
  unsure (1)..(437): unsure at all n locations; Clone ID: LIB3137-001-Q1-K1-E1
gcgcttcgcaagcacaggcagtgatcggcaaccaaatccggacagtcttgagctctctcagtctgagcatttcagttcccagattcacatagccccagccccacaagtagcgaaatggcagctgctccgttcgcgattgccggccggctctcccccgttgcgcgcctcccggtccgcgcctggaggccggcgcacgggtttgcgtcgtccgggagagcccgctcgctcgccgtggcgtccgcggcgcaggagaacagggacaacagtgtcgacgtacaggttagccagaacggcggcaacaggcagcagggcaacgccgtgcagcgccgtccgcgccgcgcgacagcgctcgacatctncccatccccgttcgggttagttgatccgatgtcgccgatgcggacgatgcggcagatgctggacacgatggacaggct

SEQ ID NO: 8186 - DNA, 344 bp, Zea mays
  Clone ID: LIB3137-001-Q1-K1-E10
gtcggatcctgtcctccaaagcgtttatgttcgcgcgctgctaggggacgactcggtgtagtaggtccccgccgcggaggccttccacgaatacaacaatgcccgcctcgtgtacctccagctccccgaccgcagtggcgacataatcatcacaacttatggggagattgacaagaacaattatctggaccccaagactgcgcaagttgctactatagatcatatgaaacagacttgtacgaaactgacgcccgctcaagatgaggagcttccatcggcttacattgaagagtttaggtagactacctgtgtgctttagatgttgaattgtcaaaatatgttgc

SEQ ID NO: 8187 - DNA, 306 bp, Zea mays
  Clone ID: LIB3137-001-Q1-K1-E11
ctgtgactagaactagtagatccaatccaacactcgggacgaaattaaaggagacgacggatcatccggccggcaggcatcgcacggtcaccaccatggcggcgcaagagggcggcatgaggctggtgtcgcacccgatcgcggcgcacgacgggcggctgccgcggcagtacacggcggaggggcagggcgccaagaaggacatgtcgccgccgctggagtggtacggcgtgcccgaaggcgcgcggtcgctggcgctgctggtgcaggacatcgacgccgaccccgtcgtgccgtggacgcact

SEQ ID NO: 8188 - DNA, 321 bp, Zea mays
  Clone ID: LIB3137-001-Q1-K1-E12
ctgtgactagaactagtagatccaatccattactcgggacgaaattaaaggagaggacgcgtcatccttccagcaggcatcgcacggtcaccaccatggcggcgcaggagggcggcatgaggctggtgtcgcacccgatcgcggcgcacgacgggcggctgccgcggcagtacacggcggaggggcagggcgccaagaaggacatgtcgccgccgctggagtggtacggcgtgcccgaaggcgcgcggtcgctggcgcttctggtgcaggacatcgacgccgaccccgtcgtgccgtggacgcactgggtggtggccaaca

SEQ ID NO: 8189 - DNA, 328 bp, Zea mays
  unsure (1)..(328): unsure at all n locations; Clone ID: LIB3137-001-Q1-K1-E2
gacccacgcgtacggcgcttcncaagcacangcagtgatcggcattcaattccggacagtcttgagctctctcagtctcgtcatttcaattcccagagtcacatanccccagccccacaagtagcgaaatggcagctgctccgttcgcgattgccggccggctctcccccgttgcgcgcctcccggtccgcgcctggaagccggcgcacgggtttgcgtcgtccgggagagcccgctcgctcgccgtggcgtccgcggcgcaagagaacaaggacaacagtgtcgacgtacaggttagccagaacggcggcaacaggcagcatggcaa

SEQ ID NO: 8190 - DNA, 112 bp, Zea mays
  Clone ID: LIB3137-001-Q1-K1-E3
gcaggaatgataactgaatttgtcatctcttttgatgaccggtatctctactttgtaaattggctgcatggcgatattaagcagtacaacattgaagatcccgcaaagcctt

SEQ ID NO: 8191 - DNA, 311 bp, Zea mays
  Clone ID: LIB3137-001-Q1-K1-E4
gccgccaccaggtgcagagtctttcgtcatctcttctccggcgaagaacccccagtcgccgaccagatcacttgttaaactttgttgaggggttatggctgtttctttcgcaaacctcaacaccgaggcatggcttaaaaagcttgatgagtaccttctcactcgcagctacatcactggctaccaagcttccaaggatgacttggctgtctacacttcgttttcgtctgctccctcgtccaagtatatcaacgtagcaaggtggtttaatcacattgatgcgctcgtgaggctgatcggaattactgcag

SEQ ID NO: 8192 - DNA, 374 bp, Zea mays
  Clone ID: LIB3137-001-Q1-K1-E5
gtactcgctcatcttgctccgccttccgcgcatcctccaaggatcgtgatggccatggccgacgcggcctccgcggccacgcgccacctggtggccgccgccgccgccccgtcggcgaagccgcggcagctgagctcacagctcgcgctgccgtcgtcgtccttccgcgcgccggccccgctccgcgcgaccgccggggaggcggtgaccgaggaggcgcccaaggggttcgtggccccgcagctggaccccagcacgccgtccccgatcttcggcggcagcacgggcgggctgctccgcaaggcgcaggtggaggagttctacgtcatcacgtgggcgtcccccaaggagcaggtgttcgagatgcccaccgg

SEQ ID NO: 8193 - DNA, 443 bp, Zea mays
  unsure (1)..(443): unsure at all n locations; Clone ID: LIB3137-001-Q1-K1-E6
cggacgcgtggggttgatattccaaaccacaagagggtggagtactcgctgcagtacatacatggcgttggacgctcacgctgacgccagatcctcctggacctcaatttcgataacaagatcaccaaggacctctccgaggaggaggtcatcaccctccgtaaggaggttggcaagtacatgattgagggagaccttaaacgtttcaaccgtgtggcgattgagaggctgaaggagattaagtgctacaagggcatccggcacaagcttggactcccagttcgtggccagaggacaaagaacaactgccggacacttaatggaaagagggcttcagttgccaagaagaagtcacccgccttccaggatgaaataatcgtattgccatgtattgaaggtctctctctctctatctctctctctgggggngcgtgtgtgtgtgt

SEQ ID NO: 8194 - DNA, 451 bp, Zea mays
  unsure (1)..(451): unsure at all n locations; Clone ID: LIB3137-001-Q1-K1-E7
ccttcctccatcttcctcctccactccactcccaagtccccaccacccccaaccccgtctggccactgcggcgcaggcttcgcttcggctccgctcggctcgagcagaagaaaatgcaacgggcagtgcaggccgtcaggtcacacggcaatgttcttaaatatgctgttctacaacacatcagcgctcccaagccagcaatgcttcctgctgccttttctcgtttcatgtcagtttcatctgctcgcctagaggatcgtggatttgaaactgccactgtagcagatgtcttgaagtctaaagggaagagtgctgatggatcttggctctggtgcaccacagaggatagcgtctatgacgctgtcaaatctatgactcagcacaacgtgggagccttggtggttgtcanacctggacagaatanatcaatcgctggcattgtcactgagag

SEQ ID NO: 8195 - DNA, 396 bp, Zea mays
  Clone ID: LIB3137-001-Q1-K1-E8
cccatatccgctcccctacctctccagcatctcccgtctccgtcgtctcgtctctgctgcgtcacctcgccgccagccatgggcaagatcaagatcggaatcaacggtttcggaaggatcggcaggctcgtggccagggtcgccctgcagagcgaggatgtcgagctcgtcgccgtcaacgaccccttcatcaccacggattacatgacctacatgttcaagtacgacaccgcgcacggccaatggaagcacagcgacatcaccctcaaggactccaagacgcttctcttcggcgagaagccggtcaccgtctttggcatcaggaaccccgaggagatcccgtggggtgaggctggtgctgagtatgtcgtggagtccaccggtgtcttcactgac

SEQ ID NO: 8196 - DNA, 405 bp, Zea mays
  Clone ID: LIB3137-001-Q1-K1-F10
gtcattaccaggcggggatgttcctcctggtggtgagttcatccaggctgcagctgttgtgagccaaccagctctttactctaaggaactgctggagcaacgtgctgctggtcctgcgatgatgcatccatctgaagcagttactaaaggtccaagatgggccgacctatttgagcctggggtgaagcatgcactgtttgttggcataggaatacagatcctgcaacagtttgctggcatcaacggcgttctctactacactcctcaaattcttgagcaagcaggcgtcggtgttcttctgtcgaacctcggccttaacgcttcttcggcatcaatcctcattagcgccctgacgaccttactgatgctcccaagcatcggcatcgcgatgaggctcatggatat

SEQ ID NO: 8197 - DNA, 305 bp, Zea mays
  unsure (1)..(305): unsure at all n locations; Clone ID: LIB3137-001-Q1-K1-F11
cggacgcgtgggcggacgcgtgggcggacgcgtgggtccgacggcgccgcctccgtctccggcgtcncgagggaagaggtggcggccgtagagacgctcgcgccgccggcgagggcagtggggtctgacggcgcggatcggaccgacccgcccccgcacgagcagcaagaggaggccgaggagggcgcggcgaaacccggtgcctccctgcagcaggacgcgccgctgaccgaggaggtggtggaagggggaagcgggggccacggcggcggcggctcgcaggagcaggagcaggatcaggccca

SEQ ID NO: 8198 - DNA, 321 bp, Zea mays
  Clone ID: LIB3137-001-Q1-K1-F12
ctagtcccctgctccattctcagccgccgccaatcccttcccgtgctccgcaaccgctgagtgagaagaagagatggccggcaagggcgatagccccgctatcggcatcgatctcggcacgacgtactcttgcgtcggcgtgtggcagcacgaccgcgtcgagatcattgccaacgaccagggtgaccgcaccacgcccttgtacgtctgcttcaccgactccgagcgcctcatcggagatgcggccaagaaccaggtcgccatgaaccccatcaacaccgtctttgatgccaagcgtctcatcggcaggaggttcaatga

SEQ ID NO: 8199 - DNA, 285 bp, Zea mays
  Clone ID: LIB3137-001-Q1-K1-F2
cgacgactcacattccacccactcacccactccatgtgcggccaagctctccaccagcgccgacgcgccggcctcggtgcggctctccgcagcagcgcaggcggctgcgatccagccctcctctccgcgcttcttcttctcctcgctggccgggaccaacccggccttcccgcatcgccgcatcgccattgccgtcgatctctccgacgagtccgccttcgccgtcaagtgggccgtgcagaactacctccgccccggggacgccggcgtgctgcttcacgtgcg

SEQ ID NO: 8200 - DNA, 424 bp, Zea mays
  unsure (1)..(424): unsure at all n locations; Clone ID: LIB3137-001-Q1-K1-F3
ccaagaagtaccgcaagatgaaggagaggcttgtcggcgtctctgaggagaccaccacgggtgtcgagaagctctaccagatgcaagagaccggcgccctcctcttccctgccattaacgtcaacgattccgtcaccaagagcaagtttgacaacctgtatggttgccgccactcgctccctgatggtctgatgaaggccactgacgttatgatcgccggaaaggttgccgtggtctgcggataccgtgatgtcngcaagggttgtgctgctgccctcaagcaggctggtgcccgtgtcattgtgaccgagatcgaccccatctgtgccctccaggctctgatggagggtcttcaggtccttccccttggagggacgtgtctctgaagctgacatcttcgtgaccaccactggcaacaaggata

SEQ ID NO: 8201 - DNA, 327 bp, Zea mays
  unsure (1)..(327): unsure at all n locations; Clone ID: LIB3137-001-Q1-K1-F4
ggcaaatgttattaaagggtattcattacataagtcatgtaatctcaatgtgggtgatgagtactgctttagtacgaaggagttatggttcatcatctttccttctgattctgaaaggattactatctctgaaacacgaaagatgaatgacgntctttatacccgacctcacttaatccgtgatcatcttatgagggccactgacgttatgatcgcccgaaaggttgccgcggtctgcggataccgtgatgtcggcaagggctgtgctgctgtcctaaagcaggctggtgcccgtgtcattgtgaccgagatcgaccccatctgtgc

SEQ ID NO: 8202 - DNA, 250 bp, Zea mays
  Clone ID: LIB3137-001-Q1-K1-F5
tttagatgttactcaaggttatccataccattcttattgtaatctcacagtccatcatcagtgctgctttactacaaaagaggcatgagacatcatctctccttttgattctcaaagaattactatctctgaaacacaaaacatgaatgacaacctgcatgcctgcccccactcgctccctgatcgtctgatgagggccactgaccttatgatcgccggaaaggttgccgtgctctgcgaataccgtgat

SEQ ID NO: 8203 - DNA, 387 bp, Zea mays
  Clone ID: LIB3137-001-Q1-K1-F6
ctccgcagctcgaataaagccccctcctcctcttccagtcttcctcctccgcgcttcagtgttccgagcgccacgattccggttcttgcagagtagcgcagagtgccggaggaatctgttggattctcctgctactggttcggttctttgggagttgttggcggtgtgccttgagcgatttggtgcgccgcggattgttgtggggtgagggtgatagcagagacaagggccgtgtggagagccgaggaggagggaagggaaagggggcgcaccgcgcatgggcgggcagtggctgggggaggggatgccgccgtccaacctgcagtgcttcttggactgtaccacccccaccgtggacacgcacatttctcccaagacgaatggacg

SEQ ID NO: 8204 - DNA, 397 bp, Zea mays
  Clone ID: LIB3137-001-Q1-K1-F7
gaggccgggaagctgcagcgtatcgtgctggtcataatgagcaaagccaccagcgaggtgctcgagcgctggaacttcaacatcgtcaccgacgccgaggtcgtcgagaagggggccatcaaggagaagagcgacaaggagatcatgagggagatccaagccatcatgcgccagatcgcgtcttgcatcacctacctcccctgcctcgacgagccatgcgtgttcgacgtgctggcctacacggacacggacgtcgacgctccgggcacctgggtcgagagtgacgccaagctcatcgacaacccgcagatggttaagctgcactccttcgacaccaagattcataaggtggacacgctggtgtcgtacaagaaagacgagtgggacgaggaggagt

SEQ ID NO: 8205 - DNA, 425 bp, Zea mays
  unsure (1)..(425): unsure at all n locations; Clone ID: LIB3137-001-Q1-K1-F8
gaagatggccggactcgacaccttcctcttcacctcggagtccgtgaacgagggacaccctgacaagctctgcgaccaggtctcagatgctgttctggacgcttgccttgctgaggaccctgacagcaaggttgcttgcgagacctgcaccaagaccaacatggtcatggtctttggtgagatcaccaccaaggccaatgtcgactacgagaagattgtcagggagacatgccgcaacattggtttcgtgtcgaacgatgtcgggcttgacgctgaccactgcaaggtgcttgtgaacattgagcagcagtcccctgatattgctcagggtgtgcacggccacttcaccaagcgccccgaggagattggagctggtgaccaggggcacatngttgggtatgcgactgacgaggaccctgagctga

SEQ ID NO: 8206 - DNA, 434 bp, Zea mays
  Clone ID: LIB3137-001-Q1-K1-F9
ctccccgcgggccgccagaggcaatttcgccctcgattcgaccccgattcgtccgcccgcgaccgggattccctccgccaagcgcggatctgaacgctgcgctccgtgtcgccgctcgaatccgccatgaagggggccaaatccaagggcgccgccaaggccgatgccaagctggcggtgaagagcaagggggcggagaagcccgccaagggcaggaaagggaaggccggcaaggaccccaacaagcctaagagggctcccagcgctttcttcgtgttcatggaggaatttcgcaaggagttcaaggagaagaaccctaagaacaagtctgtcgctgcggtggggaaagctgctggcgacaggtggaaatccctgagcgagtcggacaaggctccctatgtagccaaggctaacaagctcaagctcgagtacaa

SEQ ID NO: 8207 - DNA, 329 bp, Zea mays
  Clone ID: LIB3137-001-Q1-K1-G1
cggacgcgtgggcaaggagagtacgtggaggagcagagccatggcttcatcggtggccgcgcgggcgagcacattcctgggcacccgcctggcggacccggcgccacagaacgggcgcatcgtggcccggttcgggttcgggttgggcggcaaggcgaagcctgctccgaagaaggtggcgaagacatcgacctcctctgaccggccgctgtggttccccggcgccgtggcgcccgactacctggacggctcgctggtcggcgactacgggttcgacccgttcggtctcgggaagcccgtggagtacctgcagttcgagttggactcgc

SEQ ID NO: 8208 - DNA, 332 bp, Zea mays
  Clone ID: LIB3137-001-Q1-K1-G10
acgctcctgcccaccagactattgatcgttagcctgtctcgttccactgacatgtgggcgaggtggtcgcttcaccggcgacgtgaggcggaacagcgctactggaccctggtgccgaaccatcggtttgtggacgttctacccgaaggcgggctccagcggcgcctcatgcgtataggacctgcgcgttgcagggggccatcccggcgaactcagcggagcccttaaccacctcccactccaccacttcgttctcgacgccgtgtacgccgggtaacacggccgcggtggatgcagcagcagaaaccgcgcccacagtgacatcgagcccg

SEQ ID NO: 8209 - DNA, 338 bp, Zea mays
  Clone ID: LIB3137-001-Q1-K1-G11
gagcgatcccactcccgatcagcagctgatcgctcactcttgcagctcgatcattctttagctgctctagctctagccctagctagtagctagccactcggtcgtgtagtcatcagccttctgatcgtcacccatggccactgccgaggtccagaccccgaccgtcgtggcgaccgaggaagcgccggtggtggagaccccggctccgcccgccgccgtgcccgaggaggctgctcccgccgccgaggccaaggtggaggagccagctgccccggcggagaccgagccagctgccgccgctgagcccgaggcggcccccgtggcggcggaggaagaga

SEQ ID NO: 8210 - DNA, 203 bp, Zea mays
  Clone ID: LIB3137-001-Q1-K1-G12
atcgaccttcaagtctcgctacgtagcagttcaataaaaaaagcagccgcaatggcgagcggcaccatggccctctccttcacggccttcgccggcaaggccgtgaacgtgccgtcgtctttcgccttcagcgaagcccgcgtgacgatgcgcaagacggcggcgaaggccaaaccagcggcggcgttcgggagcccgtggta

SEQ ID NO: 8211 - DNA, 320 bp, Zea mays
  Clone ID: LIB3137-001-Q1-K1-C4
cggacgcctggtcacacacacacacacacacacacatacacacacacacacacacacacacggggacgggtgttttccaaagccgagtgtgtttactaacaaccagctagctcgggcggcagcaggcagccatcatgtccgaggagaagcaccaccacttcttcaaccaccacaagaaggacgaggagcagcctcccggcgagtacagctactccgagaccgaggtggtcaccgtcaccggcgagggcgagtactagaggtacaacaaggaggagaaggagcacaagcacacacatcacctcggctaggacggcgccatc

SEQ ID NO: 8212 - DNA, 61 bp, Zea mays
  unsure (1)..(61): unsure at all n locations; Clone ID: LIB3137-001-Q1-K1-D12
ggtccgganattcccgggtgcgagcccaacgcgttccgctcgcacaaccanaactcgcaat

SEQ ID NO: 8213 - DNA, 71 bp, Zea mays
  unsure (1)..(71): unsure at all n locations; Clone ID: LIB3137-001-Q1-K1-E9
accggtctcggaattncccgggntcgggacccacgcgnntccggtgggngtgcgtgtngcgtctcgaagcg

SEQ ID NO: 8214 - DNA, 325 bp, Zea mays
  unsure (1)..(325): unsure at all n locations; Clone ID: LIB3137-001-Q1-K1-H1
tagaggtgggttggcttctcctccccctccttttcgggttcgggttcgtgaggttctccggggttgggtttcgtgggtgagcggatcgagatggcggcgtcngatgttgagtaccgctgcttcgtcggcggcctcgcctgggccacggacgaccactcccttcacaacgccttcagcacctacggcgaggtcctcgagtccaagattatcctcgatcgggagacgcaaaggtcccgcggcttctgcttcgtcaccttcttcacggaggaggcgatgcggaacgccatcgagggcatgaacggcaaggagctggacgggcgcaaca

SEQ ID NO: 8215 - DNA, 373 bp, Zea mays
  Clone ID: LIB3137-002-Q1-K1-H7
aagcagcctaaataaatcgtatcatctcacctgttcagtttccttctcctcttcccgcagcccgggttgccgaccaggttccaccgttccagagtagccaagcgaatcccgagtctggttcgcgcgatggcggaggagcagtccaacccccagccccagcaagcggaggagaaggagggtattgtggagcagcagcagcagccgaggagggccccgaagctgaggtacctggacttcgtccaggtggcggcggcgcaagccgcgatgtgcctcgctgggctctacgggctcgccaagggaccacgccggccgcttcggcccagcgttgacgccgtcgagtctgctgtcaagggcgtcgttagccccgtctacg

SEQ ID NO: 8216 - DNA, 180 bp, Zea mays
  Clone ID: LIB3137-003-Q1-K1-A3
tattgctgtacgggccacctggttcgggaaagactcttaatgctcgtgttgtcgtacatgggtttcgactccctccccgcgccgccgatcgccgaaaccccgcgtcgcgtcgcgtagaggagagggaaagcgacctcaggagggcatatcaagaagcagagaagaatgctccatctatca

SEQ ID NO: 8217 - DNA, 123 bp, Zea mays
  unsure (1)..(123): unsure at all n locations; Clone ID: LIB3137-003-Q1-K1-B9
ccggnctggaatgacagcaccgacgcacgcgtacgaacgcgagcggccgctctagatgatccaagtttacgcacgcgtgcatgctagggcatagggctactatcgtgacacctaaatgcaatt

SEQ ID NO: 8218 - DNA, 314 bp, Zea mays
  Clone ID: LIB3137-004-Q1-K1-E7
ctggtttgtcacttcttgtttcggatctatagatgcaaaaacactactgcagtcaagtgaaggatatcgatgcacacgtcttatactatcctcgcacaactgaatcacggagcttctgttttaataccactggtaccgttcaaaataccgacctcttcatcaaatatatcctcccctgtgaggttcaagggctgttcatatcccttaataacgtgaaatcataacacagattgcatttaacctccttatcaaacttatctactgaatgatttatatataattccttatgacacaacactgaacaatttcgcatt

SEQ ID NO: 8219 - DNA, 120 bp, Zea mays
  Clone ID: LIB3137-004-Q1-K1-F3
tatggatgtatgtgttccctcagcacattgacatcttgtatatatgcccaaaaatgaatgtgaaccatgtggagtgtttctgaaaaaaaaaggagctgaaccctggttggttgttgtagc

SEQ ID NO: 8220 - DNA, 272 bp, Zea mays
  Clone ID: LIB3137-006-Q1-K1-B9
cccgggccgacccacgcgttcggtaacacctaaataagaatttccattctcctttatcttatgcatgaaggttcctgttgcactgtgatgattaaatgcctcatcgattacttcaaatgttcgttctctaataaatccaatttgtacaagcatgttatggctgtacattatcagtgtcgtccttttttgttccaattctctgtgtgtttcaagatgttttcttactatcacgttaattacaatcattatatatctatctctcattttcacac

SEQ ID NO: 8221 - DNA, 435 bp, Zea mays
  unsure (1)..(435): unsure at all n locations; Clone ID: LIB3137-006-Q1-K1-D9
tactgttgcagcttggtaggatatgcctcgacattctcaaggacaaatggagccgagcacgtagattcgaacagttcttttgaggtctctatatttgtctatgtgtgtcagtatacatactttatgtttttgccaacaaaaacgttgttcttcttttttaacctaataaaccaaatgtacaaagggaagctgntctctttcatcttggcagcaccgaaatacgactttataaaccttgttagttactatgcctgttatatccatgaacatgcttgctattctgacactattctggctttcagtatacaggctctactgagtgcaccaaatccagatgaccctctctccgataacattgcaaagcactggaaatccaatgaggtagaagcttgtgaaacaaccaaggagtggactcgcctgtatgcgagcggtgca

SEQ ID NO: 8222 - DNA, 438 bp, Zea mays
  Clone ID: LIB3137-006-Q1-K1-G9
gtgtttcctcagtggactagtgtgaagctgtgcttagcgtagcggaagggaggaaggacaaggcaaggcaactgatggcggcgggcggcggaggcggctcggcggcgccgttcgtgtggaagacgtacacgatggtggaggaccccgggacggcaggggtgatcggctggggcagcggcaacaacagcttcgtcgtcgccgaccccttcgtcttctcgcagacgctgctccccgcgcacttcaagcacaacaacttctccagcttcgtccgccagctcaacacctatggcttccgcaaggttgatccggaccggtgggagttcgcccacgcgtcgttcctgcgcggccagacgcacctcctgcgcaacatcgtccgccgcggcagcagcgccgccggtgccggaggcggaaagaggaaggacgccagccccacggagc

SEQ ID NO: 8223 - DNA, 60 bp, Zea mays
  unsure (1)..(60): unsure at all n locations; Clone ID: LIB3137-007-Q1-K1-E2
ttcccgggtcgaacccacgcccgtccggcccggcacaaccaccnnntctgactcctcttc

SEQ ID NO: 8224 - DNA, 278 bp, Zea mays
  Clone ID: LIB3137-007-Q1-K1-G7
tagagctttctattgaggacaagcaggttaagcaccgagcggattggctatgtgatgatgctcgtccagcaaaggtagccaaagaactgtccggtgggcaaggtctatcacttgacctcaatttagcagttggggcattggatgacaccgacggctcacggaattccagtgatctctctgtggaacaagagcatgaaaaagggcaccttgcagtcaagtgttcaacaccagcccctgactatgatctgttgaatctcgttgatgatgcccattgtgtt

SEQ ID NO: 8225 - DNA, 54 bp, Zea mays
  Clone ID: LIB3137-008-Q1-K1-H7
cccacgcgtacggctttgtggtgctttcgcaaagcgtcatcacgtaatccgaac

SEQ ID NO: 8226 - DNA, 391 bp, Zea mays
  unsure (1)..(391): unsure at all n locations; Clone ID: LIB3137-010-Q1-K1-B5
tattgctgtacgggccacctggttcgggaaagactcttattgctcgtggggatgcaagggagactggagcctttttcttcctgatcaatggtccagagattatgtcaaagctggcaggggagagtgaaagcaatctcagaaaggcatttgaagaagcagagaagaatgctccatctatcattgtcattgatgaaattgattccattgcacccaagacagagaagaccaatggtgaagtagagcgtcgtatcgtttcacagctactgactcttatggatggactgaaatctcgttcccatgttattgttatgggtgctacaaaccgaccaaacagcanttgatcctgctcttcgaagatttggaaggtttgatcgggaaattgacattggag

SEQ ID NO: 8227 - DNA, 422 bp, Zea mays
  Clone ID: LIB3137-011-Q1-K1-G11
ctcgtgtcacgtcatacagacgaaggctggctgcaccgtgactgaaggaccagtagtggtcggttctgcacctatagcagacgctagcactgggtcatctcctgtcactactaggcccagacctcagtcaccataccctaattatccagatttcaagccaccatcctcgccttcgccgtcagcaccttaatttggcaagagtacaagaaaccgggtctagaggatattaaagaagttgagttgttcatatggagctggcatctcaccagaggtgtatgttgtattatgagcgtgacagtgtggctaagtcactgtggcaagttttctgcagcagtaaatatatgaggatgccaagttcaagctctgcaaggtgaggtctgttcagtttggccagaaaggcatcccgtacctaaacacctacg

SEQ ID NO: 8228 - DNA, 345 bp, Zea mays
  Clone ID: LIB3137-012-Q1-K1-A6
cacggccgcgaggactcgccgatcgacgtcgtcgtcgtgaacgacagcggaggcgtcaggaacgcgtcccacctcctcaagtacgactcgatgctcggcaccttcaaggccgacgtcaagatcgtggacgacacgaccatcagcgtcgacggcaagcccatcacggtcgtcttcagcagggacccgctcaagctcccatggggtgagctcggcattgacatcgtcatcgagggcaccggagtcttcgttgacggccccggcgccggcaagggcattcaggtcggtgcgaagaacgtgatcattacgggttccggcaagggcgccggcattccgaactatggcggc

SEQ ID NO: 8229 - DNA, 368 bp, Zea mays
  Clone ID: LIB3137-014-Q1-K1-H4
cgtccgcatgaatctggatcagtaagcgatcgaagtgatgtttacagcttcggggtagttatgtgggagcgtctaacaggacgtaaaccttatgacagttcgtatccacgagctgaacaacatctagtacgatgggccacttctcaactctatgatattgatgccataacgaagatggttgatccttccattcgaggacaatgttctgataaggcattatcccgttttgctgacattattagccgctgcattcagcatgaaccagaattcatgccaccaatgtctgaagttggcccaagacttaactcgcatggtaagtaatgtatcaagggcttccatgtaggctatcccttaaacaatggtaaaat

SEQ ID NO: 8230 - DNA, 204 bp, Zea mays
  Clone ID: LIB3137-015-Q1-K1-B10
agagtattgatcactgagcacaaccacagatgtataatgaatcctcttgcatttgcctagagcactatgtatttctgcggcgtggttcgatttcagttttaccaatggaggtcatgtgtgttcagagaacaatgatattgttgtcttgtatctgcatgtaaacgttgttatctttgagtcagatactctacctggtttcaccaa

SEQ ID NO: 8231 - DNA, 334 bp, Zea mays
  Clone ID: LIB3137-015-Q1-K1-G12
aagccattgatgaagcaatagaatcttataatgatccctgacacattttgaggttgtgactggtctctcatttcttgtattctgacaacagaatgttgacattgccatcattgaagcaggtcttggtggagctagggatgcaacaaatgttattcgaagtactgaattagcagcatctgtcataacaacagtagggagggaacatctggttgcattgggtggctccctgcaaagcatagcaatagcaaagtctggaatcatcaaacaaggacgaccggttgtgattggtggaccattttcagaagatattgagcaaattattcgtgacagggca

SEQ ID NO: 8232 - DNA, 77 bp, Zea mays
  Clone ID: LIB3137-016-Q1-K1-C9
ggctaaaggatccatgcttacgtacgcctccattcgacgaaataactcttgtatagtggcacctaaattgaattcat

SEQ ID NO: 8233 - DNA, 344 bp, Zea mays
  unsure (1)..(344): unsure at all n locations; Clone ID: LIB3137-016-Q1-K1-H9
cggacgcgtgggcggacacgtgggcggacgcgtgtgtttgcggagacgagacgagacgangcgacgcgagtcncgaggagtcgaggaggatcggagctcacgcaagatgaacaggaagccaggagactgggactgcagggcgtgccagcacctcaacttgagccgccgagacatatgccagcgctgcaacgagccacgtggagttgctgatcgtggcggcgcaggaggaggaggcgactacgccagcttcggtggccagggtggctcctccttcggcggcagctttggcgctgctggctctgacgtccggcctggtgactggtactgctcctgcggcgcgcaca

SEQ ID NO: 8234 - DNA, 411 bp, Zea mays
  unsure (1)..(411): unsure at all n locations; Clone ID: LIB3137-018-Q1-K1-B3
taaaaaggcatcccccaggaaagcatcgacctcctgtcactcgcctcgacgcgcctntgagagttcggagccgtcggcccgtgcgcctccctctgcgcctaccgtccacaaggccaatagttttcaagcggcaatggcggaccatgctaaccaacccactgtccttcataagctcggtggccagttccacctgcgctcgatcatctctgaaggtgtacgggcccgtaacatatgcccatctgtctcatcttatgaaaggagatttgccacaaggaactacatgacccagagccttttgggcccttcgatgtctggtagcggtggcatcaatgtcccagtgatgcggaccccgctctgtgctaatgctcctgctgagagaggaggcaagaacttcatgatcgatttcatgat

SEQ ID NO: 8235 - DNA, 304 bp, Zea mays
  Clone ID: LIB3137-019-Q1-K1-B8
aaaaaaaaaataggttaaaaagttaaattccaattttcttttaaaaaaaaaaaaatggcttattaaaaaaataaattttaaatggacccccaccaacaaaaaaatttaaatccccaccttttcccaaaaagaataattcccccccccaaaaaacaaaaaaaataaaagttaaaccttccaaaaaaaatggggacaaggaaaaaaaaaaatttaagggccgcccttttaaaaaatccaaacttacatacccgtgcattcaaagttataatttttttttatggggacctaaattaaattcactggc

SEQ ID NO: 8236 - DNA, 448 bp, Zea mays
  Clone ID: LIB3137-020-Q1-K1-A8
gagccacataatggccgtccaccctaccaccacgccggccttgtccccgcgcgcgcgcgtgtcgccgcacaggcctcccatctcctccctggcggacccctcgtcctccccctgccatcgcatcgtcagtttcaaaagcaggaggctgccacttcgctctctccacatcgccgctgccgctgccgccggggcagaggaagaagaggcgcaactaggtggaagtgtgaacgcggtcgacgaggaggaagcggagaataaggtggtggtgcccgagagacaggacccgatgctggtactcaagttcatctggatggagaagaacatcggcatagcactcgaccagctggttcctggctatggcagcatcccgttgagcccgtactacttctggccgcggaaagacgcgtgggaagagcttagagccaagttggaagagaaagagtggatc

SEQ ID NO: 8237 - DNA, 451 bp, Zea mays
  Clone ID: LIB3137-020-Q1-K1-B4
aagacagtgaaaaggatggcgagaataaaaacagttttcagttcactaggcagactgtgaacgacatctgcttgagaaggcaatggccgatgccacagtacaggtgtataaacgagggtggccctgcccatgccaaaagatttgtttatgcggtaagggtaaatacatctgacggtggatggactgacgagtgcattggagagccaatgccgagcgtgaaaaaggccaaggactctgccgctgttcttctgctcgagctgctgaatcgaaattaccgtggcaagcctgatggaaaataaccattgattgatgttctgtggtggtaggtagacgtggaagcatccatcattctgattatacccccatgcagtgcttttcagcaaagcaaatgacctttgttgatgttcttggtggcggtattggtgatatggaggcattcaatgcaagtata

SEQ ID NO: 8238 - DNA, 459 bp, Zea mays
  Clone ID: LIB3137-020-Q1-K1-C8
gaaattcctttatgggtcaagaatcctgactatgatagaattgattggctgaataggttctgggaggggatgtggccttatcttaacaaggctatctgcagaactgcacaggatatcgcgaagccaattattgctgagaacactgcaaagtataagatagactctgttgagtttgaatcacttactttgggtagcttaccacccacctttcaagggatgaaagtctatgtcacagaggagcaagagctgataatggaaccatctcttaaatgggctgcaaacccaaatattactgttgctgtaaaagcctatggtttgaaagctactatccagattgtggatctacaagtctttgcatcacctcgcattactctgaagccattggtgcctacatttccttgctttgcaaaaatccttgtctcactcatggagaagccacatgttgactttgggctaaaa

SEQ ID NO: 8239 - DNA, 404 bp, Zea mays
  Clone ID: LIB3137-021-Q1-K1-A11
ggctagaacgaaatcagatccttctagccggtagaaccaaaggagcaagcacgagaccatgggtggctgtgctcgggcgacagcttaagacaagccatggaccttgatggtctaacacttagcagaggaacgcacgaggaaggacgaggagggtaggcattcgccgacgtggactccgccgccggaacgagctcgtggccatgctgcaacaagtgcggtttctgctacctgtctgacccgccgcagagccaatgcctggacttctcgacggtcgggtgccacccagagtgcaagcagtgcatcaggtacaccgccgacggtggcgtcgacatcccgcccgtgcacgcctaccgctgcgccgacatcctcttcaacttctgcgagcgccgctgcactcccgccgc

SEQ ID NO: 8240 - DNA, 108 bp, Zea mays
  unsure (1)..(108): unsure at all n locations; Clone ID: LIB3137-022-Q1-K1-A11
acgcgacgcgtccgnnttttatcttcagctttttttttagaggatacaagcccacccacacgcgcatgcgacgtggtggcttttcaagagggtctgggcacttcaatt

SEQ ID NO: 8241 - DNA, 389 bp, Zea mays
  Clone ID: LIB3137-022-Q1-K1-G4
cgctccgagaatcttcgctcctcgcggcgccagcagctcgtgctactgttgggtcgcgctactccctcgcggatggaagcgcctgcagccgccgagactgttcgtccacgccgccgtcgagacatttctcccctcttccaggccgccgccgcctcaggtactgccatagaaattcaagtgcccaaactgtggggagttagggcatagaaagagcagctacaagtgtctcctcaatggaacaaagaaaagaagccgaggaaaaacacaacaaaccaatggtttcccaaaaatgataatggttcttccgagcaccagcactagaatctatgtcacatgagcttgttaccactgagcagctgggaaccactgcatgttcatcacagcaactt

SEQ ID NO: 8242 - DNA, 459 bp, Zea mays
  unsure (1)..(459): unsure at all n locations; Clone ID: LIB3137-022-Q1-K1-H10
gaacgaccgggccgacccacgcgtnccttaggatccttctgttcggtgttttcagcgttcacctgttgccaccatgcagagaaacatgtctaatccatgtactacaccaatcatatccatcttctgctcttgttattactgatgcatctactgctaatcccccaccacactccactacccatttagactcctttggacactaactacatccactgacttaaacatcccttttagttttgaaaaaataaccacagcattcctaaccactatgaattaaaagcactaccacatatatactgttactgtctgaagcatgctttttactatactcctggacccacacttttactacacaattgtatgggatctaaatacacagactagactttcacccctacaccaattttctaatagaaaagattttttatcttcaacatacaaattttaaccccaactttt

SEQ ID NO: 8243 - DNA, 167 bp, Zea mays
  Clone ID: LIB3137-023-Q1-K1-A10
ccgaccttacatgttatccacaccattcaagttctcctctctattatacctgggaacacttcaaataccaacgggacatacatatcctacatactccagcaaacatctcacttctcagtaagaagaaacttagaacttacaccctatatactcaccttattactgac

SEQ ID NO: 8244 - DNA, 268 bp, Zea mays
  Clone ID: LIB3137-023-Q1-K1-A3
ctaacatttaccctcatttcctctacaaacctgtcttcacactccacgaaagcccaccatcagctccttacactactcccactcacccaatcacacatcccaaacctttattataacaaaccaccaccacaccgacataactcgcaactcaaaacacctacgatgaactcaacacaatatcaactcacttaaatcaaactccatttcggtaatccttctcctctcacttacacaaacaactgtcatatacatccttatcactcctgaa

SEQ ID NO: 8245 - DNA, 348 bp, Zea mays
  Clone ID: LIB3137-023-Q1-K1-B12
gaccggaacgaccggaccgacccacgcgtgcgtacggctgcgagaagacgacagtatggggatattatccaaactctcaatttgggcataaagatcttggaggcttcttgcgcgtgagacatgcagatggattgacaagtgcaccaattcgttccaagcagtaaagctaaaacaaaagtttgagtactcgtatccaccgaaactttgcttgtacttaggtacatgaatatctaattaagaaaaaactttgcaagaggtagtagaaaatagtaaattaaattgctgaaatttaattcaaccaggataaaggatttaaccttaattttaatttatttatttaattccaaa

SEQ ID NO: 8246 - DNA, 405 bp, Zea mays
  Clone ID: LIB3137-023-Q1-K1-B2
tactgatcactcctggcctctgcgaaggaaagaagaggtgggggaggctggtttggtggcgtgtaccgatttgcagcagctgatggcggcgcctctgctcccctcttccgtctccgtgctcctctcgctccacatcgcgctgctgctggtcctctgctccagccaggtaggagattcctgctcctcagtgcgggactgcggcacgggcctctactgcggcaactgccccgccgcaggcaggaccaagctctcctgcatcagggacctagcccatccacccaacctccatgggaaagggccacccttcaacaaggactcaagggttcgcacccaccatttcctttccattcttggggaacccgcccgccctgggggtgagagggtcaccgtctaccaccaggaaga

SEQ ID NO: 8247 - DNA, 308 bp, Zea mays
  Clone ID: LIB3137-023-Q1-K1-B9
atgtctccattttgacattttttcaatacttcttgtggccctcgtctgtaacgatcagagcggagcctctatttctaacgggaataataacacaagggtcttccgtgcacaacatacggtgatacaaagtctatgtgcataccacatctgtaaagcttattgcggtcttgctttggtcatatctcaaaggtcgtgtaaattgtattacaacccaagttaaccagtctttttatctcacaaactctactacttaccaagcgtacgataccataaatgagcactcgcatcagctaaagaccaaaagatga

SEQ ID NO: 8248 - DNA, 200 bp, Zea mays
  Clone ID: LIB3137-023-Q1-K1-C9
gacgttctacatctattcacaaactcgattttggatccacacaaaatcttcaaacctaggcacattgtaaaccttctcgagaccttctctcctacaccaaaccactttttctacccatctgttcaaaaaccacatctccaatatttcttttaatactgaatgtatccatatccattccatcattatcggaattatatata

SEQ ID NO: 8249 - DNA, 438 bp, Zea mays
  Clone ID: LIB3137-023-Q1-K1-D1
gaaggctgatattggtattgcagtagcagattctactgacgcagctcgtagtgcttctgacattgtcctaactgaacctggccttagtgtgattattagtgctgtgctgacgagtcgggcaattttccaaaggatgaagaattacacgatctatgctgtatcgattaccatccgtattgtgcttggttttatgcttcttgcgctgatatggaagtttgacttcccaccatttatggtcctgatcattgccatcctcaatgacggtaccattatgactatctcgaaggacagagtaaaaccatctccacaaccagacagtttgaagttagctgagatttttgcaactggagtagttcttggtggttatttggccatgatgactgtcattttcttctgggctgcatacaagactgacttcttcccgcggctgtccacgtc

SEQ ID NO: 8250 - DNA, 162 bp, Zea mays
  Clone ID: LIB3137-023-Q1-K1-D10
cacgggagtccagatgtttgaaagcgctgttatcatatactacctgaaggcaacatattgcctgtacccaagctcgtagtgatgcatcacaaatggtgattgtaatgttgcgtgtagattcagttctttccggtaataaaaggaaaagaaatagtgggccat

SEQ ID NO: 8251 - DNA, 236 bp, Zea mays
  Clone ID: LIB3137-023-Q1-K1-E12
agcgtcttctgcctgccttgtcacccgtatctttgccttgtgaagaaaagtcttctcctgcctcttctctaatgaaatcctcttctcatctacaactgagcctccttctctctttcggatcacatgctttctcctatccaacatcgtttaatctcgctctcttattccattgttctaaactcattgttcctttttttctatgacattctcgttccaactccattctttttatcaat

SEQ ID NO: 8252 - DNA, 256 bp, Zea mays
  unsure (1)..(256): unsure at all n locations; Clone ID: LIB3137-023-Q1-K1-E8
ctcctctatcnacgcaccaccccaaagacctccctccgcactcccagggtgttcaaccctgcnccctttccccctcactacatgtcctactccctctccccccgccgccaaaaccgccacgtctttcccccacaatgtccaaaataagcttgcctccccggctcatcacctcacagtcttgaccctccgtaccaatccttgcaacttacgctccttgatttatccccatcttcccccccattcccctttttttcaa

SEQ ID NO: 8253 - DNA, 329 bp, Zea mays
  Clone ID: LIB3137-023-Q1-K1-E9
gacggactaccccaatgaggagaacgtttttttcggacccactgtcctcgaattagactgccgctttcgtatcactcacatctttacatcctccactgacaccttcattcatgtcactgatttgtctgggaggtaaactttgttccagatcactggtctcatgaaaaataaaactcatcgatatgagaccgttccttattcagctatgctagctgctcaacatagtatacatccttacaacgacactccatatcaccctcctgcgcattaagcttcgtgcgactggacgcaacaagaccaagacccctggacctgtgtctcactctgct

SEQ ID NO: 8254 - DNA, 389 bp, Zea mays
  Clone ID: LIB3137-023-Q1-K1-F12
ccggcacttaacccgactcaacctctaactcatgtatacagcctctcgagcccatcaaggaggagtatcataccctattctatgcccacttcaaccagctagaccaagttgtggccgtcgaagctaccgacagacctgtgatcccattccacccacacagggagcacaagcctcactcgacacctgaggaccgtcttccttatgccaccaaggcttctgaccacctcatgcaagtgtttggcaaacatatcaccttgagtcatcacgacatccttaccctctttgccgaccacaccttgataatgagcctcatagagcacactgtttttgacggtgcctagactactaacccttagctctttgacaactcttacttcaacgaacttctg

SEQ ID NO: 8255 - DNA, 338 bp, Zea mays
  Clone ID: LIB3137-023-Q1-K1-G11
cgagactcctcgactgcacgcctctgtcctgctgtcatacgaccgcatcggccggcgatcctaccgcatctggaagcgcgggccggctccggaccactgacctcgctggctcacggcttccgcatccagcgctcggaccagacgtcctcttctcgggacggcgccaggcccgagatgccggggcaaggagctgactcggctcgctaataggctggcgcacaagataggagatacggatgcctgggggggcggcgtgcagcccagagtctgagggggcatgaggtacgctatggcaagaccacatgtaccgccagggatcgacgcacgctgcagagctc

SEQ ID NO: 8256 - DNA, 305 bp, Zea mays
  Clone ID: LIB3137-024-Q1-K1-H9
cggaccactgcctgtggacgccagccgcggcgtgtacctggtgctgacgtccccggacgtcgccgtggacgacttctgcgggcaggtgtgcggctttcactacttcaccttcgcgtaggtggtcgggtccacgctgccgtacgcgtgggtgggaaactcggcgctgcacgtgcccctaggtgtgcgcgtacccgttcgcggtcccggcgtacgtgcgcgggcgcaggcccgagtccccgtccaacggctacgtcggagtggacggcatggtcagcgtcatcgcgcacgagctcgcgtagatggcg

SEQ ID NO: 8257 - DNA, 238 bp, Zea mays
  Clone ID: LIB3137-025-Q1-K1-A10
gaataaccaagcccaaacacacggcgactgtgcatgcgctggtggacacagctacagcagcgagacactacgcaggcgtggaggccgccagccgagaccccggacatggcggcggtaatggctacaagacgacgcggcagacgaccagcttgcctctatgtacgcggagagaattatcgcggcctgcgccaaaaaagacaacgagatttctgtcctaaaggacgatgcggatcgaacg

SEQ ID NO: 8258 - DNA, 319 bp, Zea mays
  Clone ID: LIB3137-025-Q1-K1-A12
cagttaagcttgagcaagaaaggaacaggtctagcagtttccagaagctgaccaatgcacgcggacaagtagtaatgcttgtcatagcccatagggcgagagagtgtgtgtttgtagaaagatgggcgatgtttgcagaattcatggtagcttgtaattaagggggtgtttggttttagagactaaaaattagtgcctagtaaccaaacactacctaagtatgctccagtgctggaagtgttgtcattgtgtgaattattaatgcttgttgtcgcacgtacgtacgctagcagtgtcattgctgaagcgggctattttg

SEQ ID NO: 8259 - DNA, 271 bp, Zea mays
  Clone ID: LIB3137-025-Q1-K1-A4
caccaccgacgaccccgacccaccagcacaacttttaaggccttcagcgctttcttcaccaccaactaccacccaccaactaacgtcatcgaatagatcacagatctaacaaccgatggaggtgttcttaacacagtattccagaaagcaaaatatgatgctatagcgccatccgacagcctccccttcgatgatcttcattacaaaggtacacttccttagactgcttaacctctctataccaccccatgaaaataactctattttctca

SEQ ID NO: 8260 - DNA, 273 bp, Zea mays
  unsure (1)..(273): unsure at all n locations; Clone ID: LIB3137-025-Q1-K1-A7
gcaacggctgggactcgtacgcctgggcttttaaggcgaagatggacgcggtgacgctggtcatccacaacccgggcgtggaggaggacccggcctgcggcccgctcatcgacggcgtcgccatccgtgcgctgtacccgcccgcgctcgccaggcgggcggggggaaacctgctcaagaacggcgggttcgaggagggcccctactttcttcaggcgcgtnctgggcgtgctcgtcccgcccacatcgaggacgaccactcgccgttccccg

SEQ ID NO: 8261 - DNA, 135 bp, Zea mays
  Clone ID: LIB3137-025-Q1-K1-A8
accaactaaaggtcatggaagagatgatcgcatctcacgcttggatggatggtgttcttaagacagtagtgcggaaagcaaaagatgatgctatagcgccatccgagagcctgcccttggttgatgttcattacg

SEQ ID NO: 8262 - DNA, 204 bp, Zea mays
  unsure (1)..(204): unsure at all n locations; Clone ID: LIB3137-025-Q1-K1-A9
gaacaacgaanacaatcggcacgcgcacctcttatccgctggtcgacacacctacagctccgggaccctactacggcggcgatggcgtcatccggcgccccgggcccggcggcggcaatggccagtgacgacacggaggacgaccagctcgcctccatgtacacggaagatatcatccgggcctaccgccttcacgacaacaac

SEQ ID NO: 8263 - DNA, 359 bp, Zea mays
  Clone ID: LIB3137-025-Q1-K1-B10
ttcatatttagacaatgaacgagatgcagattatgattgagcaaaagtcatttttagaaatgaaattagtcgacccatttgatgacatgagcaaacgtttcgaatgcaccatgattgtaacaagaattgctgacaatgagccctggttctatcaaggatgcacaaaatgcaatacatcaacaaaatatgaaggaaaaacatacatttgtaaacaaggccacgcctcctctcagatggtccacaggtataaaatatctctatatgccactgatggcacatgtgagctagaattcgtgctctttgatgagagagctacatcacttattgcgaaaaccgcagagaaattactgagacacagc

SEQ ID NO: 8264 - DNA, 338 bp, Zea mays
  Clone ID: LIB3137-025-Q1-K1-B12
gcgtacggcaactgctatcctggggcgctgtccgccttcagcgagactacgtcgggagaattccgtatgaggtcgccgtgaagcgagggcacgtccagtgcgcggcgctgctgaacccgtcatccgcggagcccctggtctggccgctcgctctcaagttcatcagcgagctggaacccgacgccaaatctctgctcgaagcagccctgatggaggccaacacatagagggagaggaggatcctgaaagggaccaagaatgcattgccgtcgccaccgcaccacgatgacggcgcttatgacaccgccattgctgatgcgagcgactccgacgtgtgc

SEQ ID NO: 8265 - DNA, 350 bp, Zea mays
  Clone ID: LIB3137-025-Q1-K1-B2
cccatccatagtgaaaacaaccagcagccagattcttctgaacaggttataggcagtgccactgctaaggataagatgttaacatcgtcaaataaagcaggtgctttcagctccagcttcaagcaaccgccatctgttcttttcacatgattgaagaggctttgctagcatttttatcatgctcgcttggccatggccattcatctatcttttgttactaacttgaggttaaacggagcagagtagcttgggaaggcttgcagtaaaagattgaagaggctttgctagcatttttgttagccatttcttatcctgcttcatcggcaacgtttctagttacagaagtgtca

SEQ ID NO: 8266 - DNA, 341 bp, Zea mays
  Clone ID: LIB3137-025-Q1-K1-B4
gttgggagctcccttgctagaacagcgaccatggccctcgttagccccagcttcaagataaccaatcaaatgcgtgccaggggtatgccacttgaatgccaatttcctcataggctaccatctgtagcttgttcaatgttgttaaacacacaaccttcacaacgaaccaaccataaagattgtggtttgcttcaagtgcaatctacagaaaaccttatgcagtcgccagtatctttcagtgacttctctgtttcagtgtgtgctcaagaggatggtctgataaagctacaggtaaatgtatctggcacaatgacagattttatctttgagaaagttttcac

SEQ ID NO: 8267 - DNA, 326 bp, Zea mays
  Clone ID: LIB3137-025-Q1-K1-B7
ggagcgagcagccaaggaaaggagtcaagcaatggagaaggccgtcgacaggcagcgggtcctgctgcggcacctgaaccccgccgcggcggccagccccgccccgcacgccatctccgcaagcgcgtgcgcggcgggggacagcgcggcgtaccaccggaggccggccttcgccgacgacgtcgtcatcgtcgctgcttacaggacggcaatttgcaaggccaagagagggggtttcaaggatacctttgctgaggacctcttggttcctgtcttcaaggctttggtagacaagacgaagctggacccaagtgaagttggcgaca

SEQ ID NO: 8268 - DNA, 326 bp, Zea mays
  Clone ID: LIB3137-025-Q1-K1-B8
cgtcacggggctcctgcgtccgtaaggcaccttcgcagcggctgggctggatcaacaggccgggcgatccgtcttgtacccctcctcctgcgggtcggcgtttggggatcatggctgcgcgggcggctgacgagaacaggagaccggcggtagggaagcccgcgccaggcgtccgagacatggcgagccggcgcgcgctcacggacatcaagaacctcgtccgggctgccccgtacccttgcgccgtcgccaagaagcccatgctgcacaagagcagaagggacgaaaagcaggcagcgttggcaagcagcctgaccatgacaagg

SEQ ID NO: 8269 - DNA, 386 bp, Zea mays
  Clone ID: LIB3137-025-Q1-K1-B9
ggtgatcgtgatggaaatccaagagtaacattataggttacacgggatgtatgcttgttggcgagaatgatggctgctaacttgtatttctctcagatcgaagatctaatgtttgagctctcgatgtggcgttgcagtgatgagcttcggattcgtgcacatgaactacatcgctcttcaaaaaaagctgcaaaacactatatagaattctggaagcaagttcctccaaatgaaccatatggtgtcatacttggtgatgtcagggataaattgtactacacacgtgaacgttctcgtcatctattgacatctggaatttctgagattccgaggaggcaacttttactaacgttgcacagtttctggaaccttctgagctatgttat

SEQ ID NO: 8270 - DNA, 224 bp, Zea mays
  Clone ID: LIB3137-025-Q1-K1-C1
tcgtgtttgtaagtctaagctcctcttcccagtcaccaactcgatctgccctagtcttcccaggtcctacttaagtcatggtccagtaggccgtgcagtcctagagctcgagtgatctccttggctcttgtagcctatgtttccccggagttaatcccctcccaatatcttggtccatctgcccagagcttggtgtaccagtccctaggtggtgaccatcatcg

SEQ ID NO: 8271 - DNA, 397 bp, Zea mays
  Clone ID: LIB3137-025-Q1-K1-C10
ctctcgccaggtcttgctgctgcctgcatttttaccctcctctccgggagagcctctctcgcgttcagctcccctgcccttccacgccacgccgaccaaggcgccaaaagaaaacgccgcgccactacgtggcgagggagtttctcacggctgcgttgcttgccacctcgtcttcgcggagggcggagggcctcgccgccacgacgatggaggttgccgaggcgcccgcgcccgcgcccgacgaggacggcctggacgagcgtggcgtggcgctgcacctggacctcccgaggctgctggccggcgtcgtctccggcgccctcactggcctcttcgctctcgctggagctctgacgggggcggtcaccggcgcggtggcgggcagagcttccgacag

SEQ ID NO: 8272 - DNA, 405 bp, Zea mays
  Clone ID: LIB3137-025-Q1-K1-C11
gccctcacgcacgcggcccaactagccttttttaccctagctagatttagaaaaaaagttgggccccaatccgaaccgacgaggagctcgccgccgtgagatgtccgagtacgacgagcgctaccagggcaacgccgacatgcccgcagccgaaggcggctatccgcaggccgagtacgccgccgccgccgcgcctgccgccgggggttcgccgcccgcagacagcaagccctccgggttctccgaccacgccgacggccgctcctcccagcaccagcatgagacacaatcacatgacagtggttcctcgaaatctcgagaaagggaccgagaacgcgataagggcaaggatagggagcgtgacagggatcgcggccgaaaaaaggggagggaccgagacaggga

SEQ ID NO: 8273 - DNA, 385 bp, Zea mays
  Clone ID: LIB3137-025-Q1-K1-C12
cgacaccgtgcacggccaatggaagcactttttcatcaccctcaaggactccaagacgctggtcttcggcgagaagccggtcaccgtctttggcatcaggaaccccgaggagatcccgtggggtgaggctggtgctgagtatgtcgtggagtccaccggtgtcttcactgacaaggacaaggctgctgcacatctgaagggtggtgccaagaaggttgttatctctgccccaagcaaagatgcacccatgtttgttgttggtgtcaatgaggacaagtacacctccgatgttaacattgtttgcaatgctagctgcaccacacactgccttgctcccctcgctaaggtctttcatgacaactttggcattattgagggcttgatg

SEQ ID NO: 8274 - DNA, 349 bp, Zea mays
  Clone ID: LIB3137-025-Q1-K1-C2
cggccggccaggcggaaaaccgccgacggctggtccaaaatcaccggggggttcttcttcggcggcatctacggcgtgcatctgggcctactgtctcctctacgtgctcgatctgcgctacttcttgaagtagaaatcatcaaagatgcgtatataatgctcctgccgatcctcctctctagctgcatgggatgtagagtccagtggtccttgggtcattacactccagcggtgatcagcaccgcgtataaatgtaattcctctgctctgcacatggatggattgggatgtaacctgatcaatgtttgtttaaatgcctgttcatcaagtgatgggagccatcgggcgg

SEQ ID NO: 8275 - DNA, 378 bp, Zea mays
  Clone ID: LIB3137-025-Q1-K1-C3
cggaaacaatcgggggaaaacggtggctcgtggagtaacaactccacgacatccaaggacaaattaaaacattactcgatcgccaagaggagttgtatgaacgccaggcacagttgaaggctttgctcgaagcatctaaattgaccagaaatacaacaattaacacatcttcagttgctccggaagattggtctgggagcttcccatgggatctggaggctgacgataccaggttcaatatatttggcatttcctcctaccgatcaaatcaacgagaaataattaatgcagtcatgagtggaagagatgttctggtcataatggcagctggtggagggaagagtctatgttaccagctcccagctgtacttcgtgatg

SEQ ID NO: 8276 - DNA, 426 bp, Zea mays
  unsure (1)..(426): unsure at all n locations; Clone ID: LIB3137-025-Q1-K1-C4
cggacgcgtggngtggatgaggggcatcggttgttaaacaaagattccaagttgtttggtcagcgtaaagattataataccaaacatcgtgttctattaacggggaccccagtccagaataatcttgatgagcttttcatgcttatgcacttccttgagggtgaaagttttgggagtataactgatctccaagaagagttcaaggatataaaccaagacaagcaaattgagaagcttcatggaatgctgaagccacatcttcttcgaagattcaagaaggatgttatgaaagaacttcctccaaaaaaggaattgattctacgagttgaattgacaagaaaacagaaggagtactataaggcaattctcaccaagaattatgaagtgttagcccgtcgtaatggtggacatacatctctaataaac

SEQ ID NO: 8277 - DNA, 279 bp, Zea mays
  Clone ID: LIB3137-025-Q1-K1-C7
aggaactgagcggtggggcccgcgcggctcttatatcctgttcgctaccgtgatgtttacgctagtccagagggtttatcttccgtcctcttctttggtggtgcccattttggtttttgattgcaagggccctttttgtcaagtggtaatgctggggtcattctcggcttcagcaaacccatgcattaaccaacatggactgtggatcgatggatgcttttactcctgtcaagatttgttcttaattaattctaaggaaaaaatggtgcttcttggtgc

SEQ ID NO: 8278 - DNA, 377 bp, Zea mays
  unsure (1)..(377): unsure at all n locations; Clone ID: LIB3137-025-Q1-K1-C8
cacacacacacacacacacacacacacacacttacacacacacagacaagtggtttccaaagccaagtgtgtgtactagcaaccagctagctcgggcggcagcaggcagccatcatgtcggaggagaagcaccaccacttcttcaaccaccacaagaaggacgaggagcagcccgccggcgagtacgggtactccgagaccgaggtggtcaccgccaccggcgagggcgagtacgagaggtacaagaaggaggagaaggagcacaagcacaagcagcacctcggcgaggccggcgccatcgacgncggcgccttcgcactctacgagaagcacgaggcgaagaaggaccccgagcacgcgcacaggcacaagatcac

SEQ ID NO: 8279 - DNA, 366 bp, Zea mays
  Clone ID: LIB3137-025-Q1-K1-C9
cggacgcgtgggcttgtgaccctccctcagctgcgtcgcgtcgcatcctacgatccaaaggtgtctctgctcgcaggtcgcagccatggctaagaactacccgaccgtgagcgccgagtacagcgaggctgtggacaaggccaggcgcaagctccgagccctcatcgccgagaagagctgcgccccgctcatgctccgcctcgggtggcactccgtggggacattcgacgtgtcgtcgaggaccggcggtccattcggcacgatgaagcatcagtcggaattggctcacggcgctaacgcggggctggacatcgcggtgcagctgctcgagcccatcaaggaggagttcccaatcctatcttacgc

SEQ ID NO: 8280 - DNA, 348 bp, Zea mays
  unsure (1)..(348): unsure at all n locations; Clone ID: LIB3137-025-Q1-K1-D1
cttaccagcagtcaccactcccaagccagtaccgagtcctacgtacgagcagtcgcacgcaagtgtcaagagacgaaacggtcgacatggctcgcacgcaatctgccgtagcggtcgccgtggtggccgcggtgctgctgctggcagcggcggcgacgacctcggaggccgccatcacctgcgggcaggtgagctccgccatcgcgccctgcctctcctacgcccgcggcacggggtccggcccctccgcgtcctgctgtagcggcgtcaggaaccttaagagcgccgncagcaccgccgncgacaggcgcgccgnctgcaactgccttaagaacgccgccaggggcg

SEQ ID NO: 8281 - DNA, 212 bp, Zea mays
  unsure (1)..(212): unsure at all n locations; Clone ID: LIB3137-025-Q1-K1-D10
cacccttttgacttcagtactcaaacaaagctantcacaccactcccctttgattccagcagccgtcttatgcccacgcgacggcgcctctcatcctcaccgctggccccaccccgcctgcccctgccccactcgccacctcttttgcttttcacccgagacctcaattttcctttggctccgttaaaggtctttgtcccccccagttctcc

SEQ ID NO: 8282 - DNA, 431 bp, Zea mays
  Clone ID: LIB3137-025-Q1-K1-D12
cggacgcgtgggcggacgcgtgggctcgtctccgttagcgcgccccgagccccgacagccgggctccttctagggtttctctctgtttcgtcctcatcgaatcggagtttcgcatggagtcatcgcggtctcggaagcggacgcgccaggcacatgactgtgccgccgcgccgccaccagagcgagaagtggtagcgaggggtggcgcgtcgccaccatggagggaggatgaccgtgatggacacttcttattcgaccttggcgagaacttgacccgccgatataaaatcttgagcaaaatgggagaaggtttgggttttctgcaatctgtcgtctcctcttctgctgagtatctccgttattattctaatgaagagggctacgagtttgattttcgtatgtacatttgggcgtgttttggaatgctggga

SEQ ID NO: 8283 - DNA, 372 bp, Zea mays
  Clone ID: LIB3137-025-Q1-K1-D3
ctccgcccagcagcagagcacaccatcctctcatctcggatccccaagccctcgcctccagctcttgccacggcatacatcccctgctcggacctacacccggccgcgtactcgccggtggccagcgccgctgcatcgcccttcctagcgtcggccttggcaccgcttccccgagcgccccagtcgagctcgcccatcctatgctctagccctttctccacgccgtcgctgagctcgcccctcccctcagccatggacacgacgacctgcagaccttcttggtggccaagcccatcttcctgctcgcgccccctcttttccacctctgcgcgtatcagctcgggcaacccccatggcgtttcctccctctcg

SEQ ID NO: 8284 - DNA, 379 bp, Zea mays
  unsure (1)..(379): unsure at all n locations; Clone ID: LIB3137-025-Q1-K1-D4
cctccggccgcctcgccaaaccgctccccttcctctgccccgccgcgaccccgccgtcccgcgcctgccgccacgacgtgctcggctccgggaccgccaactacggccacgggagcatcgtccgctcccgcggcgggggcgccgtgcccgccgccaccgacgacgacgcggtcctcaggcgcgccatgtcggccgccgaccccgaggaggtcaagagggccgggaacgacctgtacaggaagggctgcttcgagggggccctcaagctctacgaccgcgccctcgccctctgccccgacaatgctgcgtgccggggcaaccgcgccgncgctctcattggcctcgaccgcctcggcgaggccgtcaaggagtgtgagga

SEQ ID NO: 8285 - DNA, 332 bp, Zea mays
  Clone ID: LIB3137-025-Q1-K1-D5
cggacgcgtgggtctcaatcagccagcccacagtcaattaatctctcgctagagggccggccggccggctagctaaccacgagagaaaaaaaaaagatcgcgattgctttcgcgcgcgcgctgcgagaggcgctccggccatgtcttcctccccagcagacctctactgcgtcctcccccgcgttctcatcgtctcgcgccgcactgtccgcaagaacaagttcgtcgacttcgtcggtgagtaccacctggacctcatcgtgggctacggcgacgtgccggtgatcgtgccgcgcgtggcgggcgtgcatgcgctgcttgactcgttcgag

SEQ ID NO: 8286 - DNA, 357 bp, Zea mays
  Clone ID: LIB3137-025-Q1-K1-D7
ggccagattcgcgcagtctaagcttcgaatctgcgcatggaggcggcagcagtagccgcggcgctcaggtcgcctaccgccaccaccgccgccgccgccgctggccccacgtggcggcccgcggccccgggcgccgcctcgctcgcctttgaccggagacgcagcttcgccttcggctccgtcaagggtctcgggcggcagcagctcacctctaggtctactaggaggcgaagcagtgtggtcagggcatcctggtccccctcggagtctctgccaccgtcctcgtcgatcgcgcctctcaggatggaatcgccggcggggcagctactctcgcaaatcctgcacacgcacccgcac

SEQ ID NO: 8287 - DNA, 326 bp, Zea mays
  Clone ID: LIB3137-025-Q1-K1-D8
caacccaacccatcaccctctacacgaacctttcagatccccgagcagaaccctacccaacgcaggggaggtcttcctcctctagcgcgccgccgctgccggtggggtgctgggcggtgcgcaccgcccgaaccacctccttgctagggtctgacttgacacggatcttctcagctggctagcgcacgcggctcaggccgccgtagagcacctgtgcgacccctaggcagtgatggacgctttccagatcattgggcacgacaacgtcacgtctttttcggtcgtcgagtacaacgtcattgacgatcacacagtgtgccagacag

SEQ ID NO: 8288 - DNA, 420 bp, Zea mays
  Clone ID: LIB3137-025-Q1-K1-E10
tacggccaccaccaccggccaggaagcaagtttaaaccctaaccgccggcgacgccagcacgatggcccgctacgaccgcgcgatcaccgtcttctcccccgacggccacctcttccaggtcgagtacgccctggaggccgtccgcaagggcaacgccgccgtcggcgtccgcggcacggacaccgtcgtcctcggtgtggagaagaagtcaacccccaagctccaggactccaggtccgtgcgcaagatcgcgtgcctggacacccacatcgctctggcatgcgcggggctgaaggcggacgcacgcgtgctcatcaaccgcgcgcgggtcgagtgccagagccaccgactcaccgtcgaggaccccgtcaccgtcgagtacatcacccgctacatcgctgggctgcagcagaagtata

SEQ ID NO: 8289 - DNA, 354 bp, Zea mays
  Clone ID: LIB3137-025-Q1-K1-E11
gcggcggcggcggacgtttgatccggcgtgttcttcttccacgagcaccaccagaagaagggggaccacaaggaggccgaggaggccggcggttagaagaagcaccacttcttcggctgattgatccctcccgtatcgtcgtccctccccgtgtgctacgcgtgcgtgtgtgagagtgatatccagcgcccgccgtgttgtgcgcgcgtacgtatgtatgcgctcgtgtgatgcacgaataagcgtggctacataatctatcgtatgtatacgtgtgtgtatgcatgtgctagtgtatgatcgtggtacgacgaccgaacaaatgtatgcaactgatgattacttacatgttta

SEQ ID NO: 8290 - DNA, 322 bp, Zea mays
  Clone ID: LIB3137-025-Q1-K1-E3
cgacccttcaaccttttccggcttcgggcgccatctcaacacctacggcttccggaaggtcgatccggaccggtgggagttcgcgcaccgtgtccttccttcgcggccagacgcatctcctgggccagatcgtccgccggagcagcggcggcaagcgcaaggacgacggcaacggcgccggcgccggctccgccgacgacgaggacgcggtggccatggaggtggtccggctgaggcgggagcagcgggccatcgaggagcaggtggccgcgatgtggcgccgcgtgcaggagacggagcgccggcccaagcagatgctcgc

SEQ ID NO: 8291 - DNA, 338 bp, Zea mays
  Clone ID: LIB3137-025-Q1-K1-E4
tttctggagcaggctagggttccgtcctcgattctcgatccgccgagtgcacactcacctttccccacttccgatcgaatcgatggcccgccgagggcgagaagaagatgataaccctcaaaagctccgatggcgaggagttcgaggtggaagaggcggtggcgatggagtcgcagaccatccgccacatgatcgaggatgactgcgccgacaacggcatccctcttcctaacgtcaactccaagatcctatccaaggtaatcgagtactgcaacaagcacgtacatgccgccgcagccgcagccgccgcctcgaaggccggttccgacgacgtgggt

SEQ ID NO: 8292 - DNA, 402 bp, Zea mays
  Clone ID: LIB3137-025-Q1-K1-E7
gggcagactgctctgatgcaagcttgtctatatggtcactggaaagttgtacagattctagttctttttaaagctaatattcacaggagagattgttttagcggcgcgaccgctattcattttgccgcgctaaaaggtcatactcgctgcattcggcttcttgtggctgattatgtgcctagcttgtcagagttttggaccattatgcgtggaaagtccacagatgaaatgaaaaagggtgcctttgatgccgcgtctctccagagactagttaatggaaagtctgatggtggtgtcaccccgcttcacttggcagcccttcatggacatgctgagagtgtacagttgctgctagaccttggagcctctgtctctgaggtgactgtcaatgatggttcaaca

SEQ ID NO: 8293 - DNA, 331 bp, Zea mays
  unsure (1)..(331): unsure at all n locations; Clone ID: LIB3137-025-Q1-K1-E8
gagtcacttcgccacgaacaaaagcgcattgttctcgctgtcgtcactcctcgtcacccagcgcacgaacagaggcaccacccagcatggccctgcaggcggcgctcctcccatccaccctctcatccgtccccaagaagtgcagcctcgccgtcgcggcgaaggacacggcattccttagcgtatcccagaagaaggtgcaggcggcgtcgctgtcggtgagaacgcgggtggcgacgacggcgcctgtggccacgccggggtccagcacggcggccaaggatgggaagaagaccgtgcggcanggcgtggtggtgatcacgggcgcgtc

SEQ ID NO: 8294 - DNA, 344 bp, Zea mays
  Clone ID: LIB3137-025-Q1-K1-E9
gaaaaccgctccaatccggaagctgaaaatttcagaagaatccagaggcgactccaggtttgtcggcgatgctgcgagcgggaggcgggcggctcctcgccccggggctccgtcggctcggcctgggcacaggcgcctccggcgaggcgggtcctgccgcggcggcggcgggggtgagggcgtaccacgagcgggtggtggaccactacaacaacccgcggaacgtaggttccttcgacaaggacgaccccaacgtcggcactgggttggtcggcgcgccggcctgcggcgacgtcatgaagctgcagatccgcgtcgacgagaactccggcaagatcgtcgac

SEQ ID NO: 8295 - DNA, 330 bp, Zea mays
  Clone ID: LIB3137-025-Q1-K1-F10
ctcacgtccatccctctctctcgtctcgttctttagcagggccggctggagcgcccacccctccctccagcccggccccagctgcgccgccgcgccggtcgtagacccaacgcccgccgcccagcccagcgcgccctccggccgtgaggcggagaggatcgggcgggcctcggggcgagcgccacgcgtagacggcggttgaggagcctgagaaaacaacgctcctccttcaagatcctgatccctacgcgcaggcgtaggagattgtattccgtctgattaatcgacggagagcaagcgggtgttgcggctgcgcgagcatggcgggcg

SEQ ID NO: 8296 - DNA, 214 bp, Zea mays
  Clone ID: LIB3137-025-Q1-K1-F11
ctcacgcacatccctctctatcgactcgggtcatatcaaggccggctgcagcgcccacccgggcgtccagcccggacacaggtgctctctcttgccgctggcagaaacaacccccgccaatcagacgagatcacgctccggccgaaaggcataaaggatcgggcggccctcggtgcgagcgccattcgtagacaccggcttaagaccctcttac

SEQ ID NO: 8297 - DNA, 208 bp, Zea mays
  Clone ID: LIB3137-025-Q1-K1-F12
gtaactggtattcctatgtataagaccttgttgtatctgccgcatctgcatctccaatcggggagtctttacacagcggaagggcgccgacaaaatcattctctgatcaagaaccatcttcaaaagaatcaaacgctccgaacagatctttacaaggacgtacgcaacctattgtgacttgttcaccgctaaccacctcaaatgatct

SEQ ID NO: 8298 - DNA, 206 bp, Zea mays
  Clone ID: LIB3137-025-Q1-K1-F3
caccatgagggagtgcgttttgatccacattggccagaccggtgtccaggtcacgctacgccacccgggagctgctctgcctagagcaaggcataaaagctgactgtcataaacgccgcgacaacaccattgggggaggtgatgatgctaacaacacctacgttactggaactggtgcttggaagcaaaagccccatgcttttttt

SEQ ID NO: 8299 - DNA, 380 bp, Zea mays
  Clone ID: LIB3137-025-Q1-K1-F4
ggaaccaactagcccgaccgcctttttccttgcaaacgaaacaaaccaaaacaatggcgacagcgagtgagatcgcggcggtgggcgtaataggcgcggggcagatgggctcgggcatcgcccagctcgccgccgccggcggctgtgccgtacttctcctcgacgccgaccccactgccctctcccgtgccgtcgtctccatctccgcctccctacggcgcctcgccgccaagggccagctctcccaggccgcgtgcgaggactcaataaagcagataaggtgcgtctccgccgtgcaggatctcagggacgcggatcttgtgatcgaggccgtcgtggagaacgaagacgtcaagaagaagctattcgtggagctggat

SEQ ID NO: 8300 - DNA, 328 bp, Zea mays
  Clone ID: LIB3137-025-Q1-K1-F8
tattaccaccatcctgtccatcagcaggcactccagaccatgcaaaggcagcaacaggcacctacgttcgacccaaatacagggatgtattatgttcctatgcagcagaacgcacatcaggcatatggcgtgcctcctggtgcacaagtcactttgccacctccgacccttgttgatacaacgccaaagccaaccgtgccaattcctcagatggcagtaaggcctgaattgcaacaacctggtgtctaccgaacaacagctgcggctacccctgctccagcgcctaatgcagcacctggatatgctgggatggcctaccaccatgtca

SEQ ID NO: 8301 - DNA, 417 bp, Zea mays
  Clone ID: LIB3137-025-Q1-K1-F9
atagcaagttatcgacgcgcgcgcaacttgttacaaagacgtggtgatggcacctgcgggcaatggcgcggacgaccatgagctgccactcttccatccgtccccgtgcgctcactactacgtgcagagcccctccgcggcgtcgcacacgctgagccacccggcgtccgactccatggcgctcatcctctccccgttcccgaacctccaccacgacgcggacgcccgccactccagcgacggccgcgaccacgagcacgaccacgaggaggcctcgcgcctgaccctgtcccgctactcctcctcgcgcggatccaacagctccttcccggtcggtgacaagaagcccggccgccggcggcatgcgctgtcggggcggtcgtcaggccgccacgacgatggcgacgacgacgcgga

SEQ ID NO: 8302 - DNA, 399 bp, Zea mays
  Clone ID: LIB3137-025-Q1-K1-G10
gttcgggtatgcgaccgatgagacccctgagttgatgcccctcagccatgtccttgccaccaagctaggtgctcgtctcaccgaggtccgcaagaacggaacctgcccctggctcaggcctgatgggaagacccaggtgacagtcgagtaccgcaatgagggtggtgccatggtccccatccgtgtccacaccgtcctcatctccacccagcacgacgagacagtgaccaatgatgagatcgctgctgacctgaaggagcatgtcatcaagcctgtcatccctgagcagtaccttgacgagaagaccatcttccaccttaacccatctggccgctttgtcattggtggacctcacggcgatgctggcctcactggccgcaagatcatcattgacaccta

SEQ ID NO: 8303 - DNA, 301 bp, Zea mays
  Clone ID: LIB3137-025-Q1-K1-G11
gagaccctactcagctagtacctaccggttatatgttctcatgtctgctgacagatccgccggagccggtggatacgatacgggcgcgtgctgctgaggaagcctcccatgagattgccatagtttacactcacatgggaagccatgtagatcaatagcaacgctctcgcgcactctatgaccacgtagcctgtcaggcgctgctgcactcactatgctggtccattcactgaccgtgaacgccatgcatacctgaaaggcgacgtaccacgttgtgcatgcgatgaactggcacccgttc

SEQ ID NO: 8304 - DNA, 297 bp, Zea mays
  Clone ID: LIB3137-025-Q1-K1-G12
gagagagtcataaagttatacctacccatcttctatactcggatcggctagcataacgggcggagcctgtggatgcattacggacgcttaatacagggtgtgccatgcttaaatacccaccagtttacgttcccagctgcacgcctgcctacgatgaccactctgtaagacctatcaccagtttagggacaacagctcgctaaactgctcatttctagagatggacagataacacgacaacgttttcaactgcaccacccccaacttcactggaattatctctttaatggaccccag

SEQ ID NO: 8305 - DNA, 345 bp, Zea mays
  Clone ID: LIB3137-025-Q1-K1-G3
ctttcccccaaatccaccgcgggctcgagctcgtaggagaggagacgagacgacccaagactttctcacccccctttgcttcctgcgcaattcctgcggcagcgcctttctctctttcaatggacagcgactacgttgccagcctgctcatgggcatgggctcatccgcccctgcgctcgacttcgccgcgctggacgccgggttcctcgaaacgctctgcggcggcggcggcggcctcttcggggtgtccggggtcgccgcgggggccgggtgtggcggcgtgtccccggaggggtcgtcggtgtccgacccggcgtgggcgcgcgccaaggacgatgacaatg

SEQ ID NO: 8306 - DNA, 344 bp, Zea mays
  unsure (1)..(344): unsure at all n locations; Clone ID: LIB3137-025-Q1-K1-G4
gacctgtccgaatcgcgtgcaggtccctcgctgtgagtttcgccgagggccctcccgcctcccccctagattcacgacggagatggcgttcgagctcacctaccgcggcggctgtgcgttcacagacgacagcgccggcgccggtggctactccccgaagctcgtcaagccgtttgcgtggctgccccgcgcgggccgctacgccgttggcgagaaccggccgctgttcgcgctcgccgggatgctcattgccggcgccgtcatctgcatcgtctcgccggtccgctcctgctgctgctgcgncggcgcctcgtgctactgcaacaacaacccgatcgtccgtt

SEQ ID NO: 8307 - DNA, 186 bp, Zea mays
  Clone ID: LIB3137-025-Q1-K1-G8
ggtctatccctccgtgtcaaccccctcctctttagttctaattgcagttcagcccctggccggtccgccgggccaccggaaggagccgctcgccggaggaagccccccatcttcttgccctgcggcgggtttatggggttctcgctgtaccccatgaagacgtccacgcggttgctctggagcact

SEQ ID NO: 8308 - DNA, 351 bp, Zea mays
  Clone ID: LIB3137-025-Q1-K1-G9
cagaccatactgttcgttgctggcataaactccctgttccagacgttattcgggacgcgccggccggtcgtgatgggcggctggtacgtcttcgtcgggccgaccatctcgatcgtcttggctggacggtacagcaatgaagcagaccctcacgagaaatttctgcggacgatgagggggacgcaaggcgctctcctcgttgcgtcgacgattcagatcatacttgggttcagtggcctctggcgcaacgttgtcaaattactgagtccgcttgcagctgttcctcctgtatcactggtcgggttcgggctctacgagcttggcttttcaagggtagcgaaatgcgtggaa

SEQ ID NO: 8309 - DNA, 392 bp, Zea mays
  Clone ID: LIB3137-025-Q1-K1-H10
gccgacatcaagaagttccaggccgccacgcgcctccgcgccaaggacaagatcgagggcggcaagatcatccgcgtcgaggcgcaccccatccccgagcaccccaggcctaagagggtgtccgggcgggtgacgctggtgggcgatgccgcggggtacgtgaccaagtgctctggcgagggcatctacttcgcggcgaagagcgggcggatgtgcgccgaggccatcgtggcgggctccgccaacgggacgcggatggtggaagagagcgacctgcgcaagtacctggccgagttcgaccgcctctactggcccacttacaaggtgctggacatcctgcagaaggtgttctaccgctccaacgcggcgcgcgaggccttcgtggagatgtg

SEQ ID NO: 8310 - DNA, 262 bp, Zea mays
  Clone ID: LIB3137-025-Q1-K1-H11
gcaacgtccaaaatccagaccgctggtaggtgtatctcgtagacattgaacaacggctgcgtggcgagcgcctgcgccaccttcatccccctcgtctcggcgccctctgcatgcccgttcaagaagaccaccgtcgccaggttccggcgccgcacggcgacgtgcagggccagcagcggcggtggcggtggccggggcggcaaaaatgatggcctcctttggctgccccggcgggacgtgatgctcaacggcctgtccagtg

SEQ ID NO: 8311 - DNA, 360 bp, Zea mays
  Clone ID: LIB3137-025-Q1-K1-H12
gctggtcataccagattcatgctacttcatgactcgcgtagcgaggatggaataaaaagcttggttcaagaggtccatgaactttacatcaagatattcctcaacccgctttacctgcccggctctcgcatcacatcctctcatttcgataccaaggtgagggcgctcgcgaggaggtacctgtaatatgggcatatgctggggtttcatcgtaaagcagacacgccgatttttttgtgccatcatcatctgataacacatacgtctaatttttcttggcgttggctttgttatgaccgacctatggatcattttttttcgagaacaaaatgacttggcgataattttcaaactttaaaa

SEQ ID NO: 8312 - DNA, 361 bp, Zea mays
  Clone ID: LIB3137-025-Q1-K1-H3
caattattcaatcggcagagcatatattgactatgtttgatgaaagaatagcttcatttgctgaacaaaagttcaagagggatggcatcgaagtgtgcacgggcttcagagtgataaaggtatctgatgatttgattacaatgaagagaaaatctgatggtgaggaggtatcagttccttatggaatggctgtttggtctgctggcattggtactcgtcctgtcgtcatggacttcatgcaacaaattgggcagaccaatcgtcgtgccttggcaactaacgagtggttaagggttcgcgagtgtgaaggcgtctatgcaattggcgactgtgctacagtgagtcaaagaaaaataatgga

SEQ ID NO: 8313 - DNA, 383 bp, Zea mays
  Clone ID: LIB3137-025-Q1-K1-H5
cccacgccgtccgaattgatccaatcgacaaagcatatatggactatgtttgatgaaagaatagcttcatttgctgagcaaaagttcaagagggatggcatcgaactgtgcacgggcttcagagtgataaaggtatctgatgatttgattacaatgaagagaaaatctgatggtgaggaggtatcagttccttatggaatggctgtttggtctgctggcattgatactcgtcctgtcgtcatggacttcatgcaacaaattgggcagaccaatcgtcgtgccttggcaactaacgagtggttaagggttcgcgagtgtgaaagcgtctatgcaattggcgactgtgctacagtgagtcaaagaaaaataatggacgatatttc

SEQ ID NO: 8314 - DNA, 330 bp, Zea mays
  Clone ID: LIB3137-025-Q1-K1-H6
tcgccaaggacgtaacggagttgatcgggaacacgccgttggtgtacctcaacaaggtgaccgatgggtgcgtcggccgcgtcgccgccaagctcgagtccatggagccctgctccagcgtcaaggataggattggctacagcatgatcacggacgcagaggagaaagggctgattactccaggcgtgagtgttctgattgaaccaactagcggcaacacaggcattggactggcctttatggctgctgccaagggctacaaacttacactcacaatgcctgcctccatgagcatggagaggaggatcatattgaaggcttttggtgctg

SEQ ID NO: 8315 - DNA, 318 bp, Zea mays
  Clone ID: LIB3137-025-Q1-K1-H7
gtttggggtttgggtgcttctctacggccttcgccagcaccgagttccggacctccgccggctcgtctccgctccctcgcactcgcactcgcagctccggctgctattctgcagaagtcggtagattggttttcctcatgggtcgcaccatcaagaaggccaagaaggctcaatccaagaagtccaagaagaaaactgaatcgtcctcgtcgtccaaccctgcgattgcctctggtccggctaaggtctggcaaccgggtgtagatacactggaagatggggaggagctgcagtttgatcctcaggcttacaattatc

SEQ ID NO: 8316 - DNA, 342 bp, Zea mays
  Clone ID: LIB3137-025-Q1-K1-H8
ctcgtcgtcgcctcgctgtctcctccgccgttgcctgcgatcccgatcatggagggcgacagtaccaacctcgacgcggctatagagtcgctcctgaacgtggagaagcagatgaggctggccggcgatgtcgccggcacgcggaaggccgtcatcgacatcgtcgagctctgctacaaggccggcgcgtggaagacgctaaacgaccagatcgttctcctctccaagaggagaggccagcttaagcaggccattactgctatggttcagaaagcaatggactacattgatttgacaccagacattgacacacgcgtcgagctaatcaaaacactgagcagc

SEQ ID NO: 8317 - DNA, 356 bp, Zea mays
  Clone ID: LIB3137-025-Q1-K1-H9
cggacgcgtgggcggacgcgtgggcacggtctgcgacccgctggccaacgcgggcgccgtgcagcacaacgcggcgctccagtccgtgctcgccgcgctcgacccggccaaccgtaccttcctcctcctcgacctcaacacgcccttcgccgccttagtcgacggcgcggcggcggcgacggcggaggagaggttcgcggagccgaggcggccgtgctgcgagagcttcagcgccgacggccactgcgggcagcaggacgacagcggcaggcggcagtacacgctgtgtagcgacccgagcaagcttttttactgggacgacgtccacccgacccaggccgggtgggccgccgtcg

SEQ ID NO: 8318 - DNA, 316 bp, Zea mays
  Clone ID: LIB3137-026-Q1-K1-A1
cggacgcgtgggtcagatcctcgcatcgtccgcaccttatcctctcgactttacagtacctgctctcagctcctccctatctcaatggcatccgcgaatgccatctccaccgcctccctcctccggcccctctctcagggcagggcgacgaggtcacagcggttcgtggtgcgtgcgaacgccaaagacattgcctttgaccagaaatccagggcagcgctgcaggccggcgtcgagaagctggcaaacgccgtcggtgtcaccctcgggccacgagggaagaatgtggggctcgatgagtaccgcacccccaaag

SEQ ID NO: 8319 - DNA, 213 bp, Zea mays
  Clone ID: LIB3137-026-Q1-K1-A12
gttgcatctgctacctcgtctgagcgctattcctccactaactccatccttccttcgccggggagctacatcctactggatgggctccatcttggacgtgatgagctgcacccataacggcctcaggagctgctcgggggcaagtacaggctagagcggttcactttgtaccggctcctcacaagaaaaaacatcttgttgaagcggaaccaa

SEQ ID NO: 8320 - DNA, 273 bp, Zea mays
  Clone ID: LIB3137-026-Q1-K1-A2
agcactccaacttctccagcttcgtgcgccagctcaacacctacggcttccggaaggtcgatccggaccggtgggagttcgcgcacgtgtccttccttcgcggccagacgcatctcctgggccagatcgtccgccggagcagcggcggcaagcgcaaggacgacggcaacggcgccggcgccggctccgccgacgacgaggacgcggtggccatggaagtggtccggctgaagcgggagcagcgggccatcgaagagcaagtggccgcgatgt

SEQ ID NO: 8321 - DNA, 320 bp, Zea mays
  Clone ID: LIB3137-026-Q1-K1-A3
cggacgcgtgggcgcgcggccctgcttcctgctgcgatggggggcgagacgcacctgagcgtgcaggagctggcggcgtcgctgggcgcgctaccgccggagttcgtgcggtctgagcaggaccagccgggcgcgaccacgtaccgcggggccgccgtgccggacgcgccggtgatcgacatatcggagcccgggttcggcgcgcgcatggccgcagccgccagggagtgggggctgttccaggtggtgaaccacggcgtgccctcagcggcggtggcggagctccaacgcgtcgggcgggccttcttcgcgctttcgac

SEQ ID NO: 8322 - DNA, 336 bp, Zea mays
  Clone ID: LIB3137-026-Q1-K1-A7
ggactttcaaccaggcgaatatctcaatgttaaggaggttcattataatcaacatggacttcttcttttagaggggcaaggaatataccgactgggagagagttggtaaggaattagtttgaaatcctccttttgttttagttttattttcttcatgttaagtttttaaccttgtgcaatcttggaatagcagcctatgttttgtatagaaaaatattccgtataatattatgtgtatcacagtgatataacttctagaagacatgacgtacagagattacctacccatttacctcattaaacataaaatgatatgtgtgttcatatgcaaattat

SEQ ID NO: 8323 - DNA, 274 bp, Zea mays
  Clone ID: LIB3137-026-Q1-K1-A8
cgagaacacgatcgagcacacaagcacgattactcgtttaggagaaaccacaaaccaccaagccgtgaaagcatcatggagtacggtcagcaggggcagcacggccacggcgccacgggccatgtcgaccagtacggcaacccagtcggcggcgtcgagcacggcaccggcggcatgaggcacggcacgggaaccggcggcatgggccagctgggtgagcacggcggcgctggcatgggtggcgggcagttccagcctgcgagggaggagcaca

SEQ ID NO: 8324 - DNA, 262 bp, Zea mays
  Clone ID: LIB3137-026-Q1-K1-A9
accaattacaactacacacacctgaaccttttgtatgagaagtacaacgaccaacgttcggggatccttgcattcccatgcaaccagctcggtgggcaggaccctcgcactaatgaggagaatgtccaccttgcttgtactcccttcaaggctgagtatccaattttcgacaaggtgaatgtcaatggggacaatactgcacccattcacatgtgtgtgaagtgcagcacaggtatgctctttggcgataacataacatgga

SEQ ID NO: 8325 - DNA, 374 bp, Zea mays
  Clone ID: LIB3137-026-Q1-K1-B1
cttccacagggagtccggggccatgcagagctccgtaaagctcgcggtgcttgctcttctgctagcggcagcagctcaccacggtctgctgccgctgccgacggcgcgatgctactggctcaacccggagatctacgacgccggcgcgctgagccgacgcgcgttcccggatggcttcgtacttcgggaccgctgcgtcggcgtaccaggtcgaggggatggccaagcacggcgggcggggccccagcatctgggacgccttcatagaggttcccgggaccatccctaacaatgccaccgctgacgtgacggtcgacgagtatcatcggtacaagggaagatgtgaacataatgaagaacatgggctttgatgc

SEQ ID NO: 8326 - DNA, 389 bp, Zea mays
  Clone ID: LIB3137-026-Q1-K1-B10
atcacctatctatagacagagagaggaattttagctagctagcatggagagtggcagcaagaaggccgcagccggtgtgttggcgctgctgcttctccagctgatggtagcaccgacgacggcgacgtcccgcttgctgcagcaggcggatacctcccccttgtttggcctggacatcatcgcgagggagtttggccatccagatggaaccatcgtctgtagtgaatcctgtgtcttcctaccatgcgtttcgtcagtctttggttgccgatgcgaaaacaaagtctgcgtgcacgactgaagaaaccttcttcagtctctgatctttctctctcgtcatttgcgtgtgaagaaccagctccatctttgtaacgaatttgtgttgggag

SEQ ID NO: 8327 - DNA, 382 bp, Zea mays
  Clone ID: LIB3137-026-Q1-K1-B11
atcacctatctatagacataaagaggaaattgtgctagctagcatggagagtggcagcggggaggcctcagccggtgtgtgggcgctgctgcttctccagctgatggtaacaccgacgacggcgacgtcccgcttgctgcagcacgcggatacctacctcttgtttggcctggacatcatcgcgagggagtttggccatccagatggaaccatcgactgtagtgaatcctgtgtcttcctaccatgcgtatcatcagtctttggttgccgatgcgaaaacaaagtatgcgtacacgactgaagaaaccttccttagtgtgtgatctttctatctcgtcatttgcgtgtgaagaaccagctccatctttgtaacgaatttgtg

SEQ ID NO: 8328 - DNA, 403 bp, Zea mays
  Clone ID: LIB3137-026-Q1-K1-B12
acaaatttgctgacaagacagggacacctttggttaatggggctcatgatactgcaaagctggctggtctccttgaggtattcatcaagaagtatgtccagtgttatgggtgtgggaatcctgagactgacattctcatatcatagactcagatgctatcactgaaatgtgcagcctgtgggtttgtctcatatgttgacatgagggacaagctcacaaccttcatcctgaaaaacccaccagaacagaagaagggaggaaaagacaagaagaaggccatgaggagagctgagaaggaacgcctgaaggaaggtgaggctgctgatgaggagcaaaagaaactgaagaaggatgcaaagaagaagggtgcatcttccaaggagtctactgccaaaggttcaaa

SEQ ID NO: 8329 - DNA, 408 bp, Zea mays
  Clone ID: LIB3137-026-Q1-K1-B2
ccctctcccttcctcctcccacccgtctgacgcctctgacgccgccgcagcagcaacagacgccaacacctccgcgtatgacatccagatcttcgagcccacctccatcgaggagcgtcgtcgcctcctgatccagcggcgtcgcctccgactcgccgcctcccatgcctcgcggctcaccgttgcctcgcgcgtctcctccaaactcatcagcgccaccggcttctgctccagcggcgtggcatacgatctgccgcctccccttctcatggctcgtcgttgcctcccgcctcttccccaacctcgcccttgccgcccttggaggatcccaaatccgacgacgagctcagtaggcccacgcagacgcggatgtgctatgaacttcagattctgtatcgatggcaatgg

SEQ ID NO: 8330 - DNA, 415 bp, Zea mays
  unsure (1)..(415): unsure at all n locations; Clone ID: LIB3137-026-Q1-K1-B3
atcgccaccaacaggcagcttagcgtgacgcaccccgtgcacaggctgctgctgccgcactaccgcgacaccatgaacatcaacgccctcgcgcgccagaagctcatcaacgccggcggcatcttcgagatgaccgtcttcccgcgccagtacgccatcgagatctcctccaaagtctacggcagctggaacttcaccgagcaggccctccccgacgacctcatcaagcgaggcatggccgttccagatccgtcgagcccctacaaggtgcggctgctgatcgaggactacccgtacgcctcggacgggctagccgtgtggcacgccatcgagcagtgggtgacggagtacctggccatctactaccccaacgaacgcgtgctgcangccgacgtggagctgcatgcgtggtgga

SEQ ID NO: 8331 - DNA, 425 bp, Zea mays
  Clone ID: LIB3137-026-Q1-K1-B4
gtccgcgtggaaccagtaccggttagtcgaccgggagaccgagcaggtgtaccacctgccctccgccaaggaccaggctcctgggaaatgtgctccctttgtctgcttcggatgcacggctaatggcctcgaggtggcgtctcctccaaaagcgacctccagcaatgcgcttggtaccggtacctcacaggaagaagcatcttgttcagcaaacaagacgttgaccactagtggttccatcagtggcagtgagagacgaggctgtcttaagagcaactccaaaagggattctttggagcaccgtatagtggtgagcgagggtgaagaaccgcgtgagtctttggaagaggtgcaaaccctgagatctagcatggaacggaggaaaagtcagtggacagatacatgttgaaaagatctttttgaga

SEQ ID NO: 8332 - DNA, 352 bp, Zea mays
  Clone ID: LIB3137-026-Q1-K1-B5
gtcccaccagaagcctaagacaccagatcagtcttccatgaaacaaaaaggagtcaacccaccatcacatgaggcattcagcgatgagtggttggaaaatggccagtgcccacttgcgcggtcttaccgggcaatgagtggtgttttgcccctcgttgccaaggccttacagccaccagctggtttgaagctgaagtgcccacctgctgtggttgctgtccgagctgcccttgcgcgaactgcgcttgtgaaatccctccgaccacagcccctgccctcaaagatggtagccattgcactactggggatggcagcaaacatccctcttggggtgtggcgggagcacaccaag

SEQ ID NO: 8333 - DNA, 389 bp, Zea mays
  Clone ID: LIB3137-026-Q1-K1-B6
ttcacactccttgaaccgttctcggacccgtacgcgtcgccgcagggcgaggaggcaatggcgggaggcgggaatggcgccggcggggacaccagggcggacttcgcgcggatctacaagacgctcaaggaggagctgctcaccgacccggacttcgagttcaccgaggagtcacgccaccggatcgaccgcatggttgactacaatgtactcggaggcaagtgtaaccgtgggctctctgtggtcgacagctacaagctgctcaagggcgctgatgctctgggcgaggaggaaacgttccttgcttgcaccctaggctggagcatagaatggcttcacgctttctttcttgtgctagatgatatcatggatgactctcacactcgtcg

SEQ ID NO: 8334 - DNA, 363 bp, Zea mays
  Clone ID: LIB3137-026-Q1-K1-B7
cggacgcgtggggccggctacaccgaacgttatggcattgtctacgtcgaccgcaaaaataactacacgcgctacatgaaggagtcagccaagtggttaaaagagttcaatactgcgaagaagcctagcaagaagattattacgccagcttaaaaacatgggacctcgtgatgtgggtacggtgccacccatgaaataaaaacctagtgtgtggtttgaaacctaaatttttctttttcttttttgcaccatgagagaggtagtggagtcatattctccagcaccgtggctaataatgtattgttgcagtacaatctagcattgtcgtcatgcaataaataaagtgactggtttccctatttc

SEQ ID NO: 8335 - DNA, 328 bp, Zea mays
  Clone ID: LIB3137-026-Q1-K1-B8
ctctctctcttgcccatcccccacctacgttgtctcatctcagatcctaaacccgcacgtgcctatatgcctgatgccacggcccctgatcctgatttacacaatcgaaagtccgagacccgagatgaggcacaggcacctgcgctagctgcaaaatgaaaaacgctcttcagagatacgcggccgcctacttcaatactgatcgcaacagcgcccagagacgtacgtgtgcgcccgcagagatcgtatcggggaaagacgtacagagcagatctgatcagaactgactctgacgcttgatgcccgctcttcgctgctgcagctggcg

SEQ ID NO: 8336 - DNA, 430 bp, Zea mays
  Clone ID: LIB3137-026-Q1-K1-B9
accatatccttccacttgctatggcggcggcggcggcgacggcgaccacgacctctccggcgagggcttcgtggcggcctacgcttcccgcgacctcggcatcggcagcaggagtctgcttccgtgttggagcgaagcgctttccagggctccgaacggcaagcacctgccggcaccgacaccgaggcacaacaaggctcacaaccgctcacgtcaagagcggggaagccgaggggcgtccgagcacggaggagagcgcaaccggcagcggcggcccggacgaggactccctgcggcgcgagctcgaaaccgcgatcgaggaggaggactacgcgcgcgccgcggcgctccgggacgagctccgcgtgctccaagaggacggccgggccgcggtgctggcggcgaacgcgcggttctacgccgcgttcaa

SEQ ID NO: 8337 - DNA, 397 bp, Zea mays
  Clone ID: LIB3137-026-Q1-K1-C1
gcacaccaaggagagtacgtggaggagcagtcatggcttcatcggtggccgccgcggcgagcacattcctgggcacccgcctggcggacccggcgccacagaacgggcgcatcgtggcccggttcgggttcgggttgggcggcaaggcgaagcctgctccgaagaaggtggcgaagacatcgacctcctctgaccggccgctgtggttccccggcgccgtggcgcccgactacctggacggctcgctggtcggcgactacgggttcgacccgttcggtctcgggaagcccgtggagtacctgcagttcgagttggactcgctggaccagaacctggccaagaatgaggccggcggcatcatcggcacccggttcgagtcctccgaagtcaagtccac

SEQ ID NO: 8338 - DNA, 427 bp, Zea mays
  Clone ID: LIB3137-026-Q1-K1-C10
cggacgcgtgggctcgacattcaaatcccttctgccttcgatcccttcgctgaggccagtgctggggactctggtgcagcggcatggtcaaaggactacgttcacgtgcgcatccagcagcgtaatggtcgcaagagcctgaccaccgtccagggattgaagaaggagttcagctacagcaagatcctcaaagatctcaagaaagagttctgctgcaatggtacagtggtccaggacccagaacttggacaggtcattcagctccagggtgatcagaggaagaacgtctcgaatttcctcgtacaggccggcattgtgaagaaggagcacatcaagattcatggtttctgagcaaccgccgggtccatatcaaaccaaccctgcatgcagggaatcttattatatataatatctgaagtggagcata

SEQ ID NO: 8339 - DNA, 402 bp, Zea mays
  Clone ID: LIB3137-026-Q1-K1-C11
atcacctatctagagagagagagagagagggaagagagaagagagagagagagagagagagagagagagagagagagaggaaagctagcatggagagtggcagcaagaaggtcgcagcctgtgtgttggcgctgctgcttctccagctgatggtagctccgacgacggcgacggcccgcttgctgcagcaggcggatacctcccccgtgtttggcctggacatcatcgcgagggagtttggccatccagatggagccatcccctgttttgaatcctgtgtcttcataccatgcatttcgtcagccgttggttgccgatgcgaaaaccaaatgtgcgtgaaataaactcgtgacgccgcttcttcagtcgggacgaggccatatatctctgatcccgttacgt

SEQ ID NO: 8340 - DNA, 246 bp, Zea mays
  Clone ID: LIB3137-026-Q1-K1-C12
gtggtctggcctcgtcgccaacggacgtctgacgcgcacccacgccatgctctacagccgaagatgcttcgcggcggcggccaaccgggtccggacgttcgccacggccttctgcgacgcgctggcctcgcgcgcggatgcggcggccttcgggactcccaggccgcaagaacaccccgagaaggctgctgcgctgaacgatccggccgatgtgctagacgttgctatcggtggagcaggcatgtg

SEQ ID NO: 8341 - DNA, 427 bp, Zea mays
  Clone ID: LIB3137-026-Q1-K1-C2
ggtagagaagctgaccaaggagcactacatgcgggtgcgcgagcagaggttcctcgagttcgccagcaagacgctcggggacggccgcgacattgcgcagggcgtgaaggcggacaacctggactgggagagcaccttcttcgtccgccacctcccggagcccaacatcgccgagataccggacctggacgacgagtaccggcgcgtcatgaagcggttcgccggcgagctggaggcgctggcggagcggctgctggacctgctgtgcgagaacctcggcctcgacaggggctacctggcgcgcgcgttccgcgggcccagcaagggcgccccgacgttcggcaccaaggtcagcagctacccgccgtgcccgcgcccggacctcgtcagcggcctgcgcgcgcacaccgacgccggcggtataatc

SEQ ID NO: 8342 - DNA, 418 bp, Zea mays
  Clone ID: LIB3137-026-Q1-K1-C3
caaatctatcgcaaacaggcctcgtctcgtcctcgtcctcgtccgccgccaaatcgaaccccccccaaaccctagctacccggcgcaacgtccccttcccgcctctccgcggcgctgcgtgacacccggcctccgctacgaaacaccggggcgggtgtagcctagcgggcgggccatggcgtcaacggtgctggaggcgacgcgggcggcccatgaggatctggagaggctggagcggctcgcggtgcgcgagctgcaacgggagcccgctaacccgcgtgaccgcctctttcagtcccaccgcgtccgccacatgctcgacctcgtcgtctccacctccggcaagctcgtggaaatttacgaagacaaggacaatgctaggaaggatgagatcaacactcatcttactgcacccacg

SEQ ID NO: 8343 - DNA, 309 bp, Zea mays
  unsure (1)..(309): unsure at all n locations; Clone ID: LIB3137-026-Q1-K1-C4
caacgcaatctttggggcaggcaaaggacgacgggtcggcgagaggcggggccatgaggatccggaagcgcacccctgccagggcagcgtcgccgggaccgccgnctntgcctcctcctcctcccctaccgctgcagcgtcccacggagaaaccacgggatgaggcggcggaagaggaggaggaggagaagcgggcggtcctcgccgccggagtccgagaaggcgacgaccgggttcgccccgccgccgccgccgntggctctgggaacagcagcgcaacggacgacgtgccgaggccggagccgcaag

SEQ ID NO: 8344 - DNA, 398 bp, Zea mays
  Clone ID: LIB3137-026-Q1-K1-C5
cggggaggtgtattaacttagtgggaatgattttttctggaaaaagtactgtggggaagatcatgtctgaagtcttgggttattcgttctttgatagtgacaaattagtggagcaagctgttggaatgccttcagttgctcaaatattcaaagttcacagtgaagccttctttcgggataatgagagtagcgtcttgagggatctgtcctccatgcgacgattagttgttgccaccggacgtggtgctgtcatccgaccagttaactggaaatatatgaagaatggcctatccgtttggttagatgtgcccttggatgctcttgctaggcgcattgctaaagtgggaaccgcttctcgttctcttctggaccaaccgtccggtgatccatacacaatg

SEQ ID NO: 8345 - DNA, 379 bp, Zea mays
  unsure (1)..(379): unsure at all n locations; Clone ID: LIB3137-026-Q1-K1-C6
acttccttccgcgcctgggtatatcaatccttgcagttattgctctaattgcctgcatctggtttccggaaactttgcataaacacaatggggatgccgttgataattccgttgaaacagtagaagaatctcttgctggcaccgacactgaagaaaatggaggtggcggatgtctaaaattatttacaaactggccgttgatgtcagctattactttatattgtatcttctctcttcaggatgtggcttatgcagagacattctctctttgggctgtcagtgacagatcgtttggtggattaagctttactaccacagatgtgggcaatgtccttgcgatgtcaggtctcttcctttntctatatcanatgttgatcta

SEQ ID NO: 8346 - DNA, 426 bp, Zea mays
  Clone ID: LIB3137-026-Q1-K1-C7
gggttcggatcttgtggaggttaggaaggttcttggtgagcatgccaagtccataatgctgatgtcaaaggttgagaatcaagagggagtagctaactttgatgatatcctggcaaactctgatgcttttatggtggcaagaggtgatttaggaatggaaattcctatagagaagattttctttgcacagaaggtgatgattttcaagtgcaatattcaaggcaagcctgttgtgactgcaacccagatgttggaatctatgatcaagtctcctcgccctactcgggcagaagcaacggatgttgcaaacgcagttcttgatggcacagactgtgttatgctcagtggtgagactgctgctggggcttatccagagttggcggtgcagactatggctaagatctgcctgcaagcagagtcttgcgt

SEQ ID NO: 8347 - DNA, 409 bp, Zea mays
  unsure (1)..(409): unsure at all n locations; Clone ID: LIB3137-026-Q1-K1-C8
gggttcggatcttgtggaggttaggaaggttcntggtgagcatgccaagtccataatgctgatgtcaaaggttgagaatcaagagggagtagctaactttgatgatatcctggcaaactctgatgcttttatggtggcaagaggtgatttaggaatggaaattcctatagagaatattttctttgcacagaaggtgatgattttcaagtgcaatattcaaggcaagcctgttgtgactgcaacccacatgttggaatctatgatcaagtctcctcgccctactcgggcagaagcaacggatgttgcaaacgcagttcttgatggcacagactgtgttatgctcagtggtgagactgctgctggggcttatccagagttggcggtgcaaactatggctaaaatctgcctg

SEQ ID NO: 8348 - DNA, 389 bp, Zea mays
  Clone ID: LIB3137-026-Q1-K1-C9
caggagggcgccgacgtcaccaacgcatcgtgctccgtcgcagatctccgacaccgagggggccgtcataagaggacgagcgcattgagaaaccgttccccgtacaacatggcggcgggttctggcccaaacggctgtgctcgatgctgctggcgctctacaacccacttactgcgcaggacggcgccaccgaagaggacgaggacagcggcggctgttgcggccgatactacagcgccctgccgaaagcccacggaatatacgatgccggcaactgaggtggcggtggaagcgccacctgcgatgaatacaacgacgtggacgtggtgagcaccacctcagacttttggtcctacctggagacaaggggtgggcaccggccccgggac

SEQ ID NO: 8349 - DNA, 420 bp, Zea mays
  Clone ID: LIB3137-026-Q1-K1-D1
gtccgggagcgcagagatcgctggggagatggtgagagaagcagcgagcgaagccaccgcaagccgcgaaagcggggcggaggcggcaggggagtgctggagcgaagcgctcaagtcgttcctggaccacatccccgtctcctccgtcccgggcgcgctccaacccactgcctccccagcggtggaggtcaagctccacggctccgtcctgggcgccctcgacgccatgtacagcagcaacgccgcgggcgcggtgatcatcgacgtggtgcacagcagtctaggcaagtacgtcgatcgcgatattggcttcgtcgagttctcgagcctagtcctgtgggcacttgaggaacttggcaaagtggaaagtgaaccaacagacagtacttctgatttcctctctactctgaaacagcatca

SEQ ID NO: 8350 - DNA, 342 bp, Zea mays
  Clone ID: LIB3137-026-Q1-K1-D10
aacccacctcaaaccaacccaagccacgttggttttccccccgacagcccacaaacgggggccatttcaaaggcggacgccgcaatcaataccaatcatatccacctcagccgtttcgcattggaccagcatcagcggaagagcccatgctcccaaaccgtggcacagaacaagaagagcgtcgtctcggctagggcataggcggagaacatctgcacacgttccacatgcaccatcctctatatttcaacaacatacatgatgcactaaaacactcgaaacatatgcttttaaaacaaggcagctagcgactatagtcgcacttccactacgagctgttca

SEQ ID NO: 8351 - DNA, 397 bp, Zea mays
  Clone ID: LIB3137-026-Q1-K1-D11
atcaataatcattgaatccattctaccgctgctcctcctccttgctctgccgagaagccggcgatgaggggccgcaagaggcagcaggtgagcgccagctcggccgccgcgctggtgaaggggagggagagcaccaagcagaaggagaaagaagctaggaaggagaaggaggcgagggaagccggcagggagccggcggcgaaggagaggcagatgaggcgcaaggccgggaaggagaaggagacggagacgggtggagaggggaaggagccagccaaggagaaggaggtcagggaagagggcaaggagaacgacaagcacaaggagatggagaaagcgaaggccaacgtctgcccgcagttcttcaaggtcttcttccccgagcagtccacggagc

SEQ ID NO: 8352 - DNA, 75 bp, Zea mays
  unsure (1)..(75): unsure at all n locations; Clone ID: LIB3137-026-Q1-K1-D12
taccgnngtccggaattacccgggtccgaccccacgccgnntccgctaattaagtggaagcggaaatannaagct

SEQ ID NO: 8353 - DNA, 401 bp, Zea mays
  Clone ID: LIB3137-026-Q1-K1-D2
agcgcttatttgacattgatattcaggaccagattatcaggaaggactttgacattactaaggaagcagggggttccagaaaagccactaacataacctacgaagtgactgttgataactccatattggcaatacatctgtattggagtggacgcggcacctgttgtattccatatgaaggagcttacgggccactagtttcagcaataaaagttacccattcccaagacccgaaaaccagtcccccacaagcaccacattctgattctgcccgagatgatgtaaagcgaacaggagtggttgcaggcattgcagcactttccatagctgctgcggtgatatcttcatctgatgtctacctttggtggaaatgggtttcacttgtgaagcgcccaatggca

SEQ ID NO: 8354 - DNA, 432 bp, Zea mays
  Clone ID: LIB3137-026-Q1-K1-D3
agacaagcaaggaatcccccgatggctcatcgtgttctcctcctcctctctctcgcgtcggccgccgcggttgccgccgccgtcgacgcggaggacccgctgatccggcaggtggttcccggtggagatgacaacgatctggagctgaacgcggagtcccacttcctgagcttcgtgcagcggttcggcaagtcctacaaggacgccgacgagcacgcgtaccggctgtccgttttcaaggccaacctgcgccgcgcgcgccggcaccagctgctggacccgtcggcggagcacggcgtcactaagttctccgacctcacgccggcagagttccgccggacctacctcggccttcgcaagtcccggcgcgctctcctcagagaacttcgggagtcggcgcacgaggcgcccgtgctccccaccgatggtctc

SEQ ID NO: 8355 - DNA, 197 bp, Zea mays
  Clone ID: LIB3137-026-Q1-K1-D4
gtctccgcaccgcgcgctgttgtctatccttgtgcagaaaaaatgacggctggctacattgttggctcactggtcggatcctttgccattgcatacctgtgtgacacatttatctctgacaagaaggcatttggaggtagcacccccaagactgtttctgagaaggagtggtggcaagccacagacaccaagttcca

SEQ ID NO: 8356 - DNA, 173 bp, Zea mays
  Clone ID: LIB3137-026-Q1-K1-D5
aaggaattgaatattactaaggaagcaataggttgccgaaggcccactaacataacctacgaaacgaccggtgataactccataaggacaatacattcttattggagtcgacggcgtaccagttgtattctatatgaaggaggttagcaagctctacttttacgaataaaagc

SEQ ID NO: 8357 - DNA, 363 bp, Zea mays
  Clone ID: LIB3137-026-Q1-K1-D8
ctcggaacgcacacaccgcccgtccccgatttccgatcccctcgtcgatccaaagatgcagatcttcgtcaagactctcactggaaagactatcaccctcgaggtggagtcctctgacaccattgacaacgtcaaggccaagatccaggacaaggaaggcattcccccggaccagcagcggctcatcttcgctggcaagcagctcgaggacgggcgcacacttgccgactacaacatccagaaggagagcaccctccaccttgttctccgcctcaggggaggcatgcagatcttcgtcaagaccctcactggaaagactatcaccctcaaggtggagtcttctgacaccatcgacaacgtcaa

SEQ ID NO: 8358 - DNA, 354 bp, Zea mays
  Clone ID: LIB3137-026-Q1-K1-D9
ctcccgactcgaaccaacccaagccacgtcttggtgaccggtcgacagtccacgaacgaggaccaacctaaggactgacgctgggggcaatatcgatctgatcgaggtgagctgtgtcggatggggtaaggatcgggggaggagccgatgctacgaaagggttgcgctgaacaagaagagggttggcttggctggggcatagctggaggacaggaaaacactttctacatgcaccgtgcactaggtgagaacaatctaaatgacgctctgaattactggaggcatatgctttttgaactggacacttagtgaatatagtatcacaattactgcgaactgttcatgaaggctttt

SEQ ID NO: 8359 - DNA, 282 bp, Zea mays
  Clone ID: LIB3137-026-Q1-K1-E10
gaacaatctgcacagtcgtgatgtatcaactttatagagaggagctacctggagggactgcctaacatgggcacaccatcagtcaatgtcaaacatgatatcaagcggcatgacataacacccttgcatctcttatgctggaccgaaccatagactcaacaaggacaacacacttggtctttgctaaacactctactgtacaggcaatcactatgtgatcatctttgatacaacaagccaggcatggtaatatgcattgggcacagaggctgggttggtaca

SEQ ID NO: 8360 - DNA, 230 bp, Zea mays
  unsure (1)..(230): unsure at all n locations; Clone ID: LIB3137-026-Q1-K1-E12
aatacccgggctcgacgccacgccgtcncngactcattcnngcccctctcctctccttacctacgtgttgatgactcttacccgtgcccacggaatctcttacgcgcgatctctgtacgttcgtgcagtgcgcggcacgccatacgcccgatgatgctttgtcccttgtcgatgggctgaatacgggagggcggcattcttcttcgtaccgcacgaggcccccgcgtcga

SEQ ID NO: 8361 - DNA, 371 bp, Zea mays
  Clone ID: LIB3137-026-Q1-K1-E2
tgcaggtgcagccatggcgaagcccgtctccattcaggtgtggaaccccagcggcaagtaccgcgtggtgagcaccaagtccatgccgggcacacgatggatccgcctgctcaccgacaacgactgccgccttgagatatgcaccgagcacaagaccatcctctccgtggacgacatcctggcgctcatcggcgatcgctgcgacggcgtcattggacagctcaccgaggactggggggacgtgctcttctctgcgctcaagcgcgccggaggcacggtcttcagcaacatggccgtcggctacaacaacgtcgatgtcgaggctgccaacaggaatggcatcgcaatcggcaacacgccgggcgttctga

SEQ ID NO: 8362 - DNA, 420 bp, Zea mays
  unsure (1)..(420): unsure at all n locations; Clone ID: LIB3137-026-Q1-K1-E3
ccgtgttaaagaggtgactggtgcactcgtacgtgtagagcttgattcattgatgaagattgtcacagttaaaagagacgatattgctgacacacctactgttgcaacaccattccgtgaacctcgttattcattgggtggtgaaactccaatgcacccgtctcgaacaccacatcatgcttatcagactccaatgcgggaccctggagcaacaccaatacatgaagggatgcggactcccatgcgaagtcgagcctgggctcctatgagccctccgagggataattgggaagatggaaatcctgctacttggggtagcagtccagcttaccagccaggaaccccacaagctcggccatacgaagcccncacacctggatcagggtgggcaaacactccangagttagtttcaatgatgc

SEQ ID NO: 8363 - DNA, 360 bp, Zea mays
  Clone ID: LIB3137-026-Q1-K1-E4
gttaaaagagacgatatggctgacacacctactgttgcaataccattcgacgaacattgttatttattgagatgcgaaactcacaatgaacatcgtttgaacacacacataatgcttatctgactgcaatgcggtaccactgagcaacaccacatacatgaagggatgcggactgacatgctaagttctgccttgaatcctatgagccctccgagggataatagcaaagatggaaatcctgctacttggggtagcaatgcagcttaccagactaggaatcgcactaagctacgacatacgacgctctgacagatacgacaggttgggtaaacacttcacgatttatggtcaatgacgcta

SEQ ID NO: 8364 - DNA, 345 bp, Zea mays
  unsure (1)..(345): unsure at all n locations; Clone ID: LIB3137-026-Q1-K1-E5
ccttcttttccttggttccaaccgccattttcctccacatcccggctttcacctcctcctccgtcgttggtcccggaatcctagccggccgctgggccgcgccccgcgccctcccgctccgcgcgctcccgccccgtcgcgtcaccgtcgtctgcagcagcgccgcggcggcagccgaagcctcggacgccgcagcgccagtggagaagttccggctcgacaatttggggccccagaaggggtcgcgccggcggcccaagcgtaagggacgcggtattgctgcangccaaggcgcgagctgcgggttcggtatgcgcgggcagaaatcgcgctcggggcccggcg

SEQ ID NO: 8365 - DNA, 357 bp, Zea mays
  Clone ID: LIB3137-026-Q1-K1-E6
accaattcctggaagtttgctttcctgctggccgcccccagcaccgacgccctttctttttccccatctccttccttggcgcgctcgcccaagtcacgcgtgtccctgctcgcccaggccgcgacctcgccaaaccgcgcagtccctgctctccttccccagccgcgctcagcccagccctttcttcttcgcccttgtcgagctccctcaactcgcccccaaccacaactggacgccaaccttggcctaaggcatggagcaacaacaaccatggaaccctttcgtgtcgcgccctcgatgtgctcgacgaaagaaaatcgggcaggctctactacctttacctggcgatgcttaaag

SEQ ID NO: 8366 - DNA, 401 bp, Zea mays
  unsure (1)..(401): unsure at all n locations; Clone ID: LIB3137-026-Q1-K1-E7
agcgatgcgcaagatgaagaatgaatttattttaaattgggatgggttgcgcactaaagataaggagcgtgtgcttgttcttggtgctacaaatagaccttttgacctcgacgaggctgtgattaggaggttcccccgcaggttaatggtgaacttgcccgatgcatcaaacagagagaaaatcctaaaagtaattttggcaaaagaagagctgggatctgatgttgatatggactcgcttgccaatatgactgatggttattcaggaagcgacctgaagaatctgtgtgtgaccgcggcgcattaccccattcgagaaattctggagaaggaaaagaaggagaagagtttggctaaaacaaaaggtangccggagcctgcattatatggaagcgaggaca

SEQ ID NO: 8367 - DNA, 404 bp, Zea mays
  Clone ID: LIB3137-026-Q1-K1-E8
ccgaggcgctcatcgccgaggcggagcatgtcagcaagatcgtggccatccacgcggccatgggcggcggcacggggctcaactacttcctccgccgcttcccgagccggtgcttcgacgtcgggatcgcggagcagcacgccgtcacgttcgcggccggcctggcctgcgagggcctcaagcccttctgcgccatctactcgtctttcctgcagcgcggctacgaccaggtcgtgcacgacgtcgatctgcagaagctaccggtgcggttcgccatggacagggccgggctggtcagcgcggacgggccgacccactgcggtgcgttcgacgtcgcgtacatggcctgcctgcccaacatggtcgtcatggccccgtccgacgaggccgagctctgccacatg

SEQ ID NO: 8368 - DNA, 407 bp, Zea mays
  Clone ID: LIB3137-026-Q1-K1-F1
gaaaacccgggggacccccacgcgtccgagatttttttaaactgagcctcatgttcatgtttcaaacaatcagatgatatttactttacaggcaaaggagaatgacctgtcaaaatctattgactcatgtaacatggaggccagtgtagtcaagacttgggtaaatttcctcgaggatacatggcaacttcagttgtcatacaatgaacagaaggaaactaaaacgaatgacgagctggagagatgcacaagcagttttctgaagttgaccaagcatcatctttcctatttcaaggaagttcttagcccgtcaattgagcggatacgcacatacgtggataatttggcagtcttaaactctaaggaggagtcaatagaacatgaaggggatgatgagatttctgtgc

SEQ ID NO: 8369 - DNA, 340 bp, Zea mays
  Clone ID: LIB3137-026-Q1-K1-F10
cgcgtggggagacggcgagctttccttgcaacggcgacccggccacgcccgagggtggctacgcgcagaccgagtacgccgccgccggtggctcgccgcccgccgaccgcaagccctccgtgttctccgaccacgctgacggtcgctcctcccagccccagcatgagactcaatcacatggcagtggttcctccaaatctcgagaaagggaccgagaacgtgataagggaaaggacagggagcgaggcagagaccgtgtccgcgaaaaggagaaggaccgagacagggacaaggatcgtgaaagaggtgacagagacagggatcgtgatcgcaccacatg

SEQ ID NO: 8370 - DNA, 420 bp, Zea mays
  Clone ID: LIB3137-026-Q1-K1-F2
catcaatggcacggttggagaagatgttgtggttgaattgagtagggccatggaaaggcagggtcttgatatgaaagttgcagctctggttaatgatactgtaggcacattggctggtgggagatatgctgataatgatgttgttgctgctgtaatattgggcactggcacaaatgcagcttatgtggaacatgcaaatgtgattcctaaatggaccgggctgctacctagatcagggaacatggtaatcaacatggagtggggaaacttcagatcagataaacttccaaggtcggagtatgataaatccttagacttcgaaagtttgaaccctggtgagcagatatatgaaaagatgatttctggaatgtatcttggaaaaattgtccggaggatcctgctgaaactggctcatgatgc

SEQ ID NO: 8371 - DNA, 404 bp, Zea mays
  Clone ID: LIB3137-026-Q1-K1-F3
gttggatctcagatcggtgatcacataaacaatggtgaaggctgttgctgtgcttggtagcagcgagggtgtcaagggcaccatcttcttcacccaagagggagatggccctaccactgtcaccggaagtatctctggcctcaagcctggcctccatgggttccatgtgcatgcacttggtgacaccaccaatggctgcatgtcaactggaccacactacaatcctgcgagcaaggaacatggagcaccagaagatgagaaccgccatgccggtgatcttggaaatgtgacagctggagcagatggtgttgcaaacattaatgttaccgacagccagatcccactgactgggccaaactcaatcattggcaaagcttgttgtgttcacgctgatcccgatgatc

SEQ ID NO: 8372 - DNA, 378 bp, Zea mays
  Clone ID: LIB3137-026-Q1-K1-F5
cggacgcgtgggcgcgcctcgactctacttttttcgagatccactcggagggccaccgcgaccgctccggtcggttccggcgaggtgccgcgcggtcgttacagcatagacagggcagacaaagctgcgattttggggggggctgttggtccatcagtagttgatggtggagataaaccacgtgaaggctggtgctctggtacatgttcgccaggcactgatggcatttggccgatgtggaaagatggacgggcgccggccgtcctcatcgtcgtcgtcgtcgttctgcacaaccaccacgggcgtgctctttgtcgcgctctagctagtcggcgcgtggatgatgacctcgtccactgtcttcccgcttgaaatttc

SEQ ID NO: 8373 - DNA, 250 bp, Zea mays
  Clone ID: LIB3137-026-Q1-K1-F6
acacttcttggcattacataaaaaccagggcttgtcaaaaccagcgcattggcgagcagcaccatggccctctcctccacagccttcgccggcaaggcagtgaacgtgccgtcgtctctcttcggcgaggcccgcgtgacgatgcgcaagacggcggcgaaggcaaagccggcggcgagctccggcagcccgtggtacggccccgaccgcgtgctctacctgggcccgctgtccggcgcgcccccgaact

SEQ ID NO: 8374 - DNA, 387 bp, Zea mays
  Clone ID: LIB3137-026-Q1-K1-F7
gaagagcgcaagatgttcggcttcgggcacttcggccaccacggccagaacccgccggcgcaccccccggcgcacggcggcgtgcaccagcccaccttcaagatcttctgcaaggccgacgaggggtactgcctcaccgtccgcgacggcaacgtggtgctggcccccgccaacccgcgcgacgagcaccagcactggtacaaggacatgcgcttcagcacccaggtcaaggacgaggagggcaaccctgcgttcgccctggtcaacaaggccactgggctcgccatcaagcactccctcggccagtcccacccggtgaagctggtgccgttcaacccggagtaccaggacgagtcggtgctgtggacggagagcggcgacgtgggc

SEQ ID NO: 8375 - DNA, 359 bp, Zea mays
  Clone ID: LIB3137-026-Q1-K1-F8
gagaactcacgtttctcttggtcagccagtttcatcaccaacttgttgacggtagggagagcaagttcttcggcgatttgagaagaaacgaggagcgagagagcgtgggtgcgtggggggtgggggctgcgcccggggcccccggatcacggaatcctacccttaccaaccctagcctccattggtcgccgtctcgggccatggcagggccggcgccggatcgggccgccctgactgtgggtccgggcatggacatgccgatcatgcacgacagcgaccggtacgagctcgtgcgcgacatcggctgcggcaactttagcgttggccgcctcatgcgcgaccgccgcaccaccgaactc

SEQ ID NO: 8376 - DNA, 453 bp, Zea mays
  unsure (1)..(453): unsure at all n locations; Clone ID: LIB3137-026-Q1-K1-F9
ggaaaaacngggccgaccgcacgcgtccggagaactcacgtatctcttggtcagccatgttcatcaccaacttgttgacggtagggagggcgagttcttcggcgattggagaagaaacgaggagcgagagagcgtgggtgcgtggggggtgggggctgcgcccggcgcccccggatcacggaatcctacccttaccaaccctagcctccattggtcgccgtcttgggccatggcagggcccgcgccggatcgggccgccctgactgtgggtacgggcatggacatgccgatcatgcacgacagcgaccggtacgagctcgtgcgcgacatcagctccggcaactttagcgttgcccggcttatgcgcgaccgccgtaccaccgaactcttcgccgtcaagtacatcgagcgtggcgagaagatagatgacaatgtccagcgcgaaatattaac

SEQ ID NO: 8377 - DNA, 352 bp, Zea mays
  Clone ID: LIB3137-026-Q1-K1-G1
aagttcccttttccctaaattttttaactcaccttgacgaaaattttcgccgcgtccactacaaagccaccgagagatctgcccgattgcgccggccggacccggggactacctgccctcactacatccgttcgggcggccggccggactaccttcaagtgcggggaccgtggtctacttcaaggcgcggaccgaggccggtgactacaccatctttatgggtcttgacaagtacgagaacgaggacctcatcaaataccgcttacccgacgacatctggttgcatgtagataagatgtcctatgcacatgtgtatgtgagattgaataaaggtcaatcaatggatgacatg

SEQ ID NO: 8378 - DNA, 268 bp, Zea mays
  unsure (1)..(268): unsure at all n locations; Clone ID: LIB3137-026-Q1-K1-G10
cacacttgctccgagctagcagacactattgntatcaaacactcggctctatgcctcgtgggtctccttaacataggcatgggcatggccaccgctgctgcaaaccgcaaactgggttatggccccgggcgaggaggtggcggtggctgtcgcggtggaggcggtggatacggaggaccagactatgggtccggatcagggtacggtgagcgcgtgagcatcgcaagcgctgctggagggtatggacataaagcctaaaggcggtggc

SEQ ID NO: 8379 - DNA, 404 bp, Zea mays
  Clone ID: LIB3137-026-Q1-K1-G2
cgctgtgcctcggcgtgttcctggcgctcatctacttcaggaacctgacatgggacttctcgtcggaggtgctcatcatcctgctcgtctgcgtagtcatggccctcttcaccagcttccggaccacgttcccgctctggacctgcctcgtcgcctacatgctctacccgttctcgctggtcctcgtctacatcctcgactacgtctttggctggtcataggctctcattggcgcctcgagtgaacacgaccctgattggagcacctgggttttaacagccgccggtgtttctgcttgaccttgtaattttgactcatgtgaagctatctgtccagacttcttatatttctttgtgtatccaaagcacgcacgtacttcgtctacatactcgactacgtctttg

SEQ ID NO: 8380 - DNA, 166 bp, Zea mays
  unsure (1)..(166): unsure at all n locations; Clone ID: LIB3137-026-Q1-K1-G3
gaatgattctggatgaaaacgaacgctagttatatactaaacacatgcaggtccaacgcgggatgntgggaacaaacccggaggaaaacctgctcctaactaaagttgtctcgccctgcctgcaaggcgcgcgcaacggctttgaccaaaacaaatacatttgctg

SEQ ID NO: 8381 - DNA, 312 bp, Zea mays
  Clone ID: LIB3137-026-Q1-K1-G6
ggaacttttagcaaagcattggccattttttgaccgcggaattcaaaacagactgacgagctaacatagcggcaggcacgttctccaggaacatggaccgcacgcagcagatggcagtagtggcgacagccgtggtggccttggtgctgctggcagaggctacatccgaggcggccatcacctgcgggcaggtggcgtacgccatcgcgccctgcatatgctacgcgcgcggccagggctgaagaccatccggcgggtgctgcagcggcgttaagagcctgaacaacgccggccggaccaccgacgaccgac

SEQ ID NO: 8382 - DNA, 340 bp, Zea mays
  unsure (1)..(340): unsure at all n locations; Clone ID: LIB3137-026-Q1-K1-G7
cactcgatcgccaataatggagtttccgcttcaccaccaccaccacggccatcgccgcgacgacgacgaagacgaccgcagaggcccgcctcccccggtctacggcggctacggccagccaccgccacccgacccgtacggccgcgcgcccgtcgaccccgatccgtacggtcgacctccgccccagtccgcgtacggtggggccggggacgcctacggccacagcggccaaggctacgcgcccccgccggcctacggcgccgggggcgggtacggcaacgtcgtccacgtcgcgcacgaggtcggcgacgagaggccttactacngcggcggcggcggc

SEQ ID NO: 8383 - DNA, 357 bp, Zea mays
  Clone ID: LIB3137-026-Q1-K1-G8
cactcgatcgccaataatggagtttccgtttcttcaccaccaccacggccatcgccgcgacgacgacgaagacgaccgcagaggcccgcctcccccggtctacggcggctacggccagccaccgccacccgacccgtacggccgcgcgcccgtcgaccccgatccgtacggtcgacctccgccccagtccgcgtacggtggggccggggacgcctacggccacagcggccaaggctacgcgcccccgccggcctacggcgccgggggcgggtacggcaacgtcgtccacgtcgcgcacgatgtcggcgacgagaggccttactacggcggcggcggcggcggtcttggtggcgccta

SEQ ID NO: 8384 - DNA, 374 bp, Zea mays
  Clone ID: LIB3137-026-Q1-K1-H1
gaaaatatccgtcagaataaaccgcagcaaatcttctccggcaccggcagcgcccaaatccggcaatccgctgctccgaatggactcaggttacaatccccggacggtggaggaggtgttccgggacttcaagggccgtcgtgccgggataatccgcgcgctcaccactgatgcggaggatttcttcaagcaatgcgacccggaaaaagaaaacttgtgcctgtatgggtttcctaatgagagctgggaagtaaatttgcctgctgaagaggtgccacctgacctcccagaaccagcattaggcataaactttgcaagagatggaatgcaagaaaaagagtggttgtccatggttgctgcacacagtgatgcat

SEQ ID NO: 8385 - DNA, 420 bp, Zea mays
  Clone ID: LIB3137-026-Q1-K1-H10
gacgacttgtttcattgattcttgaagagatctagcttcttttgcaccacaaggtcgagggtgtcttgcagctgcggatcaagctgcggctgcggctcaagctgcaagtgcggcaagaagtaccctgacctggaggagacgagcaccgccgcgcaggccaccgtcgtcctcggcgtggccccggagaagaaggccgcgcccgagttcgtcgaggccgcggcggagtccggcgaggccgcccacggctgcagctgcggtggcaactgcaagtgcgacccctgcaactgctgatcacatcgatcgacgaccatggatatgattattatctatctaacttgtggtggtggttgaacaataataagcgaggccgagctggctgccatacataagtattgtgtggtgtcactggtgtgtgtgtga

SEQ ID NO: 8386 - DNA, 430 bp, Zea mays
  Clone ID: LIB3137-026-Q1-K1-H11
gtgaaagcagcatttcaagaagtagagtatttgctgatgcatccaagcccgctgagcaggagaatgagaggaagaaaaatttccttgattggaggaatttaatgaagcctatgaatgaggagaaagatcactgggtcccagatgaagctgtcagcaagtgcacagcatgcgcagcagatttcagtgctttcaaccgcaggcatcactgtcgaaactgtggtgatattttttgcgataagtgcacccagggaagaactcctctgactacagatgcagatgctcaaccagttcgagtttgcgacagatgcatggctgaagtaacgcaaagacttaacaatgcaagggaagtggctaatcgacctattgttcacagccacgaggatcttgccaaaaaacttcacgaagccatggatataaataaaaagtcgtc

SEQ ID NO: 8387 - DNA, 306 bp, Zea mays
  Clone ID: LIB3137-026-Q1-K1-H12
cacgcgtgcgaagacactgagctggtctgtttagatggattgtcatctgtactgtacgtttttcgccgatcatggaggatgagaggaacacccagcagcaccagggcggtgagcaggcccaggaccaggagaacgaggtgaaggacaggggactcctggacagccttctcggcaggaacaagcacgacgaccaggagaagaagaaccagcaggaggaggaggagctcgcaaccgcattgaaaaggcaacgggggttgaccccgaccacaaggaggagggacacgaggccgccgagaagaaggacag

SEQ ID NO: 8388 - DNA, 65 bp, Zea mays
  Clone ID: LIB3137-026-Q1-K1-H3
aaaagcttaaacgagaagaactacaaggcactgcctgcatcggttccatgttaatgcttcgcccg

SEQ ID NO: 8389 - DNA, 178 bp, Zea mays
  Clone ID: LIB3137-026-Q1-K1-H4
cgatgtcgtttccgcggatttggcagccgccgccgtctgtggcggtcagcgtttaagctcttctacgattcctagctgggcacggtgggttctcggaggtgtggtttacacgctcgtgccgttctacaacagagttaggcatctcgaagacgagacggtgggattcgtggagaatgct

SEQ ID NO: 8390 - DNA, 358 bp, Zea mays
  unsure (1)..(358): unsure at all n locations; Clone ID: LIB3137-026-Q1-K1-H7
ggaaaaaccgggccgaccgacgcgtacgagagctactattgtactgttcaacaaacttttctcacgaganactatcgactccaagtccgtaccatttcagtgctgttgtgcggcctgaatccgnggaacatagatgggcaagcaaaagattgcgctcaatttgcccaagcttgaccagaggaagaggaggaaggccttcaaggcagctgagggaatgaacggtgtgacgtccgccacgatggagggcgacaagatcaccgtcgtatgcgatgcactcgaccccatcacgctcacaaccattctccggcgcagcctatgctacgcggagctgctcaacgtcagctccggcgacagctac

SEQ ID NO: 8391 - DNA, 429 bp, Zea mays
  Clone ID: LIB3137-026-Q1-K1-H9
cgagtgtagcaggctgcacacacaaggatgtggacaaccacaagcgcctaagatcccgtgctccgcgtcgagatctttgccgaggcggtgacggtcgagggatcgccatggcgttgagggcgtcccccgtgtcgcatggcaccgcggcagcgccgctgccgcctttcgcgcggaggaggatggcccgtggggtggtggtggccatggcgtccaccatcaacagggtcaaaactgtcaaagaaccctatacccctccacgagaggtacatcgccaaattacccattcactaccacctcaaaagcgggagattttcgattcacttcaaccttgggccaaggataacctgctgaacctactgaagccagttgaaaagtcatggcagccacaggacttcctaccagagccttcttctgatgggttttatgatg

SEQ ID NO: 8392 - DNA, 134 bp, Zea mays
  Clone ID: LIB3137-027-Q1-K1-E12
cacctgcatcgctccttcttcccttacacagtgattctgggaccatctaccccctcgttgggggatgttttttggcttccatggagaggctcattgccggcctacttggcttcctattggctgcatcggaagga

SEQ ID NO: 8393 - DNA, 371 bp, Zea mays
  Clone ID: LIB3137-027-Q1-K1-F7
gttccacctcctcgtccacgaggtgaggaattcctagcgaccgaccatggcgttgctcccgcgcaccgcgcggctggccctcctttccaccccgcgggcgtactccgctgccgctgctgcgggcgcctccccgacgtccccagcgccatacgggggcgcccccccaccggcgatgtcgaagacggccgagttcgtggtctctaaggtggacgacctgatgaactgggcgcgtaagggctcgatctggcccatgaccttcgggctcgcctgctgcgcggtggagatgatgcacgccggcgcgtcccgctacgacttcgaccggttcggcgtcatcttccgtccgtcgccgcgccagtccgattgcatgatcg

SEQ ID NO: 8394 - DNA, 363 bp, Zea mays
  Clone ID: LIB3137-027-Q1-K1-H3
ccgacgcccaaagaagcagagcaggcaacggtacagcagagagaaggcaggacagttagagagagagagagagagaggcgcagagccaaggaagcggagcagagcaacagcagcaggtcgaggaagaggagaagagaaggtccaggagacagcacagcagccaggaagagcaagagcaagatgctgcgcgggggcacgggcatgctgggggtggtcaacttcataaccttcctgatctcgatcccgatcctgggcggcggcatctggctggcgtcgcgggccaactccaccgactgcatccgcttcctgcagtggcccatcatcgtggtggggctcgtcctcatggtcgtctccctcatgggc

SEQ ID NO: 8395 - DNA, 424 bp, Zea mays
  unsure (1)..(424): unsure at all n locations; Clone ID: LIB3137-028-Q1-K1-C5
tatggctgagtggaataatgtaatatttttgctggacaattcctttacttcctgtgaaatagaagtgtgaataggtgagcagccggagatgttaggggggtggcaaaacttggtaccaaatgtggagcttgagcagagttggaacatgtcatggcaagggccgtagcaactgcgctcccacaacatgatatgcatgcaatgcacaaaatgtcgatatggatgcaatccgcaagatggatgtaatcacagttcggggagaatgagcaagtaagtaaccttggtttcctttttgctgctgtaagctcgactcttttggttcatgtatcccaagaatgatgtttaatttatcttgctcactgtttcatattttntgtgtgtgtggggtataaaatacagtacgctagcatgaatgtaccctatatcg

SEQ ID NO: 8396 - DNA, 434 bp, Zea mays
  Clone ID: LIB3137-028-Q1-K1-F5
ggacgcgtgggtgccgcctgcccgccgctctagccgttgcttctcccttcccgttcccgaggagttggcctcgccggcggatccggggcgccgctgcaagaggaggaaggaggaggagaggattccagaatggcgtcgcgctcggcgtccaaggatatcatcacgctgcgaggctctgccgccatcgtcagcgagttcttcgggtacgcggcgaatagcatcctctacaaccgcgctgtgtacccggaggagagcttcagcaaggtgaagaagtacgggctcaccatgctgctcacgcaggacgagggcgtgaagaacttcatcgccagcctcacctcccagctctcagaatggctggaggccgggaagctgcagcggatcgtgctggtcataatgagcaaagccaccagcgaggtgctcgagcgctggaactt

SEQ ID NO: 8397 - DNA, 337 bp, Zea mays
  Clone ID: LIB3137-028-Q1-K1-G12
tacgactactacgcgtccggctccgaggactagtggacgctgcaggagaacagggaggcgttctccaggatcttgttccgtccgcgtatactgatcgacgtgtccaagatcgacatgaccaccaccgtgctggggttcaagatctccatgcccatcatggtcgcccccactgctatgcagaagatggcccacccagatggggagtacgccactgcgcgcgcggcggctgcggcaggcaccataatgacactgtcgtcctgtgcaacttcaagcgtcgaggaggttgcctcgactgggccaaggatccgctttttccagctatacgtctacaaggaca

SEQ ID NO: 8398 - DNA, 306 bp, Zea mays
  Clone ID: LIB3137-028-Q1-K1-H9
cgctgctcttctcgtggatccccaaatcctttccggccaccggcatcgctccgctcccgcgcgccgactccgaccgctcctatccacgccaccgcgtcggtgctcgagttgcctcagagagggagagagagagagagagagggagggagggagggagggagggaacggcgctcacgctgttccgattcgaacgagctcgcccggcgatcttatttttttcctggaacgggctagcttcctaatctcggcctaagtgtggggagcgtgttcaccctccaaccaagcaccggcatgatcaacccttaa

SEQ ID NO: 8399 - DNA, 175 bp, Zea mays
  unsure (1)..(175): unsure at all n locations; Clone ID: LIB3137-029-Q1-K1-D10
tgtagttactatccactataattctcgccgctantcccctgtcctactgctactgctactagtggtattgtctccccaaacccaaccctccctaatcccctcaaataccttatatacagcaatccttcctcgccgtcttgattgctttaaccgcaactatccatggattaatgtc

SEQ ID NO: 8400 - DNA, 432 bp, Zea mays
  Clone ID: LIB3137-029-Q1-K1-D9
ttaaaatggaagccgaggtcgggcggccaagtagttaactgcaggccacccaggcagaggcgtcagttctcctctacgaagcggcgttccgatccacgctggcctgctaaaccaacacccttcaccagcttttatcctccatgctcagggcatccgccgccgccgtcttgctgtagacttcccactcgactacgcgctcatctcgcaccatgcgcatctcgagctgcacctcctctgcctccaagcctcgctccatgctgcccctctcgttcggatccaataccctcacctatctcaccgacgcaattacctctgttggagcgaaagtcgcccaccccctcgctcggctcattaataatgggaacatgacaagttataacgtaatgaaagcgaagaacacttcaactatcgaaggctttgggatggaaggat

SEQ ID NO: 8401 - DNA, 250 bp, Zea mays
  Clone ID: LIB3137-029-Q1-K1-H12
ctggaagccattttgaaccaaagacgattcctccacctctaacaaataaggctgactgggagagtaacccacttgaattggacttcacaaaagcaactgttatcggaaagggctctttcggtgaaattctgaaagcaaattggcgaggaacacctattgctgtcaagcgcattcttccatccttatctgatgacaggctggtgatccaagattttaagcatgaagtcaacttgctaataaagctgagaca

SEQ ID NO: 8402 - DNA, 425 bp, Zea mays
  Clone ID: LIB3137-030-Q1-K1-B4
tataattgcgtgtgtctttgattacgatgttttgctcacaaagttgctactgctttccaataattcttgacagcgtcaacgagtttgtcagtgcaaagaccgacccaatgataccagtgtatgaattcttaacttgattctctcatgccaggccagcagaaccatggcccatggttccccttatcagtgtctctctctctctctctatttttttttggctgactttgctgcttgcagaagcaaaaggagacatggatcttgcagcttctcgcggtggatcagatcaaaattgcgcacatgcttttcatgcctgtgctgctggtgccactgcttgccgaagcccaatgcgccaagctgcttcagctgttcttgttgcacctgccgcgacacgcagtgctgtactccgatctgccgctgttcaaaga

SEQ ID NO: 8403 - DNA, 390 bp, Zea mays
  Clone ID: LIB3137-031-Q1-K1-A2
acaggctactgatggagctcaaaagcaagagtgatgagttccataaccaaaaaagatgtgatgaggcaaagctgaatgctctgtcagaagaaatcgacctactcaattccaagatcgacaagctatccagtgagagaaatgagctattcgaaaagaatgagcagaaagaaaaggaattagctggaattagcgaaaaggacatgcaattgcaagacaaaactgctgagattacttcactaaataaagagcttgtattcctcaaggaccaagtgaagatgcatttggacgaactgcacagtttaaaacgtttgaagaacgagagggaggaaacaattggaaaactgcaaatagatattgggtcactgaaactccagtgtgacaacttgaaaa

SEQ ID NO: 8404 - DNA, 327 bp, Zea mays
  Clone ID: LIB3137-031-Q1-K1-A4
gcctcaagctgggattggcccgtcggcagaacaagtgcacgcgggaccgggcaacatttcccgctgcagccaacaagcagagggggcgacgatatatagccacgggcggccgttgctggatccggcatcttcctcgatcggcaagacgataggatggggttccacctgctggcgttcgtggcggcgaggggcctcatgcaggcgttcaacctgtcggcgccgctcagcctccggctgccgctcgcgcgccacctgccggaggccctcgccgtcctgtacggcgtgctcgccgcgcaagccgcgtggctcaacggcgccctggcgcgc

SEQ ID NO: 8405 - DNA, 79 bp, Zea mays
  unsure (1)..(79): unsure at all n locations; Clone ID: LIB3137-031-Q1-K1-A7
ttttgattttataaccaaaaaagatgtggggaggctgtgcttgaatggtttcggacaacgtaattanaccctactcaaa

SEQ ID NO: 8406 - DNA, 356 bp, Zea mays
  Clone ID: LIB3137-031-Q1-K1-B1
ggcccggcggctccagccccacggctgccgagcggataacgaacgactggcggcggctcgcgtcggcgttcctcctctccttctcctctctcctcgcatcgcagtcgcagcaggcaacaaaccaaatcgcttaccgcccccgaaccgtctcggttcgaatagcaaacctgttctggcaacaagccaaacaacccaggggttgttacccaaaacagggaataaatggaaaaaaagccccccaaatggcaaccccgccgtcgtccttttgttccagtttcgcttccttgcgaaccgcttcaatgggcaacccccggggaatggcttcttcacaccccacaaaaggctttcaatggaag

SEQ ID NO: 8407 - DNA, 319 bp, Zea mays
  Clone ID: LIB3137-031-Q1-K1-B10
atctaaattgcattttatttctgcaattgatctcatgacagggacgcccacagcgcgccaaatgttccagtatcatatatgcagacaggtacagtgtctaccagccacaaaggtggtcagcagcagggccaacaaatgaaacaataaactacaacattgcaggatcatctgcgtcgacatattttattactgcagaattgatcccagcagcactatcggtagttacggtagacaggagtgtacatgcagctctgtgcatatttcactaggtcccttgggggaggcagacgggtcgccaaaccgagttcataagcttttg

SEQ ID NO: 8408 - DNA, 306 bp, Zea mays
  unsure (1)..(306): unsure at all n locations; Clone ID: LIB3137-031-Q1-K1-B11
gaaaagggggccgccgaggcgtacggtttctcctangggnaacaaaagtttgccttttatcacacaggncgaggaggggggtgccgcanaactcatagcatggtgacgggcatcctaaccaatatccttatgttcaggagccagacgatgggatagatgagacaaaatgtggccaagtcgagctgtacacggatctcagtagggctaatattggatggcagccgcaggcttttactttcacatatcagaactcttatctgacgtttggtggtattaatggagcttacctacaccacttcaaaattt

SEQ ID NO: 8409 - DNA, 382 bp, Zea mays
  Clone ID: LIB3137-031-Q1-K1-B12
gcgctgcgccgtccttcacctccgccgccgaatccgagactctgatctcgggttcaccgcagcgcacagagcacccccgactcccgtcccgatccgcgctctcctctacgacgcttcagtcatggcaggaatggcacccgagggttctcagtttgatgctaagcactatgattctaaaatgcaggagctgctgagcactggtgagactgaggagtttttcacttcatatgatgaagtttttgaaagttttgatgacatgggccttcaagagaatcttctgagaggcatttatgcatatggtaggctgggagtcttctgttttatcttctgttttagcgagtttttctttacatggtattcctcgtactacccattcttcgat

SEQ ID NO: 8410 - DNA, 331 bp, Zea mays
  Clone ID: LIB3137-031-Q1-K1-B2
ggtcctcccgtcgtcgtcgactcgtcgtcgtcggtgttgctccgatgggcaaggactcgaagccgaaggacgccaaggggaagggcaagcaggcggccggctcctctggcggcgacgacggcggcggcaagggaggcaagggcaagggcaagggcaagggcggaaagtccgttgacggactcggcacttgcacctacgtaaaaggcacgtattgtgtgagaagcaggggaagatcaatgaaccttataaaaagttgcaggatggatggctgaataatggggacaaagttcctcctgctgagttggctaaggtaaggacccaaatgacgggc

SEQ ID NO: 8411 - DNA, 321 bp, Zea mays
  Clone ID: LIB3137-031-Q1-K1-B3
caagaaagtgttagctgagaaccctggtcttccatgcttctgcttcggtcactcgactggtggaggtatcattctgaaggctgcacttgatccagaggtagaaactctccttagaggtattgtcttgacatcaccagctgtccgtgttcagcctacacacccaatcatagcggtcatggcaccgatttttgccctcatcgcgccgaggtatcagttcacggcgtcccacaggaacggcccgccggtgttgcgcgaccccgaggccctgcgggccaaatacacggacccgctcgtgttcacgggcgccatccgcgtgaggac

SEQ ID NO: 8412 - DNA, 284 bp, Zea mays
  Clone ID: LIB3137-031-Q1-K1-B5
attgaaccaggatcaagaccagaaacttctgattatcctcagtcaagtgagaggccactgactgccacaagcagtttcagttctgcatccccattttcggaatcaagccaactagcttcgtctagtaaacaagcggccccatatctacctcgcaaccatatgggcaggcggtctttcatgtctaaaccagtgtacccacttgtcttccggaaccctgtgtccgaatcagaagcgtgcaagatgcttgaagttagtaatgccgggcgagcgacaccaagtgatga

SEQ ID NO: 8413 - DNA, 239 bp, Zea mays
  Clone ID: LIB3137-031-Q1-K1-B6
gcaacaccataatcgcaggagaatcgctgctccaccagactcggtttcctcttgcttcagcgtcaaaatcatggccgcagctggcaagtcgtcgtcggccatggaggagacggttgcggcgaccgccgccgcgcgggggcggcgcgggattgaccggcaggccgtcgacaggggcatcgcctacctgctcatggtggccgcgctcgtcgccacctacgcgcttcactagatttcgatct

SEQ ID NO: 8414 - DNA, 459 bp, Zea mays
  unsure (1)..(459): unsure at all n locations; Clone ID: LIB3137-031-Q1-K1-B7
ggtcctcccgtcgtcgtcgactcgtcgtcgtcggtgttgctccgatgggcaaggactcggagccgggggacgccaaggggaagggcaagcaggcngccttctactctggcggcgacgacggccgcggcaagggaggcaagggcaagggcaagggcaagggcggcaagttcgctgacggactcggcacttgcacctacggcaaaagcacctattgggggaaaagcaagggaaaaacaatgaaacttataaaaagctgcaggatggattgctgaataatggggacaaagttcctcctgctgaatttgctaacggaaggacccgaatgacgggcacgccttcactcttttaaggttaaggatagttaggtttgcttagacgaaaaggggagtgaggcactatgcgcattgatactgacgagacttcatcgttttgcgactttgaaagatttatatacatttt

SEQ ID NO: 8415 - DNA, 246 bp, Zea mays
  Clone ID: LIB3137-031-Q1-K1-B8
ggtcctcccgtcgttggagactcgtcgtcttgagtgttactcccatgggcaaggactcgcagccggagggacgccaagggaagggctagcaagctgcactgctacttttgcggagacgaccgggtgccgccatggaggcaagggcaagggcaagggcaagggctgcaagtacggttaccgactctgaacttgcacctacgtcaaaagcacctattgggtgagaagccagggaagatctatgaagct

SEQ ID NO: 8416 - DNA, 299 bp, Zea mays
  Clone ID: LIB3137-031-Q1-K1-B9
gccacaggcaggcaggcaggaggacgagttttcgaggaagctgcctgcttttcagatagttattaagatggcgttgcttcggctgcttgccttctccctgctcttcgcagtggccactcctgtcagggacatcgccgatgatgcctgctcgtcacaagtgaaggatttccagcacctgaacaacagctcggggctccacctgacgctgcaccacccgcagagcccctgctccccggcgccgctgcccgccgacctgcccttctgcgcggtgctcgcccacgacggcgcgcgcatcggcg

SEQ ID NO: 8417 - DNA, 428 bp, Zea mays
  Clone ID: LIB3137-031-Q1-K1-C10
gtcgtcgatcgttccatcgaccggcggccggccagcctagctcttggctcttgctccgatcggatcgagcgccggacaagtcaaggcagccgtacgtacgacgatggcgcagggcagccgcagcgctgccgtgcccgccgcagcgtccttcttcgcccttctcgccgtggcggccccgctgctcctgtgctgcgcgccggccgccgcggagctggccaggctggagcacccgcccaaggacggcggctcgctcagcctgctcgtcgtcggcgactggggccgaaagggcacgttcaaccagtccagggtcgcccatcagatgggcagggtcggggagcagctcagcatcgacttcgtcatatccaccggcgacaacttctacgagaacggcctgacgggcacggacgacgaggcgttcgagcagtctt

SEQ ID NO: 8418 - DNA, 389 bp, Zea mays
  unsure (1)..(389): unsure at all n locations; Clone ID: LIB3137-031-Q1-K1-C11
gaaaaangggccgacgacgcgtccgccccgccgttttcggcgggtagttttgggtttttgcctnagcggagtaccttaggggcgcggcctttcttttgccgaggaagagcacataatcanggaggtcggcatggcggaggtgcatctaggtctgccaggtccctgggcggcggattacagggagatggccgaccactacaccactaagatcggtggagttcctgattggccaactggtgatatgggcttcgagcccgagactctttagtgcagcttatgtgggaccaagctttgtcttgttgctcacgtacatgctcctgtggcaaatctaaacattgaggagaggataatctatgtgctttgtttgcccgacatcagaatgtggacct

SEQ ID NO: 8419 - DNA, 190 bp, Zea mays
  Clone ID: LIB3137-031-Q1-K1-C2
ccctgctcctcaactactgcgggaagagcgtccctcagggcttcctgtgcgcctaatatatatactagtggctagttcgtcactagcttcagttgccatgcatatttgtgattcttcttctttccttctagttcaccactgtatgtacgagcctcctccggatgttttctttggtattgccttctcttct

SEQ ID NO: 8420 - DNA, 380 bp, Zea mays
  Clone ID: LIB3137-031-Q1-K1-C3
attccaaacagcactgcccttgcttctaccgttccccaagtgcgctccctctctcgccatccatctcgtgcacgactgggcaaccgttgccgctgtcgaggtgcccaggtcttcatcggtccctcgtcagttcttctccggcccttcgccgccgacaagctcccccagctactgaagagacaggagcaaagagttaacaggagatgaatgcccctgaccgttatgagcgtttcgtcgtgccagagggcaccaagaaagtgtcctatgagagggatacaaagattgtgaatgctgcataattcactgtcgaacgcgaggatcacactgtaggcaatatcctccgaatgcagttgcacaaaaacccaaatgttttttttgcc

SEQ ID NO: 8421 - DNA, 365 bp, Zea mays
  Clone ID: LIB3137-031-Q1-K1-C4
ccttcttcattcgccgccgccgcctcctttctgctgtcgtcgccatggggagaaggcctgcgagatgctatcgccaaatcaagaacaagccataccccaagtccaggtactgccgtggtgtccctgaccccaagattaggatctacgatgttggcatgaagagaaagggtgttgatgagttcccctactgtgtgcaaccttgtctcttgggagaaggagaatgtctccagtgaggctcttgaggctgcccgtattgcctgcaacaagtacatgaccaagtctgcaggaaaggatgccttccaccttcgggtccgggttcacccctatcatgtccttcgtatcaacaagatgctttcgtgtgctgg

SEQ ID NO: 8422 - DNA, 366 bp, Zea mays
  unsure (1)..(366): unsure at all n locations; Clone ID: LIB3137-031-Q1-K1-C5
gtccgacgatctgtctcttctgtgttggtcgccccggacacaggctaatcaagttcaagttcgaccgcgcgcaggctagctccacgcggccatgccatcgctaatgtcgctgacgccgtggcggaggaagaagagggtgcctggtgggccggtgacggtgcgcacgcggcggcgcacctcgctgggtgctctgtggcggcgcctggtgcggacgctcacctgcgcgcgccgnccctactactgaccgaccgatagacgatgtatctatcatcctccatggacgacgtgctacgggaggatgatatcggttgccagctgatgaaagaggtgctgtgctaacagatgagggatcgatgcaatacaatg

SEQ ID NO: 8423 - DNA, 445 bp, Zea mays
  Clone ID: LIB3137-031-Q1-K1-C6
gaagtgactcgaataaattttcggagcatgatgaggatatggatctggatgattagagatgtgtggagcatggatgtatggcacacctttcaaccgctaccagctccaggtccaggctactcgaggaagacaagcatacatacgctcagaatctcctggacaggtgggaatcatcttgcatcgcgcagcgacacatcagcatctggattagtcccaggatcacaattcacaaggtcatccagcgtgggagcttgcctggaccgtactcggtatagaacaaggctttaatttgaaactaacactttgttcccttcttcattcacgtgtcattttttgtgggtacagccctaagaaactgtttatgtacaaatgttttaactgggaataaatcatttttttttgggtgagtttgatatctaatggcgactatgagctaatgagattg

SEQ ID NO: 8424 - DNA, 369 bp, Zea mays
  unsure (1)..(369): unsure at all n locations; Clone ID: LIB3137-031-Q1-K1-C7
cttcccaatccatcaatcgtcctctcgcgagccagagctatggagaagagccgggtgctgatggtgggcggcaccgggtacatcgggcggcggctcgtgcgggcgagtctggcgcaagggcacccgacgctggtcctgctgcggccggagatcggcctggacatcgataagctccagatgttgctctctttcaaggcccaaggcgcgcggctggtggaggcgtcgctggaggaccacgcaggcctcgtcgccgccgtggcgcaggccgacgtggtggtctcagccatgtncggngcacacattcgcaggcacaatctctccctgcagcataagctcgtcgaggtatcaaggaggctggaacatcaagcg

SEQ ID NO: 8425 - DNA, 444 bp, Zea mays
  Clone ID: LIB3137-031-Q1-K1-C8
ctcttaaacaggactactgtggcttgtaccttcctcaaggcgcacatgagccctaatcaaggatctcgtgcactactggacaaccgttgccactgtcgaggttattagggattcatcatatcatcgtcaggtttactacggtctttaccagccgacaagctcacatatttactgaagagacaggagctaagagttaacaggagatgaatgcctatgaccgttatgagcgtttcgtcgtgccatagggtaccaagaaagtgtcctatgagagggatacaaagattgtgaatgctgaatcattcactgtcaaacgcgaggatcacactgtaggcaatatcctgcgcatgcagttgcacagagacccaaatgttctctttgccgcgtataaactccctcacccactccagtacatgatcattgttaggatccacacaacgagccagt

SEQ ID NO: 8426 - DNA, 319 bp, Zea mays
  Clone ID: LIB3137-031-Q1-K1-C9
gacccacgcgtaacgccccgctatacccgcttccttctctccaattttcggcgctcgcatcccgctccgacttcgtgcgccgcggcagttccacgacgccagtcctctcacctctgtcctgacccaacacccgggcggctggaacccgcaggtgcgcttagtgccgctcgaggaggctcgccgtttgctggattcgttctgtcctttgccggccggcattgtgccctccgcggaggcgacaggggcgtgcgcggtgctgctgtaggggagggtgacggccatttccctggtcggccggggtccgggctggtggcgtgcg

SEQ ID NO: 8427 - DNA, 323 bp, Zea mays
  Clone ID: LIB3137-031-Q1-K1-D1
ccctaggagcgtgcttgaccggcggcggcgaggtgatggcgatggaccctgacgcggtagcgaaggccttcgtggagcattactaccgaacgttcgacaccaaccgcgcggcgctggttgggctgtaccaggagacctccatgctcaccttcgagggccagaagttccagggcccctccgccattgccggcaagctcggatctctccctttccaggcctgcgagcatcagatcgtcaccgtagactgccagccatcgggtccccagggaggcatgctcgtcttcggtctccgttccatacgcaccggccccgaagagcacccc

SEQ ID NO: 8428 - DNA, 443 bp, Zea mays
  unsure (1)..(443): unsure at all n locations; Clone ID: LIB3137-031-Q1-K1-D10
gaaaaangggccgaccgacgcgtccgggaatccgaatcagtaagtccggttacctatgtctctcggcttgtccgcagcccgccggtcggtaatggcgcaggatgatccggttgtttctgctcagtggctgcacgagcacctagggatgcctgatgttaaggtaaaaaaaaaacatctagtttgcgtgttcatattcacttcagagacacttcagtaatgcttccttcatcgaagaagaaagttcagagatatacttcttctatcccctgcgttactggtatgtggagaatataacagtttggttgtctatcaatttgatattcccttttatgtgttgtgttcttattactcccagaaataattagagggttagggacatattgtgcttgtgacaattatcaactcgttttaggttttggatgcttnctggtacatgccggtag

SEQ ID NO: 8429 - DNA, 402 bp, Zea mays
  unsure (1)..(402): unsure at all n locations; Clone ID: LIB3137-031-Q1-K1-D11
gcggagggcgcgnccgcttttctttgcgcctctatcaagaagcacnngnnagaggactgcgacaaggtacccctgccggggccggagtaccacccggngcctgaccacagcaagccgccggngccggagtaccacccggngcctgagcacagcaagccggcgccggagtaccacccttctacgccggaataccaccctcccactccagtgtacgggcagccaaagccaactccgatctaccattcttccgctgagcactgagttcgatcaacaacgaacgccagagctagaagaacggcaggcttttgttagttattaattcagtactgcacgtgttactagtgcgcctcatgcatggagaattaaatggtgtgaaatatagctgggagcttgtactttatt

SEQ ID NO: 8430 - DNA, 368 bp, Zea mays
  Clone ID: LIB3137-031-Q1-K1-D12
ccgccagacactctatagtctgtaccccaagcaccggcgcggcggcggctaccatggcagtcgggaagaacaagaggatctccaagggaaagaagggtggtaagaaaaagaccgtcgatcccttctctaagaaggactggtatgacatcaaggccccatcggtgttcagtgtgcgcaacattgggaagactctcgtgtccaggacacagggtaccaggattgcctctgatggtctgaagcacagagtctttgaggtttgtctagctgatcttcagggtgacgaggatcaggcttacaggaaaatcaggctccgtgctgaagatgtgcaaagcaggaatgtgcttacaaacttttggggcatgaatttt

SEQ ID NO: 8431 - DNA, 292 bp, Zea mays
  Clone ID: LIB3137-031-Q1-K1-D2
cgaattgccaaatgatccagaaacttttgtccatcgttctggacgcactggacgtgctgggaaagcaggaactgcaatcttgatgtttaccagcagccagaaaaggacagttaagtcacttgagcgtgatgttggttgcaactttgagtttataagccctccgtccatagaagaagtgctggagtcatctgctgagcatgtcattgctacattgagaggtgtgcacccagagtcaactaaatactttcttggagctgctgagaaattaacagaagaattgggacctcatgct

SEQ ID NO: 8432 - DNA, 323 bp, Zea mays
  Clone ID: LIB3137-031-Q1-K1-D3
gcgaacctcgccactcgcccactccgctcccaaagaagaagaagacgacgacgacagcaaggtgccgccgtcacgagatccgtccgaggtgaccatgtctacgcctacgaggaagcgtcccaggaaaaccaacggctccacgtcgtcgtcgtcgtccgcgatgcgtcggacgacgagcctgtcggacctcgcgccgccgccggatctctccgggaggcccaagacgcgggcggcgagggggcatgcggtggcagggccagggaccgcgtggggcgccgagatgacgatgacgcactcggcggacttcctccccgccatggaga

SEQ ID NO: 8433 - DNA, 278 bp, Zea mays
  unsure (1)..(278): unsure at all n locations; Clone ID: LIB3137-031-Q1-K1-D4
tagatatatacgatcgaacatatatntngatttatntatgctngaggtgtcgacgctgcgcggcccggctagcatcngcagcaaggcggatcatcactgctgcggcggcggcggcttcgtcggcgaccaccatgtggtgttcccgacgtccggcgactgcttcgccatggtggacgacaacctcctggactacatcgacttcagctgcgacgtgcccttcttcgacgccgacggggacatcnctcccgacctggaggtagacaccacggagctcctcg

SEQ ID NO: 8434 - DNA, 280 bp, Zea mays
  Clone ID: LIB3137-031-Q1-K1-D5
ggcggctggcctgggacgacgatgagcgccaagaccagagctggggccgcccatgtacgccggcagctcgtcgcggccgtggcggtgacggtggcatgcttctactcctcggaggcgacgcagctgcaggtggggtactacaacggcagctgcccggccgccgagagcctcatcgagaccatcgtccacgccgccgtccgcaaggacgccggcaacgggccgggcctgatccggctcttcttccacgactgcttcgtcaggggatgcgacgcgtcggtgc

SEQ ID NO: 8435 - DNA, 430 bp, Zea mays
  unsure (1)..(430): unsure at all n locations; Clone ID: LIB3137-031-Q1-K1-D7
cgaattgccaaatgatccagaaacttttgttcatcgttttggacgcactggacgtgctgggaaagcaggaactgcaatcttgatgtttaccagcagccanaaaaggacagttaagtcacttgagcgtgatgttggttgcaactttgagtttataagccctccgtccatagaagaagtgctggagtcatctgctgagcatgtcattgctacattgagaggtgtgcacccagagtcaactaaatactttcttggagctgctgagaaattaacagaagaattgggacctcatgctcttgcttctgcactggcacatctggatggattttcttaaccaccttcgtcaccttctcttatcagtcatgaacaaggattggtgacgttgcaacttacttgaaaacaaggatttggcaaaggcctttttttttctaaa

SEQ ID NO: 8436 - DNA, 468 bp, Zea mays
  Clone ID: LIB3137-031-Q1-K1-D8
gaccacgcgtccgcgaattgtcaaatgatccagaaacttttgtccatcgttctggacgcactggacgtgctgggaaagcaggaactgcaatcttgatgtttaccagcagccagaaaaggacagttaagtcacttgagcgtgatgttggttgcaactttgagtttataagccctccgtccatagaagaagtgctggagtcatctgctgagcatgtcattgctacattgagaggtgtgcacccagagtcaactaaatactttcttggagctgctgagaaattaacagaagaattgggacctcatgctcttgcttctgcactggcacatctgagtggattttctcagccaccttcgtcacgttctctcatcagtcatgaacaaggatgggtgacgttgcaactaactagaaaacaaggatttggcaaaagcttcttttctcctagatcttgtactggttttctatctgatg

SEQ ID NO: 8437 - DNA, 340 bp, Zea mays
  unsure (1)..(340): unsure at all n locations; Clone ID: LIB3137-031-Q1-K1-D9
tcgaccgacgcgtccaggcaacctggacgcttcgccagtgctttccaagagacgtagactgctacgaccacaggaaggtgtcggtcggacgagatgcggccgaggggaccatgtggtctcctaccaggaaccgcacgacgaaaactaatacggtggacgtcgtattggtcgntcgcaatgcgtcagacgactagactgtcggacctagcaccgtcggcagatctcttcgggaggcccaatacgcgggcggttaagaggtatgccgatgcatgtccaggtaccgaatggtgctcacagatgacaaggacggactcagcggactggctaccttgcatgtaga

SEQ ID NO: 8438 - DNA, 454 bp, Zea mays
  Clone ID: LIB3137-031-Q1-K1-E10
ccgccagacactctatagtctgtaccccaagcaccggcgcggcggcggctaccatggcaggggggaagaacaagaggatctccaagggaaagaagggtggtaagaaaaagaccgtcgatcccttctctaagaaggactggtatgacatcaaggccccatcggtgttcagtgtgcgcaacattgggaagactctcgtgtccaggacacagggtaccaggattgcctctgatggtctgaagcacagagtctttgaggtttgtctagctgatcttcagggtgacgaggatcaagcttacaggaaaatcaggctccgtgctgaagatgtgcaaggcaggaatgtgctcacaaacttctggggcatgaattttaccaccgataagctcagatctctagtaaagaagtggcagacattgattgaagcccatgttgatgtcaagacaaccgacaactacat

SEQ ID NO: 8439 - DNA, 415 bp, Zea mays
  Clone ID: LIB3137-031-Q1-K1-E11
cagcgctccagctcccctccatcctcggcttatataattctgcggcgagctccgaggcggggggactactaacccacgccgcagaagccgcgcgacctgatcgcgcgggggtcgaggagaggggaagcgcggcgccgcggttgcctgccaccgtaccgccgcaggagaaggaagaggagcccgtatccctccgccccgctgcccgccggaccgatggactccgagcactggatctcgcgcctggccgccgcgaagcgcttctacgcggcgcagctcggccacagcgatcgggccgggatggacgagctggagatggacgaggaggtcaggcccgaattcccctgcccctactgctacgaggaccacgacgtcggatccctttgcgcgcacctggagaggagcacccgttcgaccc

SEQ ID NO: 8440 - DNA, 297 bp, Zea mays
  unsure (1)..(297): unsure at all n locations; Clone ID: LIB3137-031-Q1-K1-E12
gattnggaaaaaactatattttatagtttttatgattcatctattggtgggggcgccgcagttttttcaaacatgagggctgctggcatttcaagtgctcaagtgacatcattcttgttggaatctgttgagagtggtgatctaatagcttatggacttatcccagaatatattggacgcttccctatccttgtgagcctgcccactttaaatgacgaccattttgttcaggttctgattgagccaaagaatgtccttggcaaacaattcaagaaattgtttagaatgaataatgtt

SEQ ID NO: 8441 - DNA, 281 bp, Zea mays
  Clone ID: LIB3137-031-Q1-K1-E2
gccacatcgagaacacgatcgagcacacaagcacgaagactcgtttaggagaaaccacaaaccaccaagccgtgaaagcatcatggagtacggtcagcaggggcagcacggccacggcgccacgggccatgtcgaccagtacggcaacccagtcggcggcgtcgagcacggcaccggcggcatgaggcacggcacgggaaccggcggcatgggccagctgggtgagcacggcggcgctggcatgggtggcgggcagttccagcctgcgagggaggagcaca

SEQ ID NO: 8442 - DNA, 386 bp, Zea mays
  Clone ID: LIB3137-031-Q1-K1-E3
accgaccccaagcgctaccagcagggcctccccgccgagtgctccatgcagtagcgcccgggtattcctcgcccgtccaacaatggcgcgcgcgcgcgtgtgtgtgcatgtggtccgctctactgctaccgctacgacgatcggtgtcgatcaccggatcaagcaagacgaaaggcatcgaaacatggtagataaataaggacttggccctgcgttgtgtggtggtaagaaattcttctgcctgtgttcttgtagagcctactcgtacgtgctcgtccaccctgtacgtacgtacgtgtacgtagtctgccgcccccgcttgatcgggtcctcctggtttgtgtctgattatactcgtcctcccattaaaaaaaaaaagtggttca

SEQ ID NO: 8443 - DNA, 461 bp, Zea mays
  Clone ID: LIB3137-031-Q1-K1-E4
ggcgaccacgcgtccgactcagtcagcacgacaatgagattgaggttgatatctatagctttgatgttgaaacattatgggagctcgatagattcgtgacaaactataggaagagtataactaagaataagcggaaggctgagctttctgcggtaaggccggatgaagctgatcctgatcaggagccggagaaggtagaacatgtgaggcagggcaaggcggatcaggatcaaattcctgcagtacaagaaccgattccagaaccagaaacagttgatgttgatccacctaaggaaagtgcagcagatgataatgagagatgtgtgggtgaatcatcacctggtcatttggaagatcagaagggagagaatgctggtagatcaagtagttctggaagctctagcagtgactcgggttcatcctctagtgatacggacacagatagttcatcagcagatggt

SEQ ID NO: 8444 - DNA, 456 bp, Zea mays
  unsure (1)..(456): unsure at all n locations; Clone ID: LIB3137-031-Q1-K1-E6
ggaagaagctcgtccggcgccccgcgacgagacgacggcctcctcctccgctccgctgaagaacgacctccccgctgacagcgttggcgggccttgtagcgaggagggggtgcggaggcgcggcgattgttcgcgggatgagcttcggcggcagcagctccctcgcatcaggtgcgaagaggccgttcgagtacgggagaacgcatgtggtgaggcccaagggcacgcacaaggccaccattgtctggctccacggacttggggacaatggagccagctggtctcaactactggaaactcttccccttcctaatataaaatggatatgccccactgcaccttcaagacccgtgtcagtgtttggcgggttcccctccacagcatggnttgatgttgctgatctttctgaggatgctcctgatgaccatgagggaatcgatgcctcagcagcacatg

SEQ ID NO: 8445 - DNA, 448 bp, Zea mays
  unsure (1)..(448): unsure at all n locations; Clone ID: LIB3137-031-Q1-K1-E8
gacggttcttgttcttcttcccacccagcgtgcgctccctcttcctcttccccttctctgtcggcgacgactgggtggccggagctgcctacatacgcctggtgccctggtcttcttcgggccattcgccggccgcgagcaccaccaaggagagcttaccaggtagagctgtttatccgtactctagcagatggcaaggataaagcctaaccaattgctaatccaaagcaaaacatagaaggctccatctcgaatcagctactctactatcatcacatggaacttgattgtcatattggttgtgctatctctctatgctacctacagccattggcatcaaaggttaatgtcctttccggaaaccttttttgggtttaatttactattttttatgcacctagcacacttatatatngcaataagttgagatgaagtaagctcatgccga

SEQ ID NO: 8446 - DNA, 380 bp, Zea mays
  Clone ID: LIB3137-031-Q1-K1-E9
gaccacctcgcgccgccgccgcgcagcagctgtagcagatcagagaagatggcgggactcgacaccttcctattaacctcggagtccgtgaacgagggacaccctgacaagctctgcgaccaggtctcagatgctgttctggacgcttgccttgctgaggaccctgacagcaaggttgcttgcgagacctgcaccaagaccaacatggtcatggtctttggtgagatcaccaccaatgccaatgtcgactactagaagattgtcagggagacatgccgcaacattggcttcgtgtcgaacgatgtcgggcttgacgctgaccactgcaaggtgcttgtgaacatttagcatcagtcccctgatattgctcaaggtgtgca

SEQ ID NO: 8447 - DNA, 399 bp, Zea mays
  unsure (1)..(399): unsure at all n locations; Clone ID: LIB3137-031-Q1-K1-F1
aaaaangggccgacccacgcgtcggcttagcgaggtgctgttatggctgttttgagctgttcgcagggccaacagcgccagccggagacggcgtgtggagcatcatcacccgaccatgttcacacatgctagccaccacagcacagcaggtgccagggcgccttctacacctacgacaccttcatagaggccgccagcaagatacccggcttcggaaccaccggcgacgagcagacgcgcaggcgggagctcgccgccttctttggccagacatcccacgaaaccaccggtggatgggcgactgctccggatggaccgattgcctggggatactgcccggtgaaggaacagaaacagacggacccaccctactatggacaaggacccatacagttaact

SEQ ID NO: 8448 - DNA, 409 bp, Zea mays
  Clone ID: LIB3137-031-Q1-K1-F10
gtgttcaggacttggatggagttacccatgtgatatctggagtgttggttgtattcttgttgagctttgcacgggtgaggcgatattccagactcacgaaaacttggaacatctggctatgatggagagggttcttggacctttgccgtaccatatgttcaagagggcagagtacgtttcatgccattgtctcatatcatatgcttaagagggcagggttctctgaacatcagtgctgtgagatctggtcgatgtcttgtgcttattaatccttgtttgtagtcggcactctgacaaatacatcagaaaaggacgcctgaattggcctgaaggttgcacttcgcgtgaaagcatgaaagctgtgatgaaattgtccaggcttcagaatctggtgatgcaaaatgtggat

SEQ ID NO: 8449 - DNA, 371 bp, Zea mays
  unsure (1)..(371): unsure at all n locations; Clone ID: LIB3137-031-Q1-K1-F11
cgcttgacctacccccctccgtttctcgcctggcctgcagggtgttcgacgctgcgcccggccgcccgagcgccgccacggcatggcttcctccatctccgccgccgctaaggcctccgcggcctttgcccaaaagaaggagctggccgcgccggcgccgcaccgcgcgggctcgagccgtcggaccaagccgtgccgcgtgcgcgccgtcgcgtcgcccgcgcgcagcccccgcgccccgtcgtccaccggctcggtgaagaccgcgatgacgatgacggagaagatcctggcgagggcgtcngagcgcgcggcgctggagcccggggagaacgtgtgggtggacatcgacgtgctcatgacgcacgacg

SEQ ID NO: 8450 - DNA, 350 bp, Zea mays
  Clone ID: LIB3137-031-Q1-K1-F2
tggcgatatgtttaccaaagaatcagctaatgtggtggatgaggttaagctgaaggtcgtctacatcccaccacccaaaccgccatccccagtgcatgaggaatctgaagaaggctcatcaccccgaccttcattgtccgatggaattaacttgaattatcaagagacaacgagggaatctgatgagtcactgttgttctcggctgtaaaaactcatatagatcaaaaggactacacctctgagacatctgctttgatttcaaagttgacagaagagagaaactctgccattcagcagaacaataagcttcgagaggaactggaccttacgaggagggaagccagcaagc

SEQ ID NO: 8451 - DNA, 378 bp, Zea mays
  Clone ID: LIB3137-031-Q1-K1-F3
gccactccccactcctcacggctcacgagggtacggcacctcgccgtggcccgcggctgtttccgaggcaagcggactcaccggcgtcctgcgcacgcgaggcgagcagcggctccgtcgacctgcgagccaatccgtctttatttctccaccccaatatccaaacataagataaaaatctatccaacactcatttcccacgccactcccccactccctctccaccctgcttccgttttcggccggcgatggcgacgaccgccgccgcatccacgtcgctccggccgctgtcaccgtccccacctcgcatcgcgagtttgccccgtcggtggtgttggggaatcccggtgcagtccttcgggcggagcgcatccatgc

SEQ ID NO: 8452 - DNA, 322 bp, Zea mays
  Clone ID: LIB3137-031-Q1-K1-F4
attcctcccaaggcaagaaaccaagaccatggctggcacggccaagacccccgtcctcggcttcctccttgctcttgctcttgtggccacctcgacgccggctgcggccaccacgctgacgctccacaacctgtgtccgtaccccgtgtggccgctggtgagcccgaacaccgggttccccgccatctccgagaacacgggccgcctcgacggcggcgggcgcgggctggtctccttccgcttcccggacagcttctgggcgggccgcgtggtggcgcgcacgggatgcagctccgggcattcccggtgcgagacggggagc

SEQ ID NO: 8453 - DNA, 301 bp, Zea mays
  Clone ID: LIB3137-031-Q1-K1-F5
gagctggtcaacagaaccacattcaagggctacaggagtagaccgaatacatagaggcgagcgcgctgtaggtataaggcacgctagcgacatcgacgtgacagataaaggccctgaatcagcaatacagcttacagaagaggaagagaaggacgtaggcgacctgggatggatgccatacaaagaatacataaatgtatgcaagggggctttgcaattctctcgaatgcaaattgatgatgtgctactcacgtgcattcagatcgcatgaacatattggttaggaagggatgttcaaatt

SEQ ID NO: 8454 - DNA, 323 bp, Zea mays
  Clone ID: LIB3137-031-Q1-K1-F6
ccttcgtcgccggtgagggtacgttgtggttccaaaaggggaaggagagggaggaggacggcgccgacgggaggagccaaggagccaacaacatgaggacggggtcgaggtggccgacggaaaactggatttgggtgacctttacggcgcggcggcggggtgggtagaggcgcggaccagctgcccgcacctcggcaccatgccgcccgctggtgctgaattgctgatgaccttgctcgcgtgcctccgcccgactctccgtgctccagatgtcatgaccctgctgaaaactgattatgcttgatatgcaaagatgtgatgtg

SEQ ID NO: 8455 - DNA, 420 bp, Zea mays
  Clone ID: LIB3137-031-Q1-K1-F7
atatgtgtaccaattaatcagctaatttggtggttgaggttaagctgaaggtcgtgtacatcggaccacccaaaccggcatccgcagtgcatgaggaatctgaagaaggctcatcaccccgaccttcattgtccgatggaattaacttgaattatcaagagacaacgagggaatctgatgagtcactgttgttctcggctgtaaaaactcatatagatcaaaaggactacacctatgagacatctgctttgatttcaaagttgacagaagagagaaactctgccattcagcagaacaataagcttcgagaggaactggaccttacgaggagggaagccaacaagcagaatggtggattctcctttggggtcgggggggccattgctctccgggaatgctactgggatatataatgaagag

SEQ ID NO: 8456 - DNA, 419 bp, Zea mays
  Clone ID: LIB3137-031-Q1-K1-F9
cacgaatttctaaaaattaataggcagcgatacgatatatgcttcaatactaataaatgagttgcagggcgagaacggccgcataggtcttgcatttgatgtaatgggtcgtgtgccatacggaacatcatttctagatgaacaggccaaagaaaggtccatggacattaacctaggatggttcttggagcctgtggttcgtggtgactaccccttctcaatgagatcgttagcgagggaacgactacccttcttcagtgacaaacagcaagagaagcttgtgggatcctataacatgttgggaataaactactacacctcaatattctccaaacatatcgacatctcaccaaaatactcgcctgttctcaacactgacgacgcctacgctagtcaagaaagtaaggaactatagttga

SEQ ID NO: 8457 - DNA, 331 bp, Zea mays
  Clone ID: LIB3137-031-Q1-K1-G1
acctgctcgcctctcgcgcatcctaccaggagggtgggagacccaggcagcggaggtgtgcgaagctcgcttcgcaccacgcgctgcggcctgcggggcgagagatcgaggcctgagctagggtctggtggcggagatgtcgacgccggcgaggaagcgcctgatgcgggacttcaagcgccttcagcaggacccgcccgccggcatcagcggcgcgccgtacgacaacaatatcatgctctggaacgccgtcatattcgggccggatgacacgccgtgggatggaggcacgttcaagctgactctgcaatttacaaaagattaccccaac

SEQ ID NO: 8458 - DNA, 196 bp, Zea mays
  unsure (1)..(196): unsure at all n locations; Clone ID: LIB3137-031-Q1-K1-G10
ggccgacccacgcgtncgnggacgcgtggaaggcacggnttatacataaaattatgcgcagccactttgcgcgggttgtggctgcatatgcgagcgcacacgctgggtgttgagacacctgcggcggcagatgaaaagggaaactagcatgcatggagtggaccgactggtacctgtaagagctgatatcgatatg

SEQ ID NO: 8459 - DNA, 368 bp, Zea mays
  Clone ID: LIB3137-031-Q1-K1-G2
ccgagcgtagcctctccgcggcgcgatccagatccaggtttttcagcatgggcctggtgaaggaaggcatcgacatggaggagggaacccttgagatcggcatggagtacaggactgtatctggtgttgctgggcctctggtcatattggataaagtaaagggcccaaagtaccaagaaattgtaaacatccgacttggagatggcaccaatcgccgtggtcaagtcctggaagttgatggcgaaaaagctgttgtgcaggtctttgaaggaacttctggaatagacaacaaatacacaaccgtgcagtttacaagcgaaggtttgaaaactcctgtctcacttgatatgcttgggcccatttttaat

SEQ ID NO: 8460 - DNA, 312 bp, Zea mays
  unsure (1)..(312): unsure at all n locations; Clone ID: LIB3137-031-Q1-K1-G4
gcgacccacgcgttccggacgcntgggcggacgcttgggcggacttttgagcaaacccaggttccctgctaaagggagctatacatgtcattagttgtggatatgacgataaaacagaatgggggaaagagatcggatggatatatggctctgttactgaagatattttaactggtttcaagatgcatgcaagacgttggatatccatctactgcatgccacttcggccttgctataagggttctgctacaattaatctttctgatcgactcaaccaagagcccagcgtaaccaggcggattccggtacccc

SEQ ID NO: 8461 - DNA, 366 bp, Zea mays
  Clone ID: LIB3137-031-Q1-K1-G5
tggagatctccttccacttcgagtcctctgtcatcccgttcatcggccgcatcgcgccctccgatacctaccgcatctggaagcgcggcgccgcgctccggaccgacatgacgctcgctggcttcgacggcttccgcatccagcgctcggaccagacgttcctcttcctcggtgacggcgccaggcccgaggatgccgggggcaaggagctgcactcgggctcgctaatagtgctggcgcacaaggataaggagattacggatgcgctggagggggcgggcgtgcagcccacagagtctgaggtggcgcatgaggtagcgctcatgtccaagaccaacatgtaccgtccagggatcgacgtcacgc

SEQ ID NO: 8462 - DNA, 334 bp, Zea mays
  Clone ID: LIB3137-031-Q1-K1-G7
cggacgcgtgggcggacgcgtgggtgcagtgctactcattactcaacttgcaaatgcagggcgggaggagcatgagcgcagtggaggccatcaaggaggcggcaacgaacgtgggtgcctcggcctgggccggcaaggagaagaccaaggccgtcgtgcaggagaaggcggccaaggcgagggcgcacgaccctgccgagaaggcggtggcggaagccaggatgcatgagcgtgtccacgaggtggaggccatcaagcaggacgccatgcgcaagaacgccaccgccaaggagcgcgccaccgtggtagagcaccacccgacgccactcgacgt

SEQ ID NO: 8463 - DNA, 287 bp, Zea mays
  unsure (1)..(287): unsure at all n locations; Clone ID: LIB3137-031-Q1-K1-G8
gacccacgcgtnncgaaaagctagctaaccctagctctagctaggctcgtctgctgcaagaaggtaacagtaacagcaggcatggaggggaaggaggaggaccaccgcctgggcgccaacaaagactaggagcgccagaccatcggcacggaggggcatggcacggacgacaaggactacaaggagcccccgccggcgccgcttttcgagcccggggagctcaaggcctggtccttctaccgcgccggcatagccgaattcagaaccacacttctcttactctacat

SEQ ID NO: 8464 - DNA, 338 bp, Zea mays
  unsure (1)..(338): unsure at all n locations; Clone ID: LIB3137-031-Q1-K1-H1
cattttccccaaaacaaaacgactcgttctttcccgggggaggggaggactggagaagcctggccagccatggacccgcccaaccctaaccccaacgatgccccgtcgctcccagccgaatccgcggccagactcgccgccctctccctttgtggcaccagggaccttcccccggacttccacaccgccgagatcctcgacgacgacgagggctacctcacctccgcgtccagaggcgggagcagcacctccgcgtggaaggaggcgcccgagggactccacgacgatgacaaggatggggacgatgtcntccagcccagccccaaaagcagcggata

SEQ ID NO: 8465 - DNA, 460 bp, Zea mays
  Clone ID: LIB3137-031-Q1-K1-H11
gccaaggcctccgtctcctacggcagtgagtcctgctcctcggcctacgcctacgcttacgccgccgccgccagcagccagccagagtgtagcaccaattagttcgagtgatgtctctctgcccacatcatcattagatctcccagatgttgcagatctctttgctccccctgcagacaatgcatcaaggaagagggaatcaaatgggtctgctcttcatgactcgcgcaataaatttccaaggatgcaatcacaatcccaaggcataggaagtgctgcagggaacgccctaattccaccgcagcttcgtggaaggagcaatgttgttactgaagacatgagcaaactctttgtggctaaacgaaaagagtagcatcttaaccttttctggacctgaacctctgtttggactccatagactgataaacgcatgtactggtcccatagtgcaatggatgtg

SEQ ID NO: 8466 - DNA, 334 bp, Zea mays
  Clone ID: LIB3137-031-Q1-K1-H12
cggacgcgtgggttcgccacgaacaaaagcgcatcgatctcgctgtcgtcactcctcgtggcccagccacgaacagaggcaccacccagcatggccctgcaggcggcgctcctcccatccaccctctcatccgtccccaagaagtgcagcctcgccgtcgcggcgaaggacacggcattccttagcgtatcccagaagaaggtgcaggcggcgtcgctgtcggtgagaacgcgggtggcgacgacggcgcctgtggccacgccggggtccagcacggcggccaaggatgggaagaagaccgtgcggcagggcgtggtggtgatcacgggcgcgt

SEQ ID NO: 8467 - DNA, 356 bp, Zea mays
  unsure (1)..(356): unsure at all n locations; Clone ID: LIB3137-031-Q1-K1-H2
cacctccatttagctactactactccctcgctgtcttccccaaccaacaaatcgacctagctaggcacaagagcgctagacgccgcagcgcagcacgcaccacccaccgagcggcggcggaggcagggcaatccgcagggagcagaggccgcgcgcgcaggcatgggcgcgccggtgcacggcgccctcgccttgttcctcctgctcctggtgggggcaggggcggcgcccgaagagacngcgccgcaggaacccacattgccagccaccggctccggcgctaccggcgcgccggcggtcggggtcaactccaactccgtgctggtggcgctgctggattcgcactacacggaact

SEQ ID NO: 8468 - DNA, 308 bp, Zea mays
  Clone ID: LIB3137-031-Q1-K1-H3
cggacgcgtgggcgggtcttcacgatgccgtcgccgccacacgacatcgcacatccgctcttctccgtcccctcgctctcggcggtcgacgtgcgctcccctggtgccatcgcttgtgcccggctcccgccatcgctggctccccgatggacctcgcggctagtgtggggccatggatccccgacggatcgagggtcgcgccgcctcatgaggtcagtgagcccgcccacactctacttgcttgctccttgttctacgagcttcggctgcgctgaagcggtcatggtcgctggtcatgtggaattaga

SEQ ID NO: 8469 - DNA, 450 bp, Zea mays
  Clone ID: LIB3137-031-Q1-K1-H5
cttagctgaatccctgaaccctctccgtctgagccgcgttctgccctttattatttataaaggtgaccaccctggcgatgcgccggggagcaagtgcgtcgtaaaagcagctgggcacagtcaaaaagagtgagcccttgttaatgggcattttggggacggagcatgaaaagatgctgggtgtacttgttcgtcacgcctttattagttttaagctttgcttcttcacattctcgcgaacgcaagatgatgttccgcgcgtctccggcagaggagtaccgtgtgttgcgcaccactctgtcgcggacaaagttccattttccaaaacgggccactgtttagccggttccctgtaaccaccaatcaggcagtgctcggtagctgctgccacaccacctaaactaatgtatctatcggtcaaggagttactactattggcggtatatatat

SEQ ID NO: 8470 - DNA, 327 bp, Zea mays
  Clone ID: LIB3137-031-Q1-K1-H6
cgacccacgcggtccgcgcgtgccccgctcccccgcagcacccggctccccttttcttgcgcgacgcgagatcggcgagattgccctcaacgcgctcgcgtcgcgccgcggatcccccaccctcctcccctctgcacgccgccatcaactcgcacctgccctcgcccgtgatccatcctctcccctgcggcaatgatatggcgtgccccctcaaccgaccattcccgcagcggatccgcaccgacccgttcgcgccggtctctggaagaagaatccaccgaaggcgaaaacgaccatggaggttcggctgactcgtctgggtctttg

SEQ ID NO: 8471 - DNA, 305 bp, Zea mays
  Clone ID: LIB3137-031-Q1-K1-H7
gagagagagagagaccccaggtcctcgctgtatctggcggaaaccggcagctatggctcgcagaatcggagcccgtggcccggcgcggctggtttcgagagagcgcggaggccggagaagccaaaccatggccgcccgtgcccaccggttgccggttgggcgccctctcccggctcccgataagtccacgggatcgggaccgcgccacatgccgcacatcacatccccaccccttccaacttccaaactcggcaaacccaacgggcaggccccgtgagccttgccgctctctcggagcactagcg

SEQ ID NO: 8472 - DNA, 124 bp, Zea mays
  Clone ID: LIB3137-031-Q1-K1-H8
gacacatcactattaacaaaacttttttttttgtttcctatactaagtacaaggggatccgtggattacctgacgctcccggcccatgaaaaaattgcacttaccgtcttactatttttaaaac

SEQ ID NO: 8473 - DNA, 431 bp, Zea mays
  Clone ID: LIB3137-032-Q1-K1-A1
ggcaaagcgcctggacccctcgctgcccatttacgacctcctcacctcccttctcaaccccgaaggcgactcccaggcttcttcgcccccgccgtcttcaccaccgcaaactgccgcagcaggggcatcggaggcagttgaggctgatgggctgagagagaggaagcacaagggcaagaatagggaggaggaggcgactcctgctgccagggagtacaccgcagagcaactcgaggtcgtgcgccaggtcaaaaagcacaccagggactactaccagatcctcggcctggaaaaggactgcagtgtcgacgacgtgcgcaaggcctaccggaagctctcgctcaaggtgcaccccgataagaacaaggcccctggcgcagaggacgccttcaaagccgtctccaaggccttccagtgcctgacagatgctg

SEQ ID NO: 8474 - DNA, 403 bp, Zea mays
  Clone ID: LIB3137-032-Q1-K1-A2
gacccacgcgcccgggcaaagcgcctggacccctcgctgcccatttacgacctttttacctccctgctcaacccggaaggcgactgccaggcttgttcgcccccgccgtcttcaccaccgcaaactgccgcagcaggggcatcggatgcagttgaggctgatgggctgagagagaggaagcacaagggcaagaatagggaggaggaggcgactcctgctgccagggagtacaccgcatagcaactcgaggtcgtgcgccatgtcaaaaagcacaccaaggactactaccagatcctcggactggaaaaggactgcagtgtcgaggacgtgcgcaaggcctaccggaagctctcgcttaaagtgcaccccgataagaacaaggcccctggcgcagaagacgcct

SEQ ID NO: 8475 - DNA, 426 bp, Zea mays
  Clone ID: LIB3137-032-Q1-K1-A3
agcaaacaacaaccaccgcttgtttcatcattaatcgtggatgagaaccgaaaggtgtagtagccttttccggtagggcatctgctagagccggccggttgaagcaggggagcgagaggaggagggcagccgagcaggagcatcgcagtggtggttaagcagcagcaacgacgacgacgacgacgctgagaggtttccccgttcccgacggcacgtccaccgaggcggcgccatcgcgatgggtcctctggcgccgctgaggtgtaacccgccgccgccgttctccaagtcgccggggtccctgctgctgctgtccaagtcgctcaccctctactgctgaaccgagccccctcctcgatcggttccatgggcgccgtggcctcgtcggcgggtggggcccggggaggcgatggcacggtgctgggc

SEQ ID NO: 8476 - DNA, 426 bp, Zea mays
  Clone ID: LIB3137-032-Q1-K1-A4
agcaaacaacaaccaccgtttgtttcatctttaatcgcggtggagaaccgaaaggtgtagtggccttttccggtagggcatctgctagagccggccggttgaagcaggggagcgagaggaggagggcagccgagcaggagcatcgcagtggtggttaagcagcagcaacgacgacgacgacgacgctgagaggtttgcccgttcccgacggcacgtccaccgaggcggcgccatcgcgatgggtcctctggcgccgctgaagtgtaacccgccgccgccgttctccaagtcaacggggtccctgctgctgctgtccaaattgctcaccctctactgctgaaccgagccccctcctcgatcggttccatgggcgccgtggcctcgtcagcgggtggggcccggggaggcgatggcacggtgctgggc

SEQ ID NO: 8477 - DNA, 388 bp, Zea mays
  Clone ID: LIB3137-032-Q1-K1-A5
ctccccccactcgtctgctttgcctccacctatccgccgcctcccaatcatcctgcccccggactcccaccccgcagcatccccacgccgccgcacctcgtcgcgtcgcgtcgtcaccggcgtgaagatggtcgggccaggcctctacaccgagatcggcaagaagaccagggatctgctgtacaaggactaccagactgaccacaagttcaccctcactacctacacctccaatggcgtcgctgtaactgcttctagcacaaagaaagctgacctgatccttggcgagatccaatcacagataaagaacaagaacatgaccatagatgtgaaagcaaactcggagtcaaatatcattacaacaattactggtgatgagattgaacac

SEQ ID NO: 8478 - DNA, 338 bp, Zea mays
  Clone ID: LIB3137-032-Q1-K1-A6
gcaactcaacagaagcacatttctccggctttttcgtcgttactccctagctagctaggctgggttctgcctgcgcactcgcagataattaagctggtgcgtctcgcggcgtggtggatcggaggagaggtgggacaggcaggcacccatggcggggctacagaggtcggcgaccacgttcagaaggtccgggtcctcgggcctggtctgggacgagcggttcctgaccgaagccgaggccgaggcggaggcgaatgcgaaaggcggcggtggcgccgcccccgaggacccccagccggagctccggcactcgaagagcgttgggagcatcagcatgc

SEQ ID NO: 8479 - DNA, 437 bp, Zea mays
  Clone ID: LIB3137-032-Q1-K1-A8
gccaagtctcgtgctctttttatcaaggagttcaataacaagcttttcaattggttggtgaccttctctttggtcatggtggtcatcgggcgctttgtcatcaagttcttcctacttgaaatcgctgcctgggtgatgttcatcttcctagagacgtacacgagaatgttctggtcagcggaatcgctgtactataatccagcttggcacatcattgtttcttcctgggaaaccatcgtgtacagcccaattcttgatctggacagatgggccgtcccaattgtcataatgctattatttggggttctttacttgaaatgcttcggtggtagaaagaagcggggaaagggttcgctcctcccattgtacaagaattcttataactcgagtcgtcgttcgaaatcagactagttatacacgcaatgttcaagtttttt

SEQ ID NO: 8480 - DNA, 415 bp, Zea mays
  Clone ID: LIB3137-032-Q1-K1-B1
gcgttcccctcctgcacgcaacctcatcttgttctccagattcaggatggccgtcctccttgagaccttgcctccccgagtgctctcggtgagctactttgtttcgatttatcaggaaatccgtttgcttcatgttgtgcaggctcatatctgattgctggattcggcaaacccgcgttggatcctgtatcgatctggagaaatcgcgaagtcgtcgtcgttcggttcggagcggatctgaggcgacgatagatggaggcggcgggatctctcggtctgcagtcctgctccacctcgatggatgatgtctctgcgctgataattattggatcaatttcgataattattagtagatctatgagatatgccgcctggaagaagcgaggtaagctgcagcatgtaaaaaagagaaaaa

SEQ ID NO: 8481 - DNA, 453 bp, Zea mays
  Clone ID: LIB3137-032-Q1-K1-B2
gcgcaaaggaggacctcatctgtccacgctttctgttgcagtttgttatttggacttcactgtataggtgtgtggaaccagtattgagcagttggcctatcaacaagctgagagagagagctctgggaaacatcatggagcatatccattatgaagatgagaacacacaatacctatgcatatgtcctgtgaataaggctctaaacatggtctgctgctgggtagaagatccaaattcagatgcattcaagcgtcaccttgcaaggataccagacttcttgtggatttcaaaagatggcatgaaagcacaagtatatgatggctgccagagctgggagacatcattcataattcaagcattttgcgctacagatcttgttaatgactatgggtcaactcttcaaaaagcctatgaagttatgaaaaattcacaggtcatgaggaaccatcctg

SEQ ID NO: 8482 - DNA, 277 bp, Zea mays
  Clone ID: LIB3137-032-Q1-K1-B3
gcctgagcgtaggcggctaccaaagagaatgttaggcggcgtcggcggcgggagcaatagaagagcggtaaattcaagagagatcagagcctcggagggaaacagaagcgcacagagcatggagagcccaatctcgaggactaacctgaattgcatcagcctggcggacccgaacgtccagaaatcagtggcgctcctcaagcaagcatgcctggattcaggcttcttctatgttgtggatcatgggataagccaagagttcatggatgaagttttt

SEQ ID NO: 8483 - DNA, 387 bp, Zea mays
  Clone ID: LIB3137-032-Q1-K1-B4
gcacgattctactcctccgtccgcgtaacttttggtttcggctatgtcggggcgcggcaagggcggcaaggggctgggcaagggcggcgccaagcgccaccacaaggtgctgcgcgacaacatccagggcatcacgaagcctgcgatccgtaggctggccatgacgggcggcgtcaagcagcatatctgggctcatctacaaggagacccgcggcgtgctcaagatcttcctcgagaacgatattcgcgacaccgtcacctacaccgagcacgcccgccgcaagaccgtgaccgtcatggatgtctgttacacgctcaagcgccaaggccgcacgctctacagctttagcggctacgcccccttcccttatgatgctttgatgtgac

SEQ ID NO: 8484 - DNA, 395 bp, Zea mays
  Clone ID: LIB3137-032-Q1-K1-B5
atctcctctctctctcctcatctcccccctttctcgctagcgatataacaacccatgtcagcctgcttgccagctcccaccagagatcagagcctcttggctaagctagagtgggagggagggagggagagctcgccgtttccgacacatcggcagcgccggagatcctgaaaagagaaagtttgcagatgaggacgacagggaccatcatgaaccttcaccgagacatggacggcagggagcagatgaggacgaccatccagaaccaagaacaggtcttcagacaacaggtacacgagctgcaccggctgtaccacgtacagaagcagctgatgcaagtgcggcaagcacacgcgcctgctcctgcgacccgtgctccaacagtgcttcgacga

SEQ ID NO: 8485 - DNA, 345 bp, Zea mays
  Clone ID: LIB3137-032-Q1-K1-B6
ccgccacgaaattctccactctccgatccattcgcaacaatgaagttcggcaagagcctcaacaaccagatcgtggagacgctcccggactggcgcgacaagttcctgtcctacaaggacctcaagaagcggctgaagcagatcggcgccggctctggcgagcggcggagcaagcgccagcgggtgggggacgggcgcggcggatcctcgccgactgcgatgaccccggaggaagccggattcgtcgcgctcctcgacgccgagctcgacaagttcaacgccttcttcctcgagaaggaggaagactacgtcatccggctgaaagagttgcaagacaaggtggtg

SEQ ID NO: 8486 - DNA, 200 bp, Zea mays
  Clone ID: LIB3137-032-Q1-K1-B7
agcgcacacacacacaaactgatcgaccctttatccacacggaagcaccgccggagcaagaggcacaacatcgtgaaaaccctgactggcaggaccaacacgctccaggcggacaaggacgttatgattgacatcatgcaggtcaacacccacgacagggagcgcaggagcaagcaccagcagctggtgaacgggcgcgg

SEQ ID NO: 8487 - DNA, 422 bp, Zea mays
  Clone ID: LIB3137-032-Q1-K1-B8
gacgatctctcagacggtttttcatgacttttgtcaaagctagtatggagcgaactctgggggataagcacgtgtgaaaaccggacgctgatgtctgtctttggctaactgcacaaaccacgctataaggatcataggaccaacaatagagtgccagcggagttggagagccgatgagcacccagggaaaccgtgagacgcacgatgcatgagtgccggggaaactgtgagacgcacggtgcagcagagccaggaactaacgaagcaggcacaggaaaagcagggcaattccataccgattgacaagacgagaagttgcccgaaggtgagcaggtacagtatggaagtgaacttgaaggctgcatagatgatgagaaccctggcaagaggctggtttaggtactctggtattaatgaatact

SEQ ID NO: 8488 - DNA, 328 bp, Zea mays
  unsure (1)..(328): unsure at all n locations; Clone ID: LIB3137-032-Q1-K1-C1
cgccgcgatttgtcaacgtgacgtcacgccttgcctccaagagggagccagtgtggaggacacgaggctgccggagccgcaggtgttgctccggtcagcatcggcatggcggggcggatggtgcggagctgcgtgcagacggcgctcaaggcggccaactccgtcgtggggatcgccggcatggccgtcatcctctacgcgctctggatgctccgcgcgtggtacaaggaggtcgccgacctacaacaacacctnccggtcccctggtgcatctacacatttcttggcctggggatctttctgtgcctactgacttgctcttggcata

SEQ ID NO: 8489 - DNA, 416 bp, Zea mays
  Clone ID: LIB3137-032-Q1-K1-C2
gtcgccgggagtctcccgatccttcttccattacctctaccggtggtgccagggccggctcgcggacggtgcttggactgcccccgtcccgtcatggatcgcgccgagctcaccaccgaacaggttctgaagcgagatattccatgggagcattacatgtcaactaagcttatctccggaacgtgccttcagcttttacggcgatatgaccacaaaccggagagccagcgagctcctttgcttgaggaggatgggccagcatatatccgagttttcctgaatatcctgcggagcatctccaaagaagagactgtggaatacgtgcttgcactcattgatgaaatgcttgcaacaaatcctaagcgtgcagcactgttttatgatcaatctttgtcgggtgaagatatttatgaacc

SEQ ID NO: 8490 - DNA, 456 bp, Zea mays
  Clone ID: LIB3137-032-Q1-K1-C3
gagcgagagaggatggcgtccctggcgcatttcgttgcatgtctaccgtgcccccctctatccggcgcgtcgcgccgtcgccccgcggcgcagaggcggcctccgtcggcgcttgtgtgcgggacctatgcgctgaccaatgacgagcgggagcgggagcggatgcgcgagctgttcgacgacgccttcgagcgctgccgcaccgcgcccatggagggcgtcgccttctcccccgacgacctcgacaccgacgtcgagtccaccgacatagacacggagatcggctcgctcattaaaggaacagtatttatgactacctcaaatggtgcatatatcgacatccaatccaagtctactgcttttttgcccttagatgaggcatgccttcttgatatcgataatgttgaagaagctggcattcgtcctgggttagtagaagaattcatgataattgat

SEQ ID NO: 8491 - DNA, 310 bp, Zea mays
  Clone ID: LIB3137-032-Q1-K1-C4
gcctgccttttgcctttccgcgccccatcattattgccacatatagcaaccaaggcagtaagcctagccaagccaaccgacggcggcgagagtatatatacacacacacctgacgcctgtgctgctgctgggatcaacgcggcagcttagtgacgacgacgactcttctgtctctgcgttgattaatggacagtaacagatccatggcgacaagcggcgtggctccgttcgtggccaagacgtaccgcatggtggatgacccggcgaccgacggcgtggtaccgtggggcaaggacaacaacagcttcgt

SEQ ID NO: 8492 - DNA, 439 bp, Zea mays
  Clone ID: LIB3137-032-Q1-K1-C5
agaaaggatcaattgaagattatgagggatttcttgaatctttttctaaaggctatttgaaatttgggattaatacaaatgaggatggaactgtatatcgtgaatgggcacctgctgcgcaggaggcagagcttattggtgacttcaatgactggaatggtgcaaaccataagatggagaaggataaatttggtgtttggtcgatcaaaattgaccatgtcaaagggaaacctgccatccctcacaattccaaggttaaatttcgctttctacatggtggagtatgggttgatcgtattccagcatggattcgttatgcgactgttgatgcctctaaatttggagctccctatgatggtgttcattgagatcctcctgcttctgaaaggtacacatttaagcatcctcggccttcaaagcctgctgctccacgtatcta

SEQ ID NO: 8493 - DNA, 439 bp, Zea mays
  Clone ID: LIB3137-032-Q1-K1-C6
cgacgcgcaggcagccctgtttttgctccttttcggtcgggaaaggggcgcgccggcgctgcctccagcaatcaactcgccgcatccaatcacggcgcctccctcctcgattggtttctcggtggttggttgttataggcaggcgggaaggatgttctcgctgagccagatcgagcacgacctcccgatgccgccgcacctgctgagccgcccccttcccgacgccatcaaggccgagctcgagaggctcttcttggacaaggtaatcacaaaacttgggctgtgcgtgtctgtctatgatatccgatccattgaaagcggttccatccatccaagggagggctgctcgacttataaagtttcatttcgtttgctgatgttcaagccttttaatggggagattcttgttgggaggattactggatatgacgataaggga

SEQ ID NO: 8494 - DNA, 296 bp, Zea mays
  Clone ID: LIB3137-032-Q1-K1-C7
ggacgcgaacacacgacttttttgaaggtttgtttgaatcgaaccgtaagggctagatatggggaggatataaacacaacagcagaatcgaactctatattgcgaatggagacacgctccgatgttggtttttcttatttgcgactgcaacgactggaatcgagtacaccaaaacatccagaaagaccaacgccacgggcgcacaatcaaaagagaactttttaaagaaaaaatggccagaacgaacagcatcaaggagaaattacagtgtcaacattggggacaatcgggtaaac

SEQ ID NO: 8495 - DNA, 451 bp, Zea mays
  unsure (1)..(451): unsure at all n locations; Clone ID: LIB3137-032-Q1-K1-D1
caccgacgtcgtcctccccgcaggccgcatgttggcaggcggtcgcctccagggtccaggctctctcccgctcacggcagcgccgtccttcgacacccccctccccgctctagttctggcctgctgaggactggaggtccatccatccggactttgttgatttcttctgttggcattgtggtgttcagctcaaaatgaaaggagtgcttccgattaagggggcatcaggccgtgaaaagaaagcgcctaaggagctcgagagcgtcttgaaccgatatttcgggtattcgggatttcgaggaaaacaactcgaagctatagaagctgttctatcanggagagattgcttttgtttgatgccaactggtggtggaaagtccatgtgctatcagattccagctctggtgaaaacaggcattgttcttgtcatttcacccttgatagcactgat

SEQ ID NO: 8496 - DNA, 455 bp, Zea mays
  Clone ID: LIB3137-032-Q1-K1-D2
cgcctcgcaccagaaacccgcgaatcaatctttaatcccgatcgaccggcggcgcgggaggcgatgccggacaaggcggtggacgacgtcatggaggccgcggtgggggcccacttcagcggcctccgcctcgaggcgctgcgcctctccacctctgcgccctcttccccttcctcctcccccgccgccgcggcgcacacgcactccaacggagccgtctacgccaacggcaccaccgagcttccctctcctgccgctgcccggcagccattcgtcatcggggtttctggagggacggcgtcggggaagacgacggtgtgcgacatgatcatccagcagctgcacgaccaccgtgtcgtgctcgttaaccaagattcgttttaccgtggccttactgctgaagagtctgcacatgcacaagactataattttgatcaccctgatgcatttgatac

SEQ ID NO: 8497 - DNA, 414 bp, Zea mays
  Clone ID: LIB3137-032-Q1-K1-D3
gtaatgatccctatcggctcatgaatttccttatctctagctggtatctaggtatatagattaaggtctagtaggcagcggatagatggaatagaatagattccaggagaattgggttccgcgggtcatcagcctcttgcagacatatcatcgatctctctccccaatctagactagagcctggctccatccagtccaattccatcagagccagtagtggactgatgcaaagcaaagggagagattctttgggtcgtcggtggcatgcaactgggtaaagcttaactctctggctctggctctgatgagggagaagctgaatcgctcttggatttctcttcttgagttgtgtgcgtaggttcctgttcagctaacaaggagattgttccagtggagaaaggagaagatggcgcc

SEQ ID NO: 8498 - DNA, 434 bp, Zea mays
  Clone ID: LIB3137-032-Q1-K1-D4
gtaatgatccctatcggctcatgaataaccttatctctagtttttatctaggtatatagagggaggtctagggggcagcggatagatggaatagaatagattccaggagaattgggttccgcgggtcatcagcctcttgcagacatatcatcgatctctctccccaatctagactagagcctggctccatccagtccaattccatcagagccagtagtggactgatgcaaagcaaagggagagattctttgggtcgtcggtggcatgcaactgggtaaagcttaactctctggctctggctctgatgagggagaagctgaatcgctcttggatttctcttcttgagttgcgtgcgtaggttcctgttcagctaacaaggagattgttccagtggagaaaggagaagatggcgcctcctgcatcaccgtcaccgt

SEQ ID NO: 8499 - DNA, 442 bp, Zea mays
  Clone ID: LIB3137-032-Q1-K1-D5
gatcgacctggccaaggtcgtggccaaggtttcgggcccgcgcgccggaggcgggctcgggctgccgctgccgctgctcgtgcgcttccccgacgtcctgcgccaccgcgtcgagacgctcaacgccgccttcggctacgccgtccgctccaccggctacggctcaaggtaccagggcgtgtacccggtcaagtgcaaccaggacaggtacgtcgtcgaggacattgtggagttcggcgcgccctttgggttcggcctcgaggccggctccaagcccgagctgctgctcgccatgagctgcctcgccgcgcgcggcggcctggacgccctgctcatctgcaacgggtacaaggacgacggctacgtctcgctcgcgctcatggcgcgctccatgggcctcaacaccgtcatcgtgctcgagcaggaggaggagctcgacatt

SEQ ID NO: 8500 - DNA, 328 bp, Zea mays
  unsure (1)..(328): unsure at all n locations; Clone ID: LIB3137-032-Q1-K1-D6
gggccgacccacgcgtacggatcgacctggccaaggttttttccaaggttgntggcccgcgcgccggaggcgggctcgggctgccgctgccgctgctcgagcgcttccccgacgtcctgcgccaccgcgtcgagacgctcaacgccgccttcggctacgccgtccgctccaccggctacggctcaaggtaccagggcgtgtacccggtcaagtgcaaccaggacaggtacgtcgtcgaggacattgtggagttcggcgcgccctttgggttcggactcgaagccggctccaagcccgagctgctgctcgccatgagctgcctcgccgc

SEQ ID NO: 8501 - DNA, 443 bp, Zea mays
  Clone ID: LIB3137-032-Q1-K1-D7
tatcgatcctccccacgtttttgtgctcgttgtgcgcgtgcaccagcccggcccccaaccggacccagcgcgacgaagccggggggcgatcgctccagcgccgccggcgacctcaccccgggagccgccggcggtaccccgctctctgtcccgcctcaacgagccctcaggtccaagtagttcgttttgtgagttatacaaagacgcgccgcaaagatgacgactgctgatcgctaccaacacatcaagtgaactaagcctgtggtaggcaaagcaagaaaattgaaggatctcatgataaaaagtgacaatacgatatgtgctgactgtggtgcacctgatcccaaatgggcatctgctaatattggagtgtttctttgcttaaaatgtggagatgttcatagggcacttggacctgacatctcaaaggtgttatctgtaac

SEQ ID NO: 8502 - DNA, 455 bp, Zea mays
  Clone ID: LIB3137-032-Q1-K1-E1
ccgaactccaaaccctagcttcgctcgttgttgcggcgagccggcgatggcgaagtctctgcgatccaaacgcgagaagcggcttcggacgttgcgccgggagatagcagagccgttctacgacaagaaggaggccgccaagctcgccgcgcaggccgcagccctagctgctgccccgctcccggtccgcgggcccccgccgtcccaggatgccggcaccccccgcgccgctagctcggcctcggctatggatgtggagatgtctggtgcagggaacagcaggtctaagaccttcctgaggccacttggcagcattagcaagaagaaggtgcagcttcatttgaagatcaagaaagacaagagaaaagctaggaagaagggaaagttttcttttaagaagtagaggagtgtatgataattcatgcagttttgttcccagtttgtaaaacaaacgc

SEQ ID NO: 8503 - DNA, 442 bp, Zea mays
  Clone ID: LIB3137-032-Q1-K1-E2
agacgagtgtcaagtgaacctgaaacttgctttgtcactggttggtagcctgagtgtgagtgagtgatcgagctagctgagctccgatcctcgctagctaggataccgccataccacaagtcttcttcacaagtttaggagtgacagcaacaagagatcgatggcctctgccaccgtgctcaagtcctccttccttcccaagaagtccgaatggggcgccaccaggcaggccgccgcgcccaggccgcccaccgtctccatggtcgtccgcgcctccgcctacgccgatgagctcgtgaagaccgcgaaaacgatcgcgtcgccggggcggggcatcctggcgatggacgagtcgaacgcgacgtgcgggaagcggctggcgtccatcgggctggaaaacacggaagccaaccggcaggcgtaccgcacgctgctggtcacg

SEQ ID NO: 8504 - DNA, 450 bp, Zea mays
  Clone ID: LIB3137-032-Q1-K1-E3
gccagagccacccaccttatcgtcatcctcgttcgctccttttcgccagcgcctcctcctgctcctccttcttccccaccgctgccgacatggctgcgcaagaagagaagaccgctgttgttgttgctgctgctgccgatgtcgcgacagaggagcctacgccggcggtggagcaccaacctcagccggctggggcggcgcgcaaggcaggaccatcggcgcccggcggggctccgcccaaccccttcgacttgtccaccatgatgaaccttctcaatgaccctagcatcaaggagatggcggagcagatcgccaaggacccggcgttcacggagattgcggagcaactgcagaagacggtggtgtccccgcggcagcagcagcagcttcatgcgcggcagcagcagcaacagcagcagctggacccgcataagtacgtggcgacgatgc

SEQ ID NO: 8505 - DNA, 379 bp, Zea mays
  Clone ID: LIB3137-032-Q1-K1-E5
agagcagagcggtgagctgttgagcagggttgtcgaggtcggtcgtcgtcactcgtcagccatgagcaaggacaagcaccacaagcacgagcaccacctgcggcgttgctgcgggtgcatggcgtcgtgcctcctggcgctggtcctcatcgtggccttcgtctcgctggtggtgtacctggcgctgcgcccctcgaagccgtccttctacctgcaggacctgaagctgctcaggcccatctcgctgggcgacccgtcgctgacggcgtcggcgcaagtgacgctggcctgccgcaaccccaacgaccgcgtgggcatgttctacaagcgcctggacgtgttcgtcacctaccgcgacgaggccgtgacggtgcccgtg

SEQ ID NO: 8506 - DNA, 446 bp, Zea mays
  Clone ID: LIB3137-032-Q1-K1-E7
ccggcagacactctatagtttgtaccccatttaccggcgcggcggcggctaccatggcagtcgggaagaacaagaggatctgcaagggaaagaagggtggtaagaaaaagaccgtcgatcccttctctaagaaggactggtatgacatcaaggccccatcggtgttcagtgtgcgcaacattgggaagactctcgtgtccaggacacagggtaccaggattgcctctgatggtctgaagcacagagtctttgaggtttgtctagctgatcttcacggtgacgaggatcatgcttacaggaaaatcaagctccgtgctgaagatgtgcaaggcaggaatgtgctcacaaacttctggggcatgaattttaccaccgataagctcagatctctagtaaagaagtggcagacattgattgaagcccatgttgatgtcaagacaaccgac

SEQ ID NO: 8507 - DNA, 219 bp, Zea mays
  unsure (1)..(219): unsure at all n locations; Clone ID: LIB3137-032-Q1-K1-E8
gcggcggacactcaacagtttttacccgattgaccggcacggaggcggcgggcaaggcgggggggaagaacaacaggaaccgcaagggaaagaagggcggggagaaaaagaccgcaacgcccnnccgcaagaacgacgccgaagacacaaaggccccaccggngaccagggcgcgcaacagcgggaagacccaagcgcgcaggacacagcggaccagga

SEQ ID NO: 8508 - DNA, 447 bp, Zea mays
  Clone ID: LIB3137-032-Q1-K1-F1
caaaagccaaaaggcatcaccgccgcgacgtttatggcagcctcgctccaagccgcggccaccctgatgcagccggccaagatcggcggccgggcgccctttgcctcgctgccgtcccgcccgtcgtcgcaactcgcctgcagggcgttcggcgtcgacgccggcgccgccaggatcacgtgctccctgcaggacgtcgccagcaggtgcgtcgacgccgcgaagctcgccggcttcgcgctcgccacctcggcgctcctcgtctcgggcgcgagcgcggagggcacgcccaagaggctgacctacgacgagatccagagcaaaacgtacatggaggtgaagggcacgggcacggcgaaccagtgcccgaccatcgacggcggcgtggagtcgttcccgttcaaggccggcaagtaccagatgaagaagctgtgcctggagccgacg

SEQ ID NO: 8509 - DNA, 449 bp, Zea mays
  Clone ID: LIB3137-032-Q1-K1-F2
cctcactctactctggacgcgactcgaactttaaccctagatccgcagccccggtcgctccaccgaccccaaatctcaaatcagcgggagggaactcgcacgcgaaggctgaactcatggctcgcgtctacgttgggaacctggatccgcgtgtcacggcgcgggagatcgaggacgagttccggatgtttggggttctgaggagtgtatgggttgctaggaaaccaccacggtttgccttcattgactttgatgaccgcagggatgcacaagatgccattcgtgaattggatggtaagaatggttggagggttgagctgtcaactaaagttggtggtggccgtggccgacaccgtaacggttctgatatgaagtgctatgagtgtggtgaagctggccactttgcacgtgaatgccgcttacggattggttcatgaggcttgggtagt

SEQ ID NO: 8510 - DNA, 417 bp, Zea mays
  Clone ID: LIB3137-032-Q1-K1-F3
gatgaagcaacctatcctataggaatacatgttcagagcagtttttagtcttcctagcataacagcggaagaaggggccccagaaaagaaggcgccgatacgggtgaaatttgagataccatatttcaccgtatcaggtattcaggtccgttatctgaagataattgaaaagagtggttatcaggcactcccctgggttagatatatcacaatggctggtgaatatgagctgagacttatatgagttctcttctctggctgccggacgacttttgaagctgcaggacactaaagatacatatttgctatcgacacagcgaacaattttcatttggatgttggcctggaagtcttctgccgaccatacaaagtcctccccttcccgtggtggggcttgctgttcatcttgttaggctc

SEQ ID NO: 8511 - DNA, 442 bp, Zea mays
  Clone ID: LIB3137-032-Q1-K1-F4
ctcggaagatgaagcacaagacaacggcattgtggagaagttaaagagtgatcccgatggaggagaagagaagtgattctgtggaccggatgtgccagtggtggtttggattgaacctggaaggactattttccggccaattctcccgtgtttggaggttattggctctgtacaattgggggcaccgcgagaacgagccggtgacctgcgtactggttacaaagattgttaaccatttcacagccatacacacctagttgtgcttgacttggtagtggatgtagactctagtgtatggtcatgtacgatagtttcggtgcgtatgtagctagcgtgactgtaatatgcagaacaattctgggcttgtttgatctatttatccatgtaaacctctgtatccgagttctgaatcgctcctgctacttgcatttgttgtttacct

SEQ ID NO: 8512 - DNA, 446 bp, Zea mays
  Clone ID: LIB3137-032-Q1-K1-F5
cctccactctgagctcacattaaacagccttttcaccaaggccaccattcaccgccaccaagaacaaacgggaactcttcacagcttctcacctcgcgtcacaacaccaagacgcacgtaggagggaacctcaagcttcagtcgtccatggctcagcagcaaacaaatcccgaagaggtggtcctcgggcaggaggtcggggccgcgagggtggccactctcaaccgcccgcgccagctcaacggcatctccgacagagtggtgtacctcctcgcacagttcctggagaaatgggagaaggatgagaacgccaaattcgtcatctttaaaggtgctgggcgtgcattttctgctggtggggacctaaagatgttttatgaaaggaaatcaaatgattcctgcctcgaggttgtgtatagaacgtattggctttgctaccacattca

SEQ ID NO: 8513 - DNA, 446 bp, Zea mays
  Clone ID: LIB3137-032-Q1-K1-F6
aacgaatataaggaggctttttcgctcggttttgatactgtgccagtacttgttggaccagtctcgtacctgttgctctcaaagcctgccaagggtgtggagaagggattccctcttctttcccttcttagcagcatcctcccagtctacaaggaggtcattgctgagttgaaggcagctggggcttcatggattcagtttgatgagcccactcttgtcctcgaccttgattctgacaaattggctgcattctctgctgcatacgcagaacttgaatctgtactttctggattgaatgtgcttgttgagacttactttgctgatgttcctgctgagtcctacaagaccctaacatctctgagcagtgtgactgcctatggttttgatcttgtccgtggaacccaaactcttgggctagtcacgagtgctggtttccctgctggaaa

SEQ ID NO: 8514 - DNA, 417 bp, Zea mays
  unsure (1)..(417): unsure at all n locations; Clone ID: LIB3137-032-Q1-K1-F7
ggcgagggcaaccaagctgttcgctactcgtagtcgcagttgttgcctgcccagcatgcagctctaactcaccccgtgcagcagacgccgagtcgtggcaggtagctaggaaggagggcaggagggaagggaagggcaggccatggcgctggaagccgtggtgttcccgaaggagcacctagcgggcactgccaaggcgcgctcggcgtcgtcactggcctgcggcttccgcaccgaggaggtcgaggacaacggcggtgtggttctgcaaggagaggccagcgatgcgcccggtgccggcgcggccaccacgtgggagtgctgggacgcggcgctctgcccgtgctccactccacctgctggtgccgtggaagagtgctgggacgacgtgcggcaccggctctccgcgtnccctcc

SEQ ID NO: 8515 - DNA, 374 bp, Zea mays
  Clone ID: LIB3137-032-Q1-K1-F8
gcgtaggctcgggctcgtttgctccacgttttgtaggagttggacgcatgtcccggtgagctgatcactgactcagggcggacatggctgcgtcgcccgacgaggtgcaactgatgcacctactgaacgagattcttggcgccaagaactccatgcaggttggcgtcttaacagcatactcgctgctctgcacacggcctcctcctccccgacgacggccatattgtggccatccacgttacccgcgagagctacgaccagattgggtcaacgataatccagaaagccggcgtggcgcacaacatccactaccgcgtagggctcgcactgcccgttctggaccagatggattccaacgagtggaacaaaggcaa

SEQ ID NO: 8516 - DNA, 392 bp, Zea mays
  unsure (1)..(392): unsure at all n locations; Clone ID: LIB3137-032-Q1-K1-G1
actacatcacacacccgacgacgatcacactttcagaagatttagttcgttcgatcgtgaccgtgacgcaggaagctataagctagccaagacaggaataataatggcggcgtcgacggtggcgagcctctctgtcccggtgacgacgacgaccttcgcggcggcgggcggcgccgacgtgctgatcgtcgtcccgaggagggcgggcgccgggcgcgtcgtctggttccccgcggcggcgcgccgcggcggcgggcggttggtcgccgtgcggtccaacgggccggccacgccgtcggagatctccgacaaggtgtcggagagcatcaagcaggcggaggagacgtgcgcggacgaccagaanggcgacgcctaatgcgcggcggcgtggg

SEQ ID NO: 8517 - DNA, 434 bp, Zea mays
  Clone ID: LIB3137-032-Q1-K1-G2
ccagctcgctgctcgcccgctctcctccgttctccgcccttcgccatggcggctttcccctccgcctccccgtcgccggcgatctccgcctcgacctggagcatggcttccctccgtacgtccctccccgcactccgcccctcccccgcgggcaggctccgttcgtcgttctcgcccgcggcggcggccacggctgcatcggtcggctgcctcgggtccttctccggcctcgcgcccgtctcgaatctcctctccctcggcgctgagaactcaagctttgagcatcggttgtttggtattgatgcccgtggaaggatagttgcgatgcgacatgggagacgcgttcctaaacttaacaggcctccggatcaaaagaaagcactgctgcgtgggcttaccacccagctgctgaagcatgggaggataaagactac

SEQ ID NO: 8518 - DNA, 456 bp, Zea mays
  unsure (1)..(456): unsure at all n locations; Clone ID: LIB3137-032-Q1-K1-G3
ctcagttttacaaaaatattaactggtttctttacaagacgatgcaaatgtacacgattacagtggcgaaacgtcacaagctggacgcctacacctccagcgacaactccgccatcgtcgccacagattccatcaagaacaccgtgtatgtcaaggcgaaagagtgcacggaagtggtgtccatggaggaattcgccgtgattcttggaaggcatttcacctcgctgtaccctcaggttacagaggccacggtgactatcgtggagcgcccatgggagcgtgtgactgtcgacggaaagcctcattcgcatgggttcaaagttggtgttgagaagcacagcacaaaagtcattgtaaaaaaatctggaagcctgcttataaattctggaattcaaagatactcgctgctaaagacaactcantctgggtttgaaaggtttgtgacggatcgctata

SEQ ID NO: 8519 - DNA, 433 bp, Zea mays
  Clone ID: LIB3137-032-Q1-K1-G4
attgctctgcacagcccatggtttgttccgttctgtgctacattctttgtcttcactgattacatgagaggtgccatgaggatctcggccctgtctgaagccggagtcatctatgtcatgacccacgactctattggtctcggagaagatggcccgacccatcagcccatcgagcacctggtgagcttccgtgcgatgccgaacatactgatgctccgccctgctgatggcaacgagactgccggagcatacaaagtcgcggtcctcaacaggaagaggccgtccatcctcgctctctccaagcaaaagctccctcacctgcctggcacctcgatcgaaggcgtggagaagggcgggtacaccatctctgacaactcgaccggcaacaagcctgacatcattgtgatgggcaccggctccgagctggagatcg

SEQ ID NO: 8520 - DNA, 417 bp, Zea mays
  unsure (1)..(417): unsure at all n locations; Clone ID: LIB3137-032-Q1-K1-G5
gggccgacccacgcgtacgccgacccgaccgtttttgtaccgttttcgatccgccccgtcgcggtcacgaccggccggcgcagctccggcacttctgcgcgggccatggcgaccggggcggaacgagcagccgccagcggaggccgagccgtggagctcggctgtccagtcgccgagtgctcgtctacctgataccaccgagaaaacgtgctcctacaggggatgagtggaacgtaacaaatgggcatgggaaggggcgctaaggtgcagaagggaaagaatgcatattaactggagataaaaaacagggagctttatgctgggcatttctcnaaaaggtgaaccacatccggtggaacctgtaattgacagtagcagatattttgtactacgtgttgaagagaatatagatgggcg

SEQ ID NO: 8521 - DNA, 443 bp, Zea mays
  Clone ID: LIB3137-032-Q1-K1-G6
gcagcacaagcaagaacctttcctcctcctttcgcctgtgatcatgtcgtcttgctgcggcggcaagtgcgggtgcggctccagctgctcctgcggcagcggatgcaacggctgcggtatgtaccctgacgtggagaccgccgccaccagcagcgtcaagaccacggtcctcgccgcgccgaccaccaaggccagcgccggcggcttcgaggcggccaccgagggcggcggctgcgactgcaacacctgcaagtgcggcaccagctgcggctgctcctgctgcagctgcaactgagccggcccggctcggcgatggcgcacgagagtcgagaggacgacgacgaggaggcgtataataataaatataatagcggcgtgcagtaaataagatcctgtcaactgcacccgccattatccatggtcgctcgctcctcgcctgcgtc

SEQ ID NO: 8522 - DNA, 399 bp, Zea mays
  Clone ID: LIB3137-032-Q1-K1-G7
cgcgtctgtccgctaccctttcccgaccagtttgctacgagacgccgcgcgatccgacccaggccgacgccgacgacccctctcgccgccggcggccatggcgtacggcgaccgcgtcaccaccttcgaggactccgagaaggagagcgagtacggctatgtccgcaaggtctctggacctgtggttgtggctgatggaatgggtggtgctgccatgtatgaacttgttcgtgtcggacatgataacctcattggggaaattatccgtcttgagggcgattcagctacaatccaaagttatgaagaaacagctggactgatggttaatgaccctgtattgaaaacaagaaagcctctttcagttgaattgggacctggaattcttggaaacatttttga

SEQ ID NO: 8523 - DNA, 274 bp, Zea mays
  Clone ID: LIB3137-032-Q1-K1-G8
gcgggacccgctgtgttttttccagggatttttagaggcgccgaggcgggagcgggaaaaccgccgcctggtggctcatccgcggctccacgcccaaaccccaaattcctaatcccgcgcgccctgttcttcgtctatctctctcccgactcggaaggaaaccctaggcgccacgcgagggttctcgaaccttcgctccccacccccccgattcggaagccctagcctggaaggttccgggatcttctggcgcgggaggatggcgggaggggtc

SEQ ID NO: 8524 - DNA, 449 bp, Zea mays
  Clone ID: LIB3137-032-Q1-K1-H1
gccgcagccgctgcttttcgttcgtcttcattctacgcgaggtcgaaacccacaaaccctctccctcctgtactccggccgacacatccaggggcgatgacgctgggtagctccggcgccggatcgagcgtcgtcgttcctcgaaacttcaggctattagaggagctcgagcgtggagagaagggcattggtgatgggacagtgagctatggaatggatgatgctgatgacatctacatgcggtcatggactggtaccatcattggccctcacaatactgtacatgaaggtcgcatctaccagctgaagttgttttgtgacaaagactatccggagaagccaccatctgtcagattccactcaagaatcaacatgacatgcgttaatcacgagacaagaatggttgatccaaagaaagttggtttgctagcgaactggcagcgggacta

SEQ ID NO: 8525 - DNA, 437 bp, Zea mays
  Clone ID: LIB3137-032-Q1-K1-H2
cgcgctttgtaacgcctccgctgcaatcagtccccgcggcgatcttgccctgcccctgaccctgagtgctagttctcgccgttacgtaaggcttcttggccttgcgtcctccgtctttcgttgctgatacatcgaggtattaaagaagctgcctgattccgggtagcagaggtcgccgccgcctgcagcaatggccgacttctcctggctcacggtgcttggtttcctattcctcacattcaactcaggcatggcgatttatcggtccaacggtgacgccggctccgtcgctttcgtcgtggtatcttatctcgacctggtggccctgttcgcctgcttgcgctactacgagcagttggatcagcagcactcccaaaagcgcgcgagggtcaaagctggggtttggagcctcacgaccctccttactatcatgttca

SEQ ID NO: 8526 - DNA, 139 bp, Zea mays
  Clone ID: LIB3137-032-Q1-K1-H3
gtgctgtcgatttgtgcggcgactgttattttgttccggcttattcttctggtgatcaatggctgaccgtgaggatatccagccacttgtgttggaccaatggacttgaatggtcaaaggttgctttgcttgtgatgat

SEQ ID NO: 8527 - DNA, 454 bp, Zea mays
  Clone ID: LIB3137-032-Q1-K1-H4
agcccaccgaattccctgcgattcctctcttctcgcctccttgtctccccctaggggatcgtcggagaggaatcgcaaagagggccgtctcatccgagttaaggaagccatggagcacaaggaggctgggtgccaggcccccgagggacccatcctctgcatcaataactgtggcttcttcggcagcgcggcgaccatgaacatgtgctccaagtgccacaaggagatgataacgaagcaggatcaggccaagctggctgcctcctctatcgacagcatcgtgaacggcagcgacgccgtcatggagccggttgttgctggcagcaacacggtagtagctgttgcccaagttgagttgcaaacaatgaacgtgcagcagcccgctgatgttgccggacccagcgagggggtggcggcgatctccaaaggggggaaggtagggccgaaccggtgc

SEQ ID NO: 8528 - DNA, 237 bp, Zea mays
  unsure (1)..(237): unsure at all n locations; Clone ID: LIB3137-032-Q1-K1-H5
agctcggccgtgccctggttatgctccctgttctcgccagccgngcgcatgtacctctatgcacgcgcgcctgcgtactgcgccgcgaaccccgccgtggagcttcctcgagctcgccccatggcgcccggccgagctcctccctgtcgggctcttgcttgccgtccaatgtttctacacgtcgcgggcttcctccccgagcttgcgctagcccctggtatcccccatggccggagc

SEQ ID NO: 8529 - DNA, 262 bp, Zea mays
  Clone ID: LIB3137-032-Q1-K1-H6
agctatgtcttgccctgctttataatcccttttctcgcaacacatcagcaggtaaatttaggcgcggggtgatggcggctgctcccgcaaacctgaactgcaacgcacgggagctaaagctaggggagtacctcgagattctcagtgacatgattgggtacgaagctcacaaggacgacacggctgggtacacttccctgagcgtggcctactcgctcgaatatatcatcgtcggaaggtggttcaactacattgatgctct

SEQ ID NO: 8530 - DNA, 400 bp, Zea mays
  Clone ID: LIB3137-032-Q1-K1-H7
cccgtgcttctccgccgtttttgccgcgttttattgcgaagagaccacgactcagatggccagccgctgggtccggcccgaggtgtacccgctgttcgcggcaacgggcgtggccgtcggcatctgcggatttcagctcttccggaacatcaccggcaacccggaagtcagggtaaacaaggcagggagggcagctggtgtgcttgagaaccatgaggaggggagacgttacgccatgcatggcctaagaagctttgtgcacgacaagactcctgagatcatgcctgcagttaacaagttcttcactgaccctaaatgaagcatgttgattggcatactactactactacttgctactggggattttacactttgctggcaactcaatatgttggggaca

SEQ ID NO: 8531 - DNA, 363 bp, Zea mays
  unsure (1)..(363): unsure at all n locations; Clone ID: LIB3137-032-Q1-K1-H8
ggcgcacggagggtaagcgggtcccgggcgattcaaggctctctttggagaaggacccacttccgtgcaccaaatccacttgggggccggtaacaactgctgacgttctgttcatggaaagacanagacaaacttctgctgttgtaatacggcggcgcaacctgtcatctgcggttactgttcgaagtggcttgattaccaacctcctgaccctgatatcccatgcactgattggtgtgcttgccaccttattcctgtggtccaaagcaaccaccttcatcaagaagagtccaccggatattccagtagtgcacgtatctgaagaccttgttgtgaatgtttcacgggcattacgggatgaca

SEQ ID NO: 8532 - DNA, 305 bp, Zea mays
  unsure (1)..(305): unsure at all n locations; Clone ID: LIB3137-033-Q1-K1-D8
ntactacaacttttaccaagccctcttaattttccatgcctnaaaacttcgtgggggggtgattgaagtttttgaggcatattaccattgatacaattgaattcttgactagaccactagctacgattatgaggacaatactttcttctcctacggagctattctcaactacaaaatatcactgaccggtaaacgagtaaagtctaatgttaaggactaactaccttctcctttgagaactccatgctctacgctatcgatagcgtgaacggtctagagatccacagttaaacatcaccgataac

SEQ ID NO: 8533 - DNA, 344 bp, Zea mays
  unsure (1)..(344): unsure at all n locations; Clone ID: LIB3137-033-Q1-K1-H2
cccggctgaataccgggccgacccacgcgtcgatcattctagccagttttctctctgttacctcggatccatctctccaggcagtcaggcacggtctgaaaagcaatgcactatacgtgctacttcctcggcaggactagctcaccaggcacgttgattaggaattatgacagcgtatttcnttatgcaattaacttatgagtttcttaacatcaatcacacggttcaactatagcttgctagacaaatatgaaaaaaagtcngagctgactgaagatttattgtctgcaaaacaggtactgcaagtaattatcatgttacattgttgcattaacaaagagagg

SEQ ID NO: 8534 - DNA, 291 bp, Zea mays
  Clone ID: LIB3137-035-Q1-K1-E2
cttggccttttttctcttttactattaatttttgaaatgaaagctctcgactattaaaagggtctcaagttacagtagttttccaaaagctgactttgggtttcaacatttttctgcataataatgcaagtcaccggtactgaccactgtgatccagcatattccacagaggaactcatgtgcgaggtgcacggcccatggaagagccattctgaaaattcgcgccacggtatacttctggggcttgaagtgcacgcatttgattcacatctccgtagtcagagcgaacat

SEQ ID NO: 8535 - DNA, 178 bp, Zea mays
  Clone ID: LIB3137-037-Q1-K1-A1
cactcccaagccagtaccgagtcctacgagcagtcgcacgcaagtgtcaagagacgaaacggtcgacatggctcgcacgcaatctgccgtagcggtcgccgtggtggccgcggtgctgctgctggcagcggcggcgacgacctcggaggccgccatcacctgcgggcaagtgagctcc

SEQ ID NO: 8536 - DNA, 182 bp, Zea mays
  Clone ID: LIB3137-037-Q1-K1-A11
cgcagcttccgattccgcttggccggtcgttctgccccgcgcgcgcctgttgcgcttgagcgggcggatttgttccgcccgttctttggccgccgccgttgcgctgcgccgtgtttgctttcaatttccattcaggcgtcttgagattccccggccggagatctgcttaattcgtacctctc

SEQ ID NO: 8537 - DNA, 390 bp, Zea mays
  unsure (1)..(390): unsure at all n locations; Clone ID: LIB3137-037-Q1-K1-A12
gtcagcagcttctgcttgctctggggggaaggagagagagagagcgagagagagatctagtagagaggctagctaggtggtcctcgaacgaagatgttggcggtgttcagcgggcaggtggtggaggtgccggcggagctggtggcggcgggcagccggacgccgtcgaccaagacgaaggcgtcgcagctggtggggcgcttcctggccgcctccgagccggccgtgtccgtgcagctcggcgaccacggncacctcgcctactcccacaccaaccaggcgctcctccgccccaggtcgttcgcggccaaggacgaggtgttctgcctgttcgagggggtgctggacaacctgggtcgtctgagccagcagcacgggctgtcaagcaag

SEQ ID NO: 8538 - DNA, 286 bp, Zea mays
  Clone ID: LIB3137-037-Q1-K1-A3
gtttatggatgcctgcaaggcagaacctgttggtgattttactattgctaaaggagctgagacagactgtagaaatggttcattatgttgataagcaatctgctgtattagactatgttgagacacagacaaaacgaacttcggtttgtggttctacgctaaatgaatcccctcaggctgcagggttggaagaagactgctctgtactgaagcatggtgatcctacttcatctgagcttcttactgtagcacctaatccaatcggtgaaacttctgttattcaagt

SEQ ID NO: 8539 - DNA, 310 bp, Zea mays
  Clone ID: LIB3137-037-Q1-K1-A4
acgcgcattttttttcggcgcccgcgcaggcgcgcgacaccgaggctcagctcgccgagctctcgtccgccgaggagtcccgcctcctggagctgcgtcgtctgccgcaggagcgcgaccgctcgtggcagtcggagctggaggccatgcagaagcagcacgccgcggactcgaccgcgcttgccgaggcgatgggcgaggtgcaccgccttcgcgttcaactcgacgacacggtgcgcgccgaccgacggcaggacgtggtggaggcgctggccaccatcaacgagctcagggccaagctcaaggcaag

SEQ ID NO: 8540 - DNA, 229 bp, Zea mays
  unsure (1)..(229): unsure at all n locations; Clone ID: LIB3137-037-Q1-K1-A5
cgtggttctcncgtctggagcaaggcggcgtagctcggcggcagggggagggcgatgcgattctgcccggtgtgtgggattctgctgcacatcgatccgggcaccggaagccaccgcctgcgcctcttctgccccgtctgcccctacgtctgccccatcctgaacaagatcgtgaagaaagcgaagttggtcaaaaaggaggtggagcccatcttcagcacggcggatg

SEQ ID NO: 8541 - DNA, 424 bp, Zea mays
  Clone ID: LIB3137-037-Q1-K1-A6
gggaaatgctcgtggaactattgctctactccatgctgttggaaatgcatcttccaaagtgaatttagtgttctagaattagttgatattgttgtgtatccttcatttctagaaccagtcaaggaaactattttgagggttcacaggggggaagggttgataaaatggccgaattggaccaatggtgcaccatttgcattatggtctttctgcttttgggaggcaacttcatgcaatgggactgacagatgcttcagaaatccaccctgatagacatttgggcagtcatccacaagcatatttggccacaactcgtttggagcttcgtaggaatttgtagcagcgcacgagttgttcgaaggctaaataattgtgtcactgcaccaggcatgactgactttgcagagtcattggccttctttgc

SEQ ID NO: 8542 - DNA, 229 bp, Zea mays
  unsure (1)..(229): unsure at all n locations; Clone ID: LIB3137-037-Q1-K1-A7
cactcccaagccagtaccgagtcctacgagcagtcgcacgcaagtgtcaagagacgaaacggtcgacatggctcgcacgcaatctgccgtagcggtcgccgtggtggccgcggtgctgctgctggcagcggcggcgacgacctcggaggccgccatcacctgcgggcaagtgagctccgncatngagccctgcctctactacgcccgcgttacggggtccgccccctcc

SEQ ID NO: 8543 - DNA, 262 bp, Zea mays
  Clone ID: LIB3137-037-Q1-K1-A8
cggacgcgtgggcggacgcgtgggcggactctttggcgcgcccgacggtcgttacccgagccggcaccccctgcttaaaatcccgcgttccggtcgcgcaccccactgcgtctgacttccccgctcgccgacgagattgctggattggctgccgccagcccctcagtgcttgctcccgttcctcgcggtggtcactggactagcctggactgcagggtccggcgcctggttgaaaagatggactcggtcatggcccgccccg

SEQ ID NO: 8544 - DNA, 343 bp, Zea mays
  Clone ID: LIB3137-037-Q1-K1-B1
gccatcgcggcgtccctcgagagtttttcacctcgacggccggccaatatagcaagctagacagggcattctcatctcatggcgacgacggagacgatggagatgggcgtcgtcgtcgacggcgtcagtagcaacgtatcaggcggctgcggcgggctggtggtgaccgagctgagccacatcaaggagctggtgaggcagctggaggtgcacctcggcggctccccggacctgtgcaagcacctggcctcgcagatcttctccctcaccgagcgctccatcggcctcatcaactcctcctacagcggcctcgacggcgcccgccggaagcgctccgcgggcg

SEQ ID NO: 8545 - DNA, 372 bp, Zea mays
  Clone ID: LIB3137-037-Q1-K1-B10
accgcccgaagatggtgaagtttctttagtccggcaaggccgtaatcctcctccagggcgcgttcgccggccggaaggcggtgatcgtgcgcgtgttcgaggagggcacccgcgaccgtccctatgggcactgcctcgtcgccggcctggccaagtaccccaagaaggtgatccgcaaggactccgccaagaagacggccaagaagtcccgcgtcaagtgtttcatcaagctcgtcaatttcactcacctcatgcccacccgctacaccctcgacgtcgatttcaaagacgtcgcctcgggcgggcccgacgcgctctccacccgggacaagaaggtcgaagcctgcaaagccgccaaggcgcgcctcgagg

SEQ ID NO: 8546 - DNA, 241 bp, Zea mays
  Clone ID: LIB3137-037-Q1-K1-B11
cgaggtcggtcgtcgacactcgtcagccatgagcaaggacaagcaccacaagcacgagcaccacctgcggcgttgctgcgggtgcatggcgtcgtgcctcctggcgctggtcctcatcgtggccttcgtctcgctggtggtgtacctggcgctgcgcccctcgaagccgtccttctacctgcaggacctgaagctgctcaagcccatctcgctgggcgacccgtcgctgacggcgtcggcg

SEQ ID NO: 8547 - DNA, 170 bp, Zea mays
  Clone ID: LIB3137-037-Q1-K1-B12
caagcaccacaatcactaacaccatctgtgtcgttactcgcggaccatgccatcgtgcctcctggcgcttgacataaaccaagtcttcctttttcatgaatcctaaggagtgctccatttatataagccgtacttctacctgcatgacctgaatctgctcaagcccatct

SEQ ID NO: 8548 - DNA, 324 bp, Zea mays
  unsure (1)..(324): unsure at all n locations; Clone ID: LIB3137-037-Q1-K1-B3
gggcagttggtgagttgggacttggtagccgacgctgtcggggtgatccagtcgccgccgacgccgtcgaacgcgcccgcgcccgagcccgacccttcctctacgcgggaggacccttccactcccaaagacgggcgtgttcgatcgtgagcccatggcggaatcaattgttttcgtggcgccgccccgccgccgggccgcccttgttnttctacactgggcgtgtttttcaactggccactcgtggccgcggtgctcgccttcgccatcgcgcagtccatcaaggtcctcaccacctggtataaggagaaccggtgggacgcg

SEQ ID NO: 8549 - DNA, 330 bp, Zea mays
  Clone ID: LIB3137-037-Q1-K1-B4
tcttttcttccatttgcccaggttttcctcggtctcttcttcggcgacgagctccaaccaggtgctagcgcggtacaattttcgagaatttgtggagtggaactgaacctgcatgacacttgctaaacctgcccctagtggcaagaggaactggagcagtggcgggactgccgctggaaggaagaacaaggaaagaggagatgacaaagcaaaaggaatcagggttgctggttggaacacgggcgacaagaagaaagaagacaaagggcgccaagtaagtgcgggatcgaagaggccgtggagtgagggagtgcccccggttggtgtgaa

SEQ ID NO: 8550 - DNA, 393 bp, Zea mays
  Clone ID: LIB3137-037-Q1-K1-B5
cggttccgccgcgctcgaattccccccactttccaccaggccagcaccatggccactaccgcggctcctcctccgcactcaccaccatccctgcaagccgccggcgccgcgcgcgtccgtactctgccgcgccacggcggggatggctgggccggcgtcggccgcggcgctgcggtccctggccccgcccacgcggccggagctgctgtcgctcgacctgccccgctacgacccagcgcccgcccgccccgtggacctcgccgtggtgggcggcgggcccgcgggcctcgctgtggcgcagcgcgtcgcggaggcgggcctgtcggtgtgcgccatcgacccgtcccccgcggtcgtgtggcccaacaactacggcgtgtgggtggacgagtt

SEQ ID NO: 8551 - DNA, 357 bp, Zea mays
  Clone ID: LIB3137-037-Q1-K1-B6
gaaggaggccgtcaaagcccttgaactatttcttgatgcaggaagcacattttcagaaaggctgacgtataggtatgaccttgtcgacctaactaggcagtgcctatccaaactagcgaatgaagtgtaccttgatgcgatgagttcgtaccaaaagaaagattcgtatggcctgaatgctcacgcgaggaaatttcttgagatcatcgtggatatcgatacgctactagctgctgatgataactttctgctgggcccctggctggaaagtgcaaaaagccttgctataactgaaaaggaacgccagcagtacgagtggaacgccagaacacacgtgacgatgtggtatgacaacac

SEQ ID NO: 8552 - DNA, 370 bp, Zea mays
  Clone ID: LIB3137-037-Q1-K1-B7
cggacgcgtgggcggacgcgtgggcggactcgttggggtctccaatgccgtctactacgcgctggtcaacgacttcatgaagccacgaatcgacgagattgatgagctgctatcgtatggtgtgaatgttactgtatacaacgggcagctcgacgtgatctgctctaccgaccgcgcagaagcatgggttcagaagctcaagtgggacggtctcaaggccttactgagcctgcccaggcagcctctgtactgcggccccggcaaaaggaccaaggcgttcgtccggtcctacaagaacctgcacttctactggattcttggggctggccactttgtgcctgacgaccaaccttgcatcgcgctgagcatg

SEQ ID NO: 8553 - DNA, 340 bp, Zea mays
  Clone ID: LIB3137-037-Q1-K1-B8
ggcggacccacgcgtccgccgggcgacgcaaaaccctagcccatccaccgatccttgtcatggcggccaccaccagccaggcgagcctcctcctgcagaagcagctcagagatctcgccaagcacccggtggatgggttctcggctgggctggtcgacgatagtaacgtattcgagtggcaggtcaccatcatcggcccgcccgataccctatatgatggagggtacttcaatgcaataatgagcttcccagaaaattacccaaacagcccgccatcagtcagatttacctcttgaatgtggcatccaaatgtttattcagatgggctggggtgtatctc

SEQ ID NO: 8554 - DNA, 172 bp, Zea mays
  unsure (1)..(172): unsure at all n locations; Clone ID: LIB3137-037-Q1-K1-B9
cggaaaaaccggggcggacccacgcgtccgtgctggcagtaactcggcggagctctagatccgttcatcctggtggttttgtgaggtcgaaagcggcgagcgaattanaagatgctggacaagctgtgggacgacgtggtggccgggcctcgcccggagacgggcctggaga

SEQ ID NO: 8555 - DNA, 364 bp, Zea mays
  Clone ID: LIB3137-037-Q1-K1-C1
cggacgcgtgggtcctggtcgagcctctttacattgccgactaccaccaccaagggctggatcggacgagcgggagctacatgacccacggccgggagaggaggtatgagctgtttgacaggtggtggcaggagaaggcatgtacgggcgctggcggcgacgtcacgtcctccatgttggcagcgtcggcgagcagccggagacgcagcaaatacgccgggctcacgcaggacccgtgcttctgggcgagagtggaggaagcgagggaggagacggagagcgctcggggcgagcgcgacgtggcggagctggcgatgaagctggaggagctgcaagagtttgagcgctacttccgtgagctggt

SEQ ID NO: 8556 - DNA, 409 bp, Zea mays
  Clone ID: LIB3137-037-Q1-K1-C11
gctcgcgaggcttccaaggcgggctgatcacaaaccggtactcccagcatggttcgatctaagaaggccagggatcatcgacgtgaaccagctgaaggaagacaaattctatgcgaaggtaagccttcgtgtctgccttgaaggtggttaccatgtgcttgatgagtccacacagtactgcagcgatctccgtccgacgatgaagcagctgtggaagccaccaatcggcatgcttgaagtcggcatcttaagtgcgaacggtctcaatccaacgaagaccagaaacagccgtgggtcgtgtgatgcgtactgtgttgccaagtatggttccaaatgggtccggacgcgcacgatagttgacagctttgagccctcgttcaatgagcagtacacatgggaagtctttgat

SEQ ID NO: 8557 - DNA, 214 bp, Zea mays
  unsure (1)..(214): unsure at all n locations; Clone ID: LIB3137-037-Q1-K1-C2
ggaaggaacacaaagctaaaggataataattttcancacagaaggtattgacgcagcccggctgtattgatatacacttagtttaattctttttaactcttataaaaaagactatctgtgtctgtatgatgaggaaccttcacttacgtgtttttttctgatgccaacgaccactgcatgataatgagatacgtatatgtgctatggttggtac

SEQ ID NO: 8558 - DNA, 319 bp, Zea mays
  unsure (1)..(319): unsure at all n locations; Clone ID: LIB3137-037-Q1-K1-C3
agcangcggcgccgaggagcggcatcccactcagtgcttgcaaccatggctnnnngattgaagaagcacttgaagaggctcaatgcgcccaagcattggatgctcgacaagcttggcggagcttttgctcccaagccatcttctggacctcacaagtccagggagtgccttcctctgatcctcatcatcaggaacaggctcaagtatgctctgaactaccgtgaggtcatttctatcctgatgcaacgccatgtacttgttgatggcaaagtcaagactgacaagacctaccctgctgggttcatggatgtcatttcca

SEQ ID NO: 8559 - DNA, 333 bp, Zea mays
  unsure (1)..(333): unsure at all n locations; Clone ID: LIB3137-037-Q1-K1-C5
gaagcattccaaaaattcatccagggaacaatagctgaaggtgcacctgtggtgcctatatccgcccagctgaaatacaacattgatgttatctgtgaataccttgtgaagaaaatccccatccctgaaaggaactttacctcacctcccaacatgattgttattcgctcctttgatgttaacaagcctggttcagaggtcgatgaaattaggggtggtgtagctggtggtagtattctcaggggagtcctgagggtgaaccagaagattgaagttcgcccttgcattgtcatgaaagatgagacttnanacatcaagtgcaccccaatctac

SEQ ID NO: 8560 - DNA, 307 bp, Zea mays
  unsure (1)..(307): unsure at all n locations; Clone ID: LIB3137-037-Q1-K1-C6
ccctcgagggtgggagtcgtctgggacaccannttgacaacgttaagggccaagaaatccaggaacaaggagnggcatctcccctcagactncagcagcggcttcaatctttnngctggcaaacnagcttgaaggacccgggcgcacgcnnttgctgactacccaacatccagaagggagaagcaccctcnncaccttgtgctccgtctcaaggggaaggcatgcagatcntttgtgaaaacccctgaccggcaaagactattcaccctcgagggtggagtncctctgacanccatttgacaacgtc

SEQ ID NO: 8561 - DNA, 385 bp, Zea mays
  unsure (1)..(385): unsure at all n locations; Clone ID: LIB3137-037-Q1-K1-C7
cctagcgccgggttcctcctcctcggatccgcccgccgccgcgcggactccattgccagaggtgatcgagggggagagatagagcttgggtggtcggattagggagagagggaggggaggatgtccagacggtcgttgaacccgagccggcgggtggcggacggnggtctgccgacagtcggaggcctgttccaccccaagtcacgctcgcctcccgtgcttactattgccctagtcgtcctgngtgtcattcttctcgtcgcctacttcaacagcggctcaagtgtaactgttacaagcagagagtctgtgaccaggtctgaaggttcttgcacatcanaagttatgcgggtgcttccatatcttaaaaaggcatatggaaatg

SEQ ID NO: 8562 - DNA, 298 bp, Zea mays
  unsure (1)..(298): unsure at all n locations; Clone ID: LIB3137-037-Q1-K1-C9
gcgaccacgacgtcagcgaccaccgccgtttcagcagccgccaccaccgccaagccgcgggggtcgtcgtcggccctctgccagagggtggccggcggcggcaggcggcgctccggggtggtgcggtgcgacgccgccggcgtggaggcccaggcgcaggccgtggcaaangcncccagngtnggcgncctcgagcagttcaagatatacgncgaccgcgacatgaaggaaagggagaccatagctgtgataggcctcagtgtacacacagcaccagcggagatgcgtgaaaaacttg

SEQ ID NO: 8563 - DNA, 377 bp, Zea mays
  Clone ID: LIB3137-037-Q1-K1-D10
cttgaaagggggagagagagagagagagattatagagagaagagagagagagagagaggagtgggagacccgcgagaggctgccgtgtagggaccgtagactcagcgactgcgaaggagggataaggggatggccgggatcggaccgatcaggcaggactgggagccggtcgttgtgcggaagaaggcacccaccgccgccgccaagaaggatgagaaggccgtcaacgccgcgcgccgcgccggtgcggagatcgataccatgaagaagtacaacgctggtacgaacaaggcggcatccagcggtacatccctcaacaccaagcgcctcgacgacgacaccgaaaacctcgcccatgagcgagttccaagtgatct

SEQ ID NO: 8564 - DNA, 356 bp, Zea mays
  Clone ID: LIB3137-037-Q1-K1-D11
ggagcttaacgcttctccagggctacttctccgctgaggacgacgacgatccggcgccggcgctcgcgctggcaccgagctgaacgagtctggtgattcgtcagccgaggaagccggatcggacgaagacgaggagtccgctcctccaaagccgccccccaagctccgccgccgaccaaaccctaagggggtagatgccggcggcagcgacgggtgctccttgctgccttccgcgctggaggccttcgctgatgtctcgggaccaccagattttctgaggcacagggttgccgagccagaggaagggacggaagccctcggtgtactcgatcgccgtgggaaaaaagggagcaaac

SEQ ID NO: 8565 - DNA, 378 bp, Zea mays
  unsure (1)..(378): unsure at all n locations; Clone ID: LIB3137-037-Q1-K1-D12
aaaccgggccgaaccaagccgtcgcttcggactttttaattaacacacacatgttgttgataagccttggcgccgccgggtacgcgggggccaccgngccgcctcgtccccgaagatgcaccctgccgtttcgcgccgncgcctcccctgcggcactggaccgccggcgacggccgcataatgtggctggcgacttcttcgtcgaccaccgctgcatcgactgccagacctgccgatggatggcgccggtacgcaggcagctttctcccatcctccaccttcaatcgctcgcttggctaaccatcattcatggcgtgaggcgtgccggcatctatgcaggaggtgttcaagagggtggatggcaaaggccgccgtagc

SEQ ID NO: 8566 - DNA, 419 bp, Zea mays
  Clone ID: LIB3137-037-Q1-K1-D3
agaaatagttcctccaagtcgcttgatgctaaactaactggtgtaaataacttctaccccaggataaatgacaggaagactcctgtaaccgtctttcatgataagaggaaaccttcacctcaagaatatggaaatagaggccatgtaaaccaggaagggtttcagaggaaggcagcagtgtacgcgtttgatgataataggcctcaacaaagagagaattttccagagagcctgcatttgccaaagattgataattcagattctgagaacataatgtatccagataggtcaggagaaaaaacaagcaaaagggaaactaggatggcacatagtggaatgctagagtatgctgatatgcagaagaagaagcaacctcaaggcttcacaaaacgtactaaaatgtcatagtgtctcgatgc

SEQ ID NO: 8567 - DNA, 213 bp, Zea mays
  unsure (1)..(213): unsure at all n locations; Clone ID: LIB3137-037-Q1-K1-D4
ccggcgaaatgtgtcgtnntcggcggcnngcggcggnngcggcgcanagtccccggcgccttcctggtcgtcgggcccgcgctccccggcgcacgccggcnngctgccgtgccttgggccctgcatctgtgcacccaagcgcggcaacgacatncctccacgatcccgtggtacaacaaaggatacgggcgttccccaatgacggggagcgcg

SEQ ID NO: 8568 - DNA, 412 bp, Zea mays
  unsure (1)..(412): unsure at all n locations; Clone ID: LIB3137-037-Q1-K1-D5
acccccgcgctggctcgccaccaccttcgtagcaggcgtgggaatctgggcagcgccccgcggagaagaggaggcagcgcgctctccgtccgccatggcgggctcttccgaccccgacaagctcatgagcaaagccgacaaactaacaaaattgagttttacaagatggaatgctgattggaaaagcgctacctccttgtatgagcaagctgcaattgcgtataggttcagaaaggacaatgagaaagcaaaagatgcttttgagaaggcctcaaaaggacaggaaatgatctcctcaccatgggacgctgctaagcatatggaatctgctgctgctttagcaaaggagcttggngcgctgaatgaagtatctgatttctatcacagagcttcagaaatataccgtgaatgt

SEQ ID NO: 8569 - DNA, 361 bp, Zea mays
  unsure (1)..(361): unsure at all n locations; Clone ID: LIB3137-037-Q1-K1-D7
gtgacgacgacgaggaggaggagggggtattgcaatggtggcggcgcanggaggcggccggagggacgccgaggcggagctcaacctgccgccggggttccggttccatcccaccgatgaggagctggtggtgcactacctctgcaggaaggtggcgtgtcagcagctgcccgtgcccatcatcgccgaggtcgacctttacaaattcgacccgtgggatcttccagagaaggcgctgtttggccgcaaggagtggtacttcttcacgccgcgggaccgcaagtacccaaacggctcgcgccccaaccgcgccgncgggagggggtattggaaggcaacgggcgcggacaagccgatcgcg

SEQ ID NO: 8570 - DNA, 220 bp, Zea mays
  Clone ID: LIB3137-037-Q1-K1-D8
gtcgcgctcagaagccgtcacctgactaataagtggtcacggtaagttcatagcacgccgcacgggtgtggatgtcgaatactgtcacggttaacatgtggctaactagagaattcaagtccacgaaaaatgatgaagatttgattctctaataaattgtctatggcagtgcgatcaggtgttcgagcagtagatgaatgtatcttattttaaattgtgt

SEQ ID NO: 8571 - DNA, 391 bp, Zea mays
  Clone ID: LIB3137-037-Q1-K1-E1
ggccttccaaagatcgtgagcatccagaacagttacagtctacttgtgagatgccgctttgaagttgatcttgttgaagtttgccacccgaataactgcaacgttggactgcttgcatactccccgttggctggtggggttctcactgggaagtatcttgacgctaacgctgacatctcaaagagcaggctaaatctcttccctggatacatggcacgctacaatgactctttggctaaagaagcgacattagagtacgttaagcttgccaagaagcacgggctaactccagtccagcttgcccttggcttcgtgcgtgatcgtccattcaccgctagctccatcattggagcgaccaccatggagcaggtgaaagagaacatcgacgcgt

SEQ ID NO: 8572 - DNA, 393 bp, Zea mays
  Clone ID: LIB3137-037-Q1-K1-E10
aaaaccgggccgcacccacgcgtcgggcgggggtaggtagcggcggtttcaaccttagtcgagctcggttccggtcacccgtcgagccgcgcaaccatgtcgaggaggaagaccagggagcccaaggaggagaacgttacccttggacccactgtccgtgaaggagagtttgtctttggtgttgctcacatctttgcatccttcaatgacaccttcattcatgtcactgatttgtctgggagggaaactttggttcggatcactggtggcatgaaggttaaggctgatcgtgatgagtcgtctccttatgctgctatgcttgctgctcaagatgttgcacagcgttgcaaggagctcggtatcaccgcgctgcacattaagcttcgtgcaact

SEQ ID NO: 8573 - DNA, 397 bp, Zea mays
  Clone ID: LIB3137-037-Q1-K1-E12
ccgaaggcttcttgaagtgagtgaaaggttaacatttgttgggccgcccgagaatgtgagggaccatgtaatggctgccacaagagccctcaacaagggtgatcaccaaaaggctttcagtgtcataaattcgttggagatttggaagcttttgaggaacagagagcatgttcttgagatgttggagcttaagatcaaggaggaagctcttagaacctatctcttttcatactcgtcttcgtatgagtccttaagccttaaccagctcactaccatgtttgatctcagcgagcagcatgcccacagcattgttagcaagatgatgatgcatgaagagcttcatgctagctgggaccagccaacaaagtgcatcgtattccatagtgtggaccaaact

SEQ ID NO: 8574 - DNA, 297 bp, Zea mays
  Clone ID: LIB3137-037-Q1-K1-E3
ggacggcaacggcggaaatgatggggtggggagaggaggtggtgcctctgtccctgcgaggctacggctatggcaacgaggaggacgaccggccggagaagccgcggcggtacggggtgacggagatgcggagccccttctactccttccgccccgcaaaccaggcgctccaggaaatattggattctcttagtccattcgttgatggtttgaagttctctggcggatgccatagtttgatgggaaaagagttggttagagagatcactgatctagcacacaagcatgacatttatg

SEQ ID NO: 8575 - DNA, 341 bp, Zea mays
  Clone ID: LIB3137-037-Q1-K1-E4
ccgtgaagttgacgcggaggccgtcttattgctcgcccggtgctgccccctcctcggcgatgtggctttcctcgattgtggcaccgtggatgaggccgcccttgctggtatccactctgtccgattcctctctgtagcaggatgccggaacctgaaatgggctactgcatccacctgctggacccagcttccctccctcattgcccttgacgtctcccgcactgatgttccgccaagtgctgtttcacgcctcatttcccatgccaaaaccctcaagctaatatgcacgctgaactgcatttctgttgaagaagaacagcttcacaatcctgctgtattta

SEQ ID NO: 8576 - DNA, 233 bp, Zea mays
  unsure (1)..(233): unsure at all n locations; Clone ID: LIB3137-037-Q1-K1-E5
caatatcccccccactaatcaacctgcaaccgctgntttcctcaataaaacactacattacttaccagactatcagtactccaaaatatctaataattccaagcaactccatatctcctacccatcctaatcgaaattgaataatctcacacccacctacttgcatataaacactcaaacctaaaacataaacaaacacaccctaagtctcatattcatattaaaccccatta

SEQ ID NO: 8577 - DNA, 235 bp, Zea mays
  Clone ID: LIB3137-037-Q1-K1-E6
cggcgcatattcccagcgaccactttttattgatagccaagtgcatgcaaccagccagcctgtccgggaagacggcagtggacgcaacaaaggaggccgcggccaacgtctgggcctctgcgaacgccggcatgcataagacctctgccgccgtgcaaggccaggtggagaaagccacggcgcgcaacgcgtcggacaaggtcttagcagatgagcgccatcataagcgcgtgcg

SEQ ID NO: 8578 - DNA, 427 bp, Zea mays
  Clone ID: LIB3137-037-Q1-K1-E7
ggagaataaggaaaaaacaatggcggtgctactccgccgcgccgcggcgctcctcgtcggcgctgctgtctgcgcggacggcgcctccacgttctactcctccgaccccaacctcggatccgcgcgcgtcgtcttccagacgaattttggtgatattgagtttggtttctttcctcatgttgcacctaagactgtcgagcacattttcaaacttgtgcggcttggatgctacaacacaaatcacttcttccgggttgacaagggtttcgttgcacaagttgctgatgttatgtcaggtcgaaccgcccctatgaatgaggagcagaaaaaagaagcggagaaaacaattgttggtgaatttagtagtgtcaagcatgtcaggggaatcctctccatgggaaggcactctgatccagacagtgctggc

SEQ ID NO: 8579 - DNA, 138 bp, Zea mays
  Clone ID: LIB3137-037-Q1-K1-E8
agccatcagccttctcatcgccacctatggccactgccgaggtccagaccccgaccgtggtggcggccgaggaagcgcccgtggtggagaccccgccgccggccgtcgtgcccgaggagtctgcccccgccgaggccg

SEQ ID NO: 8580 - DNA, 316 bp, Zea mays
  Clone ID: LIB3137-037-Q1-K1-F1
ccacgcgtccgcgatcgtagtcccagctgggggcgacgtactacgtcatcctaggtaaatttccaccggcgttagccacaatatggctgccatgctcgtccgctcgccgccgagcctcctcctcctcgtcgccgtcatcgcgttgtgcgcgtcgtcgtcctgtgtgcttgttgtgccggcggcggcgaccatggctgagaacgccgtgcccgtgcagcagcccgcgatgccgtcgtcgccccagcagccgggcctagctgctactaccgcaggtcagacgaccaccgccacgccagatgcatcgtcgtcgacgtca

SEQ ID NO: 8581 - DNA, 161 bp, Zea mays
  Clone ID: LIB3137-037-Q1-K1-F11
aaaaaccaggccggaccaacgcgtccggataaaacacgtactagatggctatattttattacccttgtgactgttatacagggccacaggggtagtgctttcactgctttctttcttatgcgatatgcgatacacagatcttctggctgtggtttgcccaa

SEQ ID NO: 8582 - DNA, 406 bp, Zea mays
  Clone ID: LIB3137-037-Q1-K1-F12
ttggtcctccagatccaggatggtcgtcctccttgagaccttgcctccccgagtgctctcggtgagctactttgtttcgatttatcaggaaatccgtttgcttcatgttgtgcaggctcatatctgattgctggattcggcaaacccgcgttggatcctgtatcggttagtccttgcctgcaaggttcttgttgttttgttttggtggtcgagcatcgcatgttctgcttctggatccagatctggagaaatcgcgaagtcgtcgtcgttcggttcggagcggatctgaggcgacgatagatggaggcggcgggatctctcggtctgcagtcctgctccacctcgatggatgatgtctctgcgctgataattatggcatcaaattcgataattattagtagatcta

SEQ ID NO: 8583 - DNA, 256 bp, Zea mays
  Clone ID: LIB3137-037-Q1-K1-F2
taaacatccgatccgaccatggcggcttacgcacttcggggccttctccccggcgtttacgccgtgctgatggtaatcgccgtcgcaagcgctgcctccagcgacgtgtcctcggtggtcgtcggcctcgccaaatgcgccgactgcaccaggaagaacttgaaggccgaggcggcattcaagggtcttgaggtggccatcaagtgcaagaacagcaaaggcgagtacgagagcaaggccatgggcaagattgatg

SEQ ID NO: 8584 - DNA, 386 bp, Zea mays
  unsure (1)..(386): unsure at all n locations; Clone ID: LIB3137-037-Q1-K1-F3
gtccgcacaagcagagctaaaacaattctggctttcctttagctagctcgcaagaaataatgggtgggcttcttcttgcttctcgcacagcctgtcgtcctggccttacaagccgccatgcccatgataatggccggcacggcctgtcttcttcaccaccaggaagtcgtagtaagcgaagccgtagccttagcttgaggccacgagctgaaaagacgacgacaggcggtgggggtcatgttgtgagcgaaaagctgagcccctggcaaatccccaggagggagtggttcccccctagctttatctttggtgctgccacttcagcataccaaattgaacgggcttgcaacgaaggtggaaaggngccaagcacttgagacgacttc

SEQ ID NO: 8585 - DNA, 388 bp, Zea mays
  Clone ID: LIB3137-037-Q1-K1-F5
gggctgcagaggtgcggcaagagctgccttcttcggtggatcaactacctacgccccgggctgaagcggggcagcttctcgcagcaggaggaggacgcgatcgtcggcctccaccagatcctggggaacaggtggtcgcagatcgcgtcgcacttgccgggccggacggataacgagatcaagaacttctggaacagctgcctcaagaagaagctgcgtcagcgcggcatcgaccccagcacccacaagcccgcggtctccgccaacgtgccggcggcatcggagcagccggcgtcgaaggaccgcaagccgtttgccacagccgccgctgatggcggctccgacatgaagcaccagcaggtgttcgacccgttcccgctgaccgaca

SEQ ID NO: 8586 - DNA, 308 bp, Zea mays
  unsure (1)..(308): unsure at all n locations; Clone ID: LIB3137-037-Q1-K1-F6
cggacgcgtgggcgcaaatctcacctttttttcatggcctcccccgccgccgcctggcgggcgcgccgactttccgtcattttctcctcgaccaagccacgcgcccgaccacccaaaccggcgccggctccgaaagcgccggccggccaggcggttgcgaaacctgacgagcgctgcgagtcccggaatctcacgaaaatcctgcaggtcatctttcgggagcgcgatccggacaagctggtttcccagttcatcgccgaatcgaccgcgtctgaacgcttncgcaacaagcaccgcgtgtacgacgt

SEQ ID NO: 8587 - DNA, 326 bp, Zea mays
  Clone ID: LIB3137-037-Q1-K1-F7
tgcacacatccaacatgtatttcccctttatttgatcaccagaagacgtaaataaaacagcacccccttctgcccggttccctgacacacggctaattaatacgcataaacataaagcatccatggatggatgccttgaaacatgcatcacttgaacagaagctcacgaggcagcgtcgtcgcatgcatgtgagagttgtggcttcgcggaatggcctcaagcaacaggagtaaatatgatgtagcatagacgatcactatagttgcaggagcaagcaagagtgaggcagccaatgtatttgcatgtctccccgtgtagcacagcg

SEQ ID NO: 8588 - DNA, 347 bp, Zea mays
  Clone ID: LIB3137-037-Q1-K1-F9
ctggatttaacagatagggaaatatactgatggtgacggagtcctctcgttcaggatgtgttgccaaggagaaaaagcttaacattccggagtcatcgacatcaagggcagagccatcttcatccgccgcaattagtggttcctcccgttcagttgctggagctgatagaggcaaagaggactactttgtgcttccagatactgcactgactcgcagcatgcagttgctcctcgcaatgggcttcagctacatccaggtcatggaggcctacagcatattcggcgaggacgtggactcgatggtctgctacctgttggagacaggaggcacctgagccttagccggc

SEQ ID NO: 8589 - DNA, 372 bp, Zea mays
  Clone ID: LIB3137-037-Q1-K1-G10
cggacgcgtgggttttgcgcaatatcttttaattccaaaacctgcttggtttggtgcaggctaatcctcagattttgcagccattgcttcaagaattgggtaaacaaaatccccaggttatgcagctaatccaggaaaaccaagcagagttcatgcggatgatcaatgaaccacttgagggagacgaagagaatgaaatgatgctggaccagatggcggatgcagctgagaccattgcagtgactccagaggagaacgaagctatacttcgtcttgaagggatgggctttgacccggcactcgtcctggaagtgttcttcgcgtgcaacaagaatgagcagctgacccgccactaccctcttggatcacatg

SEQ ID NO: 8590 - DNA, 314 bp, Zea mays
  Clone ID: LIB3137-037-Q1-K1-G11
ccggtccaacactttcacgctcatcttcagcaatggctgcctccaccagggccgtgcttctccacggcgatggccggcacccccatcaaggtgggttccttcggcgagggccgcatcaccatgcgcaagaccgtgggcaagcccaaggtggcggcgtccggcagcccctggtacggccccgaccgcgtcaagtacctcggccccttctccggcgagcccccgagctacctcaccggcgagttccccggcgactacggctgggaccaccgccggctgttcgccgacccccagacattcggcaaagaaccgcgagc

SEQ ID NO: 8591 - DNA, 195 bp, Zea mays
  unsure (1)..(195): unsure at all n locations; Clone ID: LIB3137-037-Q1-K1-G12
aaaaaaccgggcggacccacccgttcggattatcatgcatttctttcacnccttctttatcacaaacgccgacaaggagngccgccggtttctttacatgggcaaccccaccacctccaacgtcgtctcgcccaactacaccaatggcgacaacactcccgccaatatcgtcggcacctacatcctcgactacac

SEQ ID NO: 8592 - DNA, 450 bp, Zea mays
  Clone ID: LIB3137-037-Q1-K1-G2
ccgggccgaaccaacgcgtccggggatgggaaacataagcggttgtagcgtttacccgacgggggtgcccggaccacatccctggttcatcttggtaccccgtccgtctccgatttcagaagcacggcgggctccccggcagcctcaaccgagcagaaagctgagttctaccccaggtatgggaataaatttcggcggatggggaggaaatttgtgcgtctccgctggctggcttgctggcattgggaagggccctattactcgaaccgaggcatggaggacgaagaaaacatcgagggagaactgttgctcgtggagtcacaactccacgacatccaaggacaaattaaaacattactcgatcgccaagaggagttgtatgaacgccaggcacagttgaaggctttgctcgaagcatctaaattgaccagaaatacaacaattaacaca

SEQ ID NO: 8593 - DNA, 372 bp, Zea mays; identical to SEQ ID NO: 8589
  Clone ID: LIB3137-037-Q1-K1-G4

SEQ ID NO: 8594 - DNA, 404 bp, Zea mays
  Clone ID: LIB3137-037-Q1-K1-G5
ggaaaaaccggggcggaccaacgcgtccgccaccaccactgccccggatccataccagttgcagcagcgcgagctagcttcggtcgggcgagagatcgatcgatcgctcggccatcatggcgcgggaggagcaggcgctgctgtcgacggagatcgtgaaccgcggcgtggagccgtcgggaccggacgccggctcgccggccttctcggtgcgcgtgcgccgccgcctgccggacttcctgcagtcggtgaacctcaagtacgtgcgcctcgggtaccactacctcatcagccacggcgtgtacctggccaccatccccgtcatcgtgctggtgtgcggcgccgagctgggcagcctcagccgcgacgagctgtggcgcaaggtgtggggggaggccacctac

SEQ ID NO: 8595 - DNA, 362 bp, Zea mays
  unsure (1)..(362): unsure at all n locations; Clone ID: LIB3137-037-Q1-K1-G7
aaaaccgaccgaccgacgcgtccgaagcgaacattncngctaatctcaagngtgcncctgtnctagccctcctcgncgncggcgctgtcattgatggcaccaccagccccggcaacatcgcagtgtactggggccagaacggcaactaatgcagcctggcggacgcctgcaactccgggctctacgcctacgtcaacatcgcgttcctcacaaccttcggcaaccgacagaccccattttttaacctcgacggacactattactccaactacggcatgtacaacgaacaaaacatcgacatacaaacgttgctcgtgctgngcatcaaggtgctcctctccataggaagaaccagctgtatc

SEQ ID NO: 8596 - DNA, 185 bp, Zea mays
  unsure (1)..(185): unsure at all n locations; Clone ID: LIB3137-037-Q1-K1-G8
cgcgtccggcagacaacatgggtgctcatcttcttgcctanncccnancnaaccgnacccctttatgcccggcagtgttctctaatcgttcctggcctatcacaaatgcaaacggctgcttcctttgggtatgcagcgggacggggacctttgaagcgagctacaacgacgtcatttttttttat

SEQ ID NO: 8597 - DNA, 254 bp, Zea mays
  unsure (1)..(254): unsure at all n locations; Clone ID: LIB3137-037-Q1-K1-H2
acccacaaatccccaatggcgaggcgcatcgccgtggnnngcagcgttcctggcgctggccgtggtggctaccgccgcgctggcgcaggctcccggccccgcggcgacgccgagcgggccgccgaacgtgacggcgatcctggagaagggcgggcagtacaccatgttcatgcggctgatgaaggagacgcagcangacacgcagctgaacagccagctgaacagctcgtacgccagcagcggcggcgggtaca

SEQ ID NO: 8598 - DNA, 312 bp, Zea mays
  unsure (1)..(312): unsure at all n locations; Clone ID: LIB3137-037-Q1-K1-H3
tcggncccatccttctgttgatcagtggctgacggtgaggatatccagccacttgtgtgtgacaatggcactggaatggtcaaggctggctttgctggtgatgatgcgcccagagcagtgttccctagtatagtcggccgccctcggcacacgggtgtgatggttggaatgggccagaaggacgcctatgtaggtgacgaggcacagtcaaaaaagaagtatcttgaccttgaagtaccccattgagcacggtatcgtgaacaactgggatgatatggagaaaatctggcaccacaccttttacaatgaact

SEQ ID NO: 8599 - DNA, 212 bp, Zea mays
  Clone ID: LIB3137-037-Q1-K1-H5
ttggcttccttgcctcgcctaacggctaaaaaaaccagcgagcacgatttctcctctctctgtgagtgtgttttttttttacgtgctctcttgtctgcggccaacatacagctaactggcgagccgtggacgctcggccagctctgctggccgactaaagagggcgtcgtgggcctcaccgccggcgagtgcgtccctgcgggtgggcacac

SEQ ID NO: 8600 - DNA, 183 bp, Zea mays
  unsure (1)..(183): unsure at all n locations; Clone ID: LIB3137-037-Q1-K1-H7
cggcccgaccgacgcgtacgcgggcgcgtggactgtcaagcgccatacgtacgcagacgcgaaccaaccaaccagcgtggagtaggttcgccgcgctgacgatgatgcctcgccgcgcccttctcttcgccgcggtgctcctcgcggcctccgncgccgcggtctccgggttcacctgggagg

SEQ ID NO: 8601 - DNA, 438 bp, Zea mays
  Clone ID: LIB3137-037-Q1-K1-H9
gtgctgtcgatttgtgcggcgactgttagtttggttcggtcccatccttctgttgatcaatggctgacggtgaggatatccagccacttgtgtgtgacaatggcactggaatggtcaaggctggctttgctggtgatgatgcgcccagagcagtgttccctagtatagtcggccgccctcggcacacgggtgtgatggttggaatgggccagaaggacgcctatgtaggtgacgaggcacagtcaaaaagaggtatcttgaccttgaagtaccccattgagcacggtatcgtgaacaactgggatgatatggagaaaatctggcaccacaccttctacaatgaactgcgtgttgctcctgaagagcacccagttctgctgacagaagcacctctgaacccaaaggcaaacagagagaggatgacccaaattatgttcg

SEQ ID NO: 8602 - DNA, 375 bp, Zea mays
  Clone ID: LIB3137-038-Q1-K1-B9
tagcaactagctcacttgatatacatatacactatgccggcatattgcatcggcataaaaacgtgaatttaccatggcccacctgatctcttctgcaatcgcaggcgcgggcaacttggtcgctgatggaatcagtggtgtcactggcgtagcgtcgcaggttgtagaaggcgtagaggacactttaggcagtatcgtagaagcaatcgaccaaagagtcaaggatgaggaccaactggaactggccaaagacgggtggttcaagggaggtaacgggctggaacttaatgctcggaagggtgaaaggcattcctacctggcatttggattgggaggtattggccacccaagtgggggggtcattaactaccacca

SEQ ID NO: 8603 - DNA, 196 bp, Zea mays
  Clone ID: LIB3137-038-Q1-K1-H10
cgacggccaaccgcgccaccctgccgcggttgtcatggtgcatgttaacttctaccggggcgatgggaagactttcaagaagccaaggcggccgtatgagaaggagcgcctagatgctgagctgaagctggttggtgagtatggcctgcggtgcaagcgtgagctgtggcgcgtgcagtatgccctgaaccgtatc

SEQ ID NO: 8604 - DNA, 236 bp, Zea mays
  Clone ID: LIB3137-038-Q1-K1-H7
taacattcctaaaggcactgctttaaagaacatatccacagtcaaagaggggtccgccttgaaagaaaggcctgcactccacaatgtgtctaacaacctcaaagagaggtccatcctgaaagagaggcctcctcttcaagatgtgtctaacacccgcaatgagaggtccatcctgaaagaaaaatcttgcctgtgtagccatgaagctattaaaacccaatgaatatttttgctga

SEQ ID NO: 8605 - DNA, 397 bp, Zea mays
  Clone ID: LIB3137-039-Q1-K1-C8
gttccggtattgaattgccgggtcgagcgacccgtcaggtacgatcggacaccagctttgaccgtctgacgtgccctgcgctacggtcccgttgctacatacggcactagcccgcatgtggggggtgaggctgtcctacgtaacggccctatgactgagggcgcgcctgagaacagcgactacaccaagtgctacaacatcctgggggtgccgaattaggcgttcgacgacgacctgaagaaggcctaccgcaaggccgatatcaagaaccacccccacatggtcggtgaccccgagaagttcaaggagctcacacaagcctatgaggatttgagtgatccagagaaacgggagatttatgatcagcttcgtgaagatggcctgtatgaatgaatgg

SEQ ID NO: 8606 - DNA, 399 bp, Zea mays
  Clone ID: LIB3137-039-Q1-K1-D4
tacgagctgccaccggagtccgaatccgactcccctgccttcaccggcacccaggagctaaagccgtgggagcagcacgccgtggtgatcaaccttccgcgctacgactaccgcgcatcagggtccctcctcctccgttcgcattccggctttctcatcacgtgccccatcaagcgtgaaaaaagtgcaaccaatgaagccattcccatccttgaagagaaccatgtgatgtgaaaaatgcaattaagaaaagaaaactgtgctcggaggcatcatgaagtttagaagaggcagtaacgaatgggaatagtagccgtggttcagaatcaattggaagcaccggaaacacaagctcaccccagtccaaggtgaatgacaactgtgacagggcttcaaatc

SEQ ID NO: 8607 - DNA, 304 bp, Zea mays
  unsure (1)..(304): unsure at all n locations; Clone ID: LIB3137-040-Q1-K1-A12
taagcgcggaattcngctcgagctcttcggtttgatacatgaatttggaaacccaaccagtggcggggtcttattggtgctacggctgcacccctttcgtgcacctctctgtccaaagcaccatcgtctgcccccactgtcaaagcggtttcttcgaatagatccgtgccggcgccggagccgaagcctctccacgccatcgactaaatcctttccccgatgatcctcttttgctccggcgacagggcttccgccgccgtatgagagaagctttcggcaaccgctccccgttcaaccctcttat

SEQ ID NO: 8608 - DNA, 393 bp, Zea mays
  Clone ID: LIB3137-040-Q1-K1-B9
taacctcggaattcgctctagctcaacaaaaacttttttcacacgtctcatgttttgaacttggggcgtgccgacaacgccagcttacgaccacaacttcattatttttcctgtaattatctttaaatacacgaatcttatctcgtcaatctcgtaaatgtcttacgggcattttcttttcacattctccgatgaagcataccaatctagaacgaaagctctgtctcttatccaatggcaacaacaatctgatgtccctaccatagcacagatctaacagtaccattcctatcacaggattatcaattctaccgcttcaaaatataatattgatctactgttcagcaatgattagttatatttacaatgcgcctataaaacttttccaaacaa

SEQ ID NO: 8609 - DNA, 289 bp, Zea mays
  Clone ID: LIB3137-040-Q1-K1-C11
ttctgctcgagcccatactctttttaatggactggtttggccaatacattagtcagttatttcaaccatattctctctttcaattatgctacttttcatggtttcattaccaatcaacttatcagcaacatggcataaattataaacactcttcttggtggtcatggaaaattcatgcttgaaatgacacacctgctcttgactttttgttcaacgatggcaatttgtaacaaagatatttccagagttcaatgtctaatcccttcttgatttccattcacatttattt

SEQ ID NO: 8610 - DNA, 339 bp, Zea mays
  Clone ID: LIB3137-040-Q1-K1-E5
ccgggccgacccacgcgtgctcttggttatactcagcatgttgtgtaagctttgaagaagggacttgactacatagatgtggtggctcttaagaaaatgaacaacaacaagaagcttgttaagaggcttgccaagaagtaccatgctttcttgtcatcataggccatcatcaagcagattccccgtctccttggtccttgtctcaacaaggcaagcaagttcccgaccctggttactcaccaagaattcctcgagtccaaggtgaacgagactaatgcaacagtcaagttctagcttaagaaggtcctttatattgttgtcaccttttgcaacttttct

SEQ ID NO: 8611 - DNA, 444 bp, Zea mays
  Clone ID: LIB3137-041-Q1-K1-G7
cacggcttcatcatcactccactagccagtcagctactggcctacagctagccgcctgctcgcctctcatcccatcccatctcatctccgacaagcgaagcagagcactggcatgagcatggaccgcatggcgcggcgttccgtgtccttgctcctcgctctggctctcctggccgccgcggcgtcggcggactcgtggctgtacgagaagttcacgacggagggcaacgtgcgcgcggactacaacgcgcaggggcagcaggtgacgtctctgatcctgacgcagcagtccggcggcgccttcagctcgcggcagaagtacctgtacggggagttcagcatccagatgaggctgatcccgggcaactccgcgggcaccgtgacctccttctacctgtcgtcgggcgacgggcccgggcacgacgagatcgacatggagttcat

SEQ ID NO: 8612 - DNA, 340 bp, Zea mays
  Clone ID: LIB3137-041-Q1-K1-H9
tacattcgctcaccaacacatacctgacacagaacaccccacgccttgactcgctcggttggagtggagcgcacaggcaccggtcgtccaccagagagggagcggatcgagggggctcggcttgagtggaggagatggaccgcaaggatgtcggcatcctcgccatggacatctacttaccgtcctcctgcgtgcagcatgaagcacttgaggcccatgatggggcgagcaaaagcaagtacaccattgggcttgggcaaaattgcatggccttttgcaacgaggtggaagatgtcatctcaatgagtttgacggttgtcaattctctgctgaaaaaata

SEQ ID NO: 8613 - DNA, 347 bp, Zea mays
  Clone ID: LIB3137-043-Q1-K1-C2
tacacatctgcgctatcagttgccctggcagtagtttttgtcgtaattactgctgggattggcatcatcaaactcttcaatggaactgtagcgatgcccaaactttttccagaattagatggtcttaattctatctggaatctttttacagctgtccctgttcttgttacggcctatatctgccactataacgttcacagcattgacaatgaacttgaagacagaacacaaatcaagcccgttgggcgaaccatggttgtcctgggcttcaatggttacattggcacaaggttctttgcttattttcttttccgggaaagcacacttgaccacctgcttgccaactt

SEQ ID NO: 8614 - DNA, 269 bp, Zea mays
  unsure (1)..(269): unsure at all n locations; Clone ID: LIB3137-044-Q1-K1-H5
cacggataaacaccaatacaatttatagtttatgacaaattccatcgtactacggcaggtgatactatccgccggaagaccatangaaattattcttcactgtttatccctcagaaaatttcacaataaaagggttattctgatcgcctgtacttttacgctgttcacaatacgtaccttgaagaaccttcttcatgcaatgcttttgttgtcaaagacaatgtcatctctaccgcagccatacaaggaacaatatcacctggcatcac

SEQ ID NO: 8615 - DNA, 434 bp, Zea mays
  Clone ID: LIB3137-045-Q1-K1-C2
gtcaagaagaatgtgattgtggccattacctctgataagggactctgtggtggtattaatgcaacatgggtgaaagttagcagggcccttcacaaattgacatctggtccagaaaaagaaaccaagtatgttatattaggagaaaagggcaaagttcagctgttgcgtgactcaaaggacagcattgaaatgactgcaactgaactgcagaagaaccctatcaactacacacaggttgccgtgctcgcggatgacatattgaaaaatgtggaatatgatgctctgagggttattttcaacaagttccaatctgtcatatcgtttaagcccacaatggtaacaatactttcccccgaggttgcagaaaaagaatcagaagctggtgggaagatgggtgacctagattcttatgagattgaaggcggcgagacaaa

SEQ ID NO: 8616 - DNA, 422 bp, Zea mays
  Clone ID: LIB3137-046-Q1-K1-A11
caaaggcagtcaattgtctgaggtgatgacaacagctagtagcgaggcaattgacctcaggtcatgactatgctcatgggatcctagcaagagaccaaaggccacagaagtcctccagcataccttcttccagggttgtacatgtgttccgcttcctgtccgtcggaaagcttcatcgcttcctaaaacacctccatgtgttggatcaaagagaatttccgagaacagtgttgctagaagattctcgaccgggactctatctacgatgaaatctcatagcaatgcacctgcaaaatcaaacggtttatctaggactggtgtacaaagaaaacttcacttggatcgtcagccaccgcagaagagtacaaaaccgaccgagaacagcaataagctagctacaaatcgggtcccagcccggaaca

SEQ ID NO: 8617 - DNA, 411 bp, Zea mays
  Clone ID: LIB3137-046-Q1-K1-A12
atggcttcctgcaggatggcactcctccttggcttgctgctgctagtagtagcttcgccggcgagcgctgatgacgactccggtatctactaccagctggctcttatgtggccaggagcatactgcgagcagaccagcgctgggtgctgcaagccgaccaccggcgtctcgccggcgcgcgacttctacataacgggcttcaccgtccttaacgcgaccaccgacgctgcagtgacgggatgcagcaacaaagttccttacgaccctaacctgattaccggcatccaaggcctgaatcagtactggagcaacatcaggtgccccagcaacaacgggcagagcagctggaagaacgcctggaagaaagccggcgcctgctccggcctcagcgagaaagactacttcgagact

SEQ ID NO: 8618 - DNA, 333 bp, Zea mays
  Clone ID: LIB3137-046-Q1-K1-A2
ggacgcgtgggccgcgaatcacagacgcgtctatctcagcttgctgcactgcactaccgtgccctgccatcatatcgtacgtgagcccggccgagcgagagcgagggagaggcatggctgctccgaagctcgcgacgctggcgctggccgtgctcctggcggcgaccgtggtggctcccccggccgcggtgcgcgcggcgatgtcgtgttccaccgtgtacagcacgctgatgccgtgcctgccgttcgtccagatgggcggggccatgccgccccagccgtgctgcggcggcattcgcagcctgctgcagcaagccaacaacacccccgacc

SEQ ID NO: 8619 - DNA, 260 bp, Zea mays
  Clone ID: LIB3137-046-Q1-K1-A3
tcgaccacgcgtccgaccaacccacccaatatggcgctgctcgtcgccgtggcacgccgccaccaccgcctgggcctccgcgacccgctttctcgccaccacttcctccacataccctctccctcctgaccccgtcccagaccccgacccaatcacccccgcgccgtcccccgtccgcactcccccggacgagcagttcgcggcgtgggtgacgcggctgcgcccgggctttaccgcgtccgatctcgccgcggctatca

SEQ ID NO: 8620 - DNA, 308 bp, Zea mays
  Clone ID: LIB3137-046-Q1-K1-A4
caaccttccggatccagtgccgctcgccttactccccgtccccgacacccatggcgggcagtaggcggaagcacgccgccgccgccgccgccgccgcctagggttccgatcccttcctcatggattcgctgccgcggaagcgcaagggcgcgcgcgccgcgtgctccctggccggatcccgccacgatgcgcctgccgcccgcaagcgcacctgccgcgagcccaagccgcggcccgagaagaagaagccctcttccgccgatgagggctccgcctccgtccgcggcggcgtggttatgaacggcgcc

SEQ ID NO: 8621 - DNA, 430 bp, Zea mays
  Clone ID: LIB3137-046-Q1-K1-A5
gccgggagaacttggctgtctgccctgtctgcaagtacctcgtcttcttcctggggagagggagcagaagacaatacaaagatgtccaagatggcggaggagaaggcggcggcagtgggcggactcggaggagccggggcggcggacgcggcgcagcagcagcagctggcagcaggggaggccgcggcggcgcgggtgcggcccgtggagacgctgcttcgcgcggcaccgctggggctctgcgtggccgccatgaccgtcatgctccgtaaccagcagagcaacgagtacggcgccgtcgcctactccgacctgggaggcttcaagtacctcgtctacgccaacggcctctgcgctgcctactcgcttggatccgcgttctacactgccgtgccgaggcctgccaccgtgtcgcgctcctggctcgtct

SEQ ID NO: 8622 - DNA, 319 bp, Zea mays
  Clone ID: LIB3137-046-Q1-K1-A6
gtctcactaacttctgtcctgcttatactttttgccctcgccgtatcttccaggggaggggcacaggaagattctatggccatcaacaccatgacgttggtgaacggcatccaagacgtcccactgagcgaaaacgaccttgacctccaggagctcgaccgcttcgtcgtcgatgagcacaacaagaaggcccatgctcttctggggttcacgatgcttgtgacggccaagacacaactgtgcgctggcaccatgtactatatgactattgacgagaaggatggcgaattcaacaacctctactactctgacgtgtgag

SEQ ID NO: 8623 - DNA, 195 bp, Zea mays
  Clone ID: LIB3137-046-Q1-K1-A7
cggactcgtgggtaaaaatcagctgctgcttactccaaatggcgttctgtatgggcaaccggagataagaaaaggtgtacttcctcgtcttctagaggagatattgtcaacaagaattatcgtgaaacacgcaatgacaaagttgagtccatcacagcacgttcttcacacgatattcaatgcacggcagcttgc

SEQ ID NO: 8624 - DNA, 400 bp, Zea mays
  Clone ID: LIB3137-046-Q1-K1-A8
cttgatgtcaaccagcacgtgaataacgtctagtatatcggttggatccttgaggtaatggcttcagggcccccttgcctgcctcttttcatcctatattcaatggcgccactgctctgaccatgtggtggctgttggagataccactggcatggcttaaaaagtttataaagctctgcgtacttgcgtagctcattgctaatgaatgatcctgtatttgagatgtaaaacattgctcgtgcacgggtatctattgagcttcttgatctccacacagtacgaacccgctccaatgcccgaatccctttcatttatctctcccttccttttaactttgtccacagagtgcttcgatctcgatcctggaacaacacgagcttgcgagcatgacgctggacta

SEQ ID NO: 8625 - DNA, 429 bp, Zea mays
  unsure (1)..(429): unsure at all n locations; Clone ID: LIB3137-046-Q1-K1-B10
ctcccgcaaaccacaaacagaacccacgcgtgcgctcgcgcccacgagcgaacgatgcctggccggcgccgtgcgcgctccatcctgctcctcctccactacgtggccgcctcccacctcctgctgcgcgccgccgcggccacattgccggaccccgcgccgctcgacccggcactggtcgcgaccccggtgcagcccgccgccgccgttccggggggcacgatcccggcgttccccgcgcagtcggactcgctggcgggttcctcgtccacgtgcccgctcgccccttccccggcgctcctcccggccgtgcgggcctcctgcgccgncgncgcggcgctgccgccgaggctgcgctgctgccccgcgctggccgcgtggctgttcgcgggctacgcgcccgncgngctcgcggagcggccgctctag

SEQ ID NO: 8626 - DNA, 386 bp, Zea mays
  unsure (1)..(386): unsure at all n locations; Clone ID: LIB3137-046-Q1-K1-B11
gccaattactgtgtcgncgcgggggacggccgcctntctgtcggatacagcatcctcacgcgcgaccactctaagatctgcgacctggctgacaaatgtgtactagcatcttctggctttcacggtgatattaaagctctgcacaagaacctagctgccagagaatngctataccaacaccagcataacaaaaggatgagctgccctgccatggcacagctcctctccaataccctgtactacaagcgcttcttcccatattacgccttcaatgtgctcggtgggcttgacagcgaggggaaagggtgtgttttcacctatgatgcagtaggttcctatgagagaactgggtatagtgcttcaggaacgggatctactttgattat

SEQ ID NO: 8627 - DNA, 392 bp, Zea mays
  Clone ID: LIB3137-046-Q1-K1-B12
caagtggtttccaaagccaagtgtgtgtactagcaaccagctagctcgggcggcagcagggagccatgaggtcggaggagaagcaccaccacttcttcaaccaccacaagaaggacgaggagcagcccgccggcgagtacgggtactccgagaccgaggtggtcaccgccaccggcgagggcgagtacgagaggtacaagaaggaggagaaggagcacaagcacaagcagcacctcggcgaggccggcgccatcgccgccggcgccttcgcactctacgagaagcacgaggcgaagaaggaccccgagcacgcgcacaggcacaagatcacggaggaggtcgctgccgcggcggccgtcggcgcttgcggctacgtatttcacgagcaccac

SEQ ID NO: 8628 - DNA, 419 bp, Zea mays
  unsure (1)..(419): unsure at all n locations; Clone ID: LIB3137-046-Q1-K1-B2
cccgcggtgggtgtggcaccggtccgaggcggnggacacggatgccgtggtggcgcgtgctgcggcgacagggggtaagagagacagggagatggcagagagagtgtgcaaggtggcgctgtggtgcgtgcagtatcggccggaggataggccgtccatgggcagcgtttgtcaggatgctggaaggggaggaacagatcgccgcgccacgcaatccgttcgcgcatctggcgccatacacctctagtgcgattcagtcgtccggagacaccacagtaggccctgtggtcagtgctaggtagatgaaaattcttgggctatttaaatttgtaactttagttttgctatctttctcatttttaatcttggtcatatttttttcttaagttttgccttctgctttatagtactagaaggac

SEQ ID NO: 8629 - DNA, 369 bp, Zea mays
  Clone ID: LIB3137-046-Q1-K1-B3
aattcccggctcgccgccacgcctccgtgcggagtactaccggtccgaggtgtggctcacggatgccgtcgtagcgcgcgcgggcgggacaggtgctaagagagacacgaacatggctccgagagcgtgcatggaccatctcgtgtgcgtgcactatcggccgcaggataagccggccatgggcatactcgtcagcatgctgcaaacggaacaacacatcgacccgccaccccatccggacgcacatctggcgccatacactggtagagccactcaggcgttcggagacaccacataccgccctgtgttccgtgctcggcagatgaaaatccttgggctatcaaaatctggaaccataggatgcctatc

SEQ ID NO: 8630 - DNA, 383 bp, Zea mays
  unsure (1)..(383): unsure at all n locations; Clone ID: LIB3137-046-Q1-K1-B4
aataattntactccttcctttacctgtaacccccgcagcaacttcctggggggagggaggattatataatacgaagagcctcaccattacctattataacgccaccaacatactcggactcagaccaaccgtcgttgctgacacggagcaacaccagtatctggcagctgaggacgccacgtaggcgcatgcgctgcccgtgaagacgctgcttcccgctgcaccgatgcaactctgcgcggacgccatgaccgacatgatcctgaacccgcagaacaacgaacacaataccctctactactcctacctgtgatacatcacatacctcaactacacctacaggctctgctctaactactccctggaatgcgcgttctacactg

SEQ ID NO: 8631 - DNA, 410 bp, Zea mays
  Clone ID: LIB3137-046-Q1-K1-B5
accacgcgtacaactgggcctgattatgcagactgtgaggtttttaacaaggatacaccgaatcgggttgggatgtacatgcctgaggtttcaaaaacacatatgggaaacacgatgaggttgggctgcaggagaacattcttcagcaaacctgattgtcttacatcaaaattgtacggaagtcctccacatgtagatgagcgtcatcgtcatagatacgaggtcaatccctcttttgttcccatgcttgaaagtgctggtcttcattttgttggttgtgacgaaagtcgaaaccggatggagattgtggagctacaagatcatcccttctatgtaggtgttcagttccacccggagttcaaatcaaggcctcgatgaccttgaccttgttttacaggtataataatggc

SEQ ID NO: 8632 - DNA, 361 bp, Zea mays
  Clone ID: LIB3137-046-Q1-K1-B7
tccacgcgtccgctcttacccgtaaagactgctcgtagggacttttataccattgttccgcccaggggttgggggttggttaacacactcatcaactttatagagcgcatgttgaatgccttcctggtgttgccactcctcttggcataaaagtgagctacaaaatgcccccagacacttggcgaaactgattgagactatgaacccttcaaacaaacctggatggatcactataattacaaagatgggggcagagaacatgaaaatgaaactgcatcatctgatccgtgctgatcgcaaagctgaattaaatgacacatggattaatgatcctatgcattgaaacaccatccaagcccct

SEQ ID NO: 8633 - DNA, 398 bp, Zea mays
  Clone ID: LIB3137-046-Q1-K1-B8
cgcaggtggaaagaagaggaagctaacgacacgcaaccgtggccggtcccggggcgggtggggccacgcctggcctgacgcgggaagccggccggaaccatccaactccgccgcgtcgtcgtcgccttcgtctcgcgtgctcaccaagagaacaaaacgcgagcacagcatgaattcaacgtgcacggcccgtccaccctccgtttacgcttcctgcctacacgtcgcctcggacttcctctgctgtaatcccgtgacacggctggctgcgacggcgaatcagatccctacccgtggcgttggtcgtgaattggcgccgtctgcccctgccagccggattacctgctttgttctcaggcaacattttgttcactagtgaggtagcttctgtgattgga

SEQ ID NO: 8634 - DNA, 425 bp, Zea mays
  Clone ID: LIB3137-046-Q1-K1-B9
aaaatcggtcacatcttatgttcacacctgaagggactccaatgagccgagggaccacgattccggagtctcatgggacaccgtcaagtgaggtctctgttaacaccaaaaggagcaggagcaagaagcccaagtcccacgcgagcaagagggcgctggctagtccaggcagcgactcagttggacggagcagcaccgagaacttttcgaaggaatcaaggcatgccaagagagagagctcctcaagcaaagctgctaaatccgaccagggcgatcaagaacctcgtgtaagcaacagcaacagcaacccgttgcctagctacatgcagttcacagagtccgcaagagccaaggcgtcgtccccgaagatgagcccagacgtgcaggacagcaacgccgcgaggaagaggcactcgttgcccatg

SEQ ID NO: 8635 - DNA, 425 bp, Zea mays
  unsure (1)..(425): unsure at all n locations; Clone ID: LIB3137-046-Q1-K1-C11
ccggctggtactcanaccaataggaagcgttgcatgtaggaggacgatgccaacgcgggcgcgcgcatgaacaacgccatcgccgctcccttcgtcaggctcgtcatggatgaaggccacaacattctcccccggcatgaagccttgcagcttgcgatcaggatggacatggacttggttgaggtcgataggaaatcagacccacctgtatgcaaaatcatggattttcacagagagaagtataagaaagaaaccaaggagaaagaacgcttgaaaaccaagtctgctattgtcttacgtggtggggagaacaaagaagtgcgatttaaggggaagactgaactaaaagatttgatggtgaaggcagatgggattaccagattaatggagcggggttacagggtgaagtgcatggccatgccctc

SEQ ID NO: 8636 - DNA, 398 bp, Zea mays
  Clone ID: LIB3137-046-Q1-K1-C3
aaagggctcatcttagctccactttagcttcaatcgcagtcgtgaccagagcgcgagagggagctagagggccgtgaaaatgccgatcaataggatcgccctggggagccaccaggaggtgtaccacccgggcgccctcaaggcggcgttcgctgagttcatctccaccctcatcttcgtcttcgccggccagggctccggcatggccttcagcaagctgaccggcggcggcccgacgaccccggcgggcctgatcgcggcggcggtggcgcacgcgttcgcgctgttcgtggcggtgtctgtgggcgcgaacatctccggcgggcacgtgaaccctgccgtgaccttcggcgccttcgtgggcggcaacatcaccctgttccgggggcttctgtact

SEQ ID NO: 8637 - DNA, 399 bp, Zea mays
  unsure (1)..(399): unsure at all n locations; Clone ID: LIB3137-046-Q1-K1-C5
acgcgtgcggccacctcagttccattctgccctttctctttctcactcggcaaccaccatgccgccgcggcgcgaccataaatccgggcgccgcacctacatcanccacggcggcggcgctgtctcgggccctggcagcggcgcgccctttcctgcgcggggaggaggcggaggtggacccggcgctgcctagcctcgccgccgtgctgcgcggagcgggcgccggcgagtgctggcacaagcacagcacgttcctggcgcacctgctggacgtgcaccggatcctccgcctgtggggcgcgcccgacgccggggcgcgctgcgggctataccactccgcctactccaactcctacgtcaacctggccatcttacagcctgacaccgggcgcgcccacg

SEQ ID NO: 8638 - DNA, 426 bp, Zea mays
  Clone ID: LIB3137-046-Q1-K1-C7
cccacaccgttcttggaataacattctggttgtaatcaagggtttaccaaaacgacagggtctattgatcgcatgcctacaaaagcgtttgctggtgatttaaagctgcttacactaaatctgagaaaccattccgaatatgctgcgaagggtataaaaatgaaacttagcaacccaagatttttaattcccggcgattcatcggacattggcctcaagttcccacactgcttaaagaggcacgtgcaatcagaaagcagtgttgtatcagccaaaactatgaaggacaatttcaagagtctgctctttgcatttcctcaggatatagaaattcaagcaggggcagcactctcttggcctatttggtttcatgcggcaactcctggaaatgtttctctttatatatctccgtattacgaaatgggg

SEQ ID NO: 8639 - DNA, 380 bp, Zea mays
  Clone ID: LIB3137-046-Q1-K1-C8
aaaaggtcacctcttaacaccaggccgccgccattgctgctccctttgttcggggctcgggaccctcgatcccgagcgtggttaatccacgcatcgaccggcgaacgccaccgtatcccatctcgaatacctccgcgctcagcgtcatggacggcttctccaaaacgatcggcggtggtggccctaacgttccggcgggatcccaccccgcgggcgggagccaggcggcggcagggggaggcgcgacgcagcggacgcagtatccgtatgtgactggtacttcagtcattgccttgaaatacaaggatggtgtgatcatggcatgtgacactggagcctcctacggatcaactttgagatacaagagtgtggaacgcatt

SEQ ID NO: 8640 - DNA, 411 bp, Zea mays
  Clone ID: LIB3137-046-Q1-K1-C9
gcacgacacgacaccaagtcgatgtagctcgagggcaccaatcatggccggcgtgaactcgagcgtcgtcgggctcaagcccgccgcggcagtgccgcaggccgccgccgcctcatcgccggcgaagagggtgcagctggccgcgcccgagggccgccgcgccgctctgctcggcctggcggccgtcttcgccgtcacggccaccaccgggtcggccaaggccacgatcttcgatgagtacctcgagaagagcaaggccaacaaggagctgaacgacaagaagaggctggccaccagtggcgccaactttgcgcgcgcctacaccgtggagttcggcagctgccagttcccctacaacttcactgggtgccaggacctcgccaagcagaagaaagtccccttcatcagcga

SEQ ID NO: 8641 - DNA, 406 bp, Zea mays
  Clone ID: LIB3137-046-Q1-K1-D1
ccacgcgtccggtggaccaacggcacctcctacttcttcgactccgggtcctgccgcaccatgcgtttccgcgtggggatcctgccgcctgactggctcgccgccggcgccgtctatctcggccgcgagcacgtcgacggcttcgactgccacctgtggaccaaggtcgacttcgtctggtactacgaggaagtcgccaccggccgccccgtccgctggaatttcttcaatgggatgcagcagcatgtgatgagctttgaggtgggaggagtgctggaagactccaagtggcaggcgccccctcgctgcttcagtggcggcaatgccgacaccgccaacgcggctgcggatggagttcatggcgaggaagccggtagtgttgatgtgatggacagcatgatcaggt

SEQ ID NO: 8642 - DNA, 440 bp, Zea mays
  Clone ID: LIB3137-046-Q1-K1-D10
ggttcgagggacgcgtccgacaagcagggggacatgctgctggtggtgtcgcatggcgcgcacgcggtgcggctggggagcgaggcgtcgatccggcagcgcctggccgtggcgcgcggcgcctactacgccatcacgttcagcgcggcgcggacgtgcgcgcaggcggagcggctgaacgtgtcggtgagccccgagtggggcgtgctcccgatgcagaccatctacggcagcaacggctgggactcgtacgcctgggccttcaaggcgaagatggacgcggtgacgctgctcatccacaacccgggcgtggaggaggacccggcctgcggcccgctcatcgacggcgtcgccatccgtgcgctgtacccagccgcgctcgccaggcgggcggggggaaacctgctcagaacggcgggtcgagagggccctacttctgc

SEQ ID NO: 8643 - DNA, 189 bp, Zea mays
  Clone ID: LIB3137-046-Q1-K1-D11
tcgaaaaagacatcatttgctatatggcgcgtaccaagcagaccgctcgcaagtccactggaggaaagcctcctacgaagcaactcgctacaaaggcagccccgaaatctgcacccacaactcgaggagtgaagaagcctcaccgctaccgcccagagactgttgctcttcgtgagatccgcaagtacc

SEQ ID NO: 8644 - DNA, 224 bp, Zea mays
  Clone ID: LIB3137-046-Q1-K1-D12
atgactgggagccggtggttgtgcggaagaaggcacccaccgccgctgccaagaaggatgagaaggtcgtcaacgccgtgcgccgcttctgcgccggaatcgagaccatgaagaagttcaacgctggtatgaacaaggcggcgttcagcggcacattcctcaacaccaagcgccttgacgacgacacaaaaaaccttgcccatgagcgagttccaagtgacctg

SEQ ID NO: 8645 - DNA, 406 bp, Zea mays
  Clone ID: LIB3137-046-Q1-K1-D2
gaaatatttatatatcacgttcttatttggctacaattccgtgttctttattcagcaaggataaaatgaaatccacttagcccaagagcatccatccgaccttaacccaaaaataaataacctctgctcgacaccaccaaaaccaaaacatgactggaagtcaccttccatcagctacagattgttacattaatacatggtaacaagaataaactagacaagggaatagagttccaatcctctcagaatagcataataaacgatgcggtaatcacagaatggtggtgcacttaatccgcccgggattgaccagcgcgagacgaaaggataattccaacaattagaccatagagagcaagcgcttctgcgaaaatgaggatgaggatcatgccgacgaaaagctttg

SEQ ID NO: 8646 - DNA, 426 bp, Zea mays
  Clone ID: LIB3137-046-Q1-K1-D5
cggacgccttggcgctaaaaaggttaggattcctctcgcgtcgtggccgtcgggggtcggtgcgctgcgtcgttccagatttggggaaggaatccggcaccgagattcgagtcgaaaaggacatcatttgctagatggcgcgtaccaagcagaccgctcgcaagtccactggaggaaaggctcctaggaagcaactcgctacaaaggcagcccggaagtctgcacccacaactggaggagtgaagaagcctcaccgttaccgcccagggactgttgctcttcgtgagatccgcacgtaccagaagagcactgagttgctgattaggaagctgccgttccagaggcttgtcagggagattgctcaggatttcaagacggatctgcgcttccagagccatgccgtgcttgctttgcaggaggcagcag

SEQ ID NO: 8647 - DNA, 372 bp, Zea mays
  unsure (1)..(372): unsure at all n locations; Clone ID: LIB3137-046-Q1-K1-D6
ctgccccntttccgccaataaggttgggctatctttccgaacctgctcgaccggggcaggtggactctcaccatgcacacttgccgacggcatcccgcccctcaaaccctatcaaacaacacatactctcctaccatcggcccaccaaccacacccttactagctccactgctcgaaaccgctctacgaagccactggactacaaaggcagctaccaaacctgcacacagaactcaatgactgaaccagcctaaccacgaccgtccagagactgacgctcttcgcgagaaccaaagcacccaaaagagcactcactctctcactaggaagctaccggaccatacgctcgtcactgagatcgctcacgatttc

SEQ ID NO: 8648 - DNA, 426 bp, Zea mays
  Clone ID: LIB3137-046-Q1-K1-D7
ctccaggctctgatggagggtcttcaggtccttcccttggaggacgttgtctgtgaagctgacatcttcgtgaccaccactggcaacaaggatatcatcatggttgaccacatgaggaagatgaagaacaatgccattgtctgcaacattggccactttgacaatgaaattgatatgctcggccttgagacctaccctggcgtcaagcgcatcaccatcaagccccagactgaccgctgggtgttccccgagaccaacactggcatcattgtccttgctgagggtcgcctgatgaaccttgggtgtgctactggccatcctagctttgtcatgtcctgctcattcactaaccacgtcattgcccaacttgaactggggaaggagaagagctctggcaagtatgagaagaaggtgtatgtgctcccc

SEQ ID NO: 8649 - DNA, 377 bp, Zea mays
  Clone ID: LIB3137-046-Q1-K1-D8
ctagaagctcccctctccctccttccctctctctctctctcttcgccgaccgaagctccggacccaatctaatcgacacctcaccgagatgggccgcaagttcttcgtcggtggcaactggaaatgcaatggaaccacagatcaggtcgagaagattgtcaaaaccctgaatgaaggacaggttcccccttcagatgttgttgaggtcgttgtcagccctccttatgtcttccttcctgtggtcaagagccagctgcgccaagagttccatgttgctgctcagaactgctgggtgaagaagggaggtgctttcactggtgaagtcagtgctgagatgctcgtcaaccttggtgttccctgggtcattcttggacact

SEQ ID NO: 8650 - DNA, 422 bp, Zea mays
  unsure (1)..(422): unsure at all n locations; Clone ID: LIB3137-046-Q1-K1-D9
cttcgtgctgcttcctggttggggaagggaaggagaaggagaaggctgtgtgcgtcctgcgccgataacgcgatggtgtccattgtcaccgaggtatgggcgctcgctggatgcggcccggcgtccaaggcggcggcggtagcggtagcggcgcaggagttgccggcgcagcatccttctcctgccgcagcgggaggagggaaggccaagaagagagccgtgccagtgtcgttcagaggcgtcagcagcggcggtggccaggaccaccagcgtgaggccgccgccgtcgtcgtcgggcggcggcgcggcctcgcgtcgtgcgcgctcgccgccgtcgccgcctcgttctccgcccgcgctgngccgcccgcgcgggcgcttgtcctcgaggaagacgacgacatcgagcctgtggagcgcgt

SEQ ID NO: 8651 - DNA, 427 bp, Zea mays
  unsure (1)..(427): unsure at all n locations; Clone ID: LIB3137-046-Q1-K1-E1
acccacccgtccgnggacccttggttcgcccacgcgtccgcgttctcgtttccgctggctctcccctccactgggctcgcgttccttcaccgcctgctgcggctcctcgccgcgtcgggcgtgttcaccgtcgacaagcagagcacggaggaggagcggtaccgcatcagccccgtgtcctacctcctggtggacggcatccctcacgaggaccacatgaaccacaccgctctggtgctcacctgcacctcgacgcgctacatcgaggcggngatagggctggcggagtggttcaagagggacgtggtcacgtcaccgttcgaggagctgcacggggcgactctgttccacgagagcatggggagcctcgacgcatatttccacgacatggctagcgaggccttggacgcccacgacaacctcggca

SEQ ID NO: 8652 - DNA, 366 bp, Zea mays
  Clone ID: LIB3137-046-Q1-K1-E10
acccaggcgtccgttcgttaaaaccttaccgccggcgcctccttttcgttttcttaactctttcctccagctgggggtggggcggtaaagggaaggcaagatgtacaccgcgaggaagaacatccagaaggagaagggtcttgagccctccgagttcgaggactccgttgcccaggctttctttgatctggagaacgggaaccaggagctcaagagcgacctcaaggacctgtacatcaacaatgctatccagatggatgttaccgggagtaggaaggctgttgtcattcacgtcccataccgcctgcgcaaggccttcaggaagatccatgtcagactcgtcagggagctggagaagaattcagc

SEQ ID NO: 8653 - DNA, 420 bp, Zea mays
  unsure (1)..(420): unsure at all n locations; Clone ID: LIB3137-046-Q1-K1-E11
gcagancaaaaccaaacatggccaccattttgacctccgattctggcctcgtcctcaggggctccgctctcctccggaggactaggagggccgcctcatccgtcaccgccaggctgccagccgtcgcccgccgtcgcccgcagctcctcgtgcgtgcctccgccaaggagatcgcctttgaccagggctcaagagccgcccttcaggccggcgtcgagaagctcgccgccgcggtcggcgtcaccctcggacccagaggaaggaatgttgtcttggatgagtttggaacccccaaagtggtcaatgatggagttaccattgcccgcgctattgagcttgctgatcccatggagaatgctggtgcttccttgattcgtgaagttgctagcaagacgaatgactcggctggtgatggaacta

SEQ ID NO: 8654 - DNA, 357 bp, Zea mays
  Clone ID: LIB3137-046-Q1-K1-E12
caagcatcatctggtacccaggatacaaataaaggaccatcgataccatttaatatgttggttccagtcctacaggcacatcttgacagagacaaagatatgcagcttcaaactgtttgggcaaaacttaggcgtaatgaagtcaacaaagatgatttcttaagagttatcaggaatattgttggggatcaaatgctcaagcaggcagctcataaagtttttgtacagatgcaagcacaggcgcaaagaaatagccaggcaaattcaagtcagcagtctttattctctcaactttctgcacagcagatggcttccagtggttcagcacagttacatgatcagaaaattcggccacct

SEQ ID NO: 8655 - DNA, 431 bp, Zea mays
  Clone ID: LIB3137-046-Q1-K1-E2
cggacgcgtgggcggacgcgtggggtcgagtagactgccgggcctctcccgttctccacggacgggtggcgctactggaggcgacgcctggacggcgaccccgcacactcacagccacaccctccacctgtgtgactattcaagggcttaggccgagccgcccggccaatcgccgtccgccggaccgctgaggaatttttctttctcgtcaaaagttactgcattcattttacagtaatggctatggggttgattaatgctaatcctataatccatgagaaaaaagagaggcgtgccagacaggcaccagagaccacagatgaaaatgcagcagagcccatagatcagctggaaatatttgatcacattagagatataaaggatccagagcacccgtactcactggaacagctgaatgtggtgactgaaga

SEQ ID NO: 8656 - DNA, 430 bp, Zea mays
  Clone ID: LIB3137-046-Q1-K1-E3
cccaccgcctccgccgccgacaacagcgttttgtagtgtagttccggagagggttggggagagtaggagtgatccgcaatgtcgacggaggaggctgttgtggctgaggtcccggtgaccgaggtgccagcggaggtcccggcggcccaggtggccgaggcgcccaaggcgaagaaggcgcccaaggagaagaaggcgcctaaggagaagaagctttccgcggcgaagaagccggcggcgcaccctccctacgctgagatgattgtagaggcgatcgctgccctcaaggagaggaaggggtcgagctcggtggccatcagcaagtacgtcgaggggaagcatggcggcaagctccccaccaacttccgcaagcagctcactgtgcagctgaagaagctcgctgccgccggcaagctgacgagggtgaaga

SEQ ID NO: 8657 - DNA, 398 bp, Zea mays
  unsure (1)..(398): unsure at all n locations; Clone ID: LIB3137-046-Q1-K1-E4
aaaaggttaggatttctcttgtgtcgnggccgtcgggggtcggtgcgctttttcattggggatgggccgaaggaatccggcaccgagattcgagtcgaaaaggacatcatttgctagatggcgcgtaccaagcagaccgctcgcaagtccactggaggaaaggctcctaggaagcaactcgctacaaaggcagcccggaagtctgcacccacaactggaggagtgaagaagcctcaccgttaccgcccagggactgttgctcttcgtgagatccgcaagtaccagaagagcactgagttgctgattaggaagctgccgttccagaggcttgtcagggagattgctcacgatttcaagacggatctgcgctttcagagccatgccgtgcttgctttgca

SEQ ID NO: 8658 - DNA, 429 bp, Zea mays
  Clone ID: LIB3137-046-Q1-K1-E5
gtaccgtctctggacctggctttctttcaagctggagcttaggtttggtgaactgcatcgcatccatgccctcgccagtggaccaatgcaagaaagctttcctcctgaacatagcagtgaactgctcgctcacacggcggaacatctcctggatggaggtggaattgccaatgaaggtggaggccatggagaggccacgcggcgggatatcacaaacactggacttcacattgttggggatccactccacgaagtaggacgagttcttgttctggacattgatcatttgctcatccacctccttggtgctcatctttccacggaacatggcagatgctgtgagatagcggccatgacgcgggtcagcagcacacatcatgttcttggcatcccacatctgctgggttagctcaaggacagtgagagcac

SEQ ID NO: 8659 - DNA, 329 bp, Zea mays
  unsure (1)..(329): unsure at all n locations; Clone ID: LIB3137-046-Q1-K1-E6
nntaccgtatttcgaccttgctttttttcatgctacacctccaccaaaanngaacggccatcggcatccattcaactaaccagtgggccaacacaagaaacctttcctcctgaacataccacctaactactcgttcacacgtcaacacatatcatttattaacatttaatagccaattaacctggaatccatatacacaccacgcagccgaatatcacataacactcagactccacattcttgcgcatccactccaccaaataagacgacttctccttctcgacattcatcatttgctcatccaccttcttggtgctcatctttccacg

SEQ ID NO: 8660 - DNA, 314 bp, Zea mays
  unsure (1)..(314): unsure at all n locations; Clone ID: LIB3137-046-Q1-K1-E7
ccccncacactcacagccacacccttcacctgtgtgactattcaagggcttatgccgagccgcccggccaatcgccgtccgccggaccgctgaggaatttttctttctcgtcaaaagttactgcattcattttacagtaatggctatggcgttgattaatgctaatcctataatccatgagaaaaaagagaggcgtgccaaacaggcaccagagaccacagatgaaaatgcaccacagcccatacatcaacttgaaataattcatcacattagaaatataaaggatccagaccacccgtacctcactgaacaac

SEQ ID NO: 8661 - DNA, 332 bp, Zea mays
  Clone ID: LIB3137-046-Q1-K1-E8
aaggcgacccctccacttcaacccctcacactcacagccacaccctccacctgtgtgactattcaagggcttaggccgagccgcccggccaatcgccgtccgccggaccgctgaggaatttttctttctcgtcaaaagttactgcattcattttacagtaatggctatggggttgattaatgctaatcctataatccatgagaaaaaagagaggcgtgccagacaggcaccagagaccacagatgaaaatgcagcagagcccatacatcagctggaaatatttcatcacattagagatataaaggatccaaaacacccgtactcactggaac

SEQ ID NO: 8662 - DNA, 428 bp, Zea mays
  Clone ID: LIB3137-046-Q1-K1-E9
acgcacgcgtgcgaaaagtgcaaatattcacagagcttgtggtttagttgcgtggcagtgatgaagggattgcgtccggctctcaggtggcaaggcaagacacttttggaactttgggcgccattgtaaaacggagaactggcaacaagctggtaggtttcgtcaccaaccgacatgttgctgttgacttggactacccaaaccagaagatgtatcacccattgccacccaaccttgggcctggtgtttatcttggagctgtcgaaagggcaacatcttttatcacggatgatgtttggtatggaatctatgctggaacaaacccagagacatttgtacgtgctgatggggcattcatcccatttgctcatgactttgacatctccacagtcacaactacagttaggggtgttggtgatattggggat

SEQ ID NO: 8663 - DNA, 328 bp, Zea mays
  unsure (1)..(328): unsure at all n locations; Clone ID: LIB3137-046-Q1-K1-F11
caatggcctttcntttccctttcacccgcctggagctcagcctcagctagcctggggaccgctgcacgaacagtagtcctccctcctcctataaaagtagggtaaccacccgtccacgccagctagctgacgtcgtcggccatggcggagcgggagcagcaggtgggcagcgacgacgcggcggagtggaagcacgtggcggagctgagggccgtcacccaagcccaggacccttcgtgcaacgatgaggacgactacacgctccggcgctttcttcgcgcgcgggaccacaacatcagcaaggccgccgggatgctgctcaagtacc

SEQ ID NO: 8664 - DNA, 388 bp, Zea mays
  Clone ID: LIB3137-046-Q1-K1-F12
ccctcgccccctccctaccggcaccgcccagatggcctgctcccacatcgccgccgcgggggtctcgtcccccgccgcagcggcggctcgttccccggcgcattctcccgcttccgccttcgcgcgcctccggtcgacgcctcgtttcgcgagcgctggcttgtcggttaagggaaacggagcggcgttcccgttggtcgccgccgcggggccggccgcggcggcaccggtggccgacctggacggccgcccggccacggagaagcagcccatcatcgtcatcgacaactacgacagcttcacatacaacctctgccagtatatgggggagcttggattgaacttcgaagtataccgcaatgatgaactgaccatagaagatgtgaga

SEQ ID NO: 8665 - DNA, 433 bp, Zea mays
  Clone ID: LIB3137-046-Q1-K1-F2
gccagccccccacaggagcttctctgaggaagttgctgcacttaaccgctactttggcgggctgaaatctggtggtaatgcttatgtgattggagatccagcaagacctggacagaagtggcacgtcttctacgccactgagtacccagagcaaccaatggttaaccttgaaatgtgcatgactggtctggacaagaagaaagcttctgtctttttcaagactaatgctgatgggaacacaacatgtgccaaggaaatgacaaagctctctggcatctctgaaatcatccccgagatggagatctgcgattttgactttgaaccctgtggctactccatgaatgcgatccatggctctgcattctccacaatccatgtgacgcccgaggacggtttcagctatgccagttatgaggttatgggcttggatgcc

SEQ ID NO: 8666 - DNA, 422 bp, Zea mays
  Clone ID: LIB3137-046-Q1-K1-F3
ggcggctaaatatggcagaaaatgcaactgttgtactatcagtggaagaaatgcttccaggagttgcgcaaggtgctattggaatagcttgccgaagcaatgatgacaaaatgatggagtatctatcagcgttgaaccatgaagataccagattagctgttgcatgtgaaagagaatttttggcagttcttgatggtaactgccgaactccaattgcagcctatgcttaccgtgacaatgatgggaattgctcattccgcggtctattgtcttccccagatggatctaaagtatttgagacaacaagaagtggaccgtactcttttgacgacatggttgagatgggcaaagatgctggtcatgagctgaaggcaaaggctgggcctggcttctttgatagcttgcaatgaaaaagaatgagc

SEQ ID NO: 8667 - DNA, 439 bp, Zea mays
  unsure (1)..(439): unsure at all n locations; Clone ID: LIB3137-046-Q1-K1-F4
acgcgtgcgtctgcttccctttctttcaccgtgtctcgatgcacacgcgtgagatctgtgcccgccnccgcgggcatataccagacgacggggccctncgagcttcaccgcgatagaggtaggcccgcccgataccaaggaggatggcggcagtgggcgttggtgcagcggacgagcggtgggcttcgttgtgcaactgcgtggtgaacttcttgctggaggagcggtatcacctcacggcgctagagctattgcaggagctccaggaggacggccgctccgcgcacgccctccgcctccgcgctttcttctgcgacccagcgcttttcccgcccgatctcgtcgcccgctcatcctctgcgccgaccggggctgatccacagattttgctagaagagaaaatagcagcagaagaaaagttggcactcacggagtatga

SEQ ID NO: 8668 - DNA, 282 bp, Zea mays
  unsure (1)..(282): unsure at all n locations; Clone ID: LIB3137-046-Q1-K1-F6
cccacgcgtccnctcttcntttcttccactacatataaccttccttatacaactgccnacatggcgctcccgcccaattttaacatgcctacgctccaccacctcatccccctttccatcacctccgcccccctcggcacccatgcctacaataactacaccgtctcctactacaactaatagtaccacggcctaaccctgcctctcgtccactaccacttcctgcctgactcaagaacttcatctctgccatatcctcatcttaacaccgacaataaccac

SEQ ID NO: 8669 - DNA, 366 bp, Zea mays
  unsure (1)..(366): unsure at all n locations; Clone ID: LIB3137-046-Q1-K1-F7
agcttctctgaggtatttgctttacttaaccgctactttggcggcgtngaagctggtggtaatgctggtgtgggtggacatccagcaagacctggacagaagtggcacgtcttctacgccactgagtacccagagcaaccaatggttaaccttgaaatgtgcatgactggtctggacaagaagaaagcttctgtctttttcaagactaatgctgatgggaacacaacatgtgccaaggaaatgacaaagctctctggcatctctgaaatcatccccgagatggagatctgcgattttgactttgaaccctgtggctactccatgaatgcgatccatggctctgcattctccacaatccatgtgacg

SEQ ID NO: 8670 - DNA, 391 bp, Zea mays
  Clone ID: LIB3137-046-Q1-K1-F8
aaacgccatatcggtcaatttcttgttttctgcagcggcaccaatggggggggtgagcgaggatcaatccgtgcgcgaggtcgactccacggagaccaacgctatgtccctcaagctcacacaccgagctctctccgacatgtcccgcctgagcagcttcaagaacctgtagcacctctacctcagcttaaactgcctcgtcaccctaaaaggtatgctcttctgagcccatcagaagcggctgtcaggtcaagaaaacatgcttgtgagcttaaaaggcgttgaggggctctcaaagctgcaagtactgaatgctggcctgaacgaacttaccaaaacggacgacgtcacatcttatacaagacctggagcattgagtcttaatgataac

SEQ ID NO: 8671 - DNA, 436 bp, Zea mays
  Clone ID: LIB3137-046-Q1-K1-G1
ttccgttgggccaccagctttgaccgccgcctcccttcccctccgctactgctcctcctgagcccactcccccgcaggagcggcggcggcggcggcgaggtcgtaccccacatcggcgagcggcggcggcaccgccggaggcaaaggcaagatgttcgggcgcgcgccgaagaagagcgacaacaccaagtactacgagatcctcggggtgcccaagtcggcgtcccaggacgatctcaagaaggcctaccgcaaggctgctatcaagaaccaccccgacaagggcggtgaccccgagaagttcaaggagctcgcacaagcctatgaggttttgagtgatccagagaaacgtgagatttatgatcagtatggtgaagatgcccttaaggaaggaatgggcggtggaggatcccatgttgatccatttgacatcttc

SEQ ID NO: 8672 - DNA, 394 bp, Zea mays
  Clone ID: LIB3137-046-Q1-K1-G10
gtgtggatgctaaccggtgttagcaaaatacagcaattcaaattggacgtctctgtaacctcataacttgtgggcccaatagtcaattgttatctatcagtgggaaaactgaagaggacgtgctaagaagcctagagagggcattatttattatgaaaaatacatctgaaacaaagggtcttgcatttgttttggatggttgggcacttgaattaattttgaagcattccaaggagtcttttactaggttggcgatgctgtcaaaaacagcaatatgctgtcgaatgacacctttgcagaaagcacagagttcaagtttcttaagagattgatacttattcatgggcgttattcatacaatcgaacagcatttatttcacagtactccttctac

SEQ ID NO: 8673 - DNA, 300 bp, Zea mays
  unsure (1)..(300): unsure at all n locations; Clone ID: LIB3137-046-Q1-K1-G3
cacgccttctcttgctacatctaccctactttctattttctnctaaaatagaatccggaaccgcttacattaatctcactcctcaacacaccatatctgaaccgtcacacacatcacaccacattcttacatgcttaacaacccccctcttcaactttacactatcctctatttcccaactccattcaccccaacaaaaacaataacatatagcctcccactctccttggcagctttcacgtccctcactatgtcaatagaaccccttgtcgtcaaaatacgaaaaagcgcatcctccat

SEQ ID NO: 8674 - DNA, 326 bp, Zea mays
  unsure (1)..(326): unsure at all n locations; Clone ID: LIB3137-046-Q1-K1-G5
ggagactcctgcggtcgagcaggtggcagtcgccgacgaggaggctgctgctgcgcctcgtgctggtgccgaggagcccgccgcggccgaccctgtcgccgaggcagaggctgctgctcccgaggagctcgccgcggacgagccggaggctcctgctcctgctggtccccaggagccggccgccgaggcgcaggctgctgctcctgaggagcccgagaaggccagcgagtgaggccgtgcgcacgcagcggcggccagggcccangggatcggcgtgcgcgcgtggcggcgtagtcgctcgcgcgcgtacatggcagtatgacacg

SEQ ID NO: 8675 - DNA, 375 bp, Zea mays
  unsure (1)..(375): unsure at all n locations; Clone ID: LIB3137-046-Q1-K1-G6
gactcctgcngtctagcatttggcattctccgacgagganctcctgcgggggctggtgcgggttccaatgagcccggcgcnncctatcctgtcgccgaggcagaggctgctgctcccgaggagctcgccgcggacgagccggaggctcctgctcctgctggtccccaggagccggccgccgaggcgcaggctgctgctcctgaggagcccgagaaggccagcgagtgaggccgtgcgcacgcagcggcggccagggcccaggggatcggcgtgcgcgcgtggcggcgtagtcgctcgcgcgcgtcgtggcatatgacacgggatttgctgtcagtacgctcgttatactggcgtttctgtgtggggtgcgacgta

SEQ ID NO: 8676 - DNA, 382 bp, Zea mays
  unsure (1)..(382): unsure at all n locations; Clone ID: LIB3137-046-Q1-K1-G9
gccttctccctgctcgctctattccccatcgtgccccttgagcttggagctcgagcgccggcaggggcacgccccttccttatccctcgtcggccatgctcgtcggacccgtcgagcagagcccgacgccctggctgagctggtctagctcgcgccctcttccaatttgaccttccctgctcggtctggcatggaggtcagccaccagaaatcgtgcgccaaccttgcccttctcaaccgtcgaccatgtgaagccatggagccgtcgttcttagccccggctccccaagtccggccaggaacttnccagcgcctncctctctgctcctgtgctcggagcccagtactccacctcgccggggtcgacctcccctcgccctta

SEQ ID NO: 8677 - DNA, 428 bp, Zea mays
  Clone ID: LIB3137-046-Q1-K1-H1
cctcaacatcaacggctgggagatgatgatttccatcggctttctggcggcaaccggagtacgggtggcgaacgagctgggagccgggagcgcgaggagggccaagttcgccatctacaacgtggtggccacctcctccatcatcgggtccgtgctgttcgtgctgttcctcctcttccgcggaggcctcgcctacatattcaccgacagccaggcggtggcggacgcagtcgccggcctctcgcccctgctggccttctccatactgctcaacagcgtccagccagtgctgtcaggcgtcgctgtcggcgcgggctggcagagcgtcgtcgcctacgttaacatcacttcgtactacctcatcggcatccctcttggagccgtgctgggctacgcgctggggcttcatgtgaagggcatctggatcg

SEQ ID NO: 8678 - DNA, 352 bp, Zea mays
  Clone ID: LIB3137-046-Q1-K1-H10
gtagattgtttttgagtccaggcctgatgccttagtccagattgcgtctttggcagtgcgaagtggcaatggtcttctcctgaaaggtggaaaagaagccatgagatcgaacacagtattacataaggttataactggcgcaattcctgacaacgtgggtcaaaaacttattggccttgttacaagtagagatgaaatcgctgatttactaaagcttgatgatgtcattgatcttgtcattccaagaggcagcaataagctggtttcgcaaatcaaagcatcaactaagatacctgtcctcggtcatgcggatggtatttgtcatgtatacattgacaaatcagctgacatg

SEQ ID NO: 8679 - DNA, 391 bp, Zea mays
  Clone ID: LIB3137-046-Q1-K1-H11
ttttagaaaatgagactcttagggtattgggttgttgaatgatggtgacgtccactcccgccttgaccaactgcagttacttctgaaaggtgacagtgagagaggagcaaaaaaaattcgtgtgcacatccttaccgatgggcgtgacgttttggatggcaacagtgttggtttcgtggagaccctagagaatgatcttttgcagcttctaggcaaaggtattgatgcacagattgcttctcgtggtggaaggatgtatgttactcatggacgcgtatgagaatgactgggatgtggttacaccgggcttggatgcttaagtgctcggagaagcaccctacacattgaaagtgcacttgaggctgggaaacactggaaacacagcccatgc

SEQ ID NO: 8680 - DNA, 386 bp, Zea mays
  unsure (1)..(386): unsure at all n locations; Clone ID: LIB3137-046-Q1-K1-H12
cgcaggccgcgccgccccancaaatcccactcacagaaacaccaaagccccaaaggcccagacccaccggctgcgaatggagaacggcgacnaaaccctcgcctcccccacggccgccgccgagacggacgcgctcaacggcggcgtcgcggaggaggagcaggtcctcatcacccaccccgcaaagtcctacgtcacgctcgccgacgacaaccccgctcctaacggcggcgtcgtgaaagaggaggagggcggngcccacaccaccgcgaagtactacgcaggtgtcgacgaccaagccgacatcgaggaccttcgcgccgccaagctcgagctggaggagaagctcacttaggtccgccgtgagaacaagtgcctcggcgaag

SEQ ID NO: 8681 - DNA, 373 bp, Zea mays
  unsure (1)..(373): unsure at all n locations; Clone ID: LIB3137-046-Q1-K1-H2
cgggtgagacttcgtccacctgaancccctacctatatatttcctaatcccagcgccacctcgggggcgggcgcctctttcttgcatccgcgcgccnccccgatggaccgcggtggcgtttgttttcgtcgctgcccgttcagcctaaccatccccgcccgtacagcgccccggcgaccggcgccgcttctcgtcgtccgcgctaagcgcgccggcagccaggcccctgctgccgccgcctcgcgtcagcccgcgaatcccagcgcggtcccgaagcgggacgtggaagaagaggaggaggaggtcgaggaggagatgccctggatccatgacaaggcgctggacctcgtggagttcactgggcccggcacac

SEQ ID NO: 8682 - DNA, 432 bp, Zea mays
  unsure (1)..(432): unsure at all n locations; Clone ID: LIB3137-046-Q1-K1-H3
acgcgggcggtgaacttctcacctaagccccactttatatttcctaatcccagcgccacctcggcngggggcctttttattgcgtccgctcgccnccccgatggaccgcggtggcgtttgttttcgtcgctgcccgttcagcctaaccatccccgcccgtacagcgccccggcgaccggcgccgcttctcgtcgtccgcgctaagcgcgccggcagccaggcccctgctgccgccgcctcgcgtcagcccgcgaatcccagcgcggtcccgaagcgggacgtggaagaagaggaggaggaggtcgaggaggagatgccctggatcccagacaaggcgctggacctcgtggagttcactggcaccgtcacacaggccatcccagggccccgtgtcggcttttagccctgttccatggcttttcgcgggtcccc

SEQ ID NO: 8683 - DNA, 437 bp, Zea mays
  Clone ID: LIB3137-046-Q1-K1-H4
acgcgtccgcactgtctcaccctttctctattctcgattctcccgacgcggcaaagcaaaggggcagcgaggagaggaaggagagaacgagcaaaacgaggccaaaaatcccttactactaacacatcctaacctaatgatctctcgagcacgggattcttaagtctgagcaggtcggatgattcggcagggcgcagccatgaacgagaaggcgtacgtctccaaggagctcaacgccaagcacaagaagatattggaaggtcttctacggcatcctgagaatagagaatgcgcagactgcaagtcaaagggtcctggatgggcaagtgtgaatctaggtatctttatatgcatgacatgttctggcattcatagaagcctgggggtgcacatatctaacgtaagatctgccaccctggatacatggctgccagagc

SEQ ID NO: 8684 - DNA, 231 bp, Zea mays
  unsure (1)..(231): unsure at all n locations; Clone ID: LIB3137-046-Q1-K1-H5
aaatnnngagaggagcggatgacgtggtgaaggtcgtggattcggaggacggcgagggggaggaggaagaggcatacgccgcggcggcggaggggtcgagcaaggagacgccgatgctgccaaggatgccggtgcgcgtgctactcgccgagggcgacgactccacgcgccacgtcatctccgcgctgctacacaagggcggctaccgagttgctggagcccttgatggtg

SEQ ID NO: 8685 - DNA, 231 bp, Zea mays
  unsure (1)..(231): unsure at all n locations; Clone ID: LIB3137-046-Q1-K1-H6
tcccatcctcctcgacatctccngcggcggnccgctaggctcctacggcggcgagcgatcctcctcctccttgcaccccaccaacacctatttcgactcctacaagttcgacttcggcataaactcctgccgttactacggctctcgccccctccgcgaccagcggtcgggcgcggataccaacccttcaacgagggccaccaacgaagccacggggaggcaccaacccgc

SEQ ID NO: 8686 - DNA, 434 bp, Zea mays
  Clone ID: LIB3137-046-Q1-K1-H7
atatgctccaagcctgatgattggggctgctgttggagctgtttttgggggttcagctgcttattgaataaattcagctttacctggtaatgctgctgttgcacagccacaagcttatgctctggttggaatggctgctacactagcttcagtctgttcagtcccattgacttcagtactgcttctctttgagctgacaaaggattacaggattttgcttcctctcatgggagcagttgggttggcaatatgggttccttcagtagtaaaccagccaaacgacagtgagccttctgggtttagaacatccagacgaggttattcttcaatgtcaccagaagaaagaaatggtagcttaaggcaaggtgatgttgtggatgatcttgagctcagtactatacaaactgacatgagtaactatggaacttataatg

SEQ ID NO: 8687 - DNA, 370 bp, Zea mays
  Clone ID: LIB3137-046-Q1-K1-H8
ggtgaacttcctccacctgaagcccctaccacgataagccctaatcccagcgccacctcgatggcgaccacctctttcttccatccgctcgccgccccgatggaccgcggtggcgtttgttttcgtcgctgcccgttcagcctaaccatccccgcccgtacagcgccccggcgaccggcgccgcttctcgtcgtccgcgctaagcgcgccggcagccaggcccctgctgccgccgcctcgcgtcagcccgcgaatcccagcgcggtcccgaagcgggacgtggaagaagaggaggaggaggtcgaggaggagatgccctggatccaggacaaggcgctggacctcgtggagttcactggcaccgtcacac

SEQ ID NO: 8688 - DNA, 437 bp, Zea mays
  unsure (1)..(437): unsure at all n locations; Clone ID: LIB3137-046-Q1-K1-H9
ctagaacctactanaatgcgaaccaacctgtacattttcttctcttcccatccgnacgaagtcgcggatcagagagaccgaggcgcccgcggttctgctttccttccttgccccgttcacgagagaattttctggagtcttcgactcgagcagggttccgatggcgctgcaatggatgatcctggcgtgcgtggtggcggtggaagctgcggtggctgcgctggtcacgctcccggtgccccgcgctgtgcggggccagatcgtcgcgctcacgtccttgttcctgcagcccctgtccagtgtgatgcccttcgccgccttccacatcctcgatctctactggaagaaggagcacagactgatgtgcacctcggagatttgcaccgcccgagagcgcattcgcttcgagaaatctatgtttaaagctcagagaaatg

SEQ ID NO: 8689 - DNA, 404 bp, Zea mays
  unsure (1)..(404): unsure at all n locations; Clone ID: LIB3137-047-Q1-K1-A10
ccgacgcgtgggggcctgcncccccggcctcttagacatcaatgtcaggtgtttgggtctcggcccacccagaaggaacgagttcataatcctggcggccctggctgatgaggccaacagcctgcacgccatccgcgccgcgctggaggacctcgaggaccagttcgagtgttttctcgccgtgcagacacagcaacagaccgaacgagatttcgcgatggcgaggctggagcaaagccgcatcatgctcgcgataaggctcaaagagcatcacgggagaaaccacaaggtcatagacgaggcgtctgccttcgtccgcgatgtctaccaggacgtctggccttccctgtcagctaccaagtccgagagacgcgccgacagttcacgtaacccggcgaaaggtc

SEQ ID NO: 8690 - DNA, 344 bp, Zea mays
  unsure (1)..(344): unsure at all n locations; Clone ID: LIB3137-047-Q1-K1-A12
ccgcgcgtgcgaacagacnatctccaactcanaaatcatcctttcctctctacagcaacaanctactagctgtctctgggtaaagctancgaggaaaaaaaaaanaaaacatctaaaatatactccatcatcttcgtttgattaacccgcccagtaaagccatgggtactaatgatagagcggtcatttctctggtactcctcttgtgcatcgctagccgctcttccttgcgtgccgctgaaactgacgtttatcatatacgcttgtcagtcccgttgatgtttgtgttcggtgattccctggtcaacttctgaaacaataacttcctgccgccgcctgcaccc

SEQ ID NO: 8691 - DNA, 439 bp, Zea mays
  unsure (1)..(439): unsure at all n locations; Clone ID: LIB3137-047-Q1-K1-A9
cgtgcgcggacgcntnnnncnccatctgcaaacgaacttactccatttcattctccacttctccacatcgcctccttggtctaccttcgggccggtgccgaaagccagcgaccgtggccatgcagtcgccggagctctcctcttcctccccggttctcctcaatatagggggcaagaagtacgcgacaaccgtggagacgctgatgcatcgggagcccgactccatgctcgccgccatgttcagcgggcggcacacgctccatgatcacccaaccacggggaaggggatggtcttcgtggacagggactggaagcactttcgccacgtgctcaattggctcatggacggcgccatccccgtgctgtccgagtccgactaccagcagctgctgcgaaaggcagagtactaccacttgctcggtttagtcgactacataaa

SEQ ID NO: 8692 - DNA, 256 bp, Zea mays
  unsure (1)..(256): unsure at all n locations; Clone ID: LIB3137-047-Q1-K1-B9
tttaacaacatcannccattggaccttctgctaattctcttggggccttccctnctattctattataaatggtccaactttatacataataaagatatttatcatgctgattgccctgtccacctttccaatcttctttcactggacaaacaaaattaagaacttactcaaccgacttcaatctcttgttaaaagatcatcatcaatctttataacacaaattaatacaattcatcagatatcaatcgaaactaac

SEQ ID NO: 8693 - DNA, 375 bp, Zea mays
  unsure (1)..(375): unsure at all n locations; Clone ID: LIB3137-047-Q1-K1-C12
agagagcactaaggtggtggttgagagtggtgctgtgcccatctttgtcaagctactcaactggctcancgaggatgtccgtgaacaggctgtatgggctttaggtaatgttgctggtgactccccaaagtgtcgtgatctggtacttggtcatggtgggctataccctttgctgcagcagcttaatgagcatgctaagctttcgatgcttaggaatgccacatggactctctccaacttctgtcgggggaagccacaaccaaactttgatcaggtcaaaccagcattgccagcactacagcaccttattcactctcaggatgaggaggtcctaactgatgcctgctgggcgctctcatacttgtctgatgggac

SEQ ID NO: 8694 - DNA, 324 bp, Zea mays
  unsure (1)..(324): unsure at all n locations; Clone ID: LIB3137-047-Q1-K1-D11
tccctccccctgtctcagctggtggaaacaaccaatgaagccaactcatacccatccatcctcgtcgttcgtcctcctaccccacccagggactgacgaccgaccccaaaccagccgcaccaagtaacacgcgaatgctcccgtacgacgtctgctataccatcttctagggcagcttctccaatgtcaagcacacgcgcaactcccgcaccggcgccgtccgcgccatcaaggtgctcgaccgcaaccacgttcttcgacacatgatggtcaagcacatcaagcgcntagacttcgactattaagcatatcaaacatcccaat

SEQ ID NO: 8695 - DNA, 443 bp, Zea mays
  Clone ID: LIB3137-047-Q1-K1-E9
tcttcgtctcccattttcctccactttaccgttctcgccatcatcttcctccgttctgcgatgggcaccatgcctccggccatggctagccacgtcctccgtgatggcagcgatgctagaagctggatatcgccggtctgcgcaagctttttttttgttgcgcgcttccaacaggtacgtttcctacccagttcatctcgatcttctccccagtccccagtggcacagtcccgtcgtcgaggggcatgtggcgaggttgcgctagtgaggccgagatccagggctgcgccagggatgccaagatctagagctgcgtcagggacgcggagatctattttgtgttctccgccgtcagtcgatgccgccgatctccagcttcccgaggctgctccaggtgctttcttttcctccctcccatagcggtgaggcatggcgtcgctggt

SEQ ID NO: 8696 - DNA, 364 bp, Zea mays
  unsure (1)..(364): unsure at all n locations; Clone ID: LIB3137-047-Q1-K1-F10
gcgggcggatccgaatcccgtatcccccnaacgcccgcctctgcctttttcanctgctgaaaaaaggaaggagcgctgcgacgccactgggcatggaccacctctattccaacctccccaccagccacctcctcggctccgtccccgctgttacacaagatgacaggagattgggcccccccgccgcccaagttgcagatgcatctgccacctctcggttgcaggagttcccgcctggaggtggtaatggtggagggtatcggccaccacgtttccctgcagatggagatgttgaaaaccaatcatattgtaaaggatacttcaatgttgcatcttatgctccatactttaatgttgatactga

SEQ ID NO: 8697 - DNA, 259 bp, Zea mays
  unsure (1)..(259): unsure at all n locations; Clone ID: LIB3137-047-Q1-K1-G12
acaactgcttaatgtaattttataatgaaacatctcactctcannacactatattatctatcttcattttttgaattcatttctacaataatattttcttcacttttaaacaaaattatattaaaatctctctacatttattcatttcatcttttctttataactacccattatttcacaaattcttattattctttaatcaacttattccttttttttcaaataatctacatttacattttattaatcatccttctat

SEQ ID NO: 8698 - DNA, 378 bp, Zea mays
  Clone ID: LIB3137-047-Q1-K1-G9
aaaaccgcgtcccacctctaaccccaaccccaccccgaccggctgctggcaaagccccacacgggcctcaaaacatctaacacgccacaacatacctgaggaagcccgcacccctgcccacaaccaatggccaacagcaacctaccacgacagatcatcaaggatactcatcggctgctcaacgaaccagcaccggacatcagcgcaacacccacataggaaaacatgcgctacttcaacagaaagaaccttgaaccgtcacagtcaccctataaaagaggactttataagcaagaacgcgcaataccagaagaatatccaatggcagccccaaaagaaaagaatctgacaaagatctaacaacccaaacatcacaat

SEQ ID NO: 8699 - DNA, 394 bp, Zea mays
  Clone ID: LIB3137-047-Q1-K1-H12
ggcgaccgcgcgtccgacatgtccatcctcaccgtcatgggcgtcttcaagtccacctccaagtgcgccaccgtcgggatccagggcatcgcctggtccgtcggcggcatgatcttcgccctcgtctactgcaccgccggcatctccggcgggcacatcaacccggcggtgaccttcgggctgttcctggcgaggaagttgtccctcaccagggcggtgttttacatcatcatgcagtgcctgggcgccatctgcggcgcgggcgtcgtcaaggggttccagcaggggctgtacatgggcaacggcggcggcgccaacgtcgtcgcgcccggctacaccaagggcgacggcctcggcgccgagatcgtcggcaccctcatcctcgtctacaccc

SEQ ID NO: 8700 - DNA, 295 bp, Zea mays
  Clone ID: LIB3137-047-Q1-K1-H9
tcttcaccttaattataacattttctaggacggcaagcaaacagcagccgtctgttgaagtattcagacctcctgccacatcttcatctctttttttcttttttaccattccatcctctcctaggatgatctcctcgtcatcatcctcttcttccatgactgttactatacctacattcatatgtattacattctatcatcattatctcataccatatataactttactgtcatctaccttttttacatcacatatttcccttatttcaacactatttattatctttactaccct

SEQ ID NO: 8701 - DNA, 383 bp, Zea mays
  Clone ID: LIB3137-048-Q1-K1-A1
gcggcatcatcgttccaccttactctccaggctccagctccgaccccggcgagccgctagagcaacgagaacgaatcagctagtagccgcccgcgtatctccatcatggccgtgctggtcgcgaggcaggggcgggagctgcagcggtacagccagagcaccggcgggcgcatcgtggtgggctgcatcccgtaccgcgtgcggtgcgacggcgagctggaggtgctggcgatcacgtcccagaaggggcacggcatgatgttccccaagggtgggtgggaggtggacgagtccatggacgaggccgcccggcgcgaggccctggaggaggccggcgtcctcggcgacaccgagccggtcctcggcctctggcactacaagag

SEQ ID NO: 8702 - DNA, 440 bp, Zea mays
  unsure (1)..(440): unsure at all n locations; Clone ID: LIB3137-048-Q1-K1-A11
ccggggcgaccgaggcgggcnccacgcaccccaccaacccatacttataccagtttctctctgattttacttctcaggtgtagggcggctgatcgagcgagcgagcgaggcacacggagctagctaaacagagcacacggatagaaaagcaagatgtcggacggcacggcgacctgcatcgacatcatcctcgccattatcctgccgccgctcggggtcttcttcaagttcggctgcggggttgagttctggatctgccttatcctcaccttcttcggctacctccccggcatcatctacgccgtctgggccatcaccaagtagccggccggtgcgttagcatgcaatgcgcgcgcagggtgatctcgtggcgggggacgcggtgtgcgcgtgtcttgagatgtgattccttccttccttggttagttgctgctgctcct

SEQ ID NO: 8703 - DNA, 321 bp, Zea mays
  unsure (1)..(321): unsure at all n locations; Clone ID: LIB3137-048-Q1-K1-A12
gaccgacgcgtgcgcaccggattccctgcgattcctcttttctcgttttctcgnctccccctacngcatcgggcggaggggaatctcaaagagggccgtctcatccnacttaaggaagccatggagcacaaggaggctgggtgccaggcccccgagggacccatcctctgcatcaataactgtggcttcttcggcagcgcggcgaccatgaacatgtgctccaagtgccacaaggagatgataacgaagcaggatcaggccaagctggctgcctcctctatcgacagcatcgtgaacggcagcgacgccgtcattgaaccc

SEQ ID NO: 8704 - DNA, 401 bp, Zea mays
  Clone ID: LIB3137-048-Q1-K1-A2
gccgtggcctctcttccgtaagccctagcccctagccgccagtgtcgtgcattcgtgctgaggctcaactgctgatccgtcttccaagctctggtaccatccctgagcactgatttaagatgtatctccagtattacatcaacgagaagggggacaaggtctacaccaccaagaaggagtcacctcttggggtgccaacgcagtctgctcacccagctcggttctcaccagatgacaagtactctcgccagcgatacctgttgaagaagagatttggacttctgccaacgcagaatccaggaccgaagtactgaagcttcaagtcaactgtccaacctgcgatgttctttttgtgtcaatgcttgttggttggaatgtactatcttcgttctcgaatattt

SEQ ID NO: 8705 - DNA, 288 bp, Zea mays
  Clone ID: LIB3137-048-Q1-K1-A3
gccgcgccctctattcccaaaaccctaccctttaaacgtccgtgacgcacattcttcctggggctctagggctaatccgcctgccaaggtctcgacccatccatgaacactgatgtaagatatatctgcagtattacatcaaaaagaacggggacaatggctacaccaccaaaaatgagtgacctcttgtcgtgccaacgccagctgatcacacagctgccttctcaccataagacaaaccttctcgccagccaaacctgttgaccaaaagatctgcacttctgacaa

SEQ ID NO: 8706 - DNA, 449 bp, Zea mays
  Clone ID: LIB3137-048-Q1-K1-A4
gccgtgtcctctcttccttaaaccctaccctttagccgttaatgtcaaacattcttgctgcgcctcatcggctaatccgtctgccaagctcttctaccatccctgagcactgatttaagatgtatctccagtattacatcaacgagaatcgggacaaggtctacaccaccaataattagtcacctcttggcgtgccaacgcaatctgctcacccagctttgttctcaccagatgacaagtactctcgccagcgatacctgtttaacaaaagatttggacttcttccaactcacaatccatgacccaagttcttaagcttcaattcaactttccaacctgcgatgttctttttatgtcaatgcttgttctttgcaatgtactatctttccttctccaaatattttttctcctctaatttacattttagcttatactgctacaaattaaaa

SEQ ID NO: 8707 - DNA, 401 bp, Zea mays
  Clone ID: LIB3137-048-Q1-K1-A5
cggacgcgtggggtgccattgccgatcgagtccatccactagactacaccgcggcggcaggcgatggcgtgcggctctgctaccgccgctcgaccagcagcccgcctcccgctgctggcggcggtggtggtggcgtcctccttcctcgccctcgcggcgccgccgggcgcgctggtgacaagcgtcccggggttcggcaacaagcagcagctgccgtcgaagcactacgctgggtacgtgacggtggacgagcggcacggcaggcggctgttctactacctggtggagtcggagcgcgacccggcccgggaccccgtcgtgctctggctcaacggcgggcccggctgctccagcttcgacggcttcgtctacgagcacgggccattcagctttgagtcatc

SEQ ID NO: 8708 - DNA, 277 bp, Zea mays
  unsure (1)..(277): unsure at all n locations; Clone ID: LIB3137-048-Q1-K1-A6
ccgacccgacccacgccgaacctaacttccttaaaacctatcctttanccttttatatcctacattatacctcttgtctatgtgatcatttcactttcaaactcttcaccataccttatcacttatttaaaatttatctccactattacatcaaccagaaattcgacaacttctacaccaccaaaaatcaatcatctctttctcttccaacccactctactaacccaaatcgcatttcaccaaataacaattactctagacaaccataccttcttaa

SEQ ID NO: 8709 - DNA, 446 bp, Zea mays
  Clone ID: LIB3137-048-Q1-K1-A7
ctcgtagagagaaggaaaaatatccccaaactctagctcccgatctcgatggcgaaccctggcgtcttcttcgacatgaccgtcggcggcgccccggcgggccggatcgtgatggagctgtacgccaacgaggtgcccaagaccgcggagaacttccgcgcgctgtgcacgggcgagaagggcgtgggcaagtccgggaagccgctccactacaagggctccaccttccaccgcgtcatccccgagttcatgtgccagggcggcgacttcacccgcggcaacggcaccggcggcgagtccatctacggcgagaagttccccgacgagaagttcgtgcgcaagcacaccgcccccggtgtgctctccatggacaacgccgggcccaacaccaacggctcccagttcttcatctgcaccgtcgcgatcccttggctcgacggcaaaca

SEQ ID NO: 8710 - DNA, 212 bp, Zea mays
  Clone ID: LIB3137-048-Q1-K1-A8
gggcagcggcggcgacatctgcatctgcatctcccacctcgtctccctcccgcatctgccgtgcctcgatcccgccgccagccatctaagggagccgggagccatgtctccctccggcgagctgctggcgtccatctcctccgctctcgccgtggccttcgtcttcctcgcctgcgtcgagctcggcgacgccgccgccgccgtcagcgtct

SEQ ID NO: 8711 - DNA, 299 bp, Zea mays
  Clone ID: LIB3137-048-Q1-K1-B1
gttttatgccccatggtgtggtcactgcaagcatcttgctccgatttatgagaagctggctgcagttttcaagcaggacgacggtgttgtgattgccaatattgatgctgacaagcacactgacttggctgaaaaatatggtgtttctggtttccctacattgaagttcttccctaagggaaacaaagccggtgaagattatgatggtggccgggacttggatgactttgtcaagttcattaatgagaagtgtggcaccagccgggatccaaaaggccacctgaatcaagaggctgggc

SEQ ID NO: 8712 - DNA, 431 bp, Zea mays
  unsure (1)..(431): unsure at all n locations; Clone ID: LIB3137-048-Q1-K1-B10
ggtcgaccgacgcgtgcgcggacgcgtggnggagcttgttgattgtgacatttcatacaaccaggggtgcaagtgaggtgtgatggactatgcgtgtgacttcatcatcaacaatggcggaatcgacaccgaggaggattacccttacaagggcacggacggacggtgtgatgtcaacaggaaaaacgccaaggttgttactatcgacagctatgaagatgtaccagcgaacagtgagaaaagtctgcagaaggcagttgcgaaccagcccatcagtgttgcaattgaagcttggggcagagcatttcagctctacaactcgggtatcttcacagggaacctgtggaacaacgttggaccatggtgtcacggtcgtcggctacgggacagaaaacggcaaggactactgcatcgtgaagaactcttggggc

SEQ ID NO: 8713 - DNA, 273 bp, Zea mays
  unsure (1)..(273): unsure at all n locations; Clone ID: LIB3137-048-Q1-K1-B11
gaacccgggcggaccaaccggcaccacccacaactctcacccattttccttcgtgctcannccacgagagtncgggtcacagccaaggcggncgnncttctttcggagggaggccagggatctctactctcgtccggcggggcgtgggcgtccatcggcgcgcgccgggcaaatgcgggtacctcacggcggaggagcgctgcgctgcgctgcgccaggagcgatcatgccttgacagcacacacaccatcacgcagaggagggtcatcaaat

SEQ ID NO: 8714 - DNA, 414 bp, Zea mays
  Clone ID: LIB3137-048-Q1-K1-B2
gtggactgaaatccttggcgttgatggagagaggaaccccacggttgggtgatgaagagaaggtctatgcgcatcgctcgccagatgttcgatagaagacttcaatcaaaggctgtcgtcgttcttgcaaaaaaaaaatcaagtcggatcatgatgtggtacgctagtgaactacgtgatgtggaggaccaaagatgagtcgaccacaagatgctgctaagcgtgggctactctgcaagatgatgtcgtcagtcgggccaacctgaagatggataaatcaagcaagtgcccacctgagagagaggatcggcaagcacgtctcgtctaacaaacactaacctagtgttatcccaagttataagtttgttctcgtgtggatggtgctaagtgccggtgggctcggccttcttatat

SEQ ID NO: 8715 - DNA, 284 bp, Zea mays
  Clone ID: LIB3137-048-Q1-K1-B3
gcggaagagcacgagacgcccctatgcatactttactctgacgattaaaagttgctggaggggtcttttctctctcctctacgagccctaaacatggatgatgcgcaagttattgagtcaaagcatggaaccaacaaactagcttctgcatttactgctcatgacgaagctgtgcaagacagggatcaccaattattgacataagccgtgcaagtagcataccgaggcttctattgccgatactgacgtccatttggagcacctgacgttcgcaatgataaagt

SEQ ID NO: 8716 - DNA, 227 bp, Zea mays
  Clone ID: LIB3137-048-Q1-K1-B5
cccacactgatctgttctctttatttataaagttatctgtacttatatcctcgctggtgtttgcggacattaacacccagcagtgccatggcattttgctggctcccataccacaataacgaggttaaatactatggactctttgacagccttctctttaagaacttgcattacgaccacaaaaacaataaccattatcatcatcactcggactaggatctctttac

SEQ ID NO: 8717 - DNA, 432 bp, Zea mays
  Clone ID: LIB3137-048-Q1-K1-B7
cagtgaccaccttgccgaccggagcgtgtgaaccgtacggagtcgcccgcgtgagatgatggccacctccgcgttcgagtcgtccccggagatggagcggttcctctgcgagcggctgctgaacacggagcagcccatcgcggagcgcttccgggcgctcttctccctccgcaacctcagcggggatgcgccgcgccgcgccctcctccaagctgcaagggatccttctaacttgcttgcccatgaggctgcatttgcacttggacaaatgcaggatgctgaggctattcctgcactggtggcagttctcaaagatctttcgctacatccaattgtccgccatgaggcagcggaagctcttggagctattggcctggaaaagagcatccctgtgttggaggaaagtctaacaactgatcctgctgtggaggt

SEQ ID NO: 8718 - DNA, 386 bp, Zea mays
  Clone ID: LIB3137-048-Q1-K1-B8
gcgcaagacggcggcgaaggcaaagccggcggcgagctccggcagcccgtggtacggccccgaccgcgtgctctacctgggcccgctgtccggcgcgcccccgagctacctgacgggcgagttcccgggcgactacggctgggacaccgcggggctgtcggcggacccggagacgttcgccaagaaccgggagctggaggtcatccactcccgctgggccatgctgggcgcgttgggctgcgtgttcccggagctgctcgcccgcaacggcgtcaagttcggcgaggccgtgtggttcaaggccgggtcgcacatcttcagcgagggtgggctggactacctcggcaacccgagcctgatccacgcgcagagcatcctcgccatct

SEQ ID NO: 8719 - DNA, 394 bp, Zea mays
  unsure (1)..(394): unsure at all n locations; Clone ID: LIB3137-048-Q1-K1-B9
gaacaaccgggncgaccgacgcgtgcggcaaagctcttgcccttacactcattgatacttttactgcagtaaacaagctgaagcagatggggaatgtccttgtggggataattgcctttgttctctggcttcttattctgggaatagcaacaacacatttctttgtcttcctaagttcacagcttctcctggcagttttcgtatttgggaacacattgaagacagtttttgaggcaattgtcttcttgttcgtgatgcatccctttgatgttggtgaccgttgcgaaattgaacgtgttcaggcggtggttgaggaaatgaatatcatgacgacggtgtttctccgatatgataacctgaagatatattatccaaacagtgtacttgcaacaaa

SEQ ID NO: 8720 - DNA, 411 bp, Zea mays
  Clone ID: LIB3137-048-Q1-K1-C1
aagaaatcagcaaggttgtcaagatccaagaggagcttgacattgatgtgcttgtgcatggggagccagagagaaatgacatggttgagtacttcggtgagcaattatctggttttgcgttcactgccaacggatgggtgcaatcctatggatcacgctgtgtgaagccacccattatctatggtgatgtcagccggccgaaccccatgactgttttctggtccaagatggcacagagcatgacccctcgtcccatgaagggaatgttgactggtccggtcacaatcctgaactggtcattcgtcaggaacgaccagcctaggtttgagacatgctaccaaatagctcttgcaatcaaaaaagaggttgaagatcttgaggctgctggtattcacgtgatccacatcgatg

SEQ ID NO: 8721 - DNA, 409 bp, Zea mays
  Clone ID: LIB3137-048-Q1-K1-C2
aagaaatcagccggttgttaagatccaagatgagcttgtcattgatgtgcttgtgcatgtgcagccagggagaaatgacatggctgagtacttcggtgagcaattatctggttttgcgttcactgacaacggatgggtgcaatcctatggatcacgctgtgtgaagccacccattatctatggtgatgtcaaccggccgaaccccatgactgttttctggtccaagatggcacacaccatgacccctcgttccatgaagggaatgtcgactggtccggtcacaatcctgaactgcgcattcgtcaggaacgaccaacctaagtttgagacatgctgccaaatatctcttgcaatcacaaacgaggttgaagatcttgaagctgctggtattcaggtgatccagatcgat

SEQ ID NO: 8722 - DNA, 445 bp, Zea mays
  Clone ID: LIB3137-048-Q1-K1-C6
gcccgcatcggatcacatcgcgccggagcctgacgccgtgccgtcaacgaatccgtgggacgcacgccgccgcacacggacgacactagggttgcgcagctcccgctccccggcggcgccgaagattacgtgcgcgactccatccacgcctccctgggcctccccgtctccgatcgctccctccgcctcaagctcctcgcctccgaggagcagcgccaccgcctccaggaccacgtcttctcgctcgaggaagacctccgcgcagcccagcgccgcatcgacctcctcaaggccgaggccgccatgaacgccgccggcctccgccgctgcgtcgaggaaaaggaggccgtggccgccgcatacgccgacctctccgacaagagcagcaaggagtgtcggctctacgagcgggacctcgagcgcgccatggagtcctgtgacgacc

SEQ ID NO: 8723 - DNA, 432 bp, Zea mays
  unsure (1)..(432): unsure at all n locations; Clone ID: LIB3137-048-Q1-K1-C8
cacagaaggccaacaagcagtacaagccgtttacgcaccagatggcccttccaaaatggctggtggaaatgataagaatcatgattctcatatcgaagtgacaccccatgagttgggtttgaagagatcgagaacaaatggagctacagcggaaatccatgatgagcgaaatattctgaaaagatcacatcagtcagccttcaccaggtaccatacatctgtggcttccaatcaaggtggagcaagatatggggaaagctcttcaccacaagataacagttctgaggccatgaaaacggactctacatgcaagatgaagtcaaattcagatgctgctccaataaagcagggctccaatggcagtagcaataacgatgtgggatccagtacanagaatgttgctgcaaagccttcgggtgacagggagagagt

SEQ ID NO: 8724 - DNA, 455 bp, Zea mays
  Clone ID: LIB3137-048-Q1-K1-D1
cgtgtcgcgaataggatcaaggatgggaagtttacactaaacggacttgagtattcattacgtgtcaacaatggacctaacagccttcatggtgggttgaagggatttgataaggtcgtgtgggatgtcgtggagcacaaagatggcgaatgcccttcaataacttttcagtatcacagcaaggacggggaagaaggctatccaggcgatgtaaccattcgagcaacatactctcttcctgaagctactactctaaggcttgacatggaagctacaccagagaacaaagcaactcctataagcctggcgcagcacacctactggaacctcgcaggtcacgcctgcggcgacatcttaaaccactcgctgcagatctggggcaagcacatcactccggtcgacgagaacacaattcccaccggcgagataatgcccgtcgatggcactccttttga

SEQ ID NO: 8725 - DNA, 408 bp, Zea mays
  Clone ID: LIB3137-048-Q1-K1-D10
gtggatttctttaaccaagttaatatgctgtatggcacgctcacagaattctgcacacctgagagctgcccaacaatgacagctggcccaaagtatgagtacagatgggctgatggtgtgcagataaagaaacccatagaggtatcagcaccaaaatatatggagtatctgatggattggattgaaggccagcttgacgatgaatccatatttcctcaaaaactcggcacaccattcccaccaaacttcaaggaagtagtgaagacgatattcaagcgcttgtttcgtgtttatgcccacatataccactcgcatttccagaagattgttagccttaaagaggaggcccatctcaatacctgtttcaagcacttcattcttgttacaaatgagtttggcctgattgac

SEQ ID NO: 8726 - DNA, 153 bp, Zea mays
  Clone ID: LIB3137-048-Q1-K1-D12
ttccttttcacctcttattccttgaactatgtgcacccctacaagctgtgctaccagttgtcttactcctatctttactcattcctctctcattaccccaacatcaattttgccttctatacctgcaccaaaaccaacattttgatgtttttc

SEQ ID NO: 8727 - DNA, 439 bp, Zea mays
  Clone ID: LIB3137-048-Q1-K1-D2
gaaagttcggagccgccggcccgtccgcctccctctccgcctcccgtccccaaggccaatagttttcaagtggcaatggcggaccaggctaaccaacccactgtccttcataagctcggtggccagttccacctgcgctcgatcatctctgaaggtgtacgggcccgtaacatatgcccatctgtctcatcttatgaaaggagatttgccacaaggaactacatgacccagagcctttggggcccttcaatgtctgttagcggtggcatcaatgtcccagtgatgcagaccccgctctgtgctaatgctcctgctgagaaaggaggcaagaacttcatgattgatttcatgatgggtggtgtttcagctgctgtttcgaagactgctgctgctcccatcgagcgtgtgaagctgcttattcagaaccaagatgagatga

SEQ ID NO: 8728 - DNA, 393 bp, Zea mays
  Clone ID: LIB3137-048-Q1-K1-D3
gaaagttcggagccgccctcccgtccgcctttctctctctctcccgtccccaaggccaatcgttttcagggggcaatggccgaccatgctaaccaacccactgtccttcataagctcggtggccagttccacctgcgctcgatcatctctgaaggtgtacgggcccgtaacatatgcccatctgtctcatcttatgaaaggtgatttgccacaaggaactacatgacccacatcctttggggcccttcaatgtctgttagcggtggcatcaactgcccagtgatgcagaccccgctctgtgctaatgctcctgctgagaaaggaggcaagaactttatgattgatttcatgatggtaggtgtattcagctgctgttttgaagacttctgtttc

SEQ ID NO: 8729 - DNA, 415 bp, Zea mays
  Clone ID: LIB3137-048-Q1-K1-D4
gtggagacgactgggcgacccccggcgccgacctacgccaggtgcccaggccttcgtcgggaccatcggcggcgacgaacacccaccagctggatctgatccaattacagtcagaaatgtcttcagttgggagaagcaatggcaccagggcggcgaatggtgcagctgccatcagtacttccacgacggaagcaggctcggccgacgccagatttcactcccaactactacagcaggacaggcaaagtagatgggctggctgcttttcaggcttatcatgtttcggatcgcagaagggcgggaaaagaattgttcctgcagcacgcacttctgatgggaatggatcaaatactcgtggaaatggtctccagtctggtgccaattcaaaccaaaatctggctatgaatttatctct

SEQ ID NO: 8730 - DNA, 448 bp, Zea mays
  Clone ID: LIB3137-048-Q1-K1-D5
gtcgttctcaaacacaatgtttgtcgtgtgtatggtatcatccacatctcaagggctattggggatgtatatctaaagaaaccagagtataatagagaaccgcttcacggcaagtttcggcttcgagaaaccttccagaggccgatccttacttctgaacctcaaattactgaacatcgaatacagccaaacgatcaatttgttatatttgcttctgatggtctatgggagcacctcagcaataaggaagcagttgaccttgtccaaagtagtccccgaaatggaatcgctcggagactagtgaaagccgcgatgcaagaagctgccaagaagagggagatgagatattcagacctcaagaagatcgaccgtggtgtgagaaggcatttccacgacgatataactgtcgtcgtggtgttcatgccatgagcaaagctagctggagcaa

SEQ ID NO: 8731 - DNA, 448 bp, Zea mays
  Clone ID: LIB3137-048-Q1-K1-D7
gttgccaaagaattccctcccctagccgccgtcgccgctcgtctccctgagaggtgccggggccgaggatttggccgagttctaggtagagaatcggttttacttgtctcagcccggggtctgctgcgtctggtggtggtgaaggggagaaattcgtgagatctgttccggatcaggcgtgcgagctcgggaatcaggggtttcacacatagcttcgtcgatttgaatttgatgtactaatggagtctaagggtggcaaaaagtctagcagtagtcgttctatgatgtatgaagctccccttggctacagcattgaggacgttcgacctgccggaggcgtgaagaagttccagtctgctgcttactccaactgcgcgaagaagccatcctgatatcccttttggcttcctcattctagtagtttaggatttcttttctgacactttga

SEQ ID NO: 8732 - DNA, 430 bp, Zea mays
  Clone ID: LIB3137-048-Q1-K1-D8
atcatcaatcacggcggctacctcgccccgtctcgatcgcccacgctgcccgggtggaaccgtacgctgctgctgctgctgctaggctgacagcgacgacgagggggccatggctcacatcttgctccacggcacgctccacgccaccatcttcgaggccgagtcgctctccaacccgcaccgcgccaccggcggcgcccccaaattcatccgcaagcttgtggaagggatcgaggataccgtgggtatcggcaagggcaccaccaagatatacgccaccgttgatctggagaaggcccgcgtggggcgcacccggatggtcttcaacgagcccgtgaaccctcgctggtacgagtccttacacatttactgcgcgcacatggccgccgacgtattattcacctgtcagatcgacaaccccctttggggc

SEQ ID NO: 8733 - DNA, 381 bp, Zea mays
  Clone ID: LIB3137-048-Q1-K1-D9
atctggtgctgcttctgtggagttattaggcttcgatttgggggtgggggccggtggtttcggcgtgggaggacgagatcggcgccatctcgtcgcgcggcgtgctacggctccggccggggagccacgccggggccgggcgagcgccggcagccgagccggacgaggtgccgcgggagggctgctgggcgcagttgcctctcgagcttctgcgtatggtgctggtcagggtcgaggaccaggagccgcggtggccgggccgcagcgccgtcgtggcgtgcgcctgcgtctgccgctgctggagggccgccgtcaaggagatcgtgcgcgtgccggaggcgtctgggaaactcaccttccccatctctctcaagcagcctg

SEQ ID NO: 8734 - DNA, 434 bp, Zea mays
  Clone ID: LIB3137-048-Q1-K1-E2
cggacgcgtgggggagtgcgaccacctcatcgcgctggccaaggacaagctggagaagtctgtggtggcggacaacaagtccggtaagagtgtccagagtgaggtgcgcaccagctccggcatgttcctcgagaagaagcaggatgaagtagtaacgagaatagaggagaggatatctgcttggacatttcttccaccagagaatggtgaagccattcagatattacactaccagaatggtgagaaatatgaaccccactacgactacttccatgacaaaaataatcaggccctgggcggccatcgcattgccactgtgctgatgtacctatcaaatgtcgagaagggtggagagaccatcttccccaatgcagaggggaagctattgcaacccaaggacgacacttggtctgattgtgcaagaaacggatatg

SEQ ID NO: 8735 - DNA, 455 bp, Zea mays
  unsure (1)..(455): unsure at all n locations; Clone ID: LIB3137-048-Q1-K1-E3
cggacgcgtgggtcagaatccagacctcgtcagagagcattcccttgtgcatctcggcctcgccttcctcccttcctcgcccgcccagtcctctaaccatcttctccaaacgcccggagatggtctcgctgcgatgcaccaccgcgcaccactccctcctcggctcgccgacctgcctcgcgcgcccgcggcggcggccgtgccccgtcgtgcgcgctgccgtcgccgtggaggccggcgctcangccaaggtctcactcatccggattgggacgcgtgggagtcctctggctcttgcacaagcccatgaaactcgggaaaaactgaaagccgcacactctgagttagctgaggagggggctattgacatcgtcatcataaagaccacaagagacatgatcttggacaaaccccttgcaaatattggaggcaagggtttattcaccaaagagata

SEQ ID NO: 8736 - DNA, 358 bp, Zea mays
  Clone ID: LIB3137-048-Q1-K1-E4
ccggaacgaccgacgcgtccgcgaactcctaaaacacatttaccaccttattttactatttctcgacaagctttataactttgtcttttgtgacaacaaatccggcaagagttttcacaatcatgttctcaccatcttccacattttccttatgaagaaccactatgaattactaactatatttcatgacaatatatctgctttgacatttctttcaccatataatggtgaagccattctcattttacactaccacaatgtatttaaatattatccccactacgacttcttacattacataaattatcactccctttacacacatcctattgacactgctctgatttacctatctaat

SEQ ID NO: 8737 - DNA, 264 bp, Zea mays
  Clone ID: LIB3137-048-Q1-K1-E5
aaaaccggaccgacccacgcgtacaaccttacaaaaaacaaatttattttacatcttttatcacataaacaaaaatgtcgtctcttgctatactatttagcatctaccatatcaaaaacaccatctacttcacccaacacggagatttctcctaccactttcatcctaaatatctttatcctcaaacacttcctccatttcttccatgttcattcacttatttacaccatcaatctctacattttaactttaccacactactat

SEQ ID NO: 8738 - DNA, 447 bp, Zea mays
  Clone ID: LIB3137-048-Q1-K1-E6
cggacgcgtgggtccgagtggtcaataaaccccgcctcccttctgtcatcccggacgtctggacctcgcagccgcaaacgcgaaaccctagcctcgagctctatctccggccacagctggtcaggttagcggcgaaggatgagcaggcgctggagccgcacgatctacgtcgggaacctccccggcgacatccgggagagggaggtggaggatctgttctacaagtatggtaaaattgttgacattgacctgaaggtccccccaagaccacctggttatgcttttgttgagtttgaagatcctcgtgatgctgaggaggcaattgctggacgggatggatacaactttgatggacaccgtctaagagtggaggctgctcatggtggtagaggtaatgcttcctcgcatgatcgttcaagtggctttggtggcggtggtggagcacgt

SEQ ID NO: 8739 - DNA, 257 bp, Zea mays
  unsure (1)..(257): unsure at all n locations; Clone ID: LIB3137-048-Q1-K1-E7
aaaaaccggaccgaccgcacgcgtccacnnactcataaatccaatttttttataaacttctaactcccttataacatccctggcgtcttgtcctatttaaccgcaaacacgaaaccctaatctttatctctatctccttccacagcttgtcatcttagcacctacatattaacaatctctgtatcctcactatctacatttgtaacctccccgtcgacatccttcatatgtatgcgcactatcttttctacatatat

SEQ ID NO: 8740 - DNA, 409 bp, Zea mays
  Clone ID: LIB3137-048-Q1-K1-F1
gttcggggaggcgaggcgaggcgaggcgtggagggattgggaattttttgggaggggagggggcgtgagcgggaggaaagtgaagagagagtagcttccgatctcgattaccccggtctccgtatcgggaatccaattcggttccatccaacgcctgagatcggattccaacccccatttcggaccgatcgctttccgcagaccgatcggctttgggggatttttttcccgagcgatttttctggaggctcacatcgggtcggtctgagtttagttgatcgcggagcgatgctaatcgaggagcttccgggcgatccgggtggaggacgaggtgagggcggggaggatgagctgctgctgccgcgtcgcgaggatggcgactctccggaaggcgagagtggagtggtga

SEQ ID NO: 8741 - DNA, 410 bp, Zea mays
  unsure (1)..(410): unsure at all n locations; Clone ID: LIB3137-048-Q1-K1-F11
cgtgcgcccacgcgtcctgccatgtgttngctcagtcattctgatttttcagntaatgggaccgntgctgcggaacgtgcatcgcctgtggccantctactttcnaggttgggttctttcacattcagaaggacatcatctggaagattagaaactgctactgattctgaatcagacgaagcagcatcggttggtgggagcttttttgaaaccctgacttcctctgaattctacaagaatacaaaggttggcgatatctcatggagcttccgctgggcaccatttcttgcactgcatacatctgacacattccttaccatgttgctgcttctatccaagtacagaatgaagagccttccagttgtagaagtgggaggagataatattgagaacattatcacacaatcctc

SEQ ID NO: 8742 - DNA, 408 bp, Zea mays
  Clone ID: LIB3137-048-Q1-K1-F2
ggagactggcgatgcatctcctcctctccttcggttggatttgggatcgtgcatctgcgtgcgtgttgtgattgttgtgactgcccatcaatccacccccaccaccaactcgcgaaatgtgtggccgctagattgtttaatcgatccggcgccgcattctgccaggcgggggattcgcgcgggggaggatacgcatcggcggaggggagctggagctcgccgcggccaccgcgttccagaagatctgcaccctgtcgtcgcggcggccgtgcggcggcggcagcgccaccttttaccggccggtcggcgtcccagaggggttctcgctcctgggttactactgccagcctaactgccgcccgctccacggccacgtcctcgttgccagagcgggggagcgcccgtccg

SEQ ID NO: 8743 - DNA, 426 bp, Zea mays
  Clone ID: LIB3137-048-Q1-K1-F4
gcaacaagcgaaccggcggcggcgatggggatcggtgagcacttcgagggcgtcaagcagggctgggcgagcaacttcgccttcctcgactacttcaagaaggtctacggccgcgccgagcccctccccaagtggtccgacgccgacgtcgacgagttcatcgcctccgacccggtctacgggccccagctcaaggccctgcgggagtcgaggaagttcgcgctcgccggggccctcgtcggcgccgcccacctcggcggcgtcgcgctcaagtactccaaggcgccgcacggcgtcctgctggcgacgggcttcggcgcgatcaccggcgccgtgctgggatccgaggtggcggaccactggtaccagctctacgagatggacaagcagggggccaacctcacgttcatctactggtgggaggac

SEQ ID NO: 8744 - DNA, 440 bp, Zea mays
  Clone ID: LIB3137-048-Q1-K1-F6
tcctccggtccccaacccctgtcgcaccgcatccgccggccatggcctgcctgaccgaccgcgtcaacctcaacctctcggacaccaccgagaagatcatcgcggaatacatatggatcggtggatctggcatggatctcaggagcaaagcaaggaccctctccggcccggtgaccgatcccagcaagctgcccaagtggaactacgacggctccagcacgggccaggcccccggcgaggacagcgaggtcatcctgtacccgcaggccatcttcaaggacccattcaggaggggcaacaacatccttgtgatgtgcgattgctacaccccagccggcgagccaatccccaccaacaagaggtacaacgccggcaacatcttcagcagccctgacgtcgccgccgaggagccgtggtatggtattgagcaggaatacacc

SEQ ID NO: 8745 - DNA, 268 bp, Zea mays
  unsure (1)..(268): unsure at all n locations; Clone ID: LIB3137-048-Q1-K1-F7
accaccnacaacatcatcaatcaatacatatctataacgtatatcctactatatatctcattaccataacaataaccatatccatatcttttacagatactaacaactcttccacttctaactactactttttcaatacataccaagaccctcctaataacataaatatcttcctatacccatattctaccttcaaaaaaccattcattatgtacaacaacatccttttgatcttcgattttatacaccttaaaacattatctcaatt

SEQ ID NO: 8746 - DNA, 456 bp, Zea mays
  Clone ID: LIB3137-048-Q1-K1-G10
gcgtgcgctgcagccgaaccctcacttaaaatctagtcttcttgcgaaaaaattggtccggcgctgcctgggtctgcactctacgatggcggcgcctccggccacggctcccgcgaccgcccggtgtctgtccgtcgccaagtcgtgctgggctgccgagcggagctccagctcgtttgtcctctcggctcctgcgactggcctccggcaaagtgggagccgcgtcctcagcatccgtgccaaggttgccactggcctgcagagggcctgcattgcggatgatggagcggaaaggccgtggaagctcagtgatgctcgtcttgtcctggaagatggatcagtgtggacggccaagtcttttggtgcttcaggaacacaagttggtgaagttgttttcaacacatcactgacaggctatcatgagattttgaccgatccaacgtatgctggtcagtt

SEQ ID NO: 8747 - DNA, 345 bp, Zea mays
  unsure (1)..(345): unsure at all n locations; Clone ID: LIB3137-048-Q1-K1-G12
ctctgaaattctncggctacttcttcttcttttacctcgccatctnccgcaagaccctataccccgtcccctcggtanccacagccnccacctccgtctccttccccgccacgcagcacccatgcctcgtctccgcctcctcttaccgccgcctcgccgttgctgcgaaagtctcgtctccgtccgtcatcggcaccgccatgccgtccctctacttcgatacctccgtcttcaataatgaaagagtgtccctggccggccatgatgagtatattgtgaggggtgggaagcatctgttcccgcttgtaccttatgccttcatgtaatcaaacacatccgcttaat

SEQ ID NO: 8748 - DNA, 485 bp, Zea mays
  unsure (1)..(485): unsure at all n locations; Clone ID: LIB3137-048-Q1-K1-G2
aaaaaangaaccgaccgacgcgtacggctgatctntaatacttttttaaccattatttcgagagttgtactttttttttgcagactggttaattgtgaaccaatggcgtggtgttgtcattcttggaagaattcgggtggccagagggcaaggaaatatcttgttgagcggctaaacgctcacgacagggtggatctggtcttgccggagagcaatctttttaggcatcgttcatgtcacacctgtctagctacgagagtggcgcattgccttctgcagacatgcaagttttgcattgccttttgcagttcgtcaagttcgtttgtgtgttctatttgttgctttaatttgctactatgctgtaagagatactttttttatcacatcaatatatttacttgctacttaccgtccccgggctttttttaatcttaaatgctcattttatatcctttttataaaataattatatttttttttttttt

SEQ ID NO: 8749 - DNA, 437 bp, Zea mays
  Clone ID: LIB3137-048-Q1-K1-G3
cggaaaaaccgggacgaccgcacgcgtccggactttttctacaagctcattcttcctccctttatctcgtgagcagccgaagcatgtccttgcggtggggtctagcgcgccgcgtcaccacgctggccgcgatcggtggcggcggtgcccaggcgcagaggctcctgtccacctcgtcagccggcggtggcactggcctcctgggtcggcactacatacccctcgcctcccagattcggagcaaggtagttggttgcagaggagctgctcttgtgagctccagatggttgcatgaggcccaataccatgttcgccaggacggtgctttcaaggctcaagaacagcaagatccatttgaattagtcgccgatgagctatcacttcttgcaaataggttaccatccatggtggctgcttaagtccccaaactggcatta

SEQ ID NO: 8750 - DNA, 462 bp, Zea mays
  unsure (1)..(462): unsure at all n locations; Clone ID: LIB3137-048-Q1-K1-G6
gggccgaccgacgcgtccacacccccttcgccctttacgactcgccgccttaaaccctaaccccactgattcgctccatggcaaccatggggaggggatgtcgccngcgccagcggcgggagggcagggtggcggtggcattgacgccgcgctcctcgacgacatcatccgccgcctgctcgaggtgcggaccgcgcgcccagggaagcaggtgcagctctctgagtctgagatccgccagctctgcaccgccttccgcgccatcttcctcagccagcccaacctcctcgagctcgaggctcccatcaagatctgcggggacatccatggtcaatacactgatcttctaaggctttttgaatatggaggttttcctcctgaagccaattatctattcttacgtgaatatgttcatcgaagcaaacaacagttggagactatatgccttcttcttgcttacaa

SEQ ID NO: 8751 - DNA, 333 bp, Zea mays
  Clone ID: LIB3137-048-Q1-K1-G7
caagaacaaccgccttcaaaagaatcggaaatgaccgtccaaagtatgtccctttaagaaccacagattggagtaacctatagcctatggtaatatatatgtacacaggaaaggcctttgtttttgatgttgcctagcaaatggcaatgaagcttttttgttgcttccagagacaaactgtttgttttcatcttaactagcttgtacacgattgtatacttcaccatttgaccccttcaaaacaccttccatacctaactgcatatacatgtgtaactctttaaaatacaacttataatatttctatttcccttttaattgcgcaaccaattt

SEQ ID NO: 8752 - DNA, 303 bp, Zea mays
  Clone ID: LIB3137-048-Q1-K1-H11
tttaaaatcccccatccaacccctaactttatttcatcctttaactccctttttaccatattaatacataacttattccaattaataaacataacttaattctcctaataccttacattacaacaaatatattcatcccataaccccaacccaaactttttctctcacccaattttacaaaaaaaacactttttatttatacccatcatcatctataactaaccaacaaaataacaacttttatttcactttaataatcatttataaattctttacaacctctaaatcttcattaaacaaccc

SEQ ID NO: 8753 - DNA, 361 bp, Zea mays
  Clone ID: LIB3137-048-Q1-K1-H12
gggccgaccgacgcgtccgagttcgagaaggctcgtttcaggaggaacagttgtggattcaaggtttaaaaaaagggtgtcgctccgttttgccatcagcatagtgcaaccgttgtgtttgatcagtcgacagtaattagtaatcactctgtaccgagattagtagcacaatttgttgtcctggtttgaattttggaagatatttgatgtcgtctccttattatctactcgttactggttgagcacgaagattgttttgtgatttaataagaattcttcattattttttcatttttttttcttctacatttccatttttttatctttttgttggtggactaactacactagtttctttttt

SEQ ID NO: 8754 - DNA, 325 bp, Zea mays
  Clone ID: LIB3137-048-Q1-K1-H2
catgaagattgtcggggacgacaacgaggagctgagctgcatctcgttcgggttcagcatcggctttgtcgcgtccagctgaacgcttctgagcctgggcacgagaggcagccagcccatggatgtacgtaattacgtgaagcacactctgtatcctatgactttcaagtgtctaggtccatgtaagctttttgtgggtgtctgtgttcaactgagacgtttttatccggagttgaacatcacaataaagcaaagtcactgataccatgcttgatggggcccgtgttttttagactcacaataaagccggtttgtgtttgtgcct

SEQ ID NO: 8755 - DNA, 400 bp, Zea mays
  Clone ID: LIB3137-048-Q1-K1-H3
cagcacactcagctatccagcaaaagagatctagaggcatgagtcatggccaccgtcagcgcggccgttgtgaccaccatcgttgcccgcgccgcgatcgccaggcccaatgctctagggctgcctgcgctgagggcgaggagtgagagggtgcggtgcagctacgccaaggacgccaagaacgcggccccagtcagcaccaagggcgcaggcgcgtcgctgctcgccgcaacgggcgcggtgaccgcgtcggcggggcccgcgctggcgctcgtggacgagcgcatgtccacggaaggcaccgggctcagcctcgggctcagcaacaacctgctggggtggatcctccctggggtcttcggcctcatctggtccctttacaccatctacatctctgacc

SEQ ID NO: 8756 - DNA, 429 bp, Zea mays
  Clone ID: LIB3137-048-Q1-K1-H4
taagaagctagcatctgttgctgacctttatgtcaatgatgcttttggcacggcacacagggctcatgcgtgaaccgaaggagttaccaagtatttgaagcctgctgttgccggcttcctcatgcagaaggaacttgactaccttgttggagctgttgccaacccaaagaagccatttgccgctattgttggtgcatccaaggtctcaagtaagattggtgtcattgagtccttgctggcgaacgtcgatatcctcatccttggtggtggtatgatctacacattttacaaggcacaaggatattctgttggaaaatctctcgtggaagaggataaacttgagctcgcaacttctcttattgagaaggcgaaggcaaagggggtttctctttttgcttccactgatattgtaatagcggacaagtttgc

SEQ ID NO: 8757 - DNA, 449 bp, Zea mays
  Clone ID: LIB3137-048-Q1-K1-H5
ggccgctggcgcgtccgccgacgcgctcgctttctcgggcctccgcgccggcgacctcctgccgcgcgccaacgccgccgccgacagggaccgcgcgctccgcgtgctcctcaagtcccccgcggcgtcgccgtcgtcctcgcccaagaagtccgcctcgccgccaccgccgacggcggcagctgcggcgccggagccgaggaaggagtacccgcccgacctcacgctcccagacctcaagagcgggctcttcagcaccgacgagttccgcatgtacagcttcaaggtgaagccctgctcgcgcgcctactcccacgactggaccgagtgccccttcgtgcaccccggcgagaacgcgcgccgccgcgacccgcgccgcttctcctacagctgcgtcccctgcccggagttccgcaagggcggcgcctgccgcaagggcgacaactgcg

SEQ ID NO: 8758 - DNA, 419 bp, Zea mays
  Clone ID: LIB3137-048-Q1-K1-H8
ctgcagcaaacattgaggcagactcgtcatttggactagagagcattgatataatgctcaggactatgctttcaactgtatgcacaggtgtccaacgctcacttgcgagctcataaccacttggatcttcacccgtcagtttcagtttggcacctccgaagcttccgtccgaatctctgcagcctccttcctcggccaggcttgcgggcgatggcggcggagcagaccgccgagcagttccggggccaggcgcggctgccccacttcgcgtccccgcggcgctacgacctgcgcctcacgcccgacctccccgcctgcgtcttcactggctcggtggcggtttccatcggcgtggccgcgcccacccgcttcctcgtactcaacgcagccgagctcgacgtcgcgaccgggggcgtcag

SEQ ID NO: 8759 - DNA, 462 bp, Zea mays
  unsure (1)..(462): unsure at all n locations; Clone ID: LIB3137-048-Q1-K1-H9
cattcaccaatcgccttcctgtcgctctccctttcggctcggcgaacgcgatctntgccccaagctccgcagccgctccaccgccctccactccggctgccgaatcgacccgccccgatccagatcaggagctgagggatggacgcgaacaggcgccagagtgggatccagcagttgctggctgcggagcaggaggctcagcaaattgtgaatgccgctagagctgccaagtcagcgaggctcatgcaagcaaaagaggaggctgagcgggaaatagccgaataccgtgcccagatggaggctgaatttcagaggaaggttgcagagagcagcggcgactctggtgcaaacgtcaagcgtctggaggaagaaacggcggcgaagatcgagcaactcacccagcatgccgcaagcatcttcccagatgtcattcagatgcttctgcggcatgtcaccaccgtc

SEQ ID NO: 8760 - DNA, 427 bp, Zea mays
  Clone ID: LIB3137-051-Q1-K1-A1
ggcggcgcaggacgcgctgctgctgcgcgccaaggccaactccctggcgcagctcggcaagtacacctgcgacggcgaggccgccgaggccaaggagggaatgttcgtcaagaactacagctactaattaatcgcccggccatcacccgggataccgccgcccctccgagagatacgtgtgtactgatcgtggttaagcacgtactccgatccattcccatcacatgaagccatgataatgatgatatgatccatggaccatgcatggtgctctggtcgatgccgtacgtgtgtccctgatacaatactatttgtactgatgctagtcatcatatatatcgagctcgccactgcgaagtctgggagataatgcatgtattcttgacggcgagatctgaggaaaaataatactatataatgttccggg

SEQ ID NO: 8761 - DNA, 364 bp, Zea mays
  Clone ID: LIB3137-051-Q1-K1-A12
cgtgtcgatccaattgtcacttgctctccctccaacaagctaattaaggccggtcgtcatccctcttctagctcgttttattatccatggcggaggagaagcaccaccaccaccacctgttccaccataagaaggacgaggagcaggaggagcagctcgccggcggcgggtacggcgagtccgccgagtacacggaggccacggtgacggaggtggtgtccacgggcgagaacgagtacgacgagtacaaggaggagaagcagcataagcacaagcagcacctcggcgaggccggcgccatcgccgccggcgccttcgcactctacgagaagcacgaggcgaagaaggacccggagcacgcgca

SEQ ID NO: 8762 - DNA, 259 bp, Zea mays
  unsure (1)..(259): unsure at all n locations; Clone ID: LIB3137-051-Q1-K1-A3
acgcgtcacggcgggggactagccgtactacaaaccctaggcttgtgcgtgtcttctccgcagaaggcatggcggaggagagaggttcatncacccggatgccacatctaatataaaggggaacgcatcgcctttcattaatcaccggacagacacgcaggatctcctgcaaccctagaacagatacaccacactgatcgaggttgaacgcggcactcgagacgatgggatcaatgagagcaatcaaatgcagaagtga

SEQ ID NO: 8763 - DNA, 336 bp, Zea mays
  unsure (1)..(336): unsure at all n locations; Clone ID: LIB3137-051-Q1-K1-A5
cgagtctcgggctctcggctcacgcggcgcggttccccaggccccacccatccccaacacccaggggcccggcggcgtgctctctgctgtctgctctgcacccaggaccttcggccacaggagctcagccctatccctcgacggtgctcgcggccggcgcgcggcggctcgacccttccccatctccagctccacgccgtctccaccgcctggaatccagggcctncgacgccaccccaccttcaccgtctggaatcgaggaccgtcggcgccgccgacctccgtcccctgcctactgcctcgactcaactgtgtcagggtacttgtaaacagtga

SEQ ID NO: 8764 - DNA, 267 bp, Zea mays
  Clone ID: LIB3137-051-Q1-K1-A7
gggacgacccacgcgtgcgtggacgcgtggggcaaaaaaacctattaaaggtctaaaatgcaaaaaagttggggatggggtgtagtctagtagtactctgattggtgggtgctatctgggaagatgcatatgttgcttccacagtttgtggaggcacatcagtcgtggaaactggagttcgagagagatttatgtgctttgcggagaaaagcgcgtgcttggatccatacggaaatgatgtatgcaatgggacagttcatagctagt

SEQ ID NO: 8765 - DNA, 376 bp, Zea mays
  Clone ID: LIB3137-051-Q1-K1-A8
gctcgcctcgggtcaaaccctaagcttggagttgatttatccgctgcagccatgagtaagttgcagtctgagtctgtcaaggatgccatctcccagattgttggggatgccaaggagaagaataggaagttcactgagactgtggaacttcagattggtctgaagaattatgatccacagaaggacaagcgtttcagtggctctgttaagttgccccatatccctcgtcccaagatgaaggtgtgcatgcttggtgatgcccagcatgttgaggaggccgagaagatgggacttgactacatggatgttgaggctctcaagaaaatgaacaagaacatgaagcttgttaagaggcttgccaagaagtaccatgctt

SEQ ID NO: 8766 - DNA, 361 bp, Zea mays
  Clone ID: LIB3137-051-Q1-K1-A9
acgcgcgagaacggcgagaaggccatggccaaacccatcattttagcattccttggagagcatccacctgctggggtgacgcggattctatccaggtgggtcgccactccattatcaacaggggaccacgtgaggatgccacccgaattggttcaactggtgttgtgagaaggcaggctgtggatatctcacccctgagaagggagaaccagaccatctaccttctcaccactccatgccagggagagcgctatcaagaacatcaaaaccattgctgagtgccttgcagatgagtcgatcaacactgccaatggctctttcaacagctacgccttctaggaaaaggaacaagattgagcgt

SEQ ID NO: 8767 - DNA, 528 bp, Zea mays
  unsure (1)..(528): unsure at all n locations; Clone ID: LIB3137-051-Q1-K1-B1
gaannctccgggtcagacccaacgccgtccgaaccggctaagaagggtcataggctcgtctcgcattcatgtaagcactatctcctggagaatcaaatccacctgcttcagctgagcgccaatctccaatccagagtggtcnnngtggacgctcannttatctaactagtggacncanncgtgaggggatgctctacctcgtattttgggttcaaagctggtngnnttgtgaggaagaggcaggnnctgtggattattnctcacctcctgaagaaaggggtgannaccagngctcatctttactctccttncaccacttggtgccaagggaagagggcgctttcaaggaaccatctaaaactncattgctgagtggctcttgcagatgaagttgatctaacgctgccaaagggctcttccaaacagctacgctcatcaaagaagaaggacgaagattgagcgttgttgccaaaggtcaaaccgttgagtggaagcttgtatctctggtgcactttgcactagaaacta

SEQ ID NO: 8768 - DNA, 320 bp, Zea mays
  Clone ID: LIB3137-051-Q1-K1-B10
gttgcggggagcatacaacatgatggctatagctcttccgcgagcagctagagagggggggcaggtgctcctctgctggaaatcatgcccagggcgttgctctttccgctcagagactgggatgtgatgctgtcatcgtcatgcccgtgacaacaccagaaatcaagtggtaatcagtgtagaggttgggtgcaacagttgtccttgagggggactcatatgatgaagctcagtcatatgcaaaattgcgttgccagcatgaaggccgcacatttttaccttcctttgaccattctgatgtcatcactggacaaggatct

SEQ ID NO: 8769 - DNA, 394 bp, Zea mays
  Clone ID: LIB3137-051-Q1-K1-B11
gctactactcaaatattgtaagtgctgtcgattttataagctactactagttacaagcgggttgatatatacttaactacaagtagcaacgatttgccttagtatatatggttcataatatataattattggaactgagacaatatatgcaggagcttagtgttgatccatggactctgaaggagtagcagcaaaggtggcagatgagactactaaaccggcaagccaagaagacggcgagagcaaggctgggatgactgatctgctgatgctgaccgacaagtcgcagctgcaggcgctggcgatgctgttgcggaacaacgaagagctcatgatgagccaggcgatcaagtctgagacggagcgcgttgagtacctcaagacggtgagcgac

SEQ ID NO: 8770 - DNA, 458 bp, Zea mays
  Clone ID: LIB3137-051-Q1-K1-B12
cgagaacacgatcgagcacacaagcactaagactcgtttaggagaaaccacaaaccaccaagccgtgaaagcatcatggagtacggtcagcaggggcagcacggccacggcgccacgggccatgtcgaccagtacggcaacccagtcggcggcgtcgagcacggcaccggcggcatgaggcacggcacgggaaccggcggcatgggccagctgggtgagcacggcggcgctggcatgggtggcgggcagttccagcctgcgagggaggagcacaagaccggcggcatcctgcatcgctccggcagctccagctccagctcgtcggaggacgacggcatgggcggaaggaggaagaagggaatcaaggagaagatcaaggagaagctgcccggaggccacaaggacgaccagcacgccacggcgacgaccggcggcgcctactggcagcatggacacac

SEQ ID NO: 8771 - DNA, 457 bp, Zea mays
  unsure (1)..(457): unsure at all n locations; Clone ID: LIB3137-051-Q1-K1-B2
cggaannnnccgggtccggacccacgccgtccgcggaccgccgtagggtgtctncacccaccactctgctataccaatagtccaacgcaactaccgcaaggcaatccgttcggaccttcgnngtgggggaaataggagggccgctcgcagctcgctcgagaccggggcttcgccnnngagaaaccggttgggtgctgtacctcttctgccggggatgaggctncacctggtctcctatgtattgagccttggcaaagaatctctcggcgcgccggggaccctgtctcgtaataattggtcgtcgtcgagccctcctcttcaacaacgggccgcctacggcgctctttctctcnngccggcgtcttcctgcggccaaacccgtccaatcttccttccacnncgcctggcccannaagtcgaagccgcctcctcgcctcgtcaaagaactcaagcacca

SEQ ID NO: 8772 - DNA, 336 bp, Zea mays
  Clone ID: LIB3137-051-Q1-K1-B3
ctgccattcgctgtcgaacccgttccattgcttgttctttcagtgaggatagcgcaacattaggtgatggcgttgtgaatgatcaggaatttatcgcaactacaaacgacccagggcttaccttaatggctgcaaaatttgatggcattcttgtgctaagctttgaagaaatctttgttgggaatgcaacaccagactggtataacatggtgaaaaaaagtctcatcagcgaccctgctttctcgttctggtataaccgacatgctgatgaaggagaaggtggggaaaacgcgttcgggggcatggattatagccactacatcgaggatcacacct

SEQ ID NO: 8773 - DNA, 78 bp, Zea mays
  unsure (1)..(78): unsure at all n locations; Clone ID: LIB3137-051-Q1-K1-B4
ggacgaccacgcgtccgaaacaggaaaccaacaattttcccatccccacttatctttctttgaccccaanccaaccac

SEQ ID NO: 8774 - DNA, 372 bp, Zea mays
  Clone ID: LIB3137-051-Q1-K1-B5
ggccaatcccgagcagaggtgcgactcgagcgttcgctttggtgaccataacaacgaggaagccgcggtggcactggtagcggcagcagtaaggggaagatgtcgtcggcgttcagcggcgatgagaccgcccctttcttcggcttccttggcgcctccgctgcgctcgtcttctcatgcatgggggcggcgtacgggacagccaagagtggcgttggcgtggcgtccatgggtgtcatgcgcccagagctcgtcatgaagtccatcgtgcccgtggtcatggctggtgtgctcggtatctacggcctcatcatcgccgtcatcatcagcactgggatcaaccccaaggccaagccatactacctctttgac

SEQ ID NO: 8775 - DNA, 306 bp, Zea mays
  Clone ID: LIB3137-051-Q1-K1-B7
ggcgaccacgcgtccgaacggcctaaggtcatacccacccctatcattttcattctccaggcaaccacgcaactgctggctgaggctaatctcatccaagtggtcgccgactccatcatcaacactggactacgtgaggaacccaccctgcttgacccagctcctgtgatgagacagctggccttcattatctaactcctgagaagggtgaacccgcccatactcctcctaaccactgttgccagggagagcgctttcaagaacatcacaaccattcctgacctccccgccgattacttgatcaac

SEQ ID NO: 8776 - DNA, 305 bp, Zea mays
  Clone ID: LIB3137-051-Q1-K1-B8
gggacgcgccagcgcgacccgtactatatacagacgatcccgtgtttttccctgtcgacccaaccaagacacgcaacatgcaccgggcttgaactttgaaaagtactccctcctacatccataaacagctctgctcgactaacatctatcactgtacgctcgaggacgcattgtcaagatatggagaatgatttagctaaaaaacatcctcatcacacgtcgactccacaaaataagtacataaactattcactatctcataacaaaaacactactctgaacattacatacttgcacatgctggg

SEQ ID NO: 8777 - DNA, 462 bp, Zea mays
  Clone ID: LIB3137-051-Q1-K1-C1
ctcaggagtcaggtcctcacgccgcgcacgggccagagtcgacgagagcgcgcccatccggacgcggagagagctcgcctgcgcctgcgcctccaccgatcggcaagcgggaggggagatgaggggttcgtcgcggaggccggtcgccgtggtgatggcctgggtgcggcgccagccgcccaaggtcaaggccttactcgccgtcgtcgcggggatggccgcgctcgtcttcatccgcttcatcgtccacgaccacgacaacctcttcgtcgccgtcgaggccgcgcacgcgctcgggatcgccgtgctcatctacaagctcaccaaggagaagacctgcgccggattgtcactcaagtctcaggatttgactgcattatttctggccgttaggttgtattgtagttctgttatggagtatgacatccatacaattctggatacagctgcacttgcagctac

SEQ ID NO: 8778 - DNA, 352 bp, Zea mays
  Clone ID: LIB3137-051-Q1-K1-C10
acaagatggactcccgcagccttgctgtggaatttgcgcctttgatcatgtggcggcgaggtgacactggcacagatttgcgtaaccacctcaagtttaccctgaaaccgcctccaaaaattgtggatacaacatcaaatgctgccacatgggacctgttagatgaggatgacgaggatgcttcatcccagatccccttagacgatgcttcaccaccagactacagctccattgaggttatccagtgtctgatcgagcatcacaatgccatcttcaccgacgcaaatgaaaccgtgtggagatgatcggcatcttctctagatctctctggtgttagatcgtgctattgtac

SEQ ID NO: 8779 - DNA, 468 bp, Zea mays
  unsure (1)..(468): unsure at all n locations; Clone ID: LIB3137-051-Q1-K1-C11
gaccacgcgtccgacaagatggactcccgcagccttgcttttgaattttcgcctnngatcangtggcgggggggttgcactggcacagatttgcgtaaccacctcaagtttaccctgaaaccgcctccaaaaattgtggatacaacatcaaatgctgccacatgggacctgttagatgaggatgactaggatgcttcattccagatccccttagacgatgcttcaccaccagactacagcttcattgaggttatccagtgtctgatcgagcatcacaatgccatcttcaccgactcaaatgaaaccgtgtggagatgatcggcatctcctctagatctctcttgggttagatcgtgctattgtacaagttccaggtatgaaagtgggaaaggtggaattatcgctctctatttgttagggataagcattttggctcgaattttttttgaattaggtttgtttttacac

SEQ ID NO: 8780 - DNA, 415 bp, Zea mays
  unsure (1)..(415): unsure at all n locations; Clone ID: LIB3137-051-Q1-K1-C2
gcagctgcagctgcggcagttaggcttgctaagaggccagaaaacgccggaaagctatttgttgtcgtgttcccgagcttcggcgagcgctacctctcatcggtgctgttccagtccatcaagaaggaagcggaaagcatggtggtcgagccctagagcacacagttctgggcttctggcaaactatttcctgagacgttcaccatttccatcacagaaaaataaagctcgggtgccttctgttgatttcgacgtacatttccctgccgatggtgtccagcccgctgttgtcgctggagaacacgtcgtttttagacttgtgatgttttactactgttttgacactcgttgtatttctgtatatcgcgtcagactgtgaaataaaagcagtacagtgtgtttcttgcaaaanaaa

SEQ ID NO: 8781 - DNA, 185 bp, Zea mays
  Clone ID: LIB3137-051-Q1-K1-C3
ggcgagcggccggtctaaatgatgcaagcttttatacgtgtgcatgcgacggcgcagctcggggataggggcacttacattcaattgcgcggcctccgattgacaacgtcgcgactggttaaaccctgactttaccgaacttaattgcattgctacagatcacacttttggccggttgcgtaata

SEQ ID NO: 8782 - DNA, 352 bp, Zea mays
  Clone ID: LIB3137-051-Q1-K1-C4
aatgccatcacgaatgtggaacctcaacaaagtcctggtcacctcactactctgcatctcggcgtggtcgtcgtcgccatggccatgcacggcagccggtcagctgggcggcaagcccctggtcaccgccgtcaccaaggacgcgtccacctccctctacacggcgccgctcaaggacggccacccgctcgtcctcgacctcactagcccggtcatctcgctggccacgtgcgcctcctcctccaagaacaacaacggcacgctcaccgtcacgctatccgccaacgccaccgacggccagaacccgctgttccccgtctccttctcgggcggggccacgtgcgcgccgtcg

SEQ ID NO: 8783 - DNA, 261 bp, Zea mays
  Clone ID: LIB3137-051-Q1-K1-C5
cgcgggcgaaagcggtcacgaatatttatcctcaacaaatttctggtcattttactactcagcaacacggcggcgtggtcgtcttcatgaccatgcacgtccacccatcatctggtctaaaagcccctgatcaccgtcgttaccaaggacgcatccacctccctctacacggcgcctttcaaggacgggcacccgctctttctcaacctcactagcccggtcatctcactggccacatgctccttcttcttcaaaaacaac

SEQ ID NO: 8784 - DNA, 457 bp, Zea mays
  Clone ID: LIB3137-051-Q1-K1-C7
cagggtacgacccacgcgtaccgagcttcggtcttctcaagagaaacattttttctgcagtataatgagctttggaagctgaggttatgtggaggggcaacagaatattggattaacggtgcaagcttacttatatgatggttactgggaagatattggtactattgaagcattttataatgcaaacttgggaataaccaagaagcctgaaccggattttagcttttatgatcgttctgctccaatttatacgcaacctatatatttgcctgcttcaaaggttcttgatgctgatgtgacagacagtgctattggagaagggtgagttattaaacattgcacaatcaatcattccataattggactcccattctgcatttctgaaggtacagttatagaggactttttgctaatgggtgcatactattactagactgaaaatgaaaaaatgcctttt

SEQ ID NO: 8785 - DNA, 188 bp, Zea mays
  Clone ID: LIB3137-051-Q1-K1-C8
tcttctgctagcactacctttcattactgctgttccagtccatcaagaacgaatcggaaagcattgacatcgaaccctacagcacacattactgggcttatggctaactatttcctgagacgttcaccattttcatcacaaaaaaataaacctcggatgccttctgttgatatcgacgtacattaccc

SEQ ID NO: 8786 - DNA, 331 bp, Zea mays
  unsure (1)..(331): unsure at all n locations; Clone ID: LIB3137-051-Q1-K1-D10
gaccacgcgtccggtcgccaagctcgccgttgctactttttcatgngcgccgggaccgcagccaaggtggatcggctcaaatgcaagctgggattcgaccattctttcaactacaaagaggaacctgacctgaaatcggcgctgaagaggcactttcctgacggcatcgacatctacttcgagaacgtgggcggtgagatgctggaggcggcgctggccaacatgaacccctactgccgggtggcgctcatcggcgtcatcttcgagtacactggctgcgcgcggcgcgcgttgctcgacctgcttgaagtgatctacaagcttatcacca

SEQ ID NO: 8787 - DNA, 352 bp, Zea mays
  unsure (1)..(352): unsure at all n locations; Clone ID: LIB3137-051-Q1-K1-D11
gaccacgcgttcggttcgccaagctcgccggtncnactttttcatgntcgccgggaccgcagccaagggggatctgcgcaaatgcaagctgggattctaccattctttcaactacaaagaggaacctgacctgaaatcgtcgctgaagaggcacttccctgacggcatcgacatctacttctagaacgtgtgcggtgagatgcttgaggcggctctgtccaacatgaacccctacagccgggtggcgcttatcggcgtcattttctaatacactgtcagcgcgcggctcgcggtgctctaccttgcttgaggtgatctacaatcgtatcatcatactgtgcttctttttcta

SEQ ID NO: 8788 - DNA, 464 bp, Zea mays
  Clone ID: LIB3137-051-Q1-K1-D2
cagcttcacagataaggatctcctggagctaataaacttgcaagggaagtacgcacagttcctatgtggtgtatgcaagttctacttggactggcacaccgagtcttatggtgctcctgtgattttcctccacgatccggtcagctttgccgcgctagttcgtccggagctgttcacgttcaagaagggcgtggtgagggtggagacgcaaggcatctgcgtcgggcatacttccatggacatgttgctgaagaagtggaactcagagaacccgtggactggctactcaccgatttcggtcgcatggacggtcgatgtgcccaaggtggtcgcgtttgtgaaagagctcgtcaccaagccgtgaaccaagttaactaacgtgttgtggtctcgcgcaccagatgtgcagcaaaattgaaatgtcgatatatttactcacattccgagcactgcaaacactatta

SEQ ID NO: 8789 - DNA, 342 bp, Zea mays
  Clone ID: LIB3137-051-Q1-K1-D3
gttctgtcaccttacgcatcgcatgctcgaatttaacttctccggcaccaaggccagcaagcagggccgtggcctcttaatccttgccgccgtccacacatgctttctccttcttctcgtcccagactgctatgacgccaccaacgtccatcactgcagtaaaaaggagtatccactgatggagaacggcgtgcatatcgtcctctacccagtagagcccggcaagcccacaactttcaatatctccgctgctactgataaacccatcgataatgtgaagctgctgatcaacgacaagtactccttgtaatacgtacactccgaaactcgccacatttacgg

SEQ ID NO: 8790 - DNA, 291 bp, Zea mays
  unsure (1)..(291): unsure at all n locations; Clone ID: LIB3137-051-Q1-K1-D4
ggaaatcaaagcaacaaagttgctggccgagatatgcttccatgagacctcacgcgtcgntacgcggcggactggctgttatcgtcgccgtccttgcagctctgccactcaacaaagggaccgaggaggaaggaggacgaggggaggcagtctccgccgtggacgccgccgccggaacgagctcgtggccatgctgcaacaagtgcagattatgctacctgtctgacccgccgcagtgccaatgcctggacttatcgacggtcgggtgccacccagagtgcaagcagtgca

SEQ ID NO: 8791 - DNA, 292 bp, Zea mays
  unsure (1)..(292): unsure at all n locations; Clone ID: LIB3137-051-Q1-K1-D7
acacaaaactcctctactccaccccactataccttcttatccaagcacgcacaanatccgagcgggatgaacctctagtacaattactactccactcacatacccttatcctgcctcctctgatcctcttccacaatgagatcacatttcccgcactagctcctcttaagcaaaccacgttcaacaacggctctcttacagctttgatactcacctcttcaacctcattcataataccatacacatgttgaacaacaattcgaactaaaataaccacgataatcgcttctca

SEQ ID NO: 8792 - DNA, 440 bp, Zea mays
  Clone ID: LIB3137-051-Q1-K1-D8
ccgcaaaactcccccactccacgcccttccgtttctctcctatcttgctccaagcaggaggggggactcgagtagattcacttcgccactccgttgccctctcctccgccgcccgatcctttccccgtctgagatggcatctccggcatcggcgtcgcttaaggaagccgtgggcagcctcgaccgcgacagctttgttggtctcctctccaacctcatcggcgagaccgtacacctgcagaacgacccgccgacctacaggcctcaggaggagcgcgtggcgcagcacgtagtcgacgtgctccgcccggtgtccgcggacaccgcgggcggccctcttcttgtgcggaagataagctacgcctagggcaggagcaacgtcatcgttgaataccccggcaccgacccaggccgcgttgtcttccttcgttggcatgcac

SEQ ID NO: 8793 - DNA, 241 bp, Zea mays
  Clone ID: LIB3137-051-Q1-K1-D9
gcgtcacgacccagcaaattaccctccatttctataacttttccattctctccacccctacaagaacccaggagcagtgtcactttaagcttgccttcatccacacaaactacctcctacagctaatcgaagccttgatttgaggacaacaacgtacaccacatcggcataaataactatagcttcatcggcagcgcggcgaccatgaacatgtactccatctaccacaacgagatcataa

SEQ ID NO: 8794 - DNA, 421 bp, Zea mays
  Clone ID: LIB3137-051-Q1-K1-E1
agcccaccgaattccctgcgattcctctcccctcgccttctcgtctccccctaggggatcgtcggagaggaatcgcaaagagggccgtctcatccgagttaaggaagccatggagcacaaggaggctgggtgccaggcccccgagggacccatcctctgcatcaataactgtggcttcttcggcagcgcggcgaccatgaacatgtgctccaagtgccacaaggagatgataacgaagcaggatcaggccaagctggctgcctcctctatcgacagcatcgtgaacggcagcgacgccgtcatggagccggttgttgctggcagcaacacggtagtagctgttgcccaagttgagttgcaaacaatgaacgtgcagcagcccgctgatgttgccggacccaacgagggggtggcggcgatc

SEQ ID NO: 8795 - DNA, 323 bp, Zea mays
  unsure (1)..(323): unsure at all n locations; Clone ID: LIB3137-051-Q1-K1-E10
gttcgccaagctcgccggttgctacgttttcttttgcgccgggaccgcagccaaggttgatctgctcaaaggcaagctgggattcgacgatgctttcaactacaaagaggaacctgacctgaaatcggcgctgaagaggcacttccctgacggcatcgacatctacttcgagaacgtgggcggngagatgctggaggcggcgctggccaacatgaacccctacggccgggtggcgctcagcggcgtcattttcgagtacactggcggcgcgcggcgcgcggtgccggacctgctggaggtgatctacaagcgtattaccattc

SEQ ID NO: 8796 - DNA, 234 bp, Zea mays
  unsure (1)..(234): unsure at all n locations; Clone ID: LIB3137-051-Q1-K1-E11
accgacgcgtgcggttcgccaagctctccgttgctactttttcatgttcgccgggaccgcanccaaggggcatcgtctcaaatgcaagctgtgattccacaatactttcaactacaaataggaaccttacctgtaatcggcgctaaataggcacttttctgacggcatctacatttacttcgagaacgttttcggtgagattctatattcttttctaaccaacattaaccccta

SEQ ID NO: 8797 - DNA, 431 bp, Zea mays
  Clone ID: LIB3137-051-Q1-K1-E2
ccgacgtcgcccccgcccccccctgtgaaaatttgtgatgcggagaacagctaccgccgccctcgtccgggtccccctcctcgctgcggcggtacagacctccgccctgcctttcatcgtcctgcacgggattggggaccagtgcgtcaaccatggcgttgccaagttcactaaacttctcgccgattggtccggctccgacggctactgcctagagattggcagaggaacatgggactcttgggtcatgcctcttcaacaacaggctgatataatctgcaacaaggtcaaggaaatgaaacaactgagaggtggctacaacatagttggtctgtctcaggggaacttgattggtcgagcagtggttgagtactgtgatgatggaccgccggtcaagaatttcatctctctaggaggtcctcatgctggta

SEQ ID NO: 8798 - DNA, 343 bp, Zea mays
  unsure (1)..(343): unsure at all n locations; Clone ID: LIB3137-051-Q1-K1-E3
aagggaccgccgacgcgnncggcaccctaccaacttcttgtgaaaaatcttaatcnttaaaacaaccaccgacacccagggccagatacacttacatcctgcgacccaccaaaccttctcccttcttttcatcatcctagacaggattgatgaccatcacgtcaaccatcgcgttcccaattacactaaacttatcgccaacgggtccctcaacaactgctacttcctacagcttggcagaataacatctaactctaagcccacccctcttcaacaacacgctcatataagcatgcacaaggtcaacgatatgaaacaactcacatgttgctacaacataaaa

SEQ ID NO: 8799 - DNA, 98 bp, Zea mays
  unsure (1)..(98): unsure at all n locations; Clone ID: LIB3137-051-Q1-K1-E4
cgcgtgcgtttcgctcncctcctgtcccccccgcgtgcgtgcagttctctctctcacaccctcactctctgttgaggagtgaggactactggggcgaa

SEQ ID NO: 8800 - DNA, 446 bp, Zea mays
  unsure (1)..(446): unsure at all n locations; Clone ID: LIB3137-051-Q1-K1-E5
ctttctctcgcctcctgtcccccccgcgtgcgcgcagtgctctctctctctccctcactctctgttgaggagtgaggacgactggggcgaacgtcgccgccgccgccctacatcaggtgcccaggtcgttgttcggcccttcgccagctctttttcgggcacttcgccggcgacgaacacccaccagttgctgatgcaaggctttcaaaagattaacagtctcacttgatgcaaaagcaacacaatcacactaaaggtttggattagacatttcagagcatgggttcgcggtttccatcccaccagctaagcaatggcttgtatgtctcgggccgacctgagcaaccttaagagaagtccccagtcatttgctcctcggctatgccgtacactggtggggacatatagaaatctggggagcttggaaagatgnttgatcttcataa

SEQ ID NO: 8801 - DNA, 313 bp, Zea mays
  unsure (1)..(313): unsure at all n locations; Clone ID: LIB3137-051-Q1-K1-E6
nntttgtttttttttttttttttnnntttttttttttnnnnnnnnnnnnnnnngggggccgaaaaacttctttaggcatacttcaaaatccatacagagaccacaaaaactgacacaatgtttcaccataataccatccataccggaacacgttcttttaaccatttaataaatcacagcagagggatagataaaacaacaacaattctctaggtggccttgtcagccttaaaggctgtggcaacagcctggccttttagccttccaatcctcttagcttcaatgaaaccgacctttttgccagggggagcat

SEQ ID NO: 8802 - DNA, 405 bp, Zea mays
  Clone ID: LIB3137-051-Q1-K1-E7
gggcacgacgccacgacgctccagccagaatgtcccacgcttatatcgctctcaccctttttcttttctatctccccctacagggatcgcgggagaagaatcgcatagagggccgcctcatccatactaacgaagccatggagcacaaggaggctgggtgccaggcccacgagggacccatcctctgcatcaataactgtggcttcttcggcagcgcggcgaccatgaacatgtgctccaagtgccacaaggagatgataacgaagcaggatcaggccaagctggctgcctactctatcgacagcatcgcgaacggcagcgacgctcttatggatcctgttgttgctggcagcaacacggtattatctgttgtccaagttgagttgcaaacaatgaacgttcatc

SEQ ID NO: 8803 - DNA, 135 bp, Zea mays
  Clone ID: LIB3137-051-Q1-K1-E8
ggtcacccacgcgtccgcacacatcaccctaacaatttattgttaaaaattatattcttttaaacaactaccgacacccagagcctgttacacttttatactactccccaccaaacctactcccttcctttcatc

SEQ ID NO: 8804 - DNA, 237 bp, Zea mays
  Clone ID: LIB3137-051-Q1-K1-E9
gcccctccaacctctcctcttcctcgtgtctcttgacaaccaagccagagaggagcaggcaggggcgaacctgctctcctctcctcccctcttattccgcgcccagcaacgaggcatggtggagaatgcgaggaccatggcgcgcacgctggagattccccattggaaggccgaccgcctgccgtcacctactagcccgctggaccgcgcgtctgcattcccccgtgggtggcgcca

SEQ ID NO: 8805 - DNA, 231 bp, Zea mays
  Clone ID: LIB3137-051-Q1-K1-F1
acgcggccgatcggcatgccgcttgccaagcaccattcctatttctctttttgattcccagcctacccccgcgctacgcgacctaccatttcccgcccctctttcctactacaataaaactatcaaaaattcccgaacagagttcacccccgcttctcataaacccaattcccgtttctgatcctcaccttaacccctcgccttccctttcccacctctctttccattttt

SEQ ID NO: 8806 - DNA, 336 bp, Zea mays
  unsure (1)..(336): unsure at all n locations; Clone ID: LIB3137-051-Q1-K1-F3
ctccgcgctccttcaaaccaaactgaaccctattctatttcgagtgcacgacggnggcagcaggagatggtggtgacggcggaaggcggcgcgcaaagggccgtgcggcagttggtggacaccgcctgcgggcgcctggtcctggacggcgggctggccacggagctcgaggccaacggcgccgacctcaacgacccgctctggagcgccaagtgccttctctcctccccgcacctcatccgcaaggtccatatggactacctagaagccggggcgaacattataatcacagcatcgtatcaggctactattcaaaggtttgaattaaaagggctt

SEQ ID NO: 8807 - DNA, 430 bp, Zea mays
  Clone ID: LIB3137-051-Q1-K1-F4
gaccacgcgtgcgtatagctactactcaaatattgtaagtgcggtttatcttataagctactactagttacaagctggtttggatatacttaactacaagtagcaacgatttgccttagtatatatggttcataatatataattattggaactgagacaatatatgcaggagcttagtgttgatccatggactctgaaggagtagcagcaaaggtggcagatgagactactaaaccggcaagccaagaagacggcgagagcaaggctgggatgactgatctgctgatgctgaccgacaagtcgcagctgcaggcgctggcgatgctgttgcggaacaacgaggagctcatgatgagccaggcgatcaagtcggagacggagcgcgttgagtacctcaagacggtgagcgactgctacacgcggacgatga

SEQ ID NO: 8808 - DNA, 457 bp, Zea mays
  Clone ID: LIB3137-051-Q1-K1-F6
gaccacgcgtgcgtgtgaagcctaatgaccggagtctcatttggttctcttactctgatagagacccttgagctgggaaatgttttgataaatgcaagcataaccatgtattcggcagaggctcggaaggaaagcagaggagctcatgctcgtgaggatttcacgacaagagatgacgagaagtggatgaagcactcactggggtactgggagaacgagaaggttcgattggcatacaggccagtgcacatgaacacattagacgatgaagtagagtccttcccgccgaaagcccgtgtctattgatcgattcgagcctcacaccctcgggaattccgtgtaaggtgttaataaaacagatgggcgttcctggctgagaacatgatctgaactcggggaccccctttttctttggttctgtattttgtctgatttgctagaaataaaaagaacacat

SEQ ID NO: 8809 - DNA, 365 bp, Zea mays
  Clone ID: LIB3137-051-Q1-K1-F8
caaggatcgacatgatggatccacactctttattggaccgtcgattcagtgtctgcgacaggagtagcttctggagcaggccgagtgatgttgacactagcatgaggtgtggtgggtcgtctgatgatgagaacattgacgaggaatcacctagcggtatattcttcccaccgatgccatgtgcatatggtgctccactgtgcactggttctaggtattgcttagttgccagcaagcaaatggttggaattttcctcatggtgtgggtgcgaagcgatataagggagcatgtgaagaacttgaaggtttcatgtgtcggtagaggtctgatgggctaccttgggaacaagggatccatatcaatc

SEQ ID NO: 8810 - DNA, 376 bp, Zea mays
  unsure (1)..(376): unsure at all n locations; Clone ID: LIB3137-051-Q1-K1-G11
cgcgtgcgctttggctcnnaacacacacacagcccggncttcgnatttcttttccctncgccgatccaagaggcagggcttcgttaagaccctcactggaaagactatcaccctcgaggtggagtcttctgacaccattgacaacgtcaaggccaagatccaggacaaggagggcatcccccctgaccagcagcggctcatctttgctggcaagcagctcgaggacgggcgcacacttgccgactacaacatccagaaggagagcaccctccaccttgttctccgccttaggggaggcattctaatcttctttaagacccttactggaaagactatcaccctcgaggtggagtcttttgacaccatctacaacctt

SEQ ID NO: 8811 - DNA, 252 bp, Zea mays
  unsure (1)..(252): unsure at all n locations; Clone ID: LIB3137-051-Q1-K1-G12
ctatctacctagcatggccgggaatttactttctttgccggggaaanaggcgagcgcgtggttgctttttcgcgcatcnctctcatcctcaaaggcctcacctactcatactcctaggagaaccttgactacaagagcgagcttctcctcagtttcaaccccgtgctcaataaggtgcccgtgctcatccaccactgcaagcccgtctgcgagtcccagatcatcgtgcagtacttcgactaggcttttccc

SEQ ID NO: 8812 - DNA, 199 bp, Zea mays
  Clone ID: LIB3137-051-Q1-K1-G2
ggaagacccacgcgtccggtgaagccgccgccgttgcattgtccatagccttcgcttgttactgagatggggggttttgtcgagaccgacaagatcaatgcgtacttcaagcgtttccaggtgaagttcaagagaaggcgcgctggctagacagactacagggccaggataaggctgattaaccaagacaaaaacaagt

SEQ ID NO: 8813 - DNA, 254 bp, Zea mays
  unsure (1)..(254): unsure at all n locations; Clone ID: LIB3137-051-Q1-K1-G3
acccacgcgtgcgacaatcttggactgagttccaaaagtttgtagttagatttatctctgngaccttctttcctgcgggtgtgcttgatagtttggacctagtccaatcatcactaacaaagagacatctcaaagcttgcttatgtttatatatggactggagagtaaggaaagatgtatcaaatcttgtaactgcaggcctcactaaattaccaggtcttttatcccttgtaccctgacgacagctgctaccc

SEQ ID NO: 8814 - DNA, 452 bp, Zea mays
  Clone ID: LIB3137-051-Q1-K1-G7
cggacgcgtgggcgcgtgcgcattgatacgactagtttctagagcgtcgtaccgcgcacgggtgccgagccccaccgcaaagcgccggaatcgtgagcgcgtccggcctcgcctgctccgcggcgagaggcggccgaggaggacgggcgatgtacccggtggtgacgggcacgccgccggcgcggctgccggcggcgtcccgggtggacaaggccacgagccacctgctgcagggccccgactgggccgtcaacctcgaaatctgcgacaccctcaacgccgaccgctggcaaacgaaggatgtagtaaaagctgtgaagaagcgattgcagcataaggatccaaaagttaaattctttactttgacgttattggagacaatgatgaagaactagggggaatatgttcattttgaaagtgctgatcagcatgttttaacagaaaatggtaaa

SEQ ID NO: 8815 - DNA, 404 bp, Zea mays
  Clone ID: LIB3137-051-Q1-K1-G8
ctctcccgcaacggcgtcaagttcggttaggctgtctggttcaaggccggctcccagatcttcggcgagggcgggctggactaccttggcaaccccagcctgatccacgcgcagagcatcctcgccatctgggcctgccaggtcgtgctcatgggcgccgtcgagggctaccgtattgccggcgggccgctcggcgaggtcgtcgacccgctgtaccctggcggcagcttcgaccccctcggcctggccgacgaccccgaggccttcgccgagctcaaggtgaaggagctcaagaacggccgtctcgccatgttttgcatgttcggcttcttcgtccaggccatcgtcaccggcaggggcccgctcgagaacctcgctgaccacatcgctgacccaggcaaaca

SEQ ID NO: 8816 - DNA, 154 bp, Zea mays
  Clone ID: LIB3137-051-Q1-K1-H10
aagaacaacattggggatggcatgttttataagctgcctatacactaaaccaaaatcgagaacctgggcaatctgctgtacaagaactactgcaccacgatagctggactcagggccatatgctacagcttaaattactatgagtaccactcct

SEQ ID NO: 8817 - DNA, 287 bp, Zea mays
  unsure (1)..(287): unsure at all n locations; Clone ID: LIB3137-051-Q1-K1-H11
cgcgggcgnccacgcgtccggtccccgtgagtagnagtattaatgtctccatcaccaagaacctgccgcaggcgggctgatcgcggacctgtccccggcgcctatacacgggtcgcagctgcgcgtggcctaccagggcgtgcccggcgcgtacagcgagaaggcggccgggaaggcgtacccgggctgcgacgccatcccctgcgaccagttcgaggtggcgttccaggccgtggagctgtggatcgcggaccgcgccgtgcttccccgggagaactcgctgggcg

SEQ ID NO: 8818 - DNA, 461 bp, Zea mays
  unsure (1)..(461): unsure at all n locations; Clone ID: LIB3137-051-Q1-K1-H2
cggaannncccgggtccgacccacgccgtnctcggatgaagcannatgtcaatggagggaaagaagggttgtctgctgctcaaagtatcagggtgccatgatgaagagcgtagcgcagatgaactcnttgttgacgccagcaattgganttcgaagnnnatatcagaaaaggtcggctggggcagggacgccatggcctcnntatgaagannagctgggcntnnttgctcggtagaattaaatcctcccttgcattttcaaccgaagggacnntctgcctgcgccttgggtatctcgctgtgcagcaagtcttgccctcttcatttagttaagcgaatggaagttgcttgcagttaaagaggaatgtgtnttgtttctgaccttgtttggagtggttncgagccttttgttcttcttatttgtttccagcatcgacaaagaaaaatgaaattaagtagcac

SEQ ID NO: 8819 - DNA, 387 bp, Zea mays
  Clone ID: LIB3137-051-Q1-K1-H3
cggacgcgtgggcctgtatccgctgagcgccgggatcgtaggccatgtcaagaagaacattgaagattgcatggttgagaagctgggtattgacgagaccaagatcgagaacctgggcaatctgctgtacaagaactacggcaccacgatggctggactcagggccatcggctacagcttcgattacgatgagtaccacgccttcgtccatggaaggctgccgtacgacaacatcaagcctgaccccattctcaagcacattctcaagaacctgcgcatccgcaaactcatattcaccaacggtgacatggtccacgccgggagagccctcaagaggctgggcctggaggactgcttcaggggatcatctgcttcgagaccctgaac

SEQ ID NO: 8820 - DNA, 268 bp, Zea mays
  Clone ID: LIB3137-051-Q1-K1-H5
ccacgcgtccgcacctctactcaataaacccgcgatttcagtattcgacacccggcaacgacagaggctgcgcgacgtcctatctgagccctcctcccagccactccagacacagtcacacctaaacccacacctacccgcaccacttcttcttcacagcgcccaccaatccaactcccggcaacgaccccgccgctcctcacctgtacttccactcttactaaaacttttcttcgcgcttctcgcaactcgttctccacgacatatc

SEQ ID NO: 8821 - DNA, 124 bp, Zea mays
  Clone ID: LIB3137-051-Q1-K1-H6
gtacaggtacagggaaagggacacctacccgtaccactttttcttcatcgctccgaccatccccaccctcgtcaaggacgccgacttcccggacctgaacttctacttcaacttctacttttct

SEQ ID NO: 8822 - DNA, 195 bp, Zea mays
  unsure (1)..(195): unsure at all n locations; Clone ID: LIB3137-051-Q1-K1-H7
gatgaagcaatggcaattgatgaaagaaggttgtcgcngtctaagtatcaggtgcatgattaaagtagccgtttgaactttgtggacgcatcactttatccaagaatatcataaattctgctggcaggactcatgaccctattaagaaactggactttgctcgtgagattattccccttgcttttcacctattga

SEQ ID NO: 8823 - DNA, 388 bp, Zea mays
  unsure (1)..(388): unsure at all n locations; Clone ID: LIB3137-051-Q1-K1-H8
gacccacgcgngcggatgaagcaatgtcaatggacgaaagacggctgtctctttttccgtgtcaagagcaacatgaaggtggggagatgaactctgttgacgcatcacttgatcgaagaatatcataaagtcggctggcaggacgcatggccctatgaagaagctgggctttgctcggtagattatcccccttgcatttcaccgaaggactctgcctgcgcttgtatctcgctgtgcagcagtctgcccttttcatttagttagcgaatggagttgctgcagttaagaggaatgtgttgtttctgacttgtttgagtgtcgagcctttgttcttctatgtgtccagcatttacaagaaaatgaattattagcacttatgagttatttt

SEQ ID NO: 8824 - DNA, 376 bp, Zea mays
  Clone ID: LIB3137-051-Q1-K1-H9
cgcctccacgccccgtaccggcgatggccgccgaggcggcgtgctgcgacgacagcgcctgctcgacgcccttcgtgagcgcgccgtccagccccgcccgggacagggacagggaaagggacacctacccgtcccacttcttcttcagcgcgccgaccagccccacccgcggcaaggacgccgccgtcccggacctggacttcgacttcgacttcgacttctcgtcgcgcttcccgtcgccgtccgccgccgccatgtgctccgccgacgagctcttccacaacggccagatccgcctcgccgccgcgctgctgctgcagccggacggggacgcggacccggacccggaccccgccgcgggcgcgcagcacgagaa

SEQ ID NO: 8825 - DNA, 156 bp, Zea mays
  Clone ID: LIB3137-052-Q1-K1-A2
tgagcaacgagcagttcatgtcgtgccagcccgcggcggccaagacgacggaaccgccggccgcgccgtcgcaagcgtgctgcgacccgctggcgggggcggacctcaagtgcctgtgcggctacaaaaactcgccgtggatgggcgtctacaaca

SEQ ID NO: 8826 - DNA, 285 bp, Zea mays
  Clone ID: LIB3137-052-Q1-K1-A3
taaagccactcacaggatttcacgtggcattggcattaacggtcactcgttaacaagaaatcttaattctggtgggcgtgtgaacacccttcaaactttacacaacttgaatgaagatgagcttgctgggtttgaggaatcatggcaaagaaataccaaggagaatatgcctggctggaatcctagaatgaacatgcttggcagtggaaatgttcgctctgacttccgagatgtgaatcaaatgcctgcactttcagccccagaactataccgtggcacgaattt

SEQ ID NO: 8827 - DNA, 323 bp, Zea mays
  Clone ID: LIB3137-052-Q1-K1-A4
tgcctacgtattgaagcacatctgcgtcgaattggagttttcagtgagtcagaattgcgcttacagttcctgaggtgcagggaagcttggctttctggaattcttgaagatctggaccaaaggaatgtttatgattacctcaaaagcatggtgacttgccacagggtacatctattcgatgttgttaatcaatatagatcaatattcaacaatgataaatctggaaatgatgagaactccgaaggtgggctgcttttcagctgggcaatgcaacaagttagtaatcacctcgctactcttcaagttatgttaccaagcataac

SEQ ID NO: 8828 - DNA, 297 bp, Zea mays
  Clone ID: LIB3137-052-Q1-K1-A5
actcgccaagacgggagctccagacgagatgcccctggcgctgaggccccgggagtctccggacttcatggaacggggggagaggccaatgtacgactccaacggcgtcctcggcaagctctaccgcgctgccctgcggcacgaggaggacgcagaagcgctcctgcctgcgggcccaccgagctgcgtgtacgacccggacctggaggtcgccggtttcgacgagttcctggacgcaacggaggagcggtacgaggcgtacgccgagaggctgggcgccctgatgacctactactc

SEQ ID NO: 8829 - DNA, 321 bp, Zea mays
  unsure (1)..(321): unsure at all n locations; Clone ID: LIB3137-052-Q1-K1-A8
tcgacccancaggagcaggacatccgcatgattctcgccgccgatggccacctcagcaccaagaactgcgacttccacgtggagcgctacgtgtacaagcgccccactgatggcatctacattattaaccttggaaagacctgggacaagcttcagttggccgccagggtcatcgttgccattgagaatccgcaggacattatcgtgcagtctgctaagccctatggccagagggctgtcctcaaatttgcgcaagacactggtgcccatgccattggtggcaagcacacttctggtacattcaccaaccagttgcaaacc

SEQ ID NO: 8830 - DNA, 429 bp, Zea mays
  Clone ID: LIB3137-052-Q1-K1-B11
caactccgcgccgttttcactttgtcgcaccacgtgcggttctggaagacagaccagacagacagacagccaggcagtaggcgatcgcatcgcatggcgacgaggccggcagcggaggggaagccgtgggagctggcggcgcacccgcggctgcccaagggcaggacggttgccgtggtggtgctggacggctggggcgaggcggcgcccgaccccttcaattgcatccacgtcgccgacacgcccacgctcgacgccctcaagcaggcagctccggagagatggaggctcatcaaggcgcacgggacggcggtggggctgccgacggacgacgacatggggaacagcgaggtcggccacaatgcgctcggagcccggacagatatacgcgcagggcgcgaaacttgtcgaacttgcgttgggttccgg

SEQ ID NO: 8831 - DNA, 430 bp, Zea mays
  Clone ID: LIB3137-052-Q1-K1-B12
catgctctccttgacaaattcatggaaaatttaccaaaagggagccacatagctaaagggggatggcacgatggatcacaaatgccccatctaaaaagcttaacctgaatcatcatattattggaggagagcttctagaattgtcaaaaaatgaagtgcctcatgaagatattgttttccaccgtttatatttgaacaagactggcccagttaatcctaaggcaaagcggaaggactcagttcttgatgaatgaaaagtgtgaggagcttgttgttaatatcttgacaattaattcgtaattgtctctacataaatatagaaattaggaaaattgttttagaggaggactagaccaggcgaatggcttgccatggaaacaagagcagttgcagatgacgatatactatcaacgctatgaaaatgcttact

SEQ ID NO: 8832 - DNA, 402 bp, Zea mays
  Clone ID: LIB3137-052-Q1-K1-B3
ttcgggttcacaagacttttccaaccgaacaaacctgtgacaaaaggacaagctggcctagggattttaagccggggattctggcaaagtggttctggaggaggttgcccgtatcgaggcagagaaaatagctgaagcagctgtaaatgcacatgctgcattggttgctcaggtcgagaaagatcttaatgcaagttttgaaagggagcttaaggaggaaagagaaagggtagagacccttgaaaaagtagctgaagaagctagggtggaactagataggttgagggcagaaagagaggaagagaagaacattctggtcaggggcagagctgctgttgagtctgaaatggaagttctgttgaagttgaggagtgaggtagaggaacagctgcagaacgtact

SEQ ID NO: 8833 - DNA, 371 bp, Zea mays
  Clone ID: LIB3137-052-Q1-K1-B4
aggccgccgccgcctcctcctcattcggggaaaggtgcgcagttagggttgggagatctcttgcctcacgacacgagcagcagaatttgtcgagggccgctggttgctgcgagaggtccgggccttcgtgggatcttgaaaattgaatgttctaatggagtccaagggtggcaagaagaagtctagcagtagtcgttcctccctgatgtacgaagctccccttggctacagcatcgaggatatccgccctgcaggcggcatcaagaagttctccgctgcttactcgaactgcgcgaggaagccatcctgatatctctgttgtcatccccatcctagtagcgtagaaaccaacttgcattttcatttgatct

SEQ ID NO: 8834 - DNA, 314 bp, Zea mays
  unsure (1)..(314): unsure at all n locations; Clone ID: LIB3137-052-Q1-K1-B5
tccccttcttcctcgccgctgtatcccacgctacggctaatgcggncggtgccggcgcccctcccccagtgccgacgccgtggccggagcagttccacgcggtggtcttcaccaatctcaccgagagcggcggccggctgcagctgatcgacctgtactacgactggcccaggggccgcaacctcaacctcatccgggaccagctctccagcgacccgctctacgacgtcgagtggaccaacggcacctcctacttcttcgactccgggtcctgccgcaccatgcgtttccccgtggggatcctgccgctgact

SEQ ID NO: 8835 - DNA, 204 bp, Zea mays
  Clone ID: LIB3137-052-Q1-K1-B6
actctgctcgcctgaaaaagttgagcatcaacatctccaaggtcttgtttgaagatgtcgactagcaaccatgtatatattagagctccaattccagtgtatctcttgactcttgtgcatgcaccgtgaaggtgtcatgtgatgatgttgtgcctagcttttctctttacgatatgtaatcagtttaaaaaaaaaaagaatgaa

SEQ ID NO: 8836 - DNA, 301 bp, Zea mays
  unsure (1)..(301): unsure at all n locations; Clone ID: LIB3137-052-Q1-K1-B7
gcaggcangccagccggcaacattgttgcctactgccgtcctctgcttccaacaatctccgtcagcattgatccgcccgcccctccctccaccagcagcagcaatccgtttttcaccgtgcctttccactcaccaccagccgccggcccccaggccacaggcccaagccaagccgcgcggcgtcactcccaaaccctagctcgcccacagtcgccggtgatgtcgtccccttcgtcgtcccctgcgcggaggcgggaggtgggggagggcggcgagctccccgtacccgagcccgtgcccg

SEQ ID NO: 8837 - DNA, 308 bp, Zea mays
  Clone ID: LIB3137-052-Q1-K1-B8
cggccggcggccacctcaacacgcgcatgctcgccttcaacgggccacttacgttctacctcgaaaccgggtacgtggaggtggacgagcatcatggtgtgcagctattctactacttcgtgcgctcggagcgcgacccctacgaagacccactgctgctgacctctgaacaactgaccaaacaaccccggcatttactaccttggctacgggctaagacccttgaaattatatacccttgggcaaagtgacattcccactcttttttaccaacctgagacatggaccaatgtgagcaacattatatt

SEQ ID NO: 8838 - DNA, 184 bp, Zea mays
  unsure (1)..(184): unsure at all n locations; Clone ID: LIB3137-052-Q1-K1-C1
acacgcgcgcacacacacatggcgtcgcagcagaagcaacancangcgggagcggcggcggcggcgtcctccgccgtgggcttcgaggactacctgccggtgatggcggaccggctgggcgaggacgggctgatgcgggagctggcgagcgggttccggctgctgatggacccggcgcgcgggc

SEQ ID NO: 8839 - DNA, 181 bp, Zea mays
  Clone ID: LIB3137-052-Q1-K1-C2
ataaggatagggacagggacagggatcgggacagagacaaggatcgccaaagtaagcatcaccgtgaaagacgggaacagcgagaccgtcctgatgatcacagaatccgtgattctgaaagaagaagagaacgcgacaaagatgggcatcgtaagcatcgttctcggtctcgttcaagggt

SEQ ID NO: 8840 - DNA, 337 bp, Zea mays
  unsure (1)..(337): unsure at all n locations; Clone ID: LIB3137-052-Q1-K1-C3
aaattactcgcaaagcagcgtccacgggtcaagggccagtttgttcgtcaagatcatagcatccaaggaagctagggtccagttactgagctggaactctattctattatctaaaaaaagtcactgcaagtgactccactgcggtctgcgggtatcctgatgtcagattttgccgaagagttggaagcagtcacactgagttacagtttgctctgtatatttgctgaagtttgtaatatatgtatgtataggctaacgctgttctttcctaagttaggcacangacctggcacgtttgaaagtttgtcagtaggcgttagaaaatacaggcatactt

SEQ ID NO: 8841 - DNA, 448 bp, Zea mays
  Clone ID: LIB3137-052-Q1-K1-C4
cgcgaggcgaggatgaactttcggccgggggggtgggggcccgccctccccgaggccatcggcgaacccgccgcctcttgcctccagaaggccaacttctgccccctcggcggctgctcgcgctcctggcgcagagcctgcgacgctgactgcatctgggagcgcctcttccgctgccgctggccatctgccgtggcgtcggcgtcccctgtgcagggatggaaagctctctacatcagccagcacagaagaatggctgttgcaatatctaatgtggttgaatttgtgggcagcagcttaaataatgagtcacttgaatccgaatactatctgaaagctattgctgatttggccttgatacctgatataggattcctcgatgtccagtttttcttggtctcaaagaatcatagtgcgataatcaacccttatggactgcactactcga

SEQ ID NO: 8842 - DNA, 256 bp, Zea mays
  Clone ID: LIB3137-052-Q1-K1-C6
aaagggctggaaagcccccctcttttgtcctggccgtgcaactcggctcctgccctgccatcttgctttccaagacccctgcgcccccagtcccataattagttaggattaggatcaccaccatttccaaatccttgcagacctgccgaagcgcggatcacagatgaagaggcaatccaagatgcccaccgccagccgcgaatccccagaaacaggggagaagcataagcttgcgttcgcggaggaagaggcccct

SEQ ID NO: 8843 - DNA, 409 bp, Zea mays
  Clone ID: LIB3137-052-Q1-K1-C7
cgcgaccgccgggaccaaaaacactcctaaaaaatttttaccagaggaactagcggaccaggctcgtccgttttgaaaccgcgaagggcttacctaacctacttttcccagatcgacactgtgccgctcgtgccctccactcccggtccgcccaaccaataatccatccatccattcaccaccaccaccccgctgctgcgatgtgcggtggcgccatcctctagggtttcatcccgcacgccgtggtggcggaggctgcggccgcggccaataagaatcagtagcagcggtgcccggtgactgcggacctgctatggccggggcccggcactaaagaagcttcccaagaccagtaagaggacttcgagggcgacttccccgagttcgagcgcggccttggcgaggatga

SEQ ID NO: 8844 - DNA, 381 bp, Zea mays
  unsure (1)..(381): unsure at all n locations; Clone ID: LIB3137-052-Q1-K1-C8
cgcgtacggcggggacaaacatcaattgtggcaagangttaatggcccgagcggaggcggccatactcgtcgtttttcaactcatggcggccccacccacagccatggccgcccgctcgccgcacggagcacgaccggatggctccctcgccacgacgcccaacgagactatgctgtcggccacgctgtgctacacgggggagacatgcaaatacattggctgcctcactcctgcttgctcacacaactatattgaacgactatgctacatcatatttactactgtagcttgaagccattccgaaaaaccacaactctggcatgcatgcgacaaccctgactcgagagcttctgatcaagtgatgcatgttttaaagcatc

SEQ ID NO: 8845 - DNA, 392 bp, Zea mays
  unsure (1)..(392): unsure at all n locations; Clone ID: LIB3137-052-Q1-K1-C9
gcgaacgatggctatctnancaagcctcaatgctcgttctgtacaaaactgcaaacagatggtgctgtttgctttaaggtgccagcgggcanatcaaatcaatcctgttccatctcaatggtgctttgaggatgaaggtctttcattatcaatagacacggaacgtctcgattagactccttctttatctaggaagaagtataacgtggcaccttcacgctcaagtcagtggcactatggtcctcaaaccgcactgttcttaaggagacccgactatggtgatgagatcccgtcactctctcttcactatgggtaccgagataggacccgattgcgttctggtaattggtgccatgatgcttatgctcatataccgtcaagataccatcaag

SEQ ID NO: 8846 - DNA, 72 bp, Zea mays
  Clone ID: LIB3137-052-Q1-K1-D1
cggtcttgaattcccgggtcggcccacgccttcggactacagatagtacattactgggcgctgatcttattc

SEQ ID NO: 8847 - DNA, 327 bp, Zea mays
  Clone ID: LIB3137-052-Q1-K1-D2
ccgatcactcgtcaaccatggcggcggcagcaagcggaggaacggtgcgtgctctgtcccagaaagagcaagacatacagatgatgctcgccgccgacgtccaccttggcaccaagaactgcgatttccagacggagcgctatgtctttaagcgccgttccgacggcatctacatcatcaatcttggcaagacatgggataaactccagcttgcagcgagggttatcgttgccatcgagaacccgcaggacatcatcgtccagtctgcccgcccatatggccagcgtgctgtcctcaagttcgctcagtacactggcgcccatgcca

SEQ ID NO: 8848 - DNA, 302 bp, Zea mays
  unsure (1)..(302): unsure at all n locations; Clone ID: LIB3137-052-Q1-K1-D3
atctttgcttctgtggactcatatatgaatctccagcttgccaacactgaggagtacattgatggtcaattctctggaaacctgngagagattctgatcaggtgcaacaacgtcatgtatctccgaggcgttccagaggatgcagagatagaggatgcagagtgagaagatgcgatcaatgttagattgataaatgtaatatggttctgacatctatgttcgaatatgccggtgacaagtagatctatcggatcgctttgttctcttgagtgatgaaacatgatggcggtcgggctaaaggt

SEQ ID NO: 8849 - DNA, 397 bp, Zea mays
  Clone ID: LIB3137-052-Q1-K1-D4
gaagcaggcaggactacagacatagcctctgtcgtacttgttcgaaagagcttggcatggattacagggatcatcctgcttgtttcaactctcataggggtttgcttgcttatgaacatgccacttaccagggacaccctcctgtactcgaatgttaagatcgattagtttgaaggggtgttcgcggcagctactcttggggttcaactttggccttgtgtatttatgggatggatttcagatagtagagacgtatgcttgtgctgttcacaaaaccagtgtacaatgtgatactaggtgctacgtgcctttttttttaatctgtgctgcactcttgcctgtatgggcttgtttgttgttgggttccggtaaataatccagaacagtggcacaaacg

SEQ ID NO: 8850 - DNA, 311 bp, Zea mays
  Clone ID: LIB3137-052-Q1-K1-D5
aagacaactaccgcaaactttcaagactacagagctacccacaaacaaactagaaccaaacaacttggcctgcattacacggatcatgactgaatcttccaactataataatggtaactcttgattatgaacatactacttaccacctacaccctcccatactcgaatgctaagatctattagtccgaaggaactgatcgcggaacatactcttggggatcaactgtggccttatgtatatatggaacggatttcaaataggagagacatatgcttgtgctcgacacaaaaccactgtacaatatgatact

SEQ ID NO: 8851 - DNA, 374 bp, Zea mays
  Clone ID: LIB3137-052-Q1-K1-D6
catttgatgtcaagaaggaggctccaaaggaggcccccaagccaaaggtggttgaggcaccagcagaagatgaagcaccaaagccaaagccaaagaatcctcttgacttgctgccaccaagcaagatggtccttgatgactggaagaggctatactcaaacacaaagactaacttccgggaggttgccatcaaaggtttctgggacatgtacgacccagagggctactctttgtggttctgtgactacaagtacaatgatgagaacaccgtctcctttgtgaccctgaacaacgttggtggattcctgcaacggatggacctgtgccccaagtacgccttttggaagatgcttgtgatagctcttagccaccct

SEQ ID NO: 8852 - DNA, 214 bp, Zea mays
  Clone ID: LIB3137-052-Q1-K1-D7
acgcgccgcggggtttcagtttggcacctccaatctttctccgaatctctgcacctccaactcgtccatcttgactggcgatggcggccgacaaaccgccgagcagttccggggccaggcgcggctgccccactttgcgtccccgcggcgctacgacctgcgcctcacgctctacctcacaacctgcatcataactagataatgctcggcttcc

SEQ ID NO: 8853 - DNA, 105 bp, Zea mays
  unsure (1)..(105): unsure at all n locations; Clone ID: LIB3137-052-Q1-K1-D8
aaaaaaaacggaccgacgcaaacaaagcgaaccaaaacaaattacaaaaaatnttttataacaaannaccaaacacccaaccccgccaaattaaaaagggaacgg

SEQ ID NO: 8854 - DNA, 337 bp, Zea mays
  Clone ID: LIB3137-052-Q1-K1-E1
atggcggggaggactaaacatcccactaacaactgcgccctcatcgcaatcatcgccgacgaggacaccgtcactggcttcttgatggccggcgttggcaatgttgatctgcgcaagaaaaccaattacctcctcgtcgacaacaagacgacagttaaacaaatcgaggacgcgttcaaagaatttactgcaagggaggatattgctattgtgctcatcagtcagtatattgccaacatgataagatttctggtggatagctacaacaagccagtccctgctattctggaaatcccatccaaggaccatccatatgatccagcgcacgactcggggc

SEQ ID NO: 8855 - DNA, 425 bp, Zea mays
  unsure (1)..(425): unsure at all n locations; Clone ID: LIB3137-052-Q1-K1-E10
ggcaccttaatgctcttctacaccgnttttttcgccaccgaccccaagcgcaacgccgtggacttctacgtgccgggggtggctcccctccccatcggcttcgccgtgttcatggagcacctggccaccatccccgtcaccggcaccggcatcaacccggccaggagcctgggcgccgccgtcatctacaacaaggacaagccctgggacgaccactggatcttctgggtgggccccctcgtgggcgctgccatcgcggccttctaccaccagtacatcctccgggctggcgccatcaaggcccgcggctgcttcatgagcaacgcgtgatgagcggggcttggctgtggagcaatggcgggcgacctacgggcggtgggccgtgagctaggagaatgccattattcatcgatcgacttgggtgc

SEQ ID NO: 8856 - DNA, 241 bp, Zea mays
  unsure (1)..(241): unsure at all n locations; Clone ID: LIB3137-052-Q1-K1-E11
aaaaacggaaaaaaaaaataaaaacacaaattgaatcaacaccgacacaaaacacaacactcgcaaattttaaaagcctgcgcggcacaccaatanaaaacaactctatctaatacaccaatcaccaagcccatcaaaaaattcaacaaaacccacatcaaccacaccattaaccaatgcaccgcccccaactaatacaaccacaaaacccataaacaccactcaaccttctcacaattcc

SEQ ID NO: 8857 - DNA, 439 bp, Zea mays
  unsure (1)..(439): unsure at all n locations; Clone ID: LIB3137-052-Q1-K1-E2
gaaaaaagaagcaagcccaccaggccggttaaaaaaggaaccaaaaaaggaaggaaggagggaaggaaggaaaagaagaacaaaggaggcaaggggtgaaacgccgtcctggggctgcttcaagcaagtggggctggcgctggtgctcgccgtctacctccccgtggcctntgtgtgccgactactacaccgcctnctcgtctgccccttcgccaggggcgaggacctccgcggcaaggtcatcctcgtcaccggcgcgtcctccggcatcggcgagcacctggtgtacgagtacgcgaggcacggcgcgtgcgtggcgctggtggcgcgcacggaggtggcgctgcgcgccgtggccaatgcggcgcgcgacctgngcgcccccgacgtgctggtcgtgccggccgacgtcaccaatgtcgacgacgccaagcgcgcc

SEQ ID NO: 8858 - DNA, 392 bp, Zea mays
  Clone ID: LIB3137-052-Q1-K1-E4
aggaaatatgcctcgctatgatgatcgctatggaggcacgcgcttgtatgttggcagattggccccccgtactcgttctcgtgatttagaatatctcttcggcaaatatggaaggtttttcggtttttaccgggaggtctttggtggaagggtgcccttggtggacctggtgaccatttggtgaagggtgcccttggtgtaatgttattgactgttttagtggaagttccaagctggtgatgcatttgagtacttgactcatgaaggcttactgtttgtggcaaccctttccgcagaatacgagaagtggagttgaagcgcgactatgcatttattgagttcagtgaacatcgtgatgccgatgaagctcggtaccaactagatggcaggga

SEQ ID NO: 8859 - DNA, 253 bp, Zea mays
  Clone ID: LIB3137-052-Q1-K1-E6
atatggacaaaatcagccttccacttggaataattcagaggataacaaaccatctgtaggtgaacaaggtgatccttgggcaagcaaggtgtcttctactgaaggtaaaggacaacagaatgattcttggtcaagtaagatgacttctcgtggaactgaggataccaacggtggctgggacagcaaggagaaaggctctttctgcaatgatgggggtgaaggactacaaaatgatccatgggcatacaagatt

SEQ ID NO: 8860 - DNA, 140 bp, Zea mays
  Clone ID: LIB3137-052-Q1-K1-E7
ctgctcggcaggagaatgcaacccccgtggttcaccagctttcgtaatttcttaatttgggggtaacagtaaaaactttgttgtattgcttatcaacgtttgaagaaaaaccgtgagatataccggatgtatccagcttc

SEQ ID NO: 8861 - DNA, 420 bp, Zea mays
  unsure (1)..(420): unsure at all n locations; Clone ID: LIB3137-052-Q1-K1-E9
atcggcaccttcgtgctcgtctacaccgtcttctccgccaccgaccccaagcgcaacgcccgcgactcccacgtcccggttctggctcccctccccatcggcttcgccgtgttcatggtgcacctggccaccatccccgtcaccggcaccggcatcaacccggccaggagcctgggcgccgccgtcatctacaacaaggacaagccctgggacgaccactggatcttctgggtgggccccctcgtgggcgctgccatcgcggccttctaccaccagtacatcctccgggctggcgccatcaaggccctcggctccttcaggagcaacgcgtgatgagcggngcttggctgtggagcaatggcgggcgacctacgggcgtggggccgtgagcgaggagaatgccatcattcatcgatcgac

SEQ ID NO: 8862 - DNA, 280 bp, Zea mays
  Clone ID: LIB3137-052-Q1-K1-F2
atttgaatttgccatttgtgaagaaagttattaatcacagggctctggctggtggttcttggtggggtcctgtcaacaaatttgtgactgtgcttaaaccgtttgcaaaggtatttgctgatcgacgataatttggaacaggtattgtagaatcattcactgataccttattattagtgaagccccatatatgtgataatgctctgatacattcaatgtgtgcatgacaagcagaccaatttgaaggatattgatttgctcagaatgcattcatcttttg

SEQ ID NO: 8863 - DNA, 291 bp, Zea mays
  Clone ID: LIB3137-052-Q1-K1-F3
cttttgtgcgctgcaaataccaccggacgcgagacagcgaggcgcgagaagccaggcgcaagctccgcgccctcatcgccgagaagagctgcgcgcccatgatgctccgcctggcgtggcactccgcggggacgttcgacgtgtcgtcgaggaccggcggtcccttcggtactatgaagtgcccggcggaactggctcacggacgccaacgcggggcctggaacatcgcggagcggttgctcgagcccatcaaggaggagttccccaccctattctatgccgatttctacc

SEQ ID NO: 8864 - DNA, 432 bp, Zea mays
  Clone ID: LIB3137-052-Q1-K1-F4
ggagggaccctacttcccgaaactgggcggacgttgacctgtccctccggaacatctgcgccagggccaagggcgtcagcaagcggtgggacagcctcttcaacgagctgctgtccgagtacgcgctctccggcggcaagcagggcgaccacaactctgaagacttcgtgcacctcttgctgtcgctgcagaaagactacggtctcaccacggataacatcaagggcatacttgtgaacatgttcgaagcagccatcgagacatcattcctggtgctggagtactccatgagcgagctgatgaacaaccgccacgtcctggccaagctccagaaggaggtgaggacggcgacgcccgacggccgcatggtgatggaggaagacctgagccggatgccatacctgaaggccaccatcaaggagtccatgcgca

SEQ ID NO: 8865 - DNA, 388 bp, Zea mays
  Clone ID: LIB3137-052-Q1-K1-F5
ggcccaggcaatcgttcaaccgctattacttcttcccaatttcctccggatcaatccgacccgaaaccctagtccagccagatctccgccgccgccggcgagagcacggcatcagatccgccgcgatggcgttccgccgcatcttatccacagcggtgcgccgccgctcggccatcgccgcggcagcggccgggaacgcgcgcgaggcctccacggccgtcgccgcggcgcccggcgtgctagcccccgacgcggccccggtgcgcgctcccgtgatgccgtacgatcgcatcgccgaagccgttaacgccaggctccggcggctggagcacccagacccgcgcttcctccgctatgcaagccccgtgccgtcccacgccgaccacac

SEQ ID NO: 8866 - DNA, 423 bp, Zea mays
  Clone ID: LIB3137-052-Q1-K1-F6
cctcctcccaatctccgctttccacgccgcatgcgcggtaaggtagacatggcttcgacattcggtgccacttctactgtcggccttatggctgctccaacagggaagaatgtgcgccttcagaggagggtgaacttcagagtaagagcagctaaggagctgtacttcaacaaggatggctcagctatcaagaagctccagactggagtcaataagcttgcagacctagtcggagttacactcggaccaaagggaaggaatgttgttttggagagcaagtatggttctcctaaaattgttaacgatggtgttacagttgccagagaggttgagctggaggaccctgtggagaacattggtgctaaattggtcaggcaagcagcagctaagaccaatgatctagctggagatgggacaaccacc

SEQ ID NO: 8867 - DNA, 444 bp, Zea mays
  Clone ID: LIB3137-052-Q1-K1-F7
acaagatggactcccgcagccttgctgtggtatttgcgcctttgatcatgtggcggcaaggtgacactggcacagatttgcgtaaccacctcaagtttaccctgaaaccgcctccaaaaattgtggatacaacatcaaatgctgccacatgggacctgttagatgaggatgacgaggatgcttcatcccagatccccttagacgatgcttcaccaccagactacagctccattgaggttatccagtgtctgatcgagcatcacaatgccatcttcaccgacgcaaatgaaaccgtgtggagatgatcggcatctcctctagatctctcttgtgttagatcgtgctattgtacaagttccaggtaggaaggtgggaaggtggattagcgctcgctattgttagggataagcatttgggccgaaatattttgaagtaggttgatat

SEQ ID NO: 8868 - DNA, 437 bp, Zea mays
  Clone ID: LIB3137-052-Q1-K1-F8
cgcgtacgacaggatggactcccgttttcttgctgtggtttttgcgcctaagatcatgtggcggcagtgtgacatttgcacagatttgcgtcaccacctaaagtttaccctgaaaccgcctccaaaaattgtggatacaacatcaaatgctgccacatgggacctgttagatgaggatgacgaggatgcttcatcccagatccccttagacgatgcttcaccaccagactacagctccattgaggatatccagtgtctgatcgagcatcacaatgccatcttcaccgacgcaaatgaaaccgtgtggagatgatcggcgtctgctctagatctctctggtgttagatcgtgctattgtacaagttccaggtatgaaggtgggaaaggtggattagcgctcgctattgttagggattagcattttggccgaatatttt

SEQ ID NO: 8869 - DNA, 331 bp, Zea mays
  unsure (1)..(331): unsure at all n locations; Clone ID: LIB3137-052-Q1-K1-G1
gccctgtccttggcaggcggtccaccggcgggccggttccttcttctggcttttctggtcgggcttctnctcgggggctactcgctcccaagcgactcaacaacgcgcccgtcctncaactccaacccacggcctgccttcacgccgccgctgctgaagcgccaccagctgcggcgcccgagcagcagcagcgccgagctcgtcgccgggcccgccaacgcgtcgaccaagcccttcacggcgcactacttcccgcagctgctcgaccacttcgccttcacgcccaacgcgtccacggtcttncgccacaagtacctnctcaacgacacct

SEQ ID NO: 8870 - DNA, 347 bp, Zea mays
  Clone ID: LIB3137-052-Q1-K1-G12
acagccaagaccaggtctcgttgggttatctggtagttcaaaaccaccacttcatcgaagccactcacgagcctggcttcacctttctactggcaaaattcgacggcatcctcgggcttgcatttcaggaaatttcagttgaaggttcacttccagtatggtacaatatggtgaaccaaaacctagtggcgcagcctgttttctccttctggttaaaccggaacccattcgacggggaaaggggcgaaattgtgtttcgaggttctgacgaacagcattacaaacgaagccatacgtacaccagggtcacttggaaaggctactggcaatttgaaatgggtgacttt

SEQ ID NO: 8871 - DNA, 277 bp, Zea mays
  unsure (1)..(277): unsure at all n locations; Clone ID: LIB3137-052-Q1-K1-G2
atcaccggcaacaccaacacgctggccgggaacatcccgcccaaggccgggctgggcgacctccgcggcctcgcggcggggctgcgcggccagaacggctctgccatgatcgacggctccgagagcttcgacggcgccaaggcgtacaaggacagcaagatctgcaacatgctcaccatgcangagctgcaccggcggtaccacgaggagacgggcatcacgttcgcgtcgctctacccggngtgcatcgccaccacggggctgttccgcgagcaca

SEQ ID NO: 8872 - DNA, 323 bp, Zea mays
  Clone ID: LIB3137-052-Q1-K1-G3
tatgcacggcgacgcccgccaaataagcgcgcgaagaggccgtcgaggatctcgtgcagggcgtccggcgatgacaaggacaaggtcccgtcgtcgggagggagcgatcttggggtcaagcagctcgggaagctggctatggtcgcgctggccgccggcgtgctggtgctcggccccgtcgacggtgccgtggcggccaagtccggcggcagggtcggcgggcaggcgttccggtccgcgccccggtcgtccggccctcggatcaacaactccaggaccaacatctacatcaacccgccggtggcgccgccgctgggcggata

SEQ ID NO: 8873 - DNA, 415 bp, Zea mays
  unsure (1)..(415): unsure at all n locations; Clone ID: LIB3137-052-Q1-K1-G4
acccacgcgtacgcgcgcgtngtgcttcccttccccccgccccgttggccccaccggaccgagggggactgcccagcccctattgggagtgggagactaggaggaaggccccgagatccggcggcggccaccccgatgggggacttcaacgtcgcgctggtgatcgtggcggcggtggtcaacgtgctggtgctgctcgtcagcgtctacctgctcgtcaactaccatcaccccgacgacgtcaaccaggcctacttacccaagctcgtcgtcgtgctcggcctcaccgtcgccgtcctctcaatcctcatgctccctgccgacgtcgccaatcgccaggcctgccgcaaggccgtctacaacggcgcctgcagtctcacgctccccatgaagacgctctggctcgtcgtctaca

SEQ ID NO: 8874 - DNA, 431 bp, Zea mays
  unsure (1)..(431): unsure at all n locations; Clone ID: LIB3137-052-Q1-K1-G9
cgggggctttttgctgccagcagatcgtggtggttaacaagcccgaccccaacgncgcgcgggaggatggcgcgcaattcgccatccatctgaccgggatcaaggagaacaccaagttccagaccaagcccgacggcgactgcgacggagagcaggcggcgggcggacttaagcgactggtggccgagaccaaggacgcgcacggcgtgaaacaggagtacaagtggcacgccatggcccggtactgaggcggcgtgacgccgacagcggggacagcgatggagcgctacgagccggcgctggcgtaccccgtgcagtccccgggcgtgacgggcaaccagccggacatcgtcatggactcgctatccgtactggggctgggcctggtgcacccgcgccgggtgcgagacttctacggcgagctccacgcg

SEQ ID NO: 8875 - DNA, 206 bp, Zea mays
  Clone ID: LIB3137-052-Q1-K1-H10
aagcggtcgacggaggacttctccggcgtgccctacaacatgacgctgctcaactgcctactatcggcttggtacggcctgccgttcgtgtccccgaacaacatcctggtgtcgacgatcaacgggacggggtcggtgatcgaagccatctacgtggtgatcttcctcatcttcgcggtggaccggcgggccaagctcaacatgct

SEQ ID NO: 8876 - DNA, 373 bp, Zea mays
  Clone ID: LIB3137-052-Q1-K1-H12
ggggggcaaaaaaggggggggggggaaaaaaaaaaaaaaccgggagggggcggggccgggagggaggggaggggggagggggggaggaggggggccggggggggggtggaaggggggggaggaggagggggggggggagaacagggggagggggagaggacaggaggggaggagaaaggggggggggggggcgggggaggggggggggggggggggaggggagggggagggaggggggggggagggagaggggggggggggaggaggggagggaggggggaggggggggcggggggggcggggggggaaggagggggagggagggaggggggggggcgaggagggggggaggggggaggggaggggagggggg

SEQ ID NO: 8877 - DNA, 381 bp, Zea mays
  unsure (1)..(381): unsure at all n locations; Clone ID: LIB3137-052-Q1-K1-H4
aaaaaccggcccgaccgacgcgtacgcttacataaacatcggctggagtaagtactttctagttatggnggatgattattctcgcggggcttgtgtgttctttttgcaggacaaatctcatacccaagaaaccttaaagggattcttgagacgggctcaaaatgagttcggcttaaggatcaagaaaattagaagcgacaatgggacggagttcaagaactctcaaattgaaggcttccttgaggaggagggcatcaagcatgagttttcttctccctacactccacaacaaaatggtgtagtggagaggaagaatcgaaccctattggacatggctagaaccatgcttgatgagtacaagacaccgaaccggttttgggc

SEQ ID NO: 8878 - DNA, 241 bp, Zea mays
  Clone ID: LIB3137-052-Q1-K1-H5
caaaagtccaacccacccactacactttaattgctgtgttgactgcctataaaaactcaggtcttgttgaggagggaatgggcctgcttaagtgcatgaaagagcagtatggtctggagccatttatagagcatgtttcatgtgttgttgatatgctctgtcgtactggacgcttgagtgatgcatatcaccttatccagagttcccactctgaacatgcaaaaaaccctatattgtgggg

SEQ ID NO: 8879 - DNA, 420 bp, Zea mays
  Clone ID: LIB3137-052-Q1-K1-H7
ggctccactacggcccactccacgtcactgtttttcgcacgcgccccacggcttccgccggggcctatccctagaatcttcgagaagcacccggcgaagagcgcgctgccacggcgctttccggaaacttcttggagagagagagagagacggccccgcagcggcggaggcggagatgggggcgtcggatctagaccggcagatcgagcagctgaagcggtgcgagccgctcacggaggcggaggtcaaggcactgtgcctcaaggccatggaaatcctcatcgaggagagtaacgtgcaacgcgtcgacgcccccgtcaccatttgtggagacatacatggacagttctatgacatgaaggagctgttcaaagttggaggtgactgcccaaagacaaactatttgttccttggggattt

SEQ ID NO: 8880 - DNA, 429 bp, Zea mays
  unsure (1)..(429): unsure at all n locations; Clone ID: LIB3137-052-Q1-K1-H8
acccacgcgaccgntagggttttaaagatttttgaaatgaannttttttatcgnggaggagcagatattgagcgcggcctttttatggtggttggtgctgcacactttcttattcgatgccttgaccttgaacggtttgttcttcatgtagagaaggagtttgaacctttgattcagaagccatatacaagggtatatttccactccgcagcatcattacaaccgcaaccagatttaggatttatgaagcggttacaacaaatactaggacggaaacatcagcgcaaccttcatgcaatttatgtactccacccaacgttgggtttgagaacagctgttttggcaatgcaaatgtttgtagatggagaggtacctcctagttcagacatttcttcactgtggcttatgaaaatctagcatccttttttc

SEQ ID NO: 8881 - DNA, 428 bp, Zea mays
  unsure (1)..(428): unsure at all n locations; Clone ID: LIB3137-052-Q1-K1-H9
ccgaccgacgcgtccgctctaagtgctatctaatctacaatctaccttcagacactgtcgtcagtcgtccctcatcgaccgcgcgcgcgcgacttcaagcatcanactaccataatcatggctccgccgccggcaatgcagagcccaggagagctaaacgacggcgcctacgacgcgccgcacatcctattcatcccgagcgccggcataggacacctgacccccgtcttccgcgtcatcgccggcttctcgagccggggcatcgacgtctccgtcgtgaccgtgctgcccaccgtgtctgccgccgagactgactacttcaacggcctcttcgcagattaccccgccgtccgccgcgtcgacatgcacctattgccgctggacgcctccgaattcacgagagaggacccgttcttcctccggtggga

SEQ ID NO: 8882 - DNA, 389 bp, Zea mays
  Clone ID: LIB3137-053-Q1-K1-A10
gggggaaaatggctccgcttcgggccggtgccatgaaccacgctgcagcccatcctggccttaggagccacctagtaggacccaacaatgagagtttctcacggcaccacctgccgtcttcttctccacagagcagcaagcgaaggtgtaaccttagctttactacacgatctgcaagagtaggcagccaaaatggagtccaaatgttgagcccctcggaaatcccacaaagggactggttcccctctgacttcaccttcggtgccgccacttcagcgtaccaaattgaaggtgcttggaatgaagatggaaagggggaaaagaactgggatcacttctgccacaatcattcggaaaggatactggacgggagcaattcagacatttga

SEQ ID NO: 8883 - DNA, 441 bp, Zea mays
  Clone ID: LIB3137-053-Q1-K1-A11
cgtcgcgtcgcggattacggaggaaccctctaggctccggttccggaaacagcgggcgccagtcccggtcgaggaggccggctcagatccgagtacggcggcggcggcgagatgactggtggcggcccggccgcggcgtcgcaggcgtacggcgaggcatggtactgggacgagcgctaccgcaaggaggccgggcccttcgactggtaccagaagtacccggccctggcgccgctgctccgcctctacctcgcgccgcaccaacgcctcctcctcgttggctgcggcaactccgtctttggtgagaacatgattgacgatggttatcaagatgttgtcaacattgatatatcttctgtggtaattgagcaaatgaagaagaaataccacgataagcctcaacttaaatacatgaagatggatgtaaagaacatgtcagat

SEQ ID NO: 8884 - DNA, 445 bp, Zea mays
  Clone ID: LIB3137-053-Q1-K1-A12
atggaggcgaagaagaagccgtcggcccccgtcgccgtcggagccgcgccgccgcctccgggtaacgggtacttcagcaccgtcttctccgcgccgactgcgggaagcgcaagtgacgcaaagcatgcggacttgtacacgatgctgaacaagcagagctccagagggcagaatggcagagatggcaaatcccacagccgccctacttacaaggatggcaaacatgcccatccaaatgagccatcagaatctccttactttggctcatccgtgcattacggtggtcgggagttctacagcagcgttttacggaagcaaccagccaatgaaccccatacggattacaagggggacaacccggatggctctgctaccagaggtgattggtggcaaggttcactttattactgaataatctgctgggacctctcccttttgtgaacaa

SEQ ID NO: 8885 - DNA, 388 bp, Zea mays
  Clone ID: LIB3137-053-Q1-K1-A2
ccaatccagccgccaccaggtgcaaagtctttcgtcatctcttctccggcgaagaacccccagtcgcccaccagatcacttgttaaactttgttgaggggtgatggcggtttctttcgcaaacctcaactccgaggcagggcttaaaaagcttgatgagtaccttctcactcgcagctacatcactggctaccaagcttccaaggatgacttggctgtctacacttcgttttcggctgctccctcgtccaagtatatcaacgtagcaaggtggtttaaccacattgatgcgctcgtgaggctgagcggaattactgcagagggccaaggtgtgaaggttgaatcctcagcagttccttcagccccaactccagatgttgctgaagcac

SEQ ID NO: 8886 - DNA, 415 bp, Zea mays
  Clone ID: LIB3137-053-Q1-K1-A3
ctcaagcaaatacaagctctcagttagacaacactcaaaccagccacggacagcctcaaaatcccgagcaggagctcgctcgtagccccgagaacccgaaatctctgcagcgagatgtctcccgagctgaccggcaagatggccgccaaggccgccgccgccgctgcggcggtgaagcccgcgacgagggcgtacgtgacgttactggcgggcgacggcaactactggaagggcgtggtgggcctggccaagggcctgcgcaaggtcggctcggcctatcccctggaggtggcccttctgcccgacgtgccggagtcccaccgtcgcatcctcgtctcgcagggctgcattctccgcgagatcgagcccgtgtatccggccgagaaccagatacagttccgcatggcgtactacg

SEQ ID NO: 8887 - DNA, 416 bp, Zea mays
  unsure (1)..(416): unsure at all n locations; Clone ID: LIB3137-053-Q1-K1-A4
ctctgttccgccgnctcgtcaccacactctattaaaccccacccgcgcgcgcggcggggccgctggattcctcacccatgcgagcaagccnannaggaagcgagcgcgcgaaagtatcaggaggaggcatgggtaccctggggcgcgcgatcttcacggtgggcaagtggatccggggcacggggcaggccatggaccgcctcggatccaccatccagggcggcctccgcgtcgaggaacaggtttcaaggcatcgtacaatcatgaatatttttgagaaagagccaaggatccatacagatgtgtttgttgctcccagtgcagcaagcattggggatgttgagattgggcatggatcgtcaatttggtaccgattcatattggaaagggaagtgaacagcattcatattggatct

SEQ ID NO: 8888 - DNA, 389 bp, Zea mays
  unsure (1)..(389): unsure at all n locations; Clone ID: LIB3137-053-Q1-K1-A5
ccagcgcaccattcnagctttctttacctcgccggcaccggcgatggccgcccgctactgttcggacagggcggggcccgccaccacggttggggggagacgcgcgccccgctcgcgcccatacctcccaaccctaaccccagccagccccacccacgcgccgacgggtccaagtccaagccgcgggcggcagcctcctcgccggcggccggatacgtgacgttccgcccggcgtccctgggcccgctcgaggcccgcgcgctccgggaccgcctcgcgggggagctcacccaggtgcgcgccctccctctccgcatcgacacctggcagcagcagggcccgccgcccgcgaggctccgcggcgagatgcggaagcggtgcgggcagat

SEQ ID NO: 8889 - DNA, 374 bp, Zea mays
  unsure (1)..(374): unsure at all n locations; Clone ID: LIB3137-053-Q1-K1-A6
ccgggccggccgacgcgttcgatgatgtaagcactgggattnggattttattttccatcccactgccactgcatctcgcgggctcacattttccgagggccaggcaaagcatatgctggtgggtctgctgtgcaaaaatgcagcgacctgcatctgcatatgggagttgcagaagatgactctcctctggaaggaggtggacagaatgccaaatctctggtgcttagagttctacggtaagcacatgaatatgaaatgcctgggcaacagtggtttgctcatgctctccttgaaggcgaagcatatgaaccgccttgttacatacaacctttcgaaaaaggaatgatataatgttcctgattgcatgctaccat

SEQ ID NO: 8890 - DNA, 195 bp, Zea mays
  Clone ID: LIB3137-053-Q1-K1-A7
caggcgatcctacacagattacctccacacatgcaacctagttattctatactgtacctaaatagctagccgaggcatcctcatagatgcttgctgactcaaattgatatccgatcacaatttcatacaacataccagacctccgaggcagggcttaaaactctggtgcctaacgagtgacactaactcacatta

SEQ ID NO: 8891 - DNA, 399 bp, Zea mays
  Clone ID: LIB3137-053-Q1-K1-A8
cacttgcatatacacgctttcaggtgcacatctctttttccagccacggaccgcgaaaaacggccgggcggccaccagatcacttggttaaccttggtgaagggtggtggccggttctttcccgaaccttaactccggcgcagcgcttaggacgctggatgcgctactgcttactagcccgggaataggtcggaagcaagcttccagggatgactaggctgtcaacactgggtcatggggtgcctgctcaatgaaatatataagggcgagctaggccgatcaaccacatgtatacgctctgccagctgagccggattactagcgacggacaatgtgtgaaagttgaatcctcagccgttagcatcagcccaactacacatgttgctgcaacacacgccc

SEQ ID NO: 8892 - DNA, 392 bp, Zea mays
  Clone ID: LIB3137-053-Q1-K1-A9
gccacatcgagaacacgatcgagcacacaagcacgaagactcgtttaggagaaaccacaaaccaccaagccgtgaaagcatcatggagtacggtcagcaggggcagcacggccacggcgccacgggccatgtcgaccagtacggcaacccagtcggcggcgtcgagcacggcaccggcggcatgaggcacggcacgggaaccggcggcatgggccagctgggtgagcacggcggcgctggcatgggtggcgggcagttccagcctgcgagggaggagcacaagaccggcggcatcctgcatcgctccggcagctccagctccagctcgtcggaggacgacggcatgggcggaaggaggaagagcggaatcaaggagaagatcaaagagaagc

SEQ ID NO: 8893 - DNA, 329 bp, Zea mays
  Clone ID: LIB3137-053-Q1-K1-B12
cccaatccaaaccagacatgcaaggaatccttcgatggctcatcgcgttctcctcctcctcgctctcgcgtcggccgccgcggttgccgccgccgtcgacgcggaggacccgctgatccggcaggtggttcccggtggagatgacaacgatctggagctgaacgcggagtcccacttcctgagcttcgtgcagcggttcggcaagtcctacaaggacgccgacgagcacgcgtaccggctgtccgttttcaaggccaacctgcgccgcgcgcgccggcaccagctgctggacccgtcggcggagcacggcgtcactaagttctccgacc

SEQ ID NO: 8894 - DNA, 315 bp, Zea mays
  Clone ID: LIB3137-053-Q1-K1-B2
gcggttgacacgatggagtcggttgccgtcgtggccgtgccgttcccggcgcagggccatctgaaccagctgctccacctgtcgctgctgctggcgtcgcgggggctgtccgtgcactacgcggcgcccccgccgcacgtccgccaggcgcgcgcgcgcgtgcacggctgggaccccagggcgctcggctccatccgcttccacgacctcgacgtcccaccgtacgactcccccgcgccggacctggccgcgccgtcgccgttcccgaaccacctcatgcccatgttcgaggccttcgccgccgcggcgcgcgcc

SEQ ID NO: 8895 - DNA, 397 bp, Zea mays
  Clone ID: LIB3137-053-Q1-K1-B3
atctcgccttccgaggaaactcaccatcccaccacagacccgagcggaagaagccatgtccgggcgcggtaagggtggcaaggggctcggcaagggcggcgcgaagcgtcaccggaaggtgctgcgcgacaacatccagggcatcaccaagccggcgatccggcggctggcgaggaggggcggcgtcaagcgcatctcggggctcatctacgaggagacccgcggcgtgctcaagatcttcctcgagaacgtcatccgcgacgccgtcacctacactgagcacgcccgccgcaagaccgtcaccgccatggacgtcgtctacgcgctcaagcgccagggccgcaccctctacggcttcggcggctaagctgatgggctcctcgcgatgttctcccct

SEQ ID NO: 8896 - DNA, 305 bp, Zea mays
  unsure (1)..(305): unsure at all n locations; Clone ID: LIB3137-053-Q1-K1-B5
gggccganccacgcgnncgcggactcccggngtccattgaanccttggtttatcctcccccctcgcctcctcgcgccccgttgggatcgtcggagaggaatcccaaagagggccgtctcatccgagttaaggaagccatggagcacaaggaggctgggtgccaggcccccgagggacccatcctctgcatcaataactgtggcttcttcggcagcgcggcgaccatgaacatgtgctccaagtgccacaaggagatgataacgaatcttgatcaggccaagctggttgccttctctatcgacagc

SEQ ID NO: 8897 - DNA, 364 bp, Zea mays
  Clone ID: LIB3137-053-Q1-K1-B7
caccacttgcgggggctgcttcctcctgcagttgtgcctcaagaactccaaattaagaagatcatgcacaacctgcggcagtaccaggtccctttgcagcgctatatggccatgatggaccttcaggagaggaacgagaggcttttctacaagcttttaattgataacgtggaggagctgcttcctgtggtttatacaccaactgtaggtgaggcctgccagaagtatgggtccatctttcgacaaccacagggtctgtatgtcagcttgagggacaaggggaaggtcctagaagttctaaggaactggccacataggaacattcaagttatctgtgttactgatggtgagcgaatcttgggac

SEQ ID NO: 8898 - DNA, 347 bp, Zea mays
  Clone ID: LIB3137-053-Q1-K1-B8
gaacgatggagcagaccttcatcatgatcaagcccgtcggcgtccagcggggcctgatcggggacatcatcagtcgcttcgagaagaaagggttctacctcaaggggatgaagttcatgaacgtggagaggtccttcgcgcagcagcactacgctgacctttccgacaagcctttcttccccgggttggtggagtacatcatttccggccccgtggtggcgatggtgtgggaggggaaggacgtcttgttgactggctccaagatcattggggccaccaggccttgggaggcagcccccggtaccattcgtggggactacgctcgggaagtcggcaggaatgtcatc

SEQ ID NO: 8899 - DNA, 411 bp, Zea mays
  unsure (1)..(411): unsure at all n locations; Clone ID: LIB3137-053-Q1-K1-B9
cgcgtccggtcctacgccgnggaatcttctcgtcncgcttcgttttctccgccctccagntctctcataggcacgcccccaactctgctgcttcccgcgcccgaggttcaaaattcgaatccagaaagacttccccaagcattttccgtttctttaaaccggcatcgtcctccctcgtgctagcctcgctcgttgcgcgttcaaatttcgaaccacctccgccttcgacgccccaaaccctagcccgacccctccttcttcacctgcgccaccgcccaccatgagcttcgaccgcgtgccagctgttcgtggaagcggcaaggagcttgccaacccgcccgccgacggaatcaccaaccttcgctttttcaaccacagcaacaacctccttcgtttcttatgggacaagac

SEQ ID NO: 8900 - DNA, 409 bp, Zea mays
  Clone ID: LIB3137-053-Q1-K1-C1
cggacgcgtgggctccgtcgcaagctttctttcttgcccttcacgaaggcttggtcggcctggttgtatctccactccccccttcacagatccgttcctccagctagggttagcgttcctctgcagcgatggcgatcaagcggactaaggcggagaagaagatcgcgtacgacaagaagctgtgcagcctgctcgatgagtacaccaaggtgctcatcgccctggccgacaacgtcggttccaagcagctccaggacatccgccggggcctcaggggcgactcggtggtgctcatggggaagaacacgctcatcaggcgttgcatcaaggtgtacgccgagaagaccggtaaccacacctttgacccgctcatggacctcctggtcggcaacgtaggcctcatcttcac

SEQ ID NO: 8901 - DNA, 350 bp, Zea mays
  unsure (1)..(350): unsure at all n locations; Clone ID: LIB3137-053-Q1-K1-C10
cgtccgcccgcgtcgcgtggcacgctttcgttacgccggccgccgcgaggaaagaacaccgggtacttccccttcccttacgctccagtttcacaagtcgcgagccgtgcgtcgcgtcgacgcgagttccgcgtgagggagcaggcagttgcagttggaggcggtgacgaaaccctaggacttgagttccagcgcacggctcgggtcctcctcaccgttcccggcgatggaacggcggcaggagctctgcangaacttccagcgcggcagctgcaagtacggatcgcactgcangtttgtgcacgcctcctctcagcagcagcagcaggcgaagcccaacccgtttgggt

SEQ ID NO: 8902 - DNA, 259 bp, Zea mays
  unsure (1)..(259): unsure at all n locations; Clone ID: LIB3137-053-Q1-K1-C12
tttacactccagacccgctcttcgcagccacaatcttcacataactttcatcaaaccagtaagaatcaaacaacctgnggagctcttcaatgctttgaggatggtaccagtcgtcactggagactgctactgcagcaccatctgcattctccctaaaagacttgatctcagacttgacgaactcatggaaggtccatactgcagcactactgtatccaaggagtttgctgacggtaacaggttcattgcccttccttca

SEQ ID NO: 8903 - DNA, 280 bp, Zea mays
  Clone ID: LIB3137-053-Q1-K1-C4
tcacataaactacgggccaacaaaaactccaaatacacttctgcaattgatatttggagcattgggcgcatatttgctgaacttctcactgaaaggccactatttactgcgaagaatgttgaacaccaattagatattataacagatcttcttgcgactacatcatctgaaaccttatcccggattctaaatgaaaaggccaggatatattttatctgtatgctcaaaaaatattcactgccctttactcataaatttatacattctgatcctattgctc

SEQ ID NO: 8904 - DNA, 410 bp, Zea mays
  Clone ID: LIB3137-053-Q1-K1-C6
gggggatctgaaggaggaggaggcggcggtatttcaaactttagcgacatggcaatgcgggtggcgggtgcggtcacgttcgtgcggcgcctggcgccggcgcgcccaccagtacgcatcctgtcggcggcatctaccgcggaagcggaggcagtgacgtgcgggcgcggggacaagaaaaccaagcgcgggaagcggttcaagggctccttcggcaacgcacggcccaagcgggagaagaagattgagcgcatcaaggaccgcgtcgaggtgcccctctccaaacactggcggttccgggacagcgccagtcgggtgctggcgttccacgtcgactactgggactaccgcgggtggaaggaccccttcgcgttcaacgcctggaccgtgcgccagaaggcctacgtgga

SEQ ID NO: 8905 - DNA, 207 bp, Zea mays
  Clone ID: LIB3137-053-Q1-K1-C7
agggccggccggccggctagcgaacgacgagaagaaaaaaaaacgatcgcgattgctttcgcgcgcgcgctgcgagaggcgccccggccatgtcttcctccccagcagacctctcctgcgtcctcccccgcgttctcatcgtctcgcgccgcactgtccgcaagaacaagttcgtcgacttcgtccgtgagtaccacctggacctca

SEQ ID NO: 8906 - DNA, 416 bp, Zea mays
  Clone ID: LIB3137-053-Q1-K1-C9
aaatgatgaagttttcattaagctgggttcttacatggataagaagaaggaaaatgctgagcgtgatgagcgtgccaagaagtcggtgagcatcaacgagttcctgaaacctgctgaaggagaaaggtactacggcggccgtggccgtggaaggggccgtggggatcgtggtggttttagaggcggatacggagggggatacagtcgtggcccagctgctgctgctccatccattgaagatcaagctcagttcccaagccttggtgggaagtgaagggcgcccagctgctgctgtcaccgagcgttgtgttgtctgctgttgtcatatttaaattttgtccgacgttacatttctgtgccacggtttaaacggaacaaataatgatgttgcatgtggcttaactttggtatgtggt

SEQ ID NO: 8907 - DNA, 402 bp, Zea mays
  Clone ID: LIB3137-053-Q1-K1-D1
cctgacccgaccctcccgaggccgccagccttatcctctccgcctcccgccgtcccccgcgacccatccgcaagcgcgagtagaagacatggcctcgacgttcggtgccacttctacagttggccttatggctgctccaacggggaagaatgtgcgccttcagaggagggctaacttcagagtaaaagcggctaaggagctgtacttcaacaaggatgggtcagctatcaagaagctccagactggagtcaataagcttgcagacctagttggagttacactcggaccgaagggaaggaatgtcgttttggagagcaagtacggctctcccaagattgttaacgatggcgttacagttgcaagagaggttgagctggaggaccctgtggaaaacattggagc

SEQ ID NO: 8908 - DNA, 352 bp, Zea mays
  Clone ID: LIB3137-053-Q1-K1-D10
cggacgcgtgggttccacccccgccggccacactcgtctctctcacgagccacagcccacaggctagctctctagccagtccagtccacgcagcgcagggatggcgtcgttcgccgtggcaacggccccgtcgctagcggccccggcagccaagaggaggcccgccgccggcgtcacgtacgtggagggcatgaacgcctacagcggcctcaaggggctcaacaaggtgaccatgctcggggtgcgcaagaccgccgactactccttcaccaaggtcgtggcgtcgctcagcctcgcgggcaggaagcggcgcggcggagcgttcggcgcccagatgaggtgatctacctgt

SEQ ID NO: 8909 - DNA, 303 bp, Zea mays
  unsure (1)..(303): unsure at all n locations; Clone ID: LIB3137-053-Q1-K1-D11
gcaaccgaaccttaccatgcaccatagactctttgcgccagaggcagacgcacagcgggccgancagttcctacctctgcggctctccctcttgccaaatccccccacataattcttctccctccccgtctcctctcgcgctcgcgcgtggtgaggtgaggtggagttccgaccccgaggccgcaatggccacagcggaggtggtggtggccaacggctcgtgcggtgccgacaccaaaaccgtgtttaaggagatatacaccaagcccaagcatgagatgctctacgaccccgccttcgaat

SEQ ID NO: 8910 - DNA, 411 bp, Zea mays
  unsure (1)..(411): unsure at all n locations; Clone ID: LIB3137-053-Q1-K1-D2
aaaaaacgggccgacctacgcgttcgctcaggggaggcatgcagatctncgtttaattcctgaccggcaagactatcaccctggggggggagtcctctgacaccattgacaacgtcaaggccaagatccaggacaaggagggcatccctccagaccagcagcggctcatctttgctgggaagcagcttgaggacgggcgcacgcttgccgactacaacatccagaaggagagcaccctccacttggtgctgcgcctcaggggaggcatgcagatcttcgtgaagaccctgaccggcaagactatcaccctcgaagtggagtcttcagacaccatcgacaacgtcaaggccaaaatccaggacaaggagggcattcccccaaaccagcagcggctcatctttgctggaaagc

SEQ ID NO: 8911 - DNA, 396 bp, Zea mays
  unsure (1)..(396): unsure at all n locations; Clone ID: LIB3137-053-Q1-K1-D4
ntcccaagccagnaccgagtcctacgagctgttgtttgcaagtgtcaagagacgaaacggtcgacggggctcgcacgcaatctgccgtagcggtcgccgtggtggccgcggtgctgctgctggcagcggcggcgacgacctcggaggccgccatcacctgcgggcaggtgagctccgccatcgcgccctgcctctcctacgcccgcggcacggggtccgccccctccgcgtcctgctgtagcggcgtcaggaacctcaagagcgccgccagcaccgccgccgacaggcgcgccgcctgcaactgcctcaagaacgccgtcaggggcgtcagcggcctcaacgccggcaacgccgccagcatcccctccaagtgcggcgtcagcattccctacacca

SEQ ID NO: 8912 - DNA, 420 bp, Zea mays
  unsure (1)..(420): unsure at all n locations; Clone ID: LIB3137-053-Q1-K1-D5
gcggcggggcagnggtggnacatttgcatctgcattttctttctcgtctccctcccgcatctgccctgcctggatcccgccgccagccatctaagggagccgggagccatgtctccctccggcgagctgctggcgtccatctcctccgctctcgccgaggccttcgncttcctcgcctgcgtcgagctcggcgacgccgtcgacgccgtcagcgtctaccgcctcatccagtacgacctcgccggcgccccgctcggctcccgcgcccgggtcctcaaccaccacgccgcggtgctcccgctccctgcccgcgcaaacctcttcccgttcggcctcggcgtgccgctcctcgacccttccctctcccttcctaaagaatacctgggggagaaaaaaacactgggggggattggctaattt

SEQ ID NO: 8913 - DNA, 442 bp, Zea mays
  Clone ID: LIB3137-053-Q1-K1-D6
gtttgttagagcgaatgctcgcttttgagcttataatacaggccaagtgctgaagaggctcttgctgatccttatttcaagaatatagccagtgtggatagagagccttctgcacaggctgtcacaaagcttgaatttgaattcgagaggcggagagttacaaaggaagacataagggagcttatatatagggaaattcttgagtatcatccaaagatgctgagggagtttcttgagggaactgagtcaagtggtttcatgtacccaagtgcagtagatcattttaaaaagcagtttgcataccttgaagaacattatgccaagggatctacaggaactccacctgagaggcaacataattcattgccgcggccgtctgttgtctattctgacaaccgatcacaaaccacagccagcatcaccgaggatctttccaagtgta

SEQ ID NO: 8914 - DNA, 339 bp, Zea mays
  Clone ID: LIB3137-053-Q1-K1-D7
cggacgcgtgggctcgaacctcagtcaggcttcgttaggagggagagttcaaggaccgaggcggcgtctggcgagatgaagcttaacgtcaagaccctcaagggcaccaacttcgagatcgaggcgagccccgatgcgtcggttgctgacgtgaagaggatcattgagaccactcagggtcagagtacctaccgggcggaccagcaaatgcttatataccaagggaaaattctcaaggatgagaccactttggaaagcaacggagttgctgagaacagcttccttgttataatgttgtccaaagctaaagcatcgtcgagtggagcttctaccactact

SEQ ID NO: 8915 - DNA, 228 bp, Zea mays
  unsure (1)..(228): unsure at all n locations; Clone ID: LIB3137-053-Q1-K1-D8
ccggtcgaccacgcgtccggagtatcgaatcgacgaactgtagcgncatgcgtggagagaatcacaggcgatttctcgggttggtgttctggcgtcgtttctgattctacgtttaaacaaagtgtttgtctcattagggcgtgtttcctcactttttctcgcacaagaatctagtaaaaaggttctccaaataggctctttgactgctacagntcgtcgattcgattc

SEQ ID NO: 8916 - DNA, 133 bp, Zea mays
  Clone ID: LIB3137-053-Q1-K1-D9
cagccggctctcgcgcgggcgctcttgccttctctataagtccactggagggctggcccccatcggcgcgatacgatccgccgacattcggcagcatccgacgcggacacgatacttccgccccattccggct

SEQ ID NO: 8917 - DNA, 73 bp, Zea mays
  Clone ID: LIB3137-053-Q1-K1-E10
attcttgctcttgtagttggctgtgtatagttgggccggccgggggggtccgttcagttccttatctgttgat

SEQ ID NO: 8918 - DNA, 439 bp, Zea mays
  unsure (1)..(439): unsure at all n locations; Clone ID: LIB3137-053-Q1-K1-E11
cgccattcgccaccctctccgttccattccattccgttcagcggtcagcggaacatgatacggtctgcgcccttccaagcaatcacatcttcttccccgttataaatcgctcactcgctatcgtcggctacctgtatcctggcgacacccaacagcctgcttgccgcgcttgcattgaggggagttcggggagcggccggtgcggaaggaatcgacacagagttcagttcacatggctgctgaatcagagaacggcaactgcaaagcttgngcagcgagagatccttctggagttctctcaccacacagttttaaccgcagagcagtgcaaagcggcgatgtttcgctgaagatcatatactgtggagtctgttatgcaaacgttgcttggacgcggaataagctcaatgattcaaaatatcctttggttcctgggcat

SEQ ID NO: 8919 - DNA, 257 bp, Zea mays
  Clone ID: LIB3137-053-Q1-K1-E2
tttgcgctatttggatgaactaactctgtctgatcatatgtgggatgatggaaactcgctgggccccaaatagattcacagctatttgacaagagtgatgtacaaccggctcaacaagtttgatcctctctggaactcacttgtacttggtggggtgaaaaaaggtccaaagggtgatgaaaagtatcttgggatggttaacatgattggaacccactttgaagaaaaccattttccttctggatttggaaattata

SEQ ID NO: 8920 - DNA, 252 bp, Zea mays
  Clone ID: LIB3137-053-Q1-K1-E3
ggctcatactataaacgtagttgctagatacatgtctaatcctggtaaagagcattgtaaagctgttcagtgtattttcacatatctacttctttcttatagtgcttagatatgttctggcaaaatctggaaatggtctgattgtctatgttgattcatattatggtggttatttatacataattatatttttttcatgttatgttctttacttatttaatatttattcttatatattagaaattctttttt

SEQ ID NO: 8921 - DNA, 234 bp, Zea mays
  unsure (1)..(234): unsure at all n locations; Clone ID: LIB3137-053-Q1-K1-E4
cgcgtccgcggacgcgtgggatcgagttggatngggtttatagttgggcttttggacagctgtggtgtgcacggcagctctgtgacttgtgaggagggaaggaggaagaaaggcgatccatgccgtcaaaccgattcttaaaggacctaaagacccgccaaaaggtccttccaacttttggcaccccagcccctgttcccaaaatattttttaactgccagccaccaattttgg

SEQ ID NO: 8922 - DNA, 431 bp, Zea mays
  Clone ID: LIB3137-053-Q1-K1-E6
gctaaggagagtgtgatcaccaacagctagttctagtcccccttccttccatccatccatggcatgcgtcagcaccttccagagctgccccattgccagaagagcaaagatcaacacgagggccaggggctgcagcagtagcgtggcgaaggggtcaccaccaccagccttccagttccagtgcagggcgtcgactttcgcggcggacaccagcctccggctcgagctggacgagaaccccgaggcgatcatctcgggtgcgtggcccgggaactgctccctcctcagctacgacgacctccgcgcctacctcgagtcgcaggagacggcggcccaggcagacggtcagcgcggcgtggcgctcctgagcgagaccatgtccacacccgtgctggtagccacagcagaccagaccctggaggacgtcgagt

SEQ ID NO: 8923 - DNA, 418 bp, Zea mays
  Clone ID: LIB3137-053-Q1-K1-E7
cctgaagctcccctgcgtgccgtcccatcttttctttgttgccgctcggcgcccagctccacgctgcttctagtaccgagctcgcccctctccctagctcctccctgcgcgcgccggctccagcttggccaccctcctgttgctcgccatggccgccaagctcggcctttgctccttccctgctcgcgccaccggccatctccagctctcccatgctgcccggctgtccttctctctctgctccagcgggtgacgacacctaccgctcctctccctggacgcctccatgggtttcgctggtagccgccccgtcgtgctcgtctctggtgcttgctccggctgcgggcgccgtcgagccgcgaccccaccgaggtttttcccatggccgtcgcaccttgccgagctcctcccctacgac

SEQ ID NO: 8924 - DNA, 436 bp, Zea mays
  Clone ID: LIB3137-053-Q1-K1-E8
gcgccagacgcagacggccccgaacgccggttgcgtagcatcaggtcgtcgatctccgagcatcggcccgccgcgatggagaagggaaagggcctcgctcgccgctgggcggtggagctccccgacgcctcctcctcctcccccgccgtccccgacccgcccggcttcaccagatccgcgcccgacgcggacgacgccgctggagcgcgccagcgcaaggactccgaggctgcatggaaggcgcagaaagcttgggaagttgcgcaggctccgttcaagaacctgatgatgatgggatttatgatgtggatggcagggagcactgtccacctcttcagcatcggaattaccttctctgctctgtggcaacccctcaacgctctccgatctggtgggaaaagttttgaaccatttaaagacccaagggtggatacta

SEQ ID NO: 8925 - DNA, 443 bp, Zea mays
  unsure (1)..(443): unsure at all n locations; Clone ID: LIB3137-053-Q1-K1-E9
cgaccgacgcgtccgaagccggccgcgcctccctgatcgaaactttttttttgcctcgtatgagatcgccgggggtacacgcttgtatgttggaagattggcccctcgcacccgttcccgcgacctagaatatcttttcagcaaatatggaagaatacgtgaagtggagttgaagcgtgactatgcattcattgaattcagtgacccccgtgatgctgatgatgcgcagtacaacctagatggcagggaagtcgatggaagccgtattattgttgaatttgctaaaggagttcctcgtggttctggtggttcacgtgagtacatgggaagaggacctccaccaggaacaggtcgttgttttaactgtggaatggatggtcactgggcaagggactgcaaggcttgtgactggaagacanatgctaccgctgtgtgaatcggcc

SEQ ID NO: 8926 - DNA, 173 bp, Zea mays
  Clone ID: LIB3137-053-Q1-K1-F10
atggtttttctttttctcattctcatttgctggtgctcatagcctgctcggtttcctcgaaggatcagcaactactcttgattgtggactttgtcacatctgatatcaactttatagattattatccaagatgtcgctgcataacatttgtgcttcaaacaagaatgatgcct

SEQ ID NO: 8927 - DNA, 361 bp, Zea mays
  unsure (1)..(361): unsure at all n locations; Clone ID: LIB3137-053-Q1-K1-F11
gaccacgcgttcgggacgcgtgggttcnaattgatattagtgtgtacatggagacggcgtgcttctcgacgggggcgtgggacgacgctgctgacggtgaccgagggcgaggacgtacacgcgatgcacgaagctctgcagaatctcagtgtttactgaagccaggaagacatggcgtactgcagtatgtgccctccaccgagagagctgtcaagacatggcaggcaacggtaggagcttcagagaacggagtgatgacatcggagctgcttgagtggctattctcggggaagaccggggaagacgtgaaaaccaaagatggcacaaacggagcagcggttcctgctgtaacaaggatcgc

SEQ ID NO: 8928 - DNA, 404 bp, Zea mays
  unsure (1)..(404): unsure at all n locations; Clone ID: LIB3137-053-Q1-K1-F12
cggacgcctgggttatcctcagctgtagacttcatcgagagtgagttcctcgaggagccggtggaagccataaataaggtctccaagtatgtcgcacagctgaggagagtgggcaacaaggggcacggggtgtggcactttgatcagatgctgcttcaggaaggggcctgaaggccaacaagggtggcgtggacggagctgagctctgggtggtgtattcttttctttttcttttctttccagttggttagtgttttagttgtagaacggtgttgcgttgcccacatgacatgatggatgttacgtggaggattgtctcttatatttgaacataagatacttttctttctttctttactttttccccttcaattttactggacgttgcataattgccgtggngg

SEQ ID NO: 8929 - DNA, 424 bp, Zea mays
  Clone ID: LIB3137-053-Q1-K1-F2
gtcctctgttacttctccctccgccgttactcccctcccattcaccgccaccgccaattccgtaccgtcctccgccacctctgctgagagcgagaagagatggcaggcaagggtgatgggccggcaatcggcatcgatctcggcacgacgtactcttgcgtcggcgtctggcagcacgaccgtgtcgagatcatcgccaacgaccagggtaaccgcaccacaccctcgtacgtcgccttcaccgactccgagcgcctcatcggagatgcggccaagaaccaggtcgccatgaaccccatcaacaccgtctttgatgccaagcgtctcattggcaggaagtttagtgatgcctctgtccagagtgatattaagctgtggcccttcaaggtcattccagggccccgtgagaagccaatgatagttg

SEQ ID NO: 8930 - DNA, 395 bp, Zea mays
  unsure (1)..(395): unsure at all n locations; Clone ID: LIB3137-053-Q1-K1-F4
cctttctccgcacaggctcaccaaacgacgttcactttccctcgacccgtgaccgtgagcaagcgggtggcgacggcgcgcggccggccatggtgagcgagagcaaccgcggcggtgcggaccggacgacggcggcgggggaggagcgcgggcagctgctgttcgacgtgccggagatcaggttcaccaagctcttcatcaacggatccttcgtcgacgccgtctcaggtacatgcaagacgttcgagacgagggacccgcgcacggggggcgtcatcgccagcgtggcagaagctgacaaagaagacgtggacttggcagtgagggcagccagggcccgcttcgaccacggcgagtggccacgcatgtctggatcccgacgggggcngatcatg

SEQ ID NO: 8931 - DNA, 435 bp, Zea mays
  Clone ID: LIB3137-053-Q1-K1-F5
agaagtgaggttttgcgacgttgttatttgttcgaggaagggccgaaccgggaaccgggcctttctcgcggatcttcgggtcggtttgtgaattggtacgctagatgattatgcgagctgaaggacatggatcagagcgaaccataagatggtattggtggattaatcttgtggatgcatcaagccaacaccagaatggaagatgctcaccaagtggtcgtcaattaacaacactaacgtagtgtttatcccaggattataagtttgttctgttgtggatggtgctaagtgccggtgggctcggccttcttatataaattatatattccacaggtgcataaaggttcaacacaaaccaataaaagatcaaagttagggttcaaaagcaaaggagcaaaagaaccaaagtgtgccctggtctggcgcaccggactg

SEQ ID NO: 8932 - DNA, 443 bp, Zea mays
  Clone ID: LIB3137-053-Q1-K1-F6
gcagcctgtcctccggcatctctgcctcgctttctgcagcgcccagcaccgctcggcgccgccatgacgcagcgccgcagcagctgagggtgaaggcggcggcgcggccacagctgctgcacgccggccgccggcgttcgagtgtcgggaggaggccgggcggcggcgcggtggtggtgagggccgggcctgggccgctgtcggagatcgagccggacctggaggaggacgccatcgacgtgtaccgcaccaacggcatcagcccggaggacttcgagtacgggaagtatgacggacaccacacctatttcgaaggccaagacaagaagggcttctgggaggatgtctccgagtggtaccaagaagctgagcctcctcagggctttcaagcactcatctcctgggcatttcctcctgcgatcatcctcggcatggctttcaat

SEQ ID NO: 8933 - DNA, 425 bp, Zea mays
  Clone ID: LIB3137-053-Q1-K1-F7
ttcgccttactccctcacagaacccagtaaattattgccagtcccgccgtcgagatggcccgacgccgcctgctcgtcctcgccgtcgtcgccctcgcggccaccgccgccgcggccaactccggcttcgcggactccaacccgatccgccccgtcaccgaccgcgcggcctccgcgctcgagtccacggtcttcgccgcgctcggccgcacccgcgacgcgctccgcttcgcacgcttcgccgtcaggtacggcaagagctacgagagcgcggcggaggtccacaagcggttcaggatcttctccgagagcctccagctggtccgctccaccaaccgcaaaggcctctcctaccgcctcggcatcaaccgcttcgcggacatgagctgggaggagttccgtgcgacccggctcggcgcagccca

SEQ ID NO: 8934 - DNA, 430 bp, Zea mays
  Clone ID: LIB3137-053-Q1-K1-F8
cccaatcctgcacgctcttccgcctgattccaagttcgtcgcacatctgctgctcgtcgcacttcaagagattcgatcgggttcgccgtttcgcgcccgccgccatggcgacttcctcaggaccaaaggaggcgccagcgaataaccctgggctccagaccgaggtcgaccccgccaccaaaggctacttcttgcaacaaacgatgttacgtgtgaaggacccaaaagtgagccttgacttctactcacgtgtgatgggcatgtcgttgctgaaaaggttggattttgaagagatgaaattcagtttgtattttctaggttacgaggatgtgaccttagcccctgatgatcatatcaagcggactgaatggacttttaagcaaaaagctactcttgagctcacccacaactggggcacggaaaatgaccc

SEQ ID NO: 8935 - DNA, 296 bp, Zea mays
  Clone ID: LIB3137-053-Q1-K1-F9
tccgaggaggcaagctcaatccccgaacctccagggctgcgcatgcgctgcctcagctagaggcacatatccccggcacgcagactattcacgtcaagactatcgggcgctcacataaccacagcgacagtgaatacatgtcacgtcagctctacgcatgagcatatgcaatcattgaaaaacccgaacgaccagatatgtggctaattaacacgtaagacagaacaagcatattgagactcttcctactaatgttgcatgcctacgtgcctgcacatactgttaaacaaaacatt

SEQ ID NO: 8936 - DNA, 350 bp, Zea mays
  Clone ID: LIB3137-053-Q1-K1-G10
ggtgatcaccccgagcgggattacctacgagagggccgtacttctcgaccaccttcaaacggtggggaggtttgaccccgtgacccgtgaggctcttgaaccgcaccagctggttcctaatcttgccatcaaggaagctgtgcatgcgtttttgagtgagcatggttgggcttacaagattagatgatcgctttggaatacaggttttggatactgtcggatgtgacggtgggattttttgttcactgttgggggcagattttaatctgggatggctgcgtacagattcaccttctccagttgtgtacatatgagatgctcattatgatagtaattgtgaacagtacacc

SEQ ID NO: 8937 - DNA, 430 bp, Zea mays
  Clone ID: LIB3137-053-Q1-K1-G11
acgacacccggtggtcgcgtggacgttgcctagccacgcgtgattaagcctcaacctttgggccttgctcacggcgaagctctgaaaatgaagggcaactcgtgcaagctttttggaatccatctcgacagcccagccaaatctgaacctttgaagtctccgccaagcgttgccacaccggcagctgagaagtggatggcagacggaatcgacgcagacaaaagccctgagccgcacaagacgccaaagcaactcggtgctacacaggtggatcctgtcccagagagatgcccacaagcttcaaggggcacacagtgcaaatcacaaggcgggtcgactaggagctgcaagaaggtccacaagcaaggaatggcgctgggcaggtccgtggaccttaccaagttcaacggctacacggagctggtggcgg

SEQ ID NO: 8938 - DNA, 419 bp, Zea mays
  Clone ID: LIB3137-053-Q1-K1-G12
gggccgacccacgcgttcggaaaaaacaactacagccatatctatactttttccgctactagtttcagcagctccggaacgcgggcgatggttgctcctacgggatcttgaattcttgacacacacacacaccgatggtaatggtgatggagggaggaaggacggaaggcgacgagctgattgctgattatgtggattgccttatgtctctggacaccaacacccggcctgtccacagcgatggtctcatcctcggtgctccaggcgggggaggagggacggtcgatgccggaactgagccagatgccatgagagatatcccctcatccgaagaccccaatgagcccgtgctcggcatgacgtttgagtccgatgaagccgccaaggcattttacaacgactatgccaagcggcttggc

SEQ ID NO: 8939 - DNA, 376 bp, Zea mays
  Clone ID: LIB3137-053-Q1-K1-G2
cgctttctagtcgcttccgcgtcctccactctccgcgctccccatcccggagcgcggcacacgcgtagccccgcgccgcagcggctggccggcatgaagagcatgtggaagcagagcggcggcctggtgtgcgccgacgccggccccctcagcccgctcggaggccgctcgcggcgccgcacgaggctgacgctgtacgcggtcgcctttgccttcgccgcgttcaccgcctacgtcgccttcgcctcgcctccctccgcgggcgccggcgcctcgtggttcggcggagtgtacgcgtccacggcgccgtaccgctcgcagatttccagcctcttctcgtccatcttgcccgccgactcgccccgcccctcgccag

SEQ ID NO: 8940 - DNA, 416 bp, Zea mays
  Clone ID: LIB3137-053-Q1-K1-G3
ctgccgttcacacctctctcgctgcctttatttcctgttggcgacgctctcgccaggtcttgggcggcccgttcggcggcgactagcgcctccgtttgccaggtcttcgtcgtccgtttcgccgtcgactggtgcccagcaggtacatctggaagaatgggggtttaccttagcacaccgaaaactgacaaggtatccgaagatggggaaaacgataaacttaaattcggactttcatctatgcaagggtggcgtgcaactatggaagacgctcactcggctttgctagatcttgacaatgacactgcattctttggtgtttttgatggacatggaggaaaagtagttgccaaattctgtgcaaaatatctacacagagaagttctccataccgaagcctatgctgctggtgacct

SEQ ID NO: 8941 - DNA, 250 bp, Zea mays
  Clone ID: LIB3137-053-Q1-K1-G4
gagaacacgatcgagcacacaagcacgaagactcgtttaggagaaaccacaaaccaccaagccgtgcgagcatcatggagtacggtcagcaggggcagcgcggccacggcgccacgggccatgtcgaccagtacggcaacccagtcggcggcgtcgagcacggcaccggcggcatgaggcacggcacgggaaccaccggcggcatgggccagctgggtgagcacggcggcgcttgcatgggtggcgggca

SEQ ID NO: 8942 - DNA, 376 bp, Zea mays
  Clone ID: LIB3137-053-Q1-K1-G7
gcggtcatctacgagcggggagtagcgcagtggccggcgcgcgtcagaagtgcccatggacgccgcggcggtgctgaagcggaagggcgaggaggcgcccgaggcgtggctgctcggcggggtcgccgtccccgccaccaagatccgccgactcgacgcggaggtgccgccgcctgtcgggtccagcgcgggcgtgctgtcacagccgcaacgtgctttaggggtggaggaagcgcggatgagcggccacgtgggggcgccagccatggaagccacgccgttgttgaagaggaagggcgaggaagcgccgcagccgtggctcgatgtcgacggggtccctatacccgccacgaagatccgccgactcgacgccgat

SEQ ID NO: 8943 - DNA, 366 bp, Zea mays
  Clone ID: LIB3137-053-Q1-K1-G8
ccacatctcctccccctctcccgcaaagacattgccggtgtccatggccgtccaggcgcagcaccgactcaaccccgccttcctgccccacgacatggggcacgccttcagggcgctggagggcgccacggtcggcggaggcggcggctccgcgttcctggaagagctcggcttcggcgggtgcgcgccggcgccggcgcccatcgaggtcgccgcgtttggcgacacccagccgcgcagcgagctcacctgcaacggcggcggcggcgacaacagcaacgtgtttctcccgaggaagcgtgcacgcgtcgcgcccgggttcctggatgatgcccaccaccaccagcaggggttggttcttcccct

SEQ ID NO: 8944 - DNA, 406 bp, Zea mays
  Clone ID: LIB3137-053-Q1-K1-G9
cccgcgtccaaaagggcgcccgggtgcccataattttgtcaccgcgtcccgagagcgcaaatcattccgcgcgacgcaaaaaccctagcccagccaccgacccctctcatggcaaccaccaccacccaggcgagcctcctcctccagaagcagctaagagatctcgcgaagcacccggtggatgggttctctgctgggctggtcgacgacagcaatgtcttcgagtggcaggtcaccatcatcggaccgcctgacaccctatatgatggagggtacttcaatgcaataatgagcttcccacaaaattacccaaacagcccgccatcagtcagatttacctctgaaatgtggcatccaaatgtctatcctgatgggcgggtttgtatctctattcttcatccacctg

SEQ ID NO: 8945 - DNA, 353 bp, Zea mays
  Clone ID: LIB3137-053-Q1-K1-H10
attccgcatcacgcaccccaccccatcgcccgcaaccgcaagctcagattccctccggcccggccccaccgtcccgctcactccagcccagcccgcgtccccacagcccagcgacagcgagcaccggcggcatccagccatgtgcggcggcgccatcctgtcggacatcatcccgccgccgccgccgcggcgggtcacggcgggccacctctggcccgagagcaagaagccgaggagggctgcagccggcaggaggagagcccccgtggagcaggagcaggaggaggatttcgaggccgacttcgaggagttcgaggtggagtccggcgagtcggagctcgagtccgaggacg

SEQ ID NO: 8946 - DNA, 341 bp, Zea mays
  Clone ID: LIB3137-053-Q1-K1-H11
ctcgacggggactaccgctagagccttcgttttacgtccagctgccacggtacttgagcgcgccctttgccggtgcaggcggcgcatcacccaccgcaccaggattctgattgctcttcattaggctataaatggcaggaaggcaccgggcaccccgacaataccatgatgaacctcgaggataccgtgatggtccaccacctccacttccacgaccaagacctctctcaccgcgtcgcatggcagaggaactgtctaggcgccgtgctgagatccgtagaatccatgaggacaatcagcgtctggcggatgaaattgttagtctcaagcaaaccatgccc

SEQ ID NO: 8947 - DNA, 348 bp, Zea mays
  Clone ID: LIB3137-053-Q1-K1-H2
gcgagcgcaagcagagcctgccaaaaggctagagaaaaaaaaatccgccttctcctcccaggcgcaggccaggctcagcctcccctctcccctcctcggcatcttcgccgccggcgatctatctctctcacaatggcggcgcccatgtcagccatcgactcagcgtggcagctcctgatcgccaacttcaccgagttccagctcgccaccgtcgtcaccttcctgctccacgagaccgtcttcttcctctccggcctcccctccctcctcttcgagcgcttcggactcttcgccaagtacaagatccagaagaagagcaacacctctgcttaccaaaacagatgtgtc

SEQ ID NO: 8948 - DNA, 419 bp, Zea mays
  unsure (1)..(419): unsure at all n locations; Clone ID: LIB3137-053-Q1-K1-H3
ctctcttccgccgtctcgcctcctcacgccattaaaccccacccgcgcgcgcggcggccggcggcgagccctcacccatccgagcaagccgtggaggaagcgagcgcgcgaaagtatcaggaggaggcatgggtaccctggggcgcgcgatcttcacggtgggcaagtggatccggggcacggggcaggccatggaccgcctcggatccaccatccagggcggcctccgcgtcgaggaacaggtttcaaggcatcgtacaatcatgaatatttttgagaaagagccaaggatccatagagatgtgtttgttgctcccagtgcagcagtcattggggatgttgagattggtcatggatcgtcaatctggtacggatccatatngagaggtgatgtcaacagcattcatatgggatctggt

SEQ ID NO: 8949 - DNA, 330 bp, Zea mays
  Clone ID: LIB3137-053-Q1-K1-H5
gacccacgcgtacgggcactgtcgtttcttcctctcccttccccttctgctaccacacgagcagcttcctgccgccgcagggggcgcatggcctcgtcggacggctctgccgcggccctgcccagcgctaccgtcgatgtgcccggcgccggggcccctgtcctcgtagtgggcgcgccggggctccccgaggctgactataggaacgcggtggagtcgtcgctgttcaaacattggctgcggaaactgcaatcggagaaaggcctgctcacctacgggaggctgagccttacgcgggttctcattcagggcgttgacatgttcagaaaa

SEQ ID NO: 8950 - DNA, 226 bp, Zea mays
  Clone ID: LIB3137-053-Q1-K1-H6
ccaagcaatggcgaggaacaggaaggtggtgctgcgcgggtacatcgaccgcgcgcccagggaggaagacatggagctcgtcgaccgcggcgccgtggagctgcgcgtccccgatggcggctgcggcccctcggtgctggtgaagaacctctacctatcctgcgacccttacatgcgccgcaagatgccggacttcccaactcctacatccgcccttaaacctgat

SEQ ID NO: 8951 - DNA, 395 bp, Zea mays
  Clone ID: LIB3137-053-Q1-K1-H8
ttcttggtttttggggtcctccctgaataatgcaaggacaaggttggccaatgatgccaaggctgccaagggaggaggcgatagacaattcaatggtcttgtggatgtctaccgcaagacactcaaatctgatggtattgctgggctttaccgtggatttaacatatcttgtgttggaattattgtttatcgtggcctgtatttcggactttacgattctatcaagccagttgtcctcactggcagcctccaggacaacttctttgccagttttgctctgggttggctgatcaccaacggtgctggtcttgcatcttaccccattgatactgtccgcagaaggatgatgatgacttctggtgaagctgtcaagtacaagagctcattggacgcat

SEQ ID NO: 8952 - DNA, 337 bp, Zea mays
  Clone ID: LIB3137-053-Q1-K1-H9
acttactgcaagacatcacccttgaggtggagtcctcaacaccattgacacgtcaggccaagactaggacaaggagggcattcaccggaccagcagcggtgatcttcgcggcagcagctggagatggtcgcaccttggctgactacaacatccagaaggagagcaccctccacctggtgctccgtctcaggggtggtatgcagatttttgtgaagacattgactggcaagaccatcaccttggaggtggagtcgtctgacacaatcgataatgtcaaagccaagatccaggacaaggagggcattccaccggaccagcagcgcctgatctttgctgg

SEQ ID NO: 8953 - DNA, 168 bp, Zea mays
  unsure (1)..(168): unsure at all n locations; Clone ID: LIB3137-054-Q1-K1-B12
acgaaaaagaaagcgccccnnncnctttgaggancaggnannggagngggacaggaaaaangncnncaacngggncaacacgagaggaaaangnnnacanggccaagnnggccaagcaagcngaacggnangaggaaanggnggaanncaaggagaaagnnngaaaag

SEQ ID NO: 8954 - DNA, 293 bp, Zea mays
  unsure (1)..(293): unsure at all n locations; Clone ID: LIB3137-054-Q1-K1-B9
cggnngggggaaatacgacatcggcacagtaatcagcagacggcaacaaacttaaaccatgtcgtgaactgagtttgtggattatatgagtttgacatgaattgatgaatttccagcctgaaaatttttgccagcaggattgttttggtgtagggaggtgggtcacaggattaggtgaactaaggatcagtctgtgttcatttgtattaatttgtgaacagatagctataaactatgcttccaaagtttaatgatgattgaattaatcttattttttgttttaaggtttgcat

SEQ ID NO: 8955 - DNA, 277 bp, Zea mays
  unsure (1)..(277): unsure at all n locations; Clone ID: LIB3137-054-Q1-K1-C10
cacgcgnccgggnagancnncgnncaaccacgccnaanaaccgctcggggnnnncncagacgngaaaaaaanggggcngncnnncaccaagcnanncagccggctatnngccaaaaaggagaagcgcanaccganggnngggcnngangccgcnnggaaaaccaccanncnnnacaagcngaagnngggagagaaagncactactattcccaccatcggnttcaatgttgagaccgttgaatacaagaacatcagcttcactgtttgggatgttggc

SEQ ID NO: 8956 - DNA, 282 bp, Zea mays
  unsure (1)..(282): unsure at all n locations; Clone ID: LIB3137-054-Q1-K1-D11
accggcgctncatccgacgancctttccttttcgaggtcgaccctgtttttgtgaccgcctttggatccaccgtcatcgtcgaaggctgtgacaacagccgttcgatctcctgggttcacgcttggactgttcgtgatgggacaatcacccaagggagggagtatttcaacacttctttcaccgttactcgccttggagactctccaccgtcagcttgcagttcttcgacggcggagattgcgccggtgcattgcccttacgtttgggagagtagtcttttc

SEQ ID NO: 8957 - DNA, 316 bp, Zea mays
  unsure (1)..(316): unsure at all n locations; Clone ID: LIB3137-054-Q1-K1-D12
ccgnggacgcgngggcggacgcgngggcaaagattcactncngctctcaaaancaggaccacagagcatcccagccagcaagcaagaangggagcnggctnacttgatgaatggagttttgctagaggaacaagacttgttattagacaaaaagtttctacatttattccctttagaaaaagctttgaagtacaagcttcatggttgccaacttcacaaattgccagcagcgtatttaccttgggaaccgcagcggttcttccattctatactcttatggtttttgcttcgaaatctgaattgactaaaaagtcta

SEQ ID NO: 8958 - DNA, 407 bp, Zea mays
  unsure (1)..(407): unsure at all n locations; Clone ID: LIB3137-054-Q1-K1-D9
ggttaaagaaccctaccgacgatgttccggctagcgtcacgcctcttggctcgaactaccaccccatggaggagaagtcgagcattttcgtcagatctaccagccacacccgctcaagattcgaacttcatcgaatcatggtccaaagtcatacccaacatagaccctcccaagacaccatcttctttcatgacccctcgccccgccaccccttctgctatcccttctaaactcactgttaactttgttcttccttatgcatctgagctctccgctaaagaggttgacatggtaatagttccagcaacaactggacagatgggtgttttgcctggtcatgtccctacaattgctgaactgaaacctgngatcttgtcggtgcatgaaggaaatgatgtcacaaaata

SEQ ID NO: 8959 - DNA, 356 bp, Zea mays
  unsure (1)..(356): unsure at all n locations; Clone ID: LIB3137-054-Q1-K1-E10
aggcgnncggaaaagctatacgnggcttaccaagaaaagttccataagactgctgtcgggcactactggactgcaatagcagaactcatcccccgtgaggtccctaacattgagaaaagaggcaagaaggatgcagaaaagaaaccatcagtatttgtcgtccaaggaccgaaacctggaaaaccgaccgatctttcaagaatgcgacacattcttgtgaagctgaagcattcacctccacctcacatgattcctcctccacccgctccagcaaaggacactaaagatggaaaggatgctaaagatggaaaagactcgaaaaacgttgacaaggctgcatcgaacggaactgcaga

SEQ ID NO: 8960 - DNA, 144 bp, Zea mays
  unsure (1)..(144): unsure at all n locations; Clone ID: LIB3137-054-Q1-K1-E12
caacnnnnggcgaaggccaaaacngaaagaggaaagagaaaanaaaanncaanncgagngcnnnngaanngaagagagagaagcagaagaaaggagnagnagaggaagnannngnngaagccccgangaggcncnaccgaccaa

SEQ ID NO: 8961 - DNA, 336 bp, Zea mays
  unsure (1)..(336): unsure at all n locations; Clone ID: LIB3137-054-Q1-K1-F11
gggccgacccacgcgaaggttgnggaggctgaaaaaggaaaaagctgcgttgcctgccatgccagctgggcacgggttacgttctcgaacaagggatttgttcgccagaccctttagaaagaagggttacattcccttgtctacttacctcaggacctacaagatcggcgactacgtcgacgtcaaggtaaacggtgccgttcacaagggtatgccccacaagttctaccatggtcgtactggtcgagtttggaatgtcacaaaacgtgccatcggtgtcgaagtcaacaagcaggtggggaaacaggaattatcaggaaagaggattcatgtacg

SEQ ID NO: 8962 - DNA, 302 bp, Zea mays
  unsure (1)..(302): unsure at all n locations; Clone ID: LIB3137-054-Q1-K1-F12
gtgcattaaactgctncaatgactttctaatccattgatccttgactatcttcggcatcttgatgtttagatgcattaacgatgtacaggaattagttccggtagtgcccaaatggaacttgtaatcttttgtattcataaatggaagttggagttcttgccatgaaggttgaacttgaatctctttgtgtgtagttttaccaatgcaattcatcaccttatcatattattagattggtaatatttttttgaaatttttatgtatgcattgaaactcataataattagaggaatcatttttg

SEQ ID NO: 8963 - DNA, 202 bp, Zea mays
  unsure (1)..(202): unsure at all n locations; Clone ID: LIB3137-054-Q1-K1-F9
acccacgcgnccgcccacgcgnccgcccacgcgnccggccgccgtcgggcgncnccccgagaggcgccgggaccgaggaaccggccganggcnagggagagaaacggnnnngcnngncncagcccggggncagccgcgncaggnggcggagaaggggagaaanncgngagaacngnnccggancaggcgngcgagcccggga

SEQ ID NO: 8964 - DNA, 306 bp, Zea mays
  unsure (1)..(306): unsure at all n locations; Clone ID: LIB3137-054-Q1-K1-G11
cgtacgcccacgcgtccgcccacgcgtccgcacagntagaggcaaaaagcagcttaggttgaagaagaacagtgataagaagaaaaaaggaaagaaatggcacaagggaaacaactccttgcgtggtggtggtaaagacaacaaacagtttcacagaggtggtgggagtttggataagtggtataactacaaaccacttgagcttcatggtacggtagtcaacgatgcctcaggcaaccttgatggttttaaggctggcaagacagacccctactgcgggactagctatttgaaaaaatcactcac

SEQ ID NO: 8965 - DNA, 342 bp, Zea mays
  Clone ID: LIB3137-054-Q1-K1-G12
atggcttcctgcaggatggcactcctccttggcttgctgctgctagtagtagcttcgcccgcgatcgctgatgacgactccggtatctactaccagctggctcttatgtggccaggagcatactgcgagcagaccagcgctgggtgctgcaagccgaccaccggcgtctcgccggcgcgcgacttctacataacgggcttcaccgtccttaacgcgaccaccgacgctgcagtgacgggatgcagcatcaaacttccttacgaccctaacctgattaccggcatccaaggcctgaatcagtactggagcaacatcaagtgccccagcaacaacaggcagagc

SEQ ID NO: 8966 - DNA, 312 bp, Zea mays
  unsure (1)..(312): unsure at all n locations; Clone ID: LIB3137-054-Q1-K1-H11
cgggccgacccacgcggccgcgggcgcgngggggcgggnccgcagcccccttaggcgcaganccccaccggcgccgccggcggccaccgcgnngcnccccncggcagccaggaagacagaagcaccagggcngccgcgggagaggcncgncaagcagcaacannacggccagaacgggaccaagcacaccnaccagaaagggcgccccgacgcgancaccnccgncgccaacccccaagcacccgcngccnccagcaaggacaagaaggggcgnggagnnnacaacaagncncaaggggnngggaagaaaga

SEQ ID NO: 8967 - DNA, 248 bp, Zea mays
  unsure (1)..(248): unsure at all n locations; Clone ID: LIB3137-054-Q1-K1-H9
ggaaccaatgtcgaaagactaggatctgatcctgggacatttgtgaatcactgcttgccatactcggttctttacttaattggtaatncattttttggctggaattgccttgcaccatggttttcgtaccctactcgtactgccattcggcgaaagtttaatcttgagggaagctgcgaggcactccataggtcatgtggatgttgtggaagctgcgtaaaagaataattgcaacgtgaacaatgtga

SEQ ID NO: 8968 - DNA, 388 bp, Zea mays
  Clone ID: LIB3137-056-Q1-K1-A1
ggaggagcaaggagcacgacgcgatgggccactccaacgtttggaactcgcaccctaagaactacggccctggctcccgcgtctgccgggtctgcgcgaacccccacggtctgatcaggaagtacgggctcatgtgctgcaggcagtgcttccgcagcaacgccaaggacattggtttcatcaagtaccgttgaagaggccactgtgctgctgtggagaacttcctacatcaaagaaatgggtccttcattagaaggcctaatttatgcgctttagctttttgttcagaacttgagactcatgtgttaaactcaacttgttaaagttttgatggctactttgtgcttgttggaccagctataatcagaagattgaaattttctcactc

SEQ ID NO: 8969 - DNA, 269 bp, Zea mays
  Clone ID: LIB3137-056-Q1-K1-A12
gcagctcttgcgattttccctcaagcgtttcgaaccggaacggatcctacgaatcggaggtgtgtgctgatatgcgaccacggggaacaactacccaaccgtcagcaccaaatacatctaggccttcaaaaaggccacgtgcaagctactatcccttatcacaaataagagctgttcacccctcatgctccttctcgccagatactccgtcttgacgaccgacacgaagtccatgaccagtgccgcgttatcaaccattacattcccag

SEQ ID NO: 8970 - DNA, 407 bp, Zea mays
  Clone ID: LIB3137-056-Q1-K1-A2
cggacgcgtgggattctatatccggcaatgatggatgtgagcccatttaataaaggcagagaaagcactatttggggtgtttcactcatgtttggttatcttggttttgatgggttcacaagcacgttccaagataaactcttcaaagggtatgacatggaaatacacaaccaaatattctacacgacagtgtgctcttgtcttcttagtttaagtgggctgattctccagaatcatctgattccagctgtggattttatgtttcatcacccagattgcttctctgatgttctaatcctgtccagcgttgcaacagctagtcagttctttatatcctacaccatccgaacatttggggctctcacatttgctaccataatgacaactagacagctattaagtatatt

SEQ ID NO: 8971 - DNA, 405 bp, Zea mays
  unsure (1)..(405): unsure at all n locations; Clone ID: LIB3137-056-Q1-K1-A3
cggacgcgngggantctatatccggcttttatggttgtgagcccatttaataaaggcggagaaagcactatttggggtgtttcactcatgtttggttatcttggttttgatgggttcacaagcacgttccaagataaactcttcaaagggtatgacatggaaatacacaaccaaatattctacacgacagtgtgctcttgtcttcttagtttaagtgggctgattctccagaatcatctgattccagctgcggattttatgtttcatcacccagattgcttctctgatgttctaatcctgtccagcgttgcaacagctagtcagttctttatatcctacaccatccgaacatttggggctctcacatttgctaccataatgacaactagacagctattaaagata

SEQ ID NO: 8972 - DNA, 412 bp, Zea mays
  Clone ID: LIB3137-056-Q1-K1-A4
ggtggctgcccgatatacgtcagcgacttgccgggttaccacaacttcgagctgctcaggaagctcgcgctccccgacggctccgtgctacgcgcgcagcttcccggccgccccacacgcgactgcctcttctacgacccggcgcgcgacggcgcgagtttgctcaagatctggaacctgaacaagtgcggtggcgtggtgggtgtgttcaactgccagggagccgggtggtgccacgtgaccaaacggacgcgcgtgcacgacgcgtagccggacacgctgaccggcaccgtgcgtgccgacgacgtcgacgccataacgcgcatcgctggtgacagcagcgggtgggacggcgagaccgtggtgtatgcgcaccgcacgcgggagctagtgcgactgcccctgggcgtcg

SEQ ID NO: 8973 - DNA, 419 bp, Zea mays
  unsure (1)..(419): unsure at all n locations; Clone ID: LIB3137-056-Q1-K1-A5
cccgcccgtactattttatttccggcgtttttaaaccctagcacccatacggtcntcggggacgttccgccgccgtcgatggaattcaggggtctcgaggtcaaacctggatccactgtcaagtgtgagcctggacatggctttatcctgcacgtttcccaggctgaccttggggaatcaaagaaaagtgacagcgccttaatgtatgtcaaaggtgatgacaagaagctggccattggaacgctctctatcgacaaatacccacagatacaattcgatttggttttcaataaagagtttgagctggcacacacatcgaaaactaccagtgtatttttctctggttacaaagttgagcacccaattgagggagatgaaatggatcttgattctgaggatgaagaggaggagctaaacat

SEQ ID NO: 8974 - DNA, 233 bp, Zea mays
  unsure (1)..(233): unsure at all n locations; Clone ID: LIB3137-056-Q1-K1-A7
gacagggacgaggggcaaaaanggcgccgaaagctgcaccaaacaagaagggagaagccaagacccaagccacgaaggangccaaggccgagaaggcnggggcagccaacaagaagaccaagaagacccgcacggccgagacagaacaccgccccacgacccggaaaaaggcgagggaccccaaggacccacgaaacagcacgaccggaaggaacaagcaagagcaggaccaa

SEQ ID NO: 8975 - DNA, 77 bp, Zea mays
  Clone ID: LIB3137-056-Q1-K1-A8
ggggcggcaggaacaggaatctggcaacagggaggcattcgagtcgcgaggacccccggctgagaacaacccgcgag

SEQ ID NO: 8976 - DNA, 424 bp, Zea mays
  Clone ID: LIB3137-056-Q1-K1-B1
ggacgaggaatacgaggagaagctgattaaggaaactgtggtgctgttcttcctagcaacatatggggatggggagccaactgataatgcagcacgattctacaaatggtttactgagggaaaagagaaggaagtttggttgaaggatcttaaatatggtatttttggccttggaaacaggcaatacgaacattttaataaggttgcaaaggtggtagatgagctagtagaggagcagggtgggaaacgtcttgttcctgttggccttggagacgatgatcagtgcattgaggatgatttcactgcatggaaagaactagtgtggccagaattagatcaattgctccgcgacgaggatgacacaactggtgcatcgactccatatactgctgctattcctgaatacagagttgttttcattgac

SEQ ID NO: 8977 - DNA, 429 bp, Zea mays
  unsure (1)..(429): unsure at all n locations; Clone ID: LIB3137-056-Q1-K1-B2
ctgaatcgctgacgcccagcctcctctgtcatctccctcctcggacctcgccacctcacgcggaaggaggggaagaggaagcgcggagactggaaatcgggccccaaatccgcttcggtctctcgatcggcgaggcatgattcatacaaccggctaggatggcctcaaaagctataaaaagaaggcctatcagcgctgagactgatacaacaggggaaaaacaaatggatacagcactgtcagatcctgtaacagaacctcttctaggaaacactcctcaggaagagaaatccaagacatatgagcctattacacggtcaggtttctgggatgggacggcacangagtgtcttcgttggacacatcttttagcagcttttgttgctcaatctgcaagaaacataagaaatgttctttctgaatttggat

SEQ ID NO: 8978 - DNA, 372 bp, Zea mays
  Clone ID: LIB3137-056-Q1-K1-B3
ctgactcgttgacgcttacacggtggtttgaaagttctgcaaggacaaggactacttgggcgaccggaggggcatagggcgcctggaccatggccatggcagcgtatatgacgacgaccatatgcacgcgcgacggatgattcatacatcggtggcgacaacgacggacacctatccaaagagaacctattagggctgcgactggtgcagctagctataaacagattgataccttactgttagagtctaagaactaacgtatggtacgaaacactcgctactgagagaaatgcgagacatataagctctattgaacggtgaggtttctgggatgggacggcacatgagtgtcttcgttggacacatcttttg

SEQ ID NO: 8979 - DNA, 423 bp, Zea mays
  Clone ID: LIB3137-056-Q1-K1-B4
gccgaccacgcgtcgctgaatcgttgacgcttaactcctggtcatatttttcctcggacctcgccacctcgggcggatggaggggaagaggaagcgcggacactggaaatcgggccccaaatccgcttcggtctatggatcggcgaggcatgattcatacaaccggctaggatggcctcaaaagctataaaaagaaagcctatcagcgctgagactgatacaacaggggaaaaacaaatggatacagcactgtcagatcctgtaacagaacctcttgtacgaaacactcctcacgaagagaaatccaagacatatgagcctattacacggtcaggtttctgggatgggacggcacaggagtgtcttcgttggacacatcttttagcagcttttgttgctcaatctgcaagaaacataagaaat

SEQ ID NO: 8980 - DNA, 398 bp, Zea mays
  unsure (1)..(398): unsure at all n locations; Clone ID: LIB3137-056-Q1-K1-B5
ggccaccgtgctcaattagttgggcctttacttcgagatcgnccccgtcgggctcacgggcggcgcccacaagcagcccgacttcctcaccctcaaccctttcggccagatcccggctctcgtcgacggagacgaagtcctcttcgagtcccgtgcgatcaaccggtacatcgccagcaagtacgcgtcggagggcacggacctgctccccgcgacggcgtcggcggcgaagctggaggtgtggctagaggtggagtcgcaccacttctacccgaacgcgtcgccgctggtgttccagctgctcgtgaggccgctcctgggcggcgcccccgacgcggcggtggtggacaagcacgcggagcagctcgccaaagtgctcgacgtgtacgaggcgcacc

SEQ ID NO: 8981 - DNA, 371 bp, Zea mays
  Clone ID: LIB3137-056-Q1-K1-B8
atgctcctctccgccttccgtcgcagcttttcccaccgggcaagatgaagacgatcctggcgtcggagacgatggacatcccggagggcgtcacggtcacggtggccgccaagctggtcacggtggagggcccccgcggcaagctcacccgcaacttcaagcacctcaacctcgacttccagctgcaggaggccggccgcaagctcaaggtggacgcctggttcggcacccgccgcaccatggccgccatccgcaccgccatctcccacgtccagaacctcatcaagggggtcaccaagggctaccgctacaagatgaggttcgtctacgcccactttcccatcaacgccttcatcaccaacagcaacacc

SEQ ID NO: 8982 - DNA, 401 bp, Zea mays
  Clone ID: LIB3137-056-Q1-K1-C1
acaaagcagagtgaggtaagcattcgttttaagctttgatctgatcgacatggccgccggcaccatggctctcacctcccgcgcgctcgtcggcaagccagcgaccagcaccagggacgtcttcggcgaggggcgcatcaccatgcgcaagactgctggcaagcccaagcccaagccagcggcgtccggcagcccctggtacggggccgaccgcgtcctgtacctgggcccgctgtccggccagcccccaagctacctgaccggcgagttccccggcgactacggctgggacaccgcggggctgtccgccgacccggagactttcgccaagaaccgcgagctggaggtgatccactgccgctgggctatgctgggcgcgctcgggtgcgtgttcccggagc

SEQ ID NO: 8983 - DNA, 411 bp, Zea mays
  unsure (1)..(411): unsure at all n locations; Clone ID: LIB3137-056-Q1-K1-C2
cggacgcgtggggcagtagctgcgtttgttgcattgttgtgaagacaaaaccccattgcttgcttcacccctgcatgatgcccaggaggtcttaccagcgaaaagccattgcgaacacgcccagatactatcaaactagcaagatcagcacataatccagctgcaagtttggcagcacatgctgaatgtccatttgcgtaagtatccgaagtgaagtaactgtaaagcatgttctttgtctgctcgacactttcaatgtggtctggactatgaaccataagaagttcctccttcgtgatttctcgaggaggtaccaaagcacattttgagggaagatttacaatgagttgaggcgcttacacaaattttcatccaagcctcttgttttatagntctacttcctgttgcatc

SEQ ID NO: 8984 - DNA, 285 bp, Zea mays
  Clone ID: LIB3137-056-Q1-K1-C3
gggacgcatacagctttatcggaatgctttcaattttttgaaagacaaacccctactgcgctctatgccgattggtgaagccctaactgctttaccacatgaacaaccgtgcacacgctctatgattctatgaaactggaacaatcagcacttaaagcatttactggtcatgaaacacaagctgattctatatagggggatccaactgaagcgtttttacgcttcatgcatggacgatggcacatcgaacatatggtgtatgaaacaagacaaaccatattaaga

SEQ ID NO: 8985 - DNA, 386 bp, Zea mays
  Clone ID: LIB3137-056-Q1-K1-C4
atcaaggttcaagaacaaattcagcttttgccggttgagattattttattcatcccggccgagaggctgcatcgaaaaagggagatcaaggatccccggggggcttctagacgcaaagggagggcgagaggcttcttctctgagcagcgaccggctcgccgtccagagaagaagaagacgacgacgaagaagaagcgcttctgggctccgtcgtcgcatgaagaaggaaaccatggaggggcatgtgccattgccattgccattgctcccggacggagaaactgcggtgggctacagcaaggacgccgcctcctcctcctcggcggctctctcgcctctgcaagaagagatttcgagcctgcgatcgatgcagcggcgtgttgaca

SEQ ID NO: 8986 - DNA, 234 bp, Zea mays
  unsure (1)..(234): unsure at all n locations; Clone ID: LIB3137-056-Q1-K1-C5
gaaaaagggagaccaaggaaccccggggggccccaagacgcaaagggagggcgagaggcnncnncacagagcagcgaccggcncgccgnccagagaagaagaagacgacgacgaagaagaagcgcgncggggccccgncgncgcaagaagaaggaaaccanggaggggcaagngccanngccanngccanngcccccggacggagaaacngcagagggcnacagcaaggacgcc

SEQ ID NO: 8987 - DNA, 407 bp, Zea mays
  Clone ID: LIB3137-056-Q1-K1-D1
gaaaccctcgcactctagcggcccgcactaagccgtcggagcgccgcgccaccatgtaccggcttttccgccgcagcttctccatggctgccgagggttccgccgccgccgcctcttcctctccacccccctccacctccatgtcctcgaccccgcggcaacatctgccggacgagctgtaccgccgcatcatgaatgtcgggcgcccaagcatcccgttatcccccgtcctggagcaatggaatcaagaaggccataccgccaagaagttcgtcatccaggccatcgtcaagaagctcgtcggcctccgccgcttcgcccacgcactcgagctgtcgttctggatgaccgaccgcaggcacctccacctttcggtcggtgacgtcgcgtaccggctggacctaatc

SEQ ID NO: 8988 - DNA, 410 bp, Zea mays
  Clone ID: LIB3137-056-Q1-K1-D2
agatcgtactggaccaatctgccaccattctttgatcacacacaggaagttgagatcagaaaaatgcaggctgccgctactgccgccgggttctcggccgtgctgcccgccaagggcaggccggcggcgaggagcagggtggtggcccgtgtccccgccacaaggaggagcgtccgtgtagctgccgtcgtcgcgaccgaggccgcgcagatcgactacagctcaagcgtctcggtgttcccgatggaggcctgcgacctgcttggtggcgacgcgtgcaacgggcccatgttcccggaggccaagcccgcctcggcggcggcggcggcgagcaagagtgtggtcggggtggacagggactacctgtcctacgacgagccaaagacggtgttcccgggcgaggcgtgcga

SEQ ID NO: 8989 - DNA, 405 bp, Zea mays
  Clone ID: LIB3137-056-Q1-K1-D4
gccatccccttttgctgcaaatctttcctagaattgtgggtctccgacaatggcggcgctcgctccatccaagattctgggcacccagctcaacttcgcgggctcctcccgctacgccaccgcagcgcccaccgcgggggctcagaagattgtctcccttttcagcaagaagcctgcccagaagcccaagcccgctgcggtatcgtcctcttctccagacatcagcgacgagctcgccaagtggtatggtcctgacaggaggatctacctgccggatgggctgctggaccgatcggaggtgccggagtacctcaccggagaggtccctggagactatggctacgacccttttggcctgggcaagaagccagaggacttcgccaagtaccaggcctacgagctgat

SEQ ID NO: 8990 - DNA, 379 bp, Zea mays
  unsure (1)..(379): unsure at all n locations; Clone ID: LIB3137-056-Q1-K1-E2
acccacgcgtacggtttgtttctgcccctatatcaacccattctctgtttaaggctataaaactcgtggaagtgcatatgccatgcttggcaaacgggacgaagctgctcatgatctgcacacagcatctaacatggattacgacgaggagatcaatgctgagctcaagaaggtggagcctaatgctcacaagatagtggaacatcgcatgaagtatgagatgttgagaaaagagagggaggaaaagagattgctttttgatcggctncgncaacgngcagaggcgcaagctgcttacgacaaggccaagaggaaggagcaatcttcaagtcgctcatcaggaggtgcatcttccagaggctttcctggaaggaagcct

SEQ ID NO: 8991 - DNA, 396 bp, Zea mays
  Clone ID: LIB3137-056-Q1-K1-E3
gtcggccgccacaaccgccccaaccccttcggtggtcaccccgatggcgccgcctccggggtacccggcctcctccacgatctccgcctccgtggccgcgtcggtcgaggaagaggacgacctctatggccgcctcaagtcgctccagcgccacatggagttcgtcgagatccaggaggagtacgttaaagacgaacagaagaacctcaagcgcgaactcctccgtgcgcaggaggaggtcaagcggatccagtccgtaccgctcgtcatcggccagtttatggagatggtcgacggcaacaacggcatcgtgggttctactacgggcagcaactactatgtgcggatcctcagcaccatcaaccgcgagctgctcaagccgtcagcatctgtcgc

SEQ ID NO: 8992 - DNA, 384 bp, Zea mays
  unsure (1)..(384): unsure at all n locations; Clone ID: LIB3137-056-Q1-K1-E4
ccacgcgtccggtcacggtcaccaactcgacaaaaccgttgatngttttagaacaagggcacgaacaaggggaagtccgggctgccggacgacgtaccggcccctccgccggcggagggcgctacagatacagaggcatggcccccgcagcccggaaccataaccctaaccgctgccaccgatgctgcagcagnaggttcaaaaacagaatacaattttatctgttatgcctcgacgtgcccatgcggcggcnaaaccgaaagctcgcgtgggaccgcgtactcgcactccttttgtgacttgtcctcgtcagaatccacagcttcgtcgtacgacgcccgcgaagaacgatgggacctcacctggctgctcgacccattagcc

SEQ ID NO: 8993 - DNA, 135 bp, Zea mays
  unsure (1)..(135): unsure at all n locations; Clone ID: LIB3137-056-Q1-K1-E6
aaaagaattcttaggtcaatttctaggtttactctnnncgggataagaagggggttggatgataatgtagagctctgtgccggatacattggttttgggaagggttacagaagaatactagcaccttacatgttg

SEQ ID NO: 8994 - DNA, 422 bp, Zea mays
  unsure (1)..(422): unsure at all n locations; Clone ID: LIB3137-056-Q1-K1-F1
cggacgcgtgggcaagcacaagcgcactttagcaattgcttctgaggttgtccgccctagcgacgccgagctactaaaggcacaagccgacatatggcggctcagcctctcctacctcacgcccctgtcactgaggtgcgccgtggagcttggcatccctacggcgatctaccgccatggcggggctgcctcagccgctgagctggtcacggcgctgtctctcccctccactaagctgccgttcctccgccgcctgctgcggctcctcgccgcgtcgggcgtgttcaccgtcgacaagcagagctcggaggaggagcggtaccgcatcagccccgtgtcctacctcctggtggacggcatccctcacgaggaccacatgaaccacaccgctctggtgctcacctgcacctngacgcgctaca

SEQ ID NO: 8995 - DNA, 328 bp, Zea mays
  unsure (1)..(328): unsure at all n locations; Clone ID: LIB3137-056-Q1-K1-F2
acgcgacgattggactagaacgtttaaaaacacattttaaaactgttcgaagaacccancccccgtgtcccgggggaacttctctacggccaaaccaaaatacggaggctaacgaggctgctctctaaagccgtctctcttcaggagggcctacgaggcggcgaagcccaacacnagccnccgcaagggaggaacctattttttcgctaaacttgtgttttatttttcaccggaggagcctaagaagaggaagcagaagctgcgggttttttttctttataagcacaacgatatccccaagagatagagcatcggctcatcataacag

SEQ ID NO: 8996 - DNA, 428 bp, Zea mays
  Clone ID: LIB3137-056-Q1-K1-F3
cggacgcgtgggtccttcgaggcccccttcgtgctttccatggtgctccccatctgcggggacttggacggcttccaggcggccaccaaggatatggtgaagaataagaaggggacgaccacgcttgccttcatcttcgacaagggcgtcatcgtcgccgctgattccagggccagcatgggcggttatatatcctcacaaaccgtgaggaaaattattgaaataaatccttacatgctggggacaatggctggaggtgctgctgattgccaattttggcataggaacctaggaaccaagtgtcgtctccatgagctttcaaacaagcgaaggatctctattgctggtgcttccaaactgttggctaacatcctttattcatatcgggggatgggactgtcgattggtacaatgatcgctggatggga

SEQ ID NO: 8997 - DNA, 371 bp, Zea mays
  unsure (1)..(371): unsure at all n locations; Clone ID: LIB3137-056-Q1-K1-F7
ggcccgacccacgcgancgggggcancaaggnggccagtttcagcttttacaacgccgccnacgacgagggcgcggcgggcaaggccgaccgccncacgcccgacacacaggaggaggagcgcgacacggacgagacccccgagcgccaccgcgagaagagcaaccgggacggcgacgccagcngcgacangggcgccaacaaccgcancaacgggaaacccgccggcgccgacgcgcgccagcngncggagaccgnccggagccagnggcagcnccacggggacaacaggcacggacggcgacnccggacgcggcaaggaccgggacgccaagaggcncaacnacaccggcgncgaggccaccgccgcgg

SEQ ID NO: 8998 - DNA, 362 bp, Zea mays
  Clone ID: LIB3137-056-Q1-K1-G1
atcgatgtcgggacgaactccgtcgactaccctactcggaagtccgggtaccggctcgtcggcgatgtggatttcgcagcggcgagcaaggttgctgggtacctgactccggttcccggaggcgttggcccaatgacggtggcaatgctgctgaagaacacggtggatggggcaaagcgggggatagtcgagtagctacgttcatctcacttctcgttgctgtacgactgtgttgcaaggatgtgagctgactcgaaaagcgtgtgttggttggtgtaacaatctgtttcccaagaataagaatgatagtcacagctgctttcctgtttaataaatgcagtgaagaaagaattttggctttg

SEQ ID NO: 8999 - DNA, 206 bp, Zea mays
  unsure (1)..(206): unsure at all n locations; Clone ID: LIB3137-056-Q1-K1-G3
agaacaacaanggcaccgggancctgcagcactccgacagcgnaggcgaccacgacaccgccacgcgggacgncgccnaccgcgncgcccgcaaaggcgacaaagaccnagngccggacacaggccgagggaacccgnggaagcngaacggcccgnncgacggcgacagcnncaagcggnggcgggcggggcaagccccgggccgg

SEQ ID NO: 9000 - DNA, 404 bp, Zea mays
  unsure (1)..(404): unsure at all n locations; Clone ID: LIB3137-056-Q1-K1-G5
gttgacgtttaaagcgttacgttctaccgttcttggaggcagcagngaaccgggcagagggggagtgtgagagaagtagggaacgcccaccgcggcgccgccgacgccacacccggccgagccgaaaccgagactgcatcctccttcgcggcgcgccgagatgagcggcatgagcctctcccatcgtctccctcccgccgcggcggcggtggacccctactacgtgtatgcggcgcacccggacccacagcggcagggcgtgctcacgctcttcgtcgcggtgctccccgacgacgtgaagccccgcgagatccacaaccttttcttctaccgccccggcttcgatcactgcctcctcgagtacaccggccgtggcaaccatgcggttgcttttgtgacgttct

SEQ ID NO: 9001 - DNA, 385 bp, Zea mays
  Clone ID: LIB3137-056-Q1-K1-H1
gcgcctccgcaggccatggaggtgcgcgtcaagattctcttcacctcgctctgccacaccgacgtgtacttctgggaggccaaggggcagactcccgtgttccctcggatctttggccatgaggctggaggtatcatagagagtgttggagagggtgtgactgacgtagctccgggcgaccatgtccttcctgtgttcactggggagtgcaaggagtgcgcccactgcaagtcggcagagagcaacatgtgtgatttgctcaggatcaacactgaccgcggtgtgatgattggcgatggcaagtcgcggttttcaatcaatgggaagcctatctaccactttgttgggacttccaccttcagcgagtacaccgtcatgcatgtcg

SEQ ID NO: 9002 - DNA, 494 bp, Zea mays
  unsure (1)..(494): unsure at all n locations; Clone ID: LIB3137-056-Q1-K1-H2
ccgggnncggacccacgcccgtccgnnggctctctggggctcgccacgcccgctcgtacctatgtcgccgctgctgcctcacatgngnnctcccnntcgttcacggtagccctgcgcgtctcggccccgcgaaccctccgnctcgccgccnnngcgaccgcncnttcgcggtnctcctcctcggccccgccgcccccggacgggcnanntccactttttgtggcgccttnctccgcatcnnacccgacnngggctgggctgggggcctnntccgtcgcggcgcccgcgtactggcgccgccaagcgggcacccccggcgtcgcctacgccaccgcagctacccgagaagagcatctacgactacaccgttaaggacattgatggaaaagatgttcctcttaaaaagttcaagaataaggtgttgctgattgttaacgttgcttctcaatgtgggttgacaacagcaaattacactgaactatctcatatctatg

SEQ ID NO: 9003 - DNA, 423 bp, Zea mays
  Clone ID: LIB3137-056-Q1-K1-H3
ggcgctctgctcgccacgcgccgtacctttgccgttcgccacatggctccctcgttcacgagcctgctctcggccgcgaactccgccgccgccgcgaccgcctcgcggctcccctcggccgccgccggacgggcatccacttttgtgcgcttcccgcatcacccgacgggctgggctggggcctccgtcgcggcgccgcgtacggcgcgcaagcgggcacccggcgtcgcctacgccaccgcagctaccgagaagagcatctacgactacaccgttaaggacattgatggaaaagatgttcctcttaaaaagttcaagaataaggtgttgctgattgttaacgttgcttctcaatgtgggttgacaacagcaaattacactgaactatctcatatctatgagaagtacaagactcaaggggtt

SEQ ID NO: 9004 - DNA, 368 bp, Zea mays
  Clone ID: LIB3137-056-Q1-K1-H4
ggccgaccacgcgtccgaagcaaaccataaacgtaacgccaggcttttagactttgacgcctgactccacacactgtgttgcctgtcattcccagagctttcttgcatcgccaggaatccactggaaattttgtaattggactacagaactgtatccatcgacgaacgcgcatggagttggccatgggtcacggtagggaacacagaccagcaccgcggtcctctcccaccagctcattgatcctgtcctacctgtacggtattcctgcggagaccttcgaattttactcgatcgaacacaacatgaaacgggcacgcggtgccagcccccctatgactgcgatgaccaatccgaacgatgatggtta

SEQ ID NO: 9005 - DNA, 436 bp, Zea mays
  Clone ID: LIB3137-056-Q1-K1-H5
ccgacccacgcggccgacttttgctacaaatttttttctaaatttctgaactccaacaatggctgcgcgggcttgatccattatactgggcacccacctcaacttcgcgggctcctcccgctacgccaccgcagcgcccaccgcgatggctcagaagattgactcccttttcaacaagaagcctgcccagaagcccaatcccgatgctgcatcgtcgttttctccagacatcagcgacaagctcgccaaatggtatggtcctgacaggaagatctacctgccggattcgctgttggacctttcggatgtgcctgagtacctcaccgaataggtccctgcagactatggctacgacccttttggcctgtgcaagaaaccaaaggacttcgacaaataccaggcctacaaacttatccataccaaattggccaatctc

SEQ ID NO: 9006 - DNA, 305 bp, Zea mays
  unsure (1)..(305): unsure at all n locations; Clone ID: LIB3137-057-Q1-K1-A3
ctggctctttgcctaacttttggncnnacttcttattcttatcttacactgacncntgagctcatgcagaattctaaaccgacagtgcataccaacaaaaacacccaacctccccatcatgagtaagccttgtaggaccatacataccctaacactatcgctgcccactctccgagtagcgatggccaaggttttttcttttatccttcacaaccgaacccgcaactcaccgctcaagcgaacacactttcgaccgcaccacagctctccttcatgatgcttgtgccaactactaccctttcatc

SEQ ID NO: 9007 - DNA, 331 bp, Zea mays
  Clone ID: LIB3137-057-Q1-K1-A7
gccgaaaggctctgaagaagcctttcaatttttagttctactactagtagctggcctgcgcatctgttctgttgtttacttcgcaaagccttctgtttcggcgaccatggaggatgagaggaacacccagcagcaccagggcggtgaggcccatcaggacgccgccgatcaggtggacgtgaaggatttgtttctcctgtacagccttctcggcaggaagaagcacgacgacgaccaggagaagaagaagcagacggatgagctggcgaccggcatggagaacgtcacggtgttcgagcccgagaagcacgggcacaaagaggaagagcac

SEQ ID NO: 9008 - DNA, 197 bp, Zea mays
  Clone ID: LIB3137-058-Q1-K1-G5
ggtagacaaacgtaaaaggttcaatcttttattgttgcaccaatgtaatactctgttcattacacacagcccccctgatgacaaattttttcagaatatgctttctcactgcacatcagcatggcaggacctacccatctaatcataaacggcccacgcctttaagcaaattcatggacatgaaaacggactcacat

SEQ ID NO: 9009 - DNA, 379 bp, Zea mays
  Clone ID: LIB3137-060-Q1-K1-A9
ggaacactcttttattctcaaaccattttctttttcctcaagggaacggaagaccaacagacattctctttttgccttatcactcccaactatgaccgtttctactttaaatactcatacaccaaaggctggtgagccgtatgctgatctaagcgaccaatatgctgtactggtatcttatcgctgtaattacacataatctattactttttttaagtaagtaacacactgtgctccctctgcattcagcgatcttatcatctcagtatcatccgaactgtctttacggaatcctaatctttgtgctcgtgttccttaacttcccatacagatactaacactttaaactactaatattacatttgaaaacctttcatta

SEQ ID NO: 9010 - DNA, 254 bp, Zea mays
  unsure (1)..(254): unsure at all n locations; Clone ID: LIB3137-060-Q1-K1-C10
gacggacggacccagtgaggcgagcacgggctctcaccggcgatggcgacgagggcatgggtggccgctgcggtggccttgaaccctcaactgctgcctctccgctcctgctcgcccacgaagtcggtctccccagcgcagcgctcggcgtcnatggtgctccggctgcgcagcggccggtcgtgcgtggggaagatcgtgtgccgccgcgccaataacgcgggatactaggactacaatgttccggaccccat

SEQ ID NO: 9011 - DNA, 168 bp, Zea mays
  Clone ID: LIB3137-061-Q1-K1-E11
aaccggcataacatagctctttcgccccctttttgagcacccggagccgtagggagtcgggagcctcatcctcatgcttgccggcccctttatcgcaccttggggaaaggaggcccacatcatcgtcctcaggatcccctaaaagcacctgtttgagaaggcaccgcc

SEQ ID NO: 9012 - DNA, 175 bp, Zea mays
  Clone ID: LIB3137-061-Q1-K1-E9
cacggtgatagaggatctactgtgccgtctttccgagaagacggagcacaaggtctcagtgggctacttgtacaagcccttcatcttctccttggctcgtctggaccttgccaacaactggcctggtctgcggctgctctacggtcgcaacgagccgctggcagagttggttaac

SEQ ID NO: 9013 - DNA, 245 bp, Zea mays
  Clone ID: LIB3137-061-Q1-K1-F9
gtcggactcgtgcgctctttccacactcttttttaaattgcaactgacgagcctgatcagcgagcatgcacagctcagtcaccagcatttcataacagttacttcaaataaatcaagttatttactttttaacgaaatacaagacatgaactttttgagccatcttccctggaaagagcagaacgaacaggatcttgtagttttgcctacagatgctgcattatctgaagacccatcggtcaatg

SEQ ID NO: 9014 - DNA, 188 bp, Zea mays
  Clone ID: LIB3137-062-Q1-K1-A3
ataatgctacagacactttttatcatttaccttgccaccaacgaatgcgggaactggcgataccagcacggttattcatacccataccacaaccaccacatcccatactgagaactggatggcatcagagctgtgtcttcctcacactatgaactcgagtgcggtcaggatcaagaatgcactgtcgc

SEQ ID NO: 9015 - DNA, 401 bp, Zea mays
  unsure (1)..(401): unsure at all n locations; Clone ID: LIB3137-062-Q1-K1-B11
ggaaatttgctgtttctggatgttggcctctggctatcccaggagataaaggatcatttcaagaagaagccccgtttcccaataaccctcaagtacatcgacccgacctacatgatccgcgctgtcagttcaaacgcttccgacaacgtctactgcactctgctagcccacagcgcgctccatggcgccatggcggggtacaccggcttcaccgtcgctccggtgaatggcagacacgcctacatcccgttctataggatcaccgagaagcagaacaaggtggtgatcacggaccggatgtgggcgagggtgctgtgctcgacgaaccagccctgcttnctgagccacgaggacgtggagaacatgaagcacgacgacgacgagcaccacctgcacaacac

SEQ ID NO: 9016 - DNA, 334 bp, Zea mays
  unsure (1)..(334): unsure at all n locations; Clone ID: LIB3137-062-Q1-K1-D4
aatcagtcagtcacagctcacattaaacacttcgaagccgcccccgctcccaagcccgaccgagcaaagcgcaaagccccccaaccgcggatcaatccgcagcatcgatggcgcccaaggcggagaaaaagccggcggcgaagaagcccgcggaggaggagcccgcgaccgagaaggcggagaaggctccggcagggaagaagccgaaggcggagaaacgcctccccgcgggcaagttcttnnccngcgagggcaagaagggcaagaagaaagccaagatgagcgtggagacctacaagatctacatcttcaaggtgctcaagcaggtgcaccc

SEQ ID NO: 9017 - DNA, 244 bp, Zea mays
  Clone ID: LIB3137-062-Q1-K1-D8
taaaacgaccatgcattgaggaaaatatcttagttcatatatgatcatgcaagttcgcacgcgagaaagcatctctaacagtgtaacgtgcgacaaatgcaaacgcgacgcaatactccaattcctcttccatgtcccaccttcagatcgatttgcagatatctgctcggatattgtccaggtatgtgacgcacaagtttcttgaacaattacaactgaaatatgccgcacaacaatatttatt

SEQ ID NO: 9018 - DNA, 213 bp, Zea mays
  Clone ID: LIB3137-062-Q1-K1-D9
cctaaaacaactcctttacttatgtctcatctctacgccaccaccccctaagcaggtggagctgcctttaaactccctatgtaatcataagacccataaccactttactacatcaaagcccatgattactactaatctctctcctcacacataatgactgcattcacatctaaaagattataacatacactccaacataacctttcattacaa

SEQ ID NO: 9019 - DNA, 336 bp, Zea mays
  unsure (1)..(336): unsure at all n locations; Clone ID: LIB3137-062-Q1-K1-F9
gatcaaanatagagatagagctgtattatttatcatgaagggtggcaagaagggggtgggcggggctgtggtggccataggtgctcttctgcaactcatggcagctccaccgacggccatggccgcccgctcgccgcacggagccgtgccggatggctccctcgccacgacgcccaaggtgacgatgctgtcggccacgctgtgctacacgggggagacatgcaaatacattggctgcctcactcctgcttgctcctgcaactatagtgatcgtctatgctacatcatatttactcctgttgcttgaggccattccgcgaagccacaactcttaca

SEQ ID NO: 9020 - DNA, 219 bp, Zea mays
  Clone ID: LIB3137-001-Q1-K1-A10
ctaacacattctcatacgcattctcttacttttaggccccaccacgctttattggcgacggcgttatcatcacgccgggtgagactacccgatctatcgcccagctcgcctgcctgtgatcgacccggtcgctgcctccgatcctcttgctgcccaacaccctgcctacttcagccagctagccaggttgagaccgactagctcgatctagctgctgac

SEQ ID NO: 9021 - DNA, 324 bp, Zea mays
  Clone ID: LIB3137-001-Q1-K1-D6
gttctagatcgcgagccgacacctcctgcttatttttgcatcactgtgatggttataaacggcaagatcaacaacaacaacagcaacaacaacaacaacaacaacaacaacaacaacaacaacaacaacaacaacaacaacaacaacaacaagctttaaatccttctgatctgacgcaggtttcattgccatgtacgctactctagctagccgcgacgtggactgttgcttaatcccggagtcgcccttctaccttgaagggaagggagggctccttgagtttgtcgagagacggctcaaggacaactgacacatggtcatcgt

SEQ ID NO: 9022 - DNA, 241 bp, Zea mays
  Clone ID: LIB3137-002-Q1-K1-F8
tcgattgcgcacaaaaagacaaccggatctcaccgaataccaccagtgggcacatgaggtagaggcgcggatcttatgcaaatctctgactggacagactatgagaactacgatgtggactcgagtgacaacattgacaacgttacggccaagatacagtacaatgaaggcatacgaatggaccagcagaggctcatctttactgacatacagtttgaagacggtcgcacacttactgact

SEQ ID NO: 9023 - DNA, 275 bp, Zea mays
  Clone ID: LIB3137-002-Q1-K1-G6
tcgtacatggagaacacacagatgctcattattgaagctgaccgcctcgaccggaaacgatgggtagaggctatatatgacctccacaggatgctgaatgcggatcaactgatcgacgctagactgctagaatatgcatacatgctagatcttgcatgtgatatgaatgctgctggaatatctgacatgcttaggctgcattccatgctacagcggcgctcatgcatgcacaacacttacgctacatctggagcagggatctatgacgatctaga

SEQ ID NO: 9024 - DNA, 279 bp, Zea mays
  unsure (1)..(279): unsure at all n locations; Clone ID: LIB3137-003-Q1-K1-H9
ccggnctagaattacaacactagactcacatttatctgtgttgcactcactacaatctttcaacttgtaaaacatcactttacagataaatgaataaggcgtccttctcacagggagaggcgcattgaacatttgccacaaacattttttttcttttaaccaacaaaacaaccaacagctaataaccctatacctcctgcacctaaaaaaccagcagatatctgtctaccctgttttgacacagaagtcgacaatcctgaatgatggcatacaacttca

SEQ ID NO: 9025 - DNA, 339 bp, Zea mays
  unsure (1)..(339): unsure at all n locations; Clone ID: LIB3137-004-Q1-K1-D4
cgccgctcctctaacaacccagtcgctcataaccctatagctctcgcctgctcgcctgggccgccggagcgagctccccatcttcatccgtcaaccatggcgacccacatcagcaagaagaagaagttcgtcagcgacggtgttttctacgccgagctcaatgagatgctgacgcgggagctggcggaggatggctactctggcgtgtaggtgcgcgtcacgccgatgcgcacggagatcatcatccgcgccacgcgcacgcagaacgtgctctgagagaagggccgcangatcagggagcttacctccgtcgtccagaagaggttcaacttgcctgag

SEQ ID NO: 9026 - DNA, 482 bp, Zea mays
  Clone ID: LIB3137-005-Q1-K1-F9
ctcttctcgggtttcacggaggagctgctttttctctctatggtgagaaggacaagatgaagtgagcatctttccctgcttctccctctcttctagggtttcagggagagtctggtttcttcttttccactctctgtctagggtttcaaggagaagcaagcatctttctctctaagaatggggtgttgagaagaacaaggtaaaggttttcgtatctttccagggtggtgatggtgacaagttcaaggtgacatggcgttgtgcctggctccctgtatgccacacatatatagactgatctgaactgagattggctactgtgggtggcgtgcgaggagccaagcataccctctctctctctctctctctctctctctctctctctctctctctctctctctctctttctctctctctgatacttatcatttgtgtagatcttttattttgcagagatttcaagcatagtcacacaactcatc

SEQ ID NO: 9027 - DNA, 389 bp, Zea mays
  unsure (1)..(389): unsure at all n locations; Clone ID: LIB3137-008-Q1-K1-E4
gtacttgcttcanatggtcttcaagaatacctcaaccagcaaggattccatatcgtgggctatggctgtaccacttgcattggaaactctggtgatctcgatgaatccgtatcaactgccattacagaaaatgatgttgttgctgctgctgttttgtcgggtaaccgtaacttcgagggtcgtgtgcaccctttaactcgggctaactatcttgcttcaccacctcttgttgttgcttatgcacttgccggaactgttgatattgattttgagaaagagcccattggatttggaaaggatggcaaggaagtctacttcagggatatatggccctcaacagaagaaattgcgcaggttgtccaatccagtgtgctgcctgacatgttcaa

SEQ ID NO: 9028 - DNA, 144 bp, Zea mays
  Clone ID: LIB3137-009-Q1-K1-C3
tcattaaccttcacactgctgctcgccgaacgacaactcatagccgcctgggagctccacaataccatcctacgcatgcgtacatatgccgccgatgctacgcactcatatgctacctcgagacttggtggcgccactggccca

SEQ ID NO: 9029 - DNA, 81 bp, Zea mays
  unsure (1)..(81): unsure at all n locations; Clone ID: LIB3137-013-Q1-K1-D8
gttctagatcgcgagcggcgcccntttttttttttttttttttttactcaggcaaatgcacagatcttacagaagcaaacg

SEQ ID NO: 9030 - DNA, 407 bp, Zea mays
  Clone ID: LIB3137-025-Q1-K1-A3
accctctcgctctccgcaaggcgacgacggttaggccaccgccgccggcgccgtcccactacgacaactgctgaggccttcatcgctttcttcgccggcgacgagcacccaccaactaaggtcatggaagagatgatagatctaacgggggatggaggtgttcttaagacagtagtgcggaaagcaaaagatgatgctatagcgccatccgagagcctgcccttggttgatgttcattacgaaggtacacttgctgagactggtgaagttttcgataccacccatgaagataactctattttctcatttgaaattggacaaggcgctgtcatcaaagcatgggatatagccttaagaactatgaaagttggcgaggttgcaaaaattacatgcaaatcagaatatgc

SEQ ID NO: 9031 - DNA, 381 bp, Zea mays
  Clone ID: LIB3137-025-Q1-K1-A5
ccagaagaacccgaatggaaaccggcaggttctttttcaaggagggcgtgctgtatgccaagaaggactacaacctggcgaagcacccacagattgatgtgcccaacctccaggtgatcaagctcatgcagagcttcaagtccaaggagtatgtcagagagaccttctcctggcagtactactactggtacctcaccaacgatggcattgagcacctacgcaactacctgaacctcccgtctgagatcgtgcctgccacgctcaagaagtctgccaggccactgggccgtccatttggctctggccctcctggtgaccgcccaaggggccctggtcgttttgaagacagaccaaagtttggagacagggatgaagtaccgg

SEQ ID NO: 9032 - DNA, 415 bp, Zea mays
  Clone ID: LIB3137-025-Q1-K1-A6
gttttctttcggaactaaaaactttcgtgcttacctaatccgttcgacaaatccacacgaatcctgtgattcagagcagggtgttggcattgatcagacgcctgccatggcggatcagttcgtggattcggcgaacaatgtgatcattgaggaggtgaacaagggcctgaacccaggaatggtggttctgcttgtggttgcaagctttctgctgctcttctttgtggggaactatgcgatgtatgtgtatgcgcagaagacgctcccggcaaagaagaagaagccggtgtccaagaagaagctgaagaaggaaaaactgaagcaaggggtctctgcgccgggagaagtaaccgacatgctgccgatcctaccgttcagagcttctattcacatgattattaaagaaaaaaattta

SEQ ID NO: 9033 - DNA, 356 bp, Zea mays
  Clone ID: LIB3137-025-Q1-K1-B1
cttccggggacctaaaatttaaactgatgaaccagcatttaaaactgaagcaccaggagcagcccagaagacacgtaaaaaatatagcctattgtctggcgtgggatcgaaggtaaaacaccaactcgcaaaagtgaagaaagccattgtaggcaaacctgggcacacaaaaccagtatctccgacggcataaaactccagtcaccttagaacatgtacattattgtattgtttgtagtcttgtgagccatttatttcggtggtagtgtttgcgatgggctaggagaaagtcctcttcacaaccatagcattggaattctatgatgttgcacatgaaacaccccccccccccctcg

SEQ ID NO: 9034 - DNA, 268 bp, Zea mays
  Clone ID: LIB3137-025-Q1-K1-B11
gaccagcagcacgaggacgtggagtcgctcaagaagctcatcgacgagactacgttctacgacaggcagtggcaggctacctggcaagatgaccccaccgaggggccaaagaattagttcggcgttgggggcgcaaacgcagaatgctcgcttcttgtggtgtgtgtgtcttgcctctttcttcggccctttttgtttcaccgtttagtcaggcttggaggaactttttgatgatcgtcataatctatctatctacgtgatcttgtgc

SEQ ID NO: 9035 - DNA, 380 bp, Zea mays
  unsure (1)..(380): unsure at all n locations; Clone ID: LIB3137-025-Q1-K1-B3
aagccaccgggatcccggcttccttctcgcacctgcggatctactctccgcacctgcggatctactaccccccggcgaaacaagcgccccgacgcctcagggaatgcggagcgatgaggcggcgctcaggcactgacgtcgccggtcagcgcgagctgcgcggcgaccgaacctgccatcgcaagcacgtcgaggacgggtagactcgtccatccttccttcctcctgttagtcgtcgtagggtagtttgcactttgcagatagctagctagtagttaggggatcaggcatgggtgagggcgaggcggangtgaaaggcggggtgctgcaaggccgctacgagctcggccgcgtgctgggtcacggcaacttcgggcgcg

SEQ ID NO: 9036 - DNA, 376 bp, Zea mays
  unsure (1)..(376): unsure at all n locations; Clone ID: LIB3137-025-Q1-K1-B5
gagaagtgcaaggaagcaggcggncaccatggtgaagggacgcacgggacagcgcgtcaggctctacgtccggggcaccatcctcggatacaagaggtccaagtcgaaccagtacgagaccacgtcgctcgttcagatcgagggggtgaacaccaaggaggacgtcgcgtggtacgctggcaagcgcatggcgtacatctacaaggctaagaccaagagcagcgagacccgctacaggtgcatctggggcaaggtcacccgcccgcacggcaactcgggcgtcgtccgcgccaagttcaagtccaacctcccgcctgagtccatggggcgcaaggtcagagtgttcatgtacccgagcagcatctaaggtttttgg

SEQ ID NO: 9037 - DNA, 403 bp, Zea mays
  Clone ID: LIB3137-025-Q1-K1-B6
gtccggctgttaatcctacagaagttctgcttgtcgttgatgccatgactggccaagaagcagcagcactagtcaccaccttcaatattgagattggtataactggtgcaatactgactaaattggatggtgactccaggggcggagccgcactaagcgttaaagaggtctctgggaggcccatcaaatttgttgggcgtggggagcgattagaggacctcgagcttttctaccctgatcgcatggcacagcgagttctgggaatgggagacgtgctttcatttgtcgaaaagacacaagaagtgatgaagcaagaagaagctatagaattacagaagaagatcatgagtgcaaaattcgacttcaacgatttcttaaaacaatctcaaaaacgtgcgaaaat

SEQ ID NO: 9038 - DNA, 372 bp, Zea mays
  unsure (1)..(372): unsure at all n locations; Clone ID: LIB3137-025-Q1-K1-C5
tttggccttttccagtggcccagcttcgtttttggtaacgcagagtacatccaagctacggctcactaccgcttcgattttgaacatgaactgcagcactcagtcgatggcctcacccgcagccgcagcagcatcagcagagttcacgcagatggaagccgcgcgccagtccctcatcgcgatctcccagtcggtcccggaggtcggggcacccgtcgtcagcccgcccagcggcggcggcggcggcggccgaggcatggatgagaacgggcacgaggacgtcgcggagcggaggtacagggcgaagcttatctccatctccaaccagtcgcccgacgcgcgggcgcggnctacgacgtgccctcgcaacaa

SEQ ID NO: 9039 - DNA, 409 bp, Zea mays
  Clone ID: LIB3137-025-Q1-K1-C6
cgtccaaacctccaaggatgaccctgccaaggaggctgtcagcttcacgtcccaggtcatcatcatgaaccaccctgggcagataggcaatggctatgccccagtgctggactgccacacctcccacattgctgtcaagtttgctgaactcattaccaagatcgacaggcggtctggcaaggagcttgagaaggagcccaagttcctgaagaacggtgatgctggtatggtgaagatgattcccaccaagcccatggtggtggagacattctcgcagtatcctccccttggtaggtttgctgtccgcgacatgaggcagacagttgctgttggagtcatcaagagtgtggagaagaaggacccgaccggcgccaaagttaccaaagcagctgccaaaaagaaatgatgc

SEQ ID NO: 9040 - DNA, 338 bp, Zea mays
  Clone ID: LIB3137-025-Q1-K1-D2
tcggcgggttgggcttggagatgaacaaggcggttcttaaccccggggccaaaaatccagtcgggcgcgtccaagtacacctgcaccttgagctggttgatggagatgcactcgttgcccctgaacttccactgcaggtgcctgacgaggacgttgacgtagccgtcgatcttgatgaccatgtcgacgtcgacgccgccgccgccgaggttgctgctgctgcactcgatgctgatgtcgtgcagcttgcccctgtcgtggaacctggccttggtgaggaaccgcttcttgctaaagacgtgctccttcttgcacaccagtgcggcgtcccgcagcga

SEQ ID NO: 9041 - DNA, 390 bp, Zea mays
  Clone ID: LIB3137-025-Q1-K1-D6
agccttccgggtaaaccaggcaaagtctgcacctcctatttttaaaaaggctgctccttctaaggagccaaaggcaaaggatgtcaagaaggaggctccaaaggaggcccccaagccaaaggtggttgaggcaccagcagaagaggaagcaccaaagccaaagccaaagaatcctcttgacttgctgccaccaagcaagatggtccttgatgactggaagaggctatactcaaacacaaagactaacttccgggaggttgccatcaaaggtttctgggacatgtacgacccagagggctactctttgtggttctgtgactacaagtacaatgatgagaacaccgtctcctttgtgaccctgaacaaggttggtggattcctgcagcggat

SEQ ID NO: 9042 - DNA, 379 bp, Zea mays
  Clone ID: LIB3137-025-Q1-K1-E1
tcgcctcgccatcacataaaaccagggccagccgaatccgcgcaatggccaaccagaaccatggccctttcctcaacaagccttcgccggcaaggcagtgaacgtgccgtcgtctctcttcggcgaggcccgcgtgacgatgcgcaagacggcggcgaaggcaaagccggcggcgagctccggcagcccgtggtacggccccgaccgcgtgctctacctgggcccgctgtccggcgcgcccccgagctacctgacgggcgagttcccgggcgactacggctgggataccgcggggctgtcggcggacccggagacgttcgccaagaaccgggagctggaagtcatccactcccgctgggccatgctgggcgcgttgggc

SEQ ID NO: 9043 - DNA, 367 bp, Zea mays
  unsure (1)..(367): unsure at all n locations; Clone ID: LIB3137-025-Q1-K1-E5
tccggtttcctcgctcccgacgaacccgccgccgtcgcgtcagttccagcgagcgacggcttcgccaccccggcggacgagaagaggcacgcgcacacgcactacgacatcggccggtccgagccggcacgggagcagcaggacaagaaggagaagacgcaggggggcaactcaacaagggccaagtcgagctcgggggctaggaagacgcccgctcagaggcaggcggaggccggcgccgagtgcgtggacgcgagggcggaggcattcatcgacagcttcaggcagcagcagcaggtgcaccactaccaggaggaggaatacgtnccgcctccggcgcccgcgccgccgntgtcgcgcacgtcgt

SEQ ID NO: 9044 - DNA, 401 bp, Zea mays
  unsure (1)..(401): unsure at all n locations; Clone ID: LIB3137-025-Q1-K1-E6
cttccgaggaaggtccgaaccggccgaccccttttcctgttgaataaccaccaccttttttttttctcctcttcgatctcgatcgccctcgcaattcctccgtaaagcgcccctgccctgggcgagctatagcgcgcgcgcccagatctgcgcggtctcgccggcgatggcgtgcatcaagagcgcgcagcgggcggcgctgacggcgttggcgccggacgcgccgtacctcgccgcgggcaccatgaccggcgccgtcgacttgagcttctccgcctccgccaacatcgagatcttccgcctcgacttccagtccgactccccggacctcccgctcctcgccgncgcgccctcaccggaccgnttcaaccgcctctcctggtcgcgcccgggcgccgtcg

SEQ ID NO: 9045 - DNA, 362 bp, Zea mays
  Clone ID: LIB3137-025-Q1-K1-F1
cttcggcaagcattaaccaataccaaacttccggattttcatgggttaatccgggccaaataacatttggaatggaataaatgcttattcacaagaatattagtaatgtgtcaagactcaaggctataattataaatttctagaactttgtcgttttcagttatgtagtgctctacttactgcacctattgagatatttaatagagaaattaaataaaggatactgctactcatatgatagttatgctatcatgaataggttcaaggatactgcgttcgtctcatggtggggaaattgttcgtagttgaaaacgccgctgtgggcagcgaggtggaacaagaagagccaaaaaaagaagcga

SEQ ID NO: 9046 - DNA, 333 bp, Zea mays
  Clone ID: LIB3137-025-Q1-K1-F2
gccaaaatagggcgttttcgtactcgcctactttcgcggttcaaacctttcccctttctcccaattccttccgccggccgccgctccacccgtacgacgacaccatgagggagtgcatttcgatccacatcggccaggccggtatccaggtcggaaacgcgtgctgggagctgtactgccttgagcatggcattcaagctgacggtcagatgcccggtgacaagaccattgggggaggtgatgatgctttcaacaccttcttcagtgagactggtgctgggaagcacgtgccccgtgctgtttttgttgaccttgaacccactgtcatcgatg

SEQ ID NO: 9047 - DNA, 430 bp, Zea mays
  unsure (1)..(430): unsure at all n locations; Clone ID: LIB3137-025-Q1-K1-F5
cttccgcttgatcggctggccggagaaggagctttctttttttactacctctgggcgagctgcgtgtccctgtcgtccttctcgctcctgtggtcgccgcgcgcggcgctgcgatggggcggtcgtcgccgtgctgcgagaaggaggccgggctgaagaaggggccgtggacggccgaggaggaccagaaactgctggccttcatcgagcagcacggacacggctgctggcgctcgctgccggccaaggccggtctgcggcggtgcggcaagagctgccggctccggtggaccaactacctgcggccggacatcaagcggggcaagttcacgctgcaggaggagcagaccatcatncagctccacgctctcctcggcaacaggtggtcgtcgatcgcgacgcaccttgccaagcgcacggacaacgagat

SEQ ID NO: 9048 - DNA, 409 bp, Zea mays
  Clone ID: LIB3137-025-Q1-K1-F6
tttttcaacacaaactcgccttttcgactttttagagatagagcgaggcaccaagaagggaaaaaaagagggacaggaaaaaaattcattctcgtttcgctgtccgctagaccccgcccgaatcaatggagattagggctccgccgacgagcctgaggctcgcgccgccgcccgccttcgccagcttccgccgaaccccgcttaggacctccttccttcgcggcagcgtgtcacttaaagttgtgcaagtacggcagtcaaatgtcaacagatttaagtgcaatagcatacgaagtaacctctttgataggctaacaagggttgtcaggtcctacgcaaatgcagttctaagttcgtttgaagaccctgagaagattctagaccaagcagttctggagatgaacgatga

SEQ ID NO: 9049 - DNA, 409 bp, Zea mays
  Clone ID: LIB3137-025-Q1-K1-G6
ttccttaacattcctggtggcaggcgggccctgttggttcgccctctttcgcagcttgctacgctaaagcaagtctagtctctagaggaggaggcggagggggaggccatgggcaaggacgacgtggtccaaagcggcgcgggcggcggggagttcgccgccaaggactacacggacccgccgtcggcgccgctggtggacgcggcggagctgggttcgtggtcgctgtaccgcgcggtgatcgcggagttcatcgcgacgctgctgttcctgtacgtgacggtggcgacggtgatcgggtacaagcaccagacggacgcgtcggcgtcgggggccggggcggacgcggcgtgcggcggcgtgggcgtgctgggcatcgcgtgggccttccgcggcatgatcttcgtgc

SEQ ID NO: 9050 - DNA, 317 bp, Zea mays
  Clone ID: LIB3137-025-Q1-K1-H1
tcgcttcaatctggccctcgggccggccgcgcctttggagaaggggaaaaacatgcttaaagccggggccaccccccaacaacaagctgcccaagtggcacccccgcctccgcaacgagtgccgcgtcctcgatcgtcagattccgagatgtgcagagggaggagaagaacgtggagaaagccatcagggaggctgccaagccccaatgacatgggatctgcaaaggctcttgctaaagaacttgtaagatcaagacgtgctgttaatcgtctttatgagaacaaggctcaactaaattcagtatcaatgcaccttg

SEQ ID NO: 9051 - DNA, 299 bp, Zea mays
  Clone ID: LIB3137-025-Q1-K1-H2
tcggcctgaaggcaagggcgtttgccgccaaccgtgtgccacgaacggggtgcgtaaccattatgggcggcgaaacgcattggcttcttttggcaagaagacacaagccagaacaacaaccagcagcttcgccagcgcgggggtgggccttgggccggcgcccaacaaaaataggtgcgcgacgacggcgagaccgagccaacatcatcaccatcaacaacaacagcagcaacagcaggagttgaggctccacaacgcctcgtgcgtgggcgtgctggctccacgggtctcgacgatcg

SEQ ID NO: 9052 - DNA, 383 bp, Zea mays
  Clone ID: LIB3137-025-Q1-K1-H4
tcggctcggcagcttcggtggctggttcattggatttgttaaccagcttccgaatcggcggcagcggggacgggggcggggacctccgcttcctgtgcgagaacctcggcctctccggccccgacgacttcgccatcccgctggccgactgggaggcacacaaggccgctcgatcatccgcctccgcttcgagctcccccaaccccgcacgccccaactacgactcccctcaccgccctcagcgggactcaccgctctctcaggtgggtgccgaggagcccgcccaggcttcggacgccgagacggagctaccggccgcaacgggaagggacggcccaatcgaagccccggagcggccggcacgcttggatctaccgctcgag

SEQ ID NO: 9053 - DNA, 60 bp, Zea mays
  Clone ID: LIB3137-026-Q1-K1-A10
ctctcctgagctcgctcgtatctcctctctgtacgaacagaaaggttaccagcagcacca

SEQ ID NO: 9054 - DNA, 322 bp, Zea mays
  Clone ID: LIB3137-026-Q1-K1-A4
tcggggacccctgggccccaaccggaaccggaagtttacttacttacggggcaagcgccggaagccggaagcaccggtgacgaagccttccgtgtcatcactcatcaggatctcagggttttgtttcgtttcgcgggcgttgggaatccatccatggcgaggaagatgctcatcgacggggaggtggcggccgtcgcggatggtgggcactatgactacgatctcttcgtcatcggggcgggcagcggcggcgttcgcggctctcgcaccgccgccttcttcggagctaaagttgcgatttgtgagctcccattccacccca

SEQ ID NO: 9055 - DNA, 393 bp, Zea mays
  Clone ID: LIB3137-026-Q1-K1-A5
gggaccctcaggctccgtggaaatcaaggttgagcatgtcgatggggttgacaacgacgcgatcatcgcacaagccctccaggaggaattgtccaatgtcgccttcgccgaagcgtccgggccaacctctgccgctgacaatcaacaaaattctgctgttctcacgcagcaatggcttcgcccacgcgccgtccatgtagaaccagcttctcaagaggcagggaccagggaggaacctttcagcacctgctcaagccctggagatgacaataacgtccaggacagccagcaatgcttgatagagctcatggataacttctctgtcattgacggtgaagtgggcaaaagattgaacaacatggttcctgttcctcatgttcctaaaactaatgg

SEQ ID NO: 9056 - DNA, 224 bp, Zea mays
  Clone ID: LIB3137-026-Q1-K1-A6
tcgaggactcctaatgctccagcttaacacgctttttcataacgaaggggttcacaacggaccgggcataccatagggactacgcgcacgtttgcttaatttgcggtcagacgcatctactgggccaaatcgtgcgcctgacaatcaacagcaagctcatggactaacgcaacagtggactgagccgacctgcgccgacatactaggaccacggttggtcatga

SEQ ID NO: 9057 - DNA, 213 bp, Zea mays
  Clone ID: LIB3137-026-Q1-K1-D6
agccttccggccgagaccagaaatgcaaaattcggggctttttttttaggcaggattttgatgcgcctcgcgaaacgtgctgcggcagacatctccgtaacagacccgacgaagcgactggccatcgctgattctgaacaaaacagtgtgatcgcaagcgatgctataccgctcgtatgcatataaaacgaggcagcaacttctaggtctatc

SEQ ID NO: 9058 - DNA, 199 bp, Zea mays
  unsure (1)..(199): unsure at all n locations; Clone ID: LIB3137-026-Q1-K1-E11
aacctatcccatactgttattcagccgngttgtttcataaccggcatatcagacactgggctacatcatacagccgatggggctacacaatacaagactctacaactacatcatcagttcctacctatcccaataagatgaaccctaacccccgaccgatcacccactctggaaattcaataaaaaatgggctttccta

SEQ ID NO: 9059 - DNA, 377 bp, Zea mays
  Clone ID: LIB3137-026-Q1-K1-E9
cacctctccaccgctaggggcggtgccatgtctactgggagctggcgggcacgacactcgcggacgggatcccgcctcggcggcccgccagcgcgggctctggtcgatgtccggcgttagtgcgtgcgcgtacctgatgaagtgatgatgggttttgatcgaccagccgtcagcgtagtgcggtcacggggtttacagtgttattcgaactgacctctctgcttactcgtgctagtagtggtggctgccatgtgtgtgtgctgctggtagagaactagggattctttttttttcttctgtcgcttccttgcttatatgtcccgtcgtgttaggctgtgtttactatgcagtgtttggtggtggccgctttccatgag

SEQ ID NO: 9060 - DNA, 373 bp, Zea mays
  Clone ID: LIB3137-026-Q1-K1-F11
cgagccggcacgacgactgcctcaagtattgtgggatctgctgcgccacctgcaactgcgtgccgtccgggacagcgggcaacaaggacgagtgcccatgctaccgcgacatgaccaccggacacggcaaccgcaccaggcccaagtgcccctgatgatattcattccttcgctctgtcttgcatgcgtatgtaatgtataggctgtgcaatgcatgcatacatgatacatgccgtgactctggatcggcggatgcctatgcatgcttttcactagctgctgctactactactactcttcctgtcttcctactgtgtgcaccaaagtgagagggacgacatgcatggcgatgacatgtcgtgttatgtgcact

SEQ ID NO: 9061 - DNA, 442 bp, Zea mays
  Clone ID: LIB3137-026-Q1-K1-F12
ctcctcgccatcacataaaaccagtgcttgttgaagcagcgcaatggcgagcagcaccatggccctctcctccacagccttcgccggcaaggcagtgaacgtgccgtcgtctctcttcggcgaggcccgcgtgacgatgcgcaagacggcggcgaaggcaaagccggcggcgagctccggcagcccgtggtacggccccgaccgcgtgctctacctgggcccgctgtccggcgcgcccccgagctacctgacgggcgagttcccgggcgactacggctgggataccgcggggctgtcggcggacccggagacgttcgccaagaaccgggagctggaggtcatccactcccgctgggccatgctgggcgcgttgggctgcgtgttcccggacttgctcgcccgcaacggcgtcaagttcggcgaggccgtgtggttcaaggcc

SEQ ID NO: 9062 - DNA, 383 bp, Zea mays
  Clone ID: LIB3137-026-Q1-K1-F4
gttgactgtgccgggaaggccatccgaccagttgggcaggagagtcgtcactgacagccccgtgtacgacggccgtggcgccgacgcccgcctcgtggctcgcatacagggagtcacggtcctggtcggtaacgcagacgccttgttcaccatggtgttcgaaaccgacaggctaaagggctccacgctcgtcatcaacggaatggtcacggatgggtcagacgaatgggcgatctacggcggaaccggggtgttcgccatggccaccggtgtcatgaagagaagaaaccttgccggcggtagcaacgacgggaactctgacgagcttgccctggaagttttctgcccggtgtttggcgcatcacagcaaccaattagcaagc

SEQ ID NO: 9063 - DNA, 392 bp, Zea mays
  unsure (1)..(392): unsure at all n locations; Clone ID: LIB3137-026-Q1-K1-G11
agccgcgccaccgccgtctacgccggcgttttgtccgcggccaccggcttcacggnactgcggctactcctaccgggtcaagccagccgtctaccgaccgccgacccaaatgccgaaaactaagcacctatacccaatccccccggcggcagaaggtcgtccacttaaaccgccgccgcggcggttcccggtggtaccacgaccagcggaagctcacggtggctgtcttaatcagcggcggttaggcgctcgcgttgtatgttgaccatgtgtagaccgtgccctacaccaaccgttaacacctacgaccgacgtgccggaagtaaatgcgtcaaaaaagccagtcccagtttgaccagctcaagaaggagttaaggcccaaaatactgcca

SEQ ID NO: 9064 - DNA, 316 bp, Zea mays
  Clone ID: LIB3137-026-Q1-K1-G4
tcgggtacacacacacacacacacacacaccaccttttcacacacacacacacacacacacagacaaggggtttccaaagccaagtgtgtgtactaacaaccagctagctcgggcggcagcaagcagccatcatgtcggaagagaagcaccaccacttcttcaaccaccacaagaaggacgaggagcagcccgccggcgagtacgggtactccgagaccgaggtggtcaccgccaccggcgagggcgagtacgagaggtacaagaaggaggagaaggagcacaagcacaagcagcacctcggcgaggccggcgcca

SEQ ID NO: 9065 - DNA, 399 bp, Zea mays
  unsure (1)..(399): unsure at all n locations; Clone ID: LIB3137-026-Q1-K1-G5
agccttcgggttggtacttttagcaaagcattggccatttttcgaccgccgaattccaaacagcccgacgagctaacagagcggcaggcacctcctccaggaacatggcccgcacgcagcanttggcagtagtggcgacagccgtggtggccttggtgctgctggcggcggcgacatcggaggcggccatcagctgcgggcaggtggcgtcggtatcgcgccctgatatcctacgcgcgcggcagggctacggccctcgcggtgctgagcgggtaggagctaaaacgcgccgaccacgcgccgcgtgcgctgaatgctaaaacgcgcgcgggtagggctaacccgtacgcgcagatcctcaagggggtagatcctaacatagactcacgatgtcaggga

SEQ ID NO: 9066 - DNA, 437 bp, Zea mays
  Clone ID: LIB3137-026-Q1-K1-H2
tcctcttttaagttaatgcacgccaacttccaggcctttcaccactgccaatcaaatctctcgctcgacgctggtcacacgcaccacgcacgcccagccgagctcctgcttccctctcccgcggtgcctggcttcctccaagctcgcccccaaccacaaccacgccctggtccgcgctccagccctccccatcctcctcttgctatggtgcccagccgagctctctccccttcctgccatggccgacgcccctccctgctgtagctcgatgccctcccctgcagcaagcagtgccctcccctttctgcagcaagtgggtgcccccagcccctcctttgttcccatggccggccacctctgctgcttccatggtgatctctaaatccctttgttgttttactagttcttgttaataccctgctgatgtgaagttttat

SEQ ID NO: 9067 - DNA, 192 bp, Zea mays
  Clone ID: LIB3137-028-Q1-K1-E9
cgaccgcaagcagctcggcaggcaggcctccaccgctccaccacctccactcggtctacgtgctccgtcaccaaacccacccgggccaacgccgaagcaaccccccctccgtcctccccagatccggcgccgcctccgccctcacttacactagcacgcacggcggacacgtcgcctcccccgcgcgatctg

SEQ ID NO: 9068 - DNA, 57 bp, Zea mays
  Clone ID: LIB3137-031-Q1-K1-A1
gcttgcatgcctgcacgtcgactctagacgatccccaggtacccgagctcgaatccg

SEQ ID NO: 9069 - DNA, 254 bp, Zea mays
  Clone ID: LIB3137-031-Q1-K1-A8
acaggctactgatggagctcaaaagcaagagtgatgagttccataaccaaaaaagatgtgatgaggcaaagctgaatgctctgtcagaagaaatcgacctactcaattccaagatcgacaagctatccagtgagagaaatgacctattcaaaaggatggaccaaaaggaaagggatttgcttggattaaccgaaagggcctccattggcagaacaaaccggttgaaatacctcacttaattaagagcttggatt

SEQ ID NO: 9070 - DNA, 256 bp, Zea mays
  unsure (1)..(256): unsure at all n locations; Clone ID: LIB3137-031-Q1-K1-B4
ngcaaccgaccccaccttccctttacgcgaataagcatcaccgcgagacgcgagtcgtccgcctctgtgtcttcgctcggcgatctatcaaggagggtgagggggagatggcgganaatccgcagctgtttgggaacgggatgccggtgccgttctacggcgagatgttcgtcctcgtccgcgacggcgtcgagttccacgtcgacaagatcccgtcagctcctggaggtcatgtgaaaacaaaaggcacaattta

SEQ ID NO: 9071 - DNA, 240 bp, Zea mays
  Clone ID: LIB3137-031-Q1-K1-E1
cggccggtggttgatactgcagagaggttttaaggtgccctcgagtattcacccaaagtaaacgatcactctcacagcgtagctaggaggtaactgagcgtgccctgcgtctcatacggttggcttatgggtaacagacatatatatgatgtacctggacgatggggaggacaatgtgtagttgaattcactgagactggcacaatacctaaacttacaaagcaaagatgttgtttcttc

SEQ ID NO: 9072 - DNA, 268 bp, Zea mays
  unsure (1)..(268): unsure at all n locations; Clone ID: LIB3137-031-Q1-K1-F8
cattgcatcgtgttcttgccggtctagcaagtgactataagaataatggaataaacgatgacccagtgtgtgtatgatttccgttctgaagaacaacacatcccttgcaggattgttgttcagtagattttacttgtaccgcggctttggagttccccaaaggactttgttcaagaacttcttctctcacaggaaataacatgagtgcagtccgtgcttttnaaaaaaaaaaaaaaaaaaaaaaaaaaaaaaaaaaaaaaaataaaaa

SEQ ID NO: 9073 - DNA, 418 bp, Zea mays
  Clone ID: LIB3137-031-Q1-K1-G11
ctagttctagatcgcgatctatatctagtttgacgcgtgggcggacgcgtggggggacgcgtggggagccaccgtggcagatgctgtaagaactcttggaatgtggggtcttttcacacgcggccttcctcttcgtataattatggttggtactctcacaggagcgcaatgggcagcctatgacgcgtttaaagtgtttgttggactgccaacatctggcggagtggttcgtagctgtgctgctgtgcctcctattcgcgccaagagggtgcaccgagaagacgtgctaaaccaacggagagtagacgtaccgtattgagaagatgtgctgaaccaacaaagcagaataggaaatgtgttgcgatttcactgagttttgtaggagttcgaaaccagttgtttaagttttagctggtag

SEQ ID NO: 9074 - DNA, 340 bp, Zea mays
  Clone ID: LIB3137-032-Q1-K1-A7
aacgcgagagcaaccgcccctatcgaactgttcggctgactaggagcgagcccactgctttggtacgaaaacgcccacacccccggctccttttctcccgaacgggcgaacccgaacccaccctcactctccgattcaaaccgtcgccgccgtcgccgagagagttgtgactcccccagcggcggcctgcgaccacccgttccccagtcgtctcttctctccagaccgcatttgcgcccgtcccgtcccctcccctctccctcggcgaggtccgagagcagagctgcctcgggagggtcgtagtccagtccacccgtccgctgcggcggcggttactacg

SEQ ID NO: 9075 - DNA, 458 bp, Zea mays
  unsure (1)..(458): unsure at all n locations; Clone ID: LIB3137-032-Q1-K1-E4
attattttaaaaaaaaaaaatgtaccaactttgtcattcattcagcaatgcaacagacattgcacccaaatgtgcgttataccgcagcattccagacattcaagtccccctatatatcgaaaccatcactctagcaaatcccacaaacagaagttaaaaggtacccagctatgcctgggtagcattttttatgttgcagcaaaaaaggatacattccccgcttgcgaggtcgattcagcttcctatttcccagctcggcgacagcaaaaccagagatcactcccatgctttaagggcaccacccctcccaattgccttgatgatagtctgcttactgttgcgcgcactgcactatctgggctccgcccggcatctcgtcgtactcctcgtacgcctcctgggcagcgtgagcttgcttnctgcgcatctattactcgatgttgttcacatcatgcata

SEQ ID NO: 9076 - DNA, 349 bp, Zea mays
  unsure (1)..(349): unsure at all n locations; Clone ID: LIB3137-032-Q1-K1-E6
ggtgtggactccttcaagatgagctttgacttcctactcgtgagcctacaggagaagggcaacagcctcaagacggcaactgtgtaaaactgagaagattgggtaccggcgggtgaacgattttactaaataaaatgctagcttgctggctctcttagtttttacgatgtacctttgctctccattttctgaatcgggattgtattctaggcttgcctggccgtcattgtgtgaccaacgttcatggcttgtaacaagggatcggacgtaaacggttggaaaacatctctgttactttctatacgatttttatttgcccgnnnnaaanngcntgnacgnnnnnnnaaaa

SEQ ID NO: 9077 - DNA, 373 bp, Zea mays
  Clone ID: LIB3137-036-Q1-K1-H3
gctaatcccagtcaaatcgaagcaagcatgtccatggcggccgtgggcgtgggcggcgcggtggcgttcctcctcccgcagcgccgccagggcgccgtcccctggagcggcgggcggcggcgggcgcccgtggcggtgcgcgcgtcgtacgaggccggggtgggcgtgatggcgaccaaggtggggatgatgacctacttcgatccggagacggggaagccggtgccggtgaccgtggtcgggttccgggagggcggcaacgtggtgacgcaggtgaagacggccgccacggacgggtacgacgccgtccaggtcgggtaccacggcgtgcgcgaggacaagctcacccgcccggagctgggccacctgggca

SEQ ID NO: 9078 - DNA, 306 bp, Zea mays
  Clone ID: LIB3137-037-Q1-K1-A9
tcgggaaaaacttggtttgaagttggactctcacgaacatatacaccaactgctgatgataggggacatgcactaaagtttgagtgcgtagctgtggattcagaaaaaaagtctccaattggaccctcaacctcaatcatgacatcacgtgtaattcccgcgccaactcctacccctcgccgccttatccaagtgaatggggatgttttaggtcacttggatttagacagccaaatttcgtccttagggacattcactgtgttatcctacaatattcttgcttgtgcatatgctacaactgatgca

SEQ ID NO: 9079 - DNA, 348 bp, Zea mays
  Clone ID: LIB3137-037-Q1-K1-C10
agatgctctctcgctcatcatcggccgtttttagcagcttgagagggcggagaggaggtcatggcacggcagcgccagcggtagcagcaacgcagacacacagatgtgctgtgtgagagacaagagagagaaaggagtggagagagaagggcaggaaagcttagaagaagagagatccacctcgaagtaacccctccctccctccctcctcgcttgctcctgctggagtggagtcgagcctgctgctgccgctacctcctccccggcgccaggagagggagaggcgaggagaagccgcggccatgagggaggaggaagaggccagctggttcgcgcgcggcgaggagc

SEQ ID NO: 9080 - DNA, 425 bp, Zea mays
  unsure (1)..(425): unsure at all n locations; Clone ID: LIB3137-037-Q1-K1-C4
ccggaccgagcgcggaagcgcaaacttctgttccttgttgcaagcaagggatggcggcggcatgggcagtgctggcggcggtcctcgtcgcggcgcaggtggcgtctgcggcgccggtcacggcgccagcgttcctctgggcgcctaagaactacggattccgctctgatgatgctaaggaggtagtccattatcaaacaatctcaccaaagaacttagctaaatctgttcttgaggaaggtggctggtcaacctttatgtgttcaagggaggatactgagaagcatgttgatgttgccattgtttttattggctcaaagctacaatcatcagacatatcgaaagataagcaagttgatccagctttagcagatacattgaagctctncttcacagaaatcagagtttctatggcatcccctacg

SEQ ID NO: 9081 - DNA, 318 bp, Zea mays
  unsure (1)..(318): unsure at all n locations; Clone ID: LIB3137-037-Q1-K1-D2
gctgcaacanataaattgctacccaggcatagctgggtacctccgcaacttctgtttgtgggatttgctacactgatggtttcgatatatagggggacttgaatgtcaaaaaaaaaaaaaaaaaaaaaaaagggcggccgccctttatttttccttttccttttttttctcttttctactttttcaatttttttttatgattttcttcctacaaatcctcttctcttgccgcaaaaaaaaaagggcccccttttttttttgtgggaaaaaaaaaaacttttttttccgcctttcttgacaaaattttaagaggttttt

SEQ ID NO: 9082 - DNA, 248 bp, Zea mays
  unsure (1)..(248): unsure at all n locations; Clone ID: LIB3137-037-Q1-K1-D6
ccgtccgcgcacgcagcgataaacccgtcgtggctcagcttcattctcgnngtgtcgtnncccgcgtnntctacagcgcggggtgcgagtcctcgcnngttctttgacagcccactcngnnctgtcnngtcgccccgtcccttagaaactacctagatcccgnntcagcttaaccgagggctccnnattctcttcgcggcgcagcgcatctctcggtgtcatcaaagcggcgggcggctggggcggcg

SEQ ID NO: 9083 - DNA, 378 bp, Zea mays
  Clone ID: LIB3137-037-Q1-K1-E11
gtgggcttttcctccccctccggttcgggttcgggttcgtgaggttctccggggttcggttgcgtgggtgagcggatcgagatggcggcgtcggatgttgagtaccgctgcttcgtcggcggcctcgcctgggccacggacgaccactccctccacaacgccttcagcacctacggcgaggtcctcgagtccaagatcatcctcgatcgggagacgcagaggtcccgcggcttcggcttcgtcaccttctccacggaggaggcgatgcggaacgccatcgagggcatgaacggcaaggagctggacggccgcaacatcaccgtcaacgaggcccagtcccgcggcggccgtggaggcggcggccgtgggtaccgtggt

SEQ ID NO: 9084 - DNA, 414 bp, Zea mays
  Clone ID: LIB3137-037-Q1-K1-E2
cgcaggccgggccgccccagcaaatcccattcacagaaacaccaaagccccaaaggcccaaacgcaccacctccgaatggagaacggcgacgaaaccctcgcctcccccacggccgccgccgagacggacgcgctcaacggcggcgtcgcggaggaggagcaggtcctcatcacccaccccgcaaagtcctacgtcacgctcgccgacgacaaccccgctcctaacggcggcgtcgtgaaagaggaggagggcggcgcccacaccaccgcgaagtcctacgcagctgtcgccgcccaagccgagatcgaggacctccgcgccgccaagctcgacctggaggagaagctcgctgaggcccgccgtgagaacaagtccctcgccgaagagacgcaccgcagcgaggggatcttcac

SEQ ID NO: 9085 - DNA, 265 bp, Zea mays
  Clone ID: LIB3137-037-Q1-K1-F4
aaaaaccccggccgacccacgcgtccgcacaccctgtaggccctgctgcttcttattttgattggggaactgctgataccccggggggttctgctcgcattagcgagaaagtcaacgtttttgatagcccacagggcgagaagatcccgaaacgcagcaggaactccagtggtctgaagggtacgcagggaaagaacgaagccactgaaactctagaagccaaagatgctgataccggacacgactccccaagtgactatggcac

SEQ ID NO: 9086 - DNA, 138 bp, Zea mays
  Clone ID: LIB3137-037-Q1-K1-F8
atttattgcatgcttcattcaccgtggactcaataatctctcttgctctaaaatcgaggtattcgtttttcttgtgattgtgtacatgcgtaaaaaaaaacccaaaaggcaaaaaaaaaaccaaaacacaaaaagggc

SEQ ID NO: 9087 - DNA, 429 bp, Zea mays
  unsure (1)..(429): unsure at all n locations; Clone ID: LIB3137-037-Q1-K1-G1
cgggaaccttctatcctccccctttggggttcggtcctcctccgtccgtcgccgtcgtcaaacgtaaagcgcgacgtgtgtaaacggcccgcgccttcggcagacgccaacaacagactcagactatactcgcagcagaaaggttagttagctgagctccgcggggggtcgaaccgagactcttcgtcgcgcgcgccgcagggccagcccagcaggcgccggacgcgaaagcttgctcagctctgtgttcaccggcggcacgggccgtcccggcgatggaatccttcggtgtccctcctgcgcccgtggcggcgccggagaagaggaagaagccgctcgacctcaaggaccccgtccccgccggcgccgccgccgncgncaacggcggcggcgccaccaaggcgtccccagcggcgaagtgggcggaga

SEQ ID NO: 9088 - DNA, 373 bp, Zea mays
  Clone ID: LIB3137-037-Q1-K1-G6
agacaatatatgcaggagcttagtgttgatccatggactctgaaggagtagcagcaaaggtggcagatgagactactaaaccggcaagccaagaagacggcgagagcaaggctgggatgactgatctgctgatgctgaccgacaagtcgcagctgcaggcgctggcgatgctgttgcggaacaacgaggagctcatgatgagccaggcgatcaagtcggagacggagcgcgttgagtacctcaagacggtgagcgactgctacacgcggacgatgaagctcctcgacgattccatggcggccaggaccacgtacgagcgttcgggcggaacgaggaacctcgtcgcccgggacatggacgactacgtcgtcta

SEQ ID NO: 9089 - DNA, 205 bp, Zea mays
  unsure (1)..(205): unsure at all n locations; Clone ID: LIB3137-037-Q1-K1-G9
ggaaacccggcggacccacgcgtccggcaggttataaattagcccctgtangataaagctgtctgngtagatccaccgaggccgcttacctaaacaactatgtaacatcatagatgacattagatgcatgataattgctggtaaagcttggtcaaaaaaaaaaaaaaatattaaaaaaaaaaaaaaaattaaaaaaaaattaaaa

SEQ ID NO: 9090 - DNA, 358 bp, Zea mays
  Clone ID: LIB3137-037-Q1-K1-H1
gcaaacatggaactggaatttagtcgcatcaaggaaagattgggtttccttaaatggggctctagtgctttccaaaatatgctagttgttcctcctggttctggtattgtgcaccaggtcaatcttgagtatcttggcagagttgttttcaacacagatggcattctctatcctgacagcgtagttggtactgactcacacaccactatgattgatggtttgggtgttgctggctggggggttggtggtatagaagcggaggctacaatgcttggtcagccaatgagcatggttttgcctggtgttgttggcttcaagttaactgggaagttacggagtggtgtcacggccactgatc

SEQ ID NO: 9091 - DNA, 350 bp, Zea mays
  Clone ID: LIB3137-037-Q1-K1-H4
gttcctcgaagcggagggcgggagcttctctgtggaggagatggtggacttctgcctgtccctgctggtggctgggtacgagaccacctccgtgctcatgacgctcgccgtcaagttcctcaccgagacacccaccgcactggcgcagctcaaggaagagcacgacagcatcagaggggtaaaaggcaaaggccaagctctggaatggagcgattacaagtcgatgccgtttacacaatgcgtgataagcgaaacgctgcgcgtggccaacctgatcagcggggtgttcaggcgtgcgaacaccgacatccacttcaaaggccacgtgatcccaaagggctgcaagatct

SEQ ID NO: 9092 - DNA, 328 bp, Zea mays
  Clone ID: LIB3137-037-Q1-K1-H8
agccttccgttacgcgactgttacctactcgatcggatcctgaccacgcccgcctaccaggccaccaccaccaccacccacaaatccccaatggcgaggcgcatcgccgtggcggcagcgttcctggcgctggccgtggtggctaccgccgcgctggcgcaggctcccggccccgcggcgacgccgagcgggccgccgaacgtgacggcgatcctggagaagggcgggcagtacaccatgttcatgcggctgatgaaggagacgcagcaggacacgcagctgaacagccagctgaacagctcgtacgccagcagcggcggcgggtaca

SEQ ID NO: 9093 - DNA, 331 bp, Zea mays
  Clone ID: LIB3137-038-Q1-K1-A12
cggacgcggggcgaggcgcgccaccgcctgccgaatcgagctgcagaaaccaccttggcgtggcatcacaggccgctttcctcgcggggttctcgcagctcgccgcgcagccgggccgcgaccgcgccgtggcggtggcggtggcggtggcgccggcgccgggcccggcccgggtggccgttgcggcggtgggtagcgccaagttgggcgtgaaggcggggacgttcaagaccgcggcggtggcgcccctcggggtgccgtgccgggccagcctgatcgagcccgaccgcgggcggctggtggacctggtggcgcccgaagagggcgggcg

SEQ ID NO: 9094 - DNA, 437 bp, Zea mays
  Clone ID: LIB3137-040-Q1-K1-B10
attcggctcgaggttatcctcaattttcaatggctcaatcccattctggaaaagccggttccatgacttcaatactcctcctgtttatgcttcttatcagtaatacaggcacaacaggtgcacaatctggtgtatgctatggaagagttggcaacaatctgccatcgccacaagaagtagtttccctttttaaacagtacggcttccaaaggatgagaatctatgatcgaaaccatgaagtcctccaagctctgagagattccaacattgagttgctgctagatcttcctaacatcgacctccaatatgtagcttccagccaagataacgcaaacagatgggtgcaagacaatgtcagaaacttttggaatgtcagattcaggtacattactgtgggaaatgaagtgaagccttgggactcatttgcacagtttgta

SEQ ID NO: 9095 - DNA, 436 bp, Zea mays
  Clone ID: LIB3137-040-Q1-K1-B12
attcggctcgagcaattctcaaatttatagctcgggaacagagaaggagaaatagaatggacgccattgattctgtgttcgatccgttgagagaattcgcaaaggacagcgtgaggctcgtgaagcgctgccacaaacccgatcgcaaagaattctccaaggttgccgtgcgtaccgcaattggtttcgttgtgatgggattcgtgggtttcttcgtgaagcttattttcattccaattaacaacatcatcgtcggatctggttaggatgaagggtactacaatcgcctcaggaattcaggttgtcaagcaaaagtaggcagaaagagttcccacatcaatagatcattctatgccctcaatcttagttctgtttttcattttttgttttttttctcatcttaagaagtgttacttactttagacgtaaaatttta

SEQ ID NO: 9096 - DNA, 394 bp, Zea mays
  unsure (1)..(394): unsure at all n locations; Clone ID: LIB3137-040-Q1-K1-C10
attcngctctagatctaggaattttttttctaggcaacagacaatgctaaacagtactgtcttccaataataatgtggtccaaacanaatgagaattcatttatgacagcgtttggctcgttaaacgcttacacaatactctatcgcaaagaattctccaagattacctctcgaacagcaattgatctccttgtgatgggattcatttgcttcttcttgaaacttattttcattccaattaacaacatcatcttctcatctgcttatgattaaaggttctacaatcgccttaagaattcacgttgtcaagcaaaaatatgcacaaatagtttccacatcaatagatcattctaatgccctaaatcttaaatcctgtttcaatttttgttttttt

SEQ ID NO: 9097 - DNA, 433 bp, Zea mays
  unsure (1)..(433): unsure at all n locations; Clone ID: LIB3137-040-Q1-K1-C12
attcggctcgagaagaggccctatttagctaactattttctttctttcttcgtcggcgggaaagatgggagtggctgtttatttggacaccattttcgtccctttgagtcttttcatcacagtgggttaccatgtctatctttgccacaccatcaagaacaaaccttcacgtacaacttatggaatcagtaagaagagaaggacagattggagtctcaacttaaatcaggtaattgcatagatcaattgtgcatgtaatatgtttatacatggaatttattctcagagtaattgtttggtttcatgttttcagatatgatttttcacgtgtcagaacagaacatgattttcagaaattaaaaataataattaactttcacatctcanacatatataatttttctatttccaacgaagtttcaaacacacaata

SEQ ID NO: 9098 - DNA, 442 bp, Zea mays
  Clone ID: LIB3137-040-Q1-K1-D12
attcggctcgagagaccaccaatttacttgtgagtgtatacccaacacaaactgaagtcatcatgcactactacacccgcctctcataagttgatagggaacctatcatggagtattccacaccaccaccaatgataggcaactaccaccaccctaatgctcaccgtgtcctcaacgagaagattgtctatgaggagaatgttatttgaggatcccgccacaaccacattcatcaccaccaccctgagactcatgagagagtcaaggtggtcgagtatgaacaagttcctgataatcgcattgtctatgaatagaaacctgcttatgacaactatcgttactactctccaaggtattgaaattggacaaatgcaagaacacctataacgtgttatcatgttgctttttattaagcaggctacctattataccaaaagcacca

SEQ ID NO: 9099 - DNA, 443 bp, Zea mays
  Clone ID: LIB3137-040-Q1-K1-F12
attcggctcgagtcggaacgttgttataaacgttgctgttttcagataagcacgtaactcactatctatctatcaatcgatatctccgagttcagccgaaccaaactccgaagctatggcagagctccaaaccaaggttgaacctgttacggtcccggctccggtggatcccgagccaccgctagctgaggctccgccgctcgagaagaaagcggtggcggtgccaccacctgttccggctgcggcagaggaaaccaaagctcttgttattgtggagaaggagaaggagaatgagaagataccagaacctgtaaaaaagaacgcctcacgtggatcccttgatagagacattgctcttgcagaaatagagaaagagaaacgattgtctaatgtgaaggcttgggaagaaagtgaaaaatccaaagcagagaataaagcccaaa

SEQ ID NO: 9100 - DNA, 449 bp, Zea mays
  Clone ID: LIB3137-040-Q1-K1-G12
attcggctcgaggtgactcgttcttcttcgtcgttatcttcttcttttgtatgtctgtgtttgtattttctgtcaccttaaaatgtcttgctgcggtggtaactgtggttgcggaagcgcctgcaagtgcggcaacggctgcggaggctgcaagatgtacccagacttgagctacacctagtcaaccaccaccgataccttggtcatgggagtggcaccagttaaagctcaattcgagagtgctgaaatgggtgttcccgctgagaacgattgctgcaaatgtggagctaactgcacctgcaacccctgcacttgcaagtgaagtgttggatagctaaagcttcaagcagaaatggcccttacaaataatgataaaaactatatgtattttcaaaactccaaaattatgtagtatgtattatgttgcactctgatgttttgtgtctaaa

SEQ ID NO: 9101 - DNA, 232 bp, Zea mays
  unsure (1)..(232): unsure at all n locations; Clone ID: LIB3137-040-Q1-K1-H11
attcnnctctataatanagcattttttttcacatccaatgttatnacctgatgaaacctttttatctatcttagtcacacacgccttatacattataccacaattttaaaacaataatcacatcaaatactaagttataatataaaaacaataattttttcattaaaaaaaaaaaaaaaaatacatccgcccactatttatctcttctacctcttaattaattctctaccct

SEQ ID NO: 9102 - DNA, 421 bp, Zea mays
  Clone ID: LIB3137-040-Q1-K1-H9
attcggctcgagctctagccgaattttctctagcgtaaatgtgttacgagaatttgatgttctcattccagaggaagctcgccaattgagaaggaaagctctctctcgtattgaatggctgcaaaaagctgatgtgcctaccatagcacagattgaagagttccattcgatgcagaggatgatgaatgctcctgattcaaatgataatattgatctactgttgagcattgatttgttgggtttacaaggagcaggtaaagcttttccaaacaagattgtttttgatgataagcttgtgttggctaacacacaagaattcttttatggaaattttccagtggattcttggttaccaatttttgtgaattgtctttatcctgtaagtcaattaccttcataagctgtcgttgtaaatgttaca

SEQ ID NO: 9103 - DNA, 61 bp, Zea mays
  Clone ID: LIB3137-041-Q1-K1-H6
agagcgtcccgtcaggctgatctctagcgctctctctgcggccgttcacgtctcggtccca

SEQ ID NO: 9104 - DNA, 307 bp, Zea mays
  Clone ID: LIB3137-043-Q1-K1-H1
tttctctccgtcctcccccacctcccaccatcccttttttttgctcgactccttctccttttatccccgccttttttttacctgtttccccccttttctttttttctttttttttatctttctaccttattacttacttcttctttttcttttttatttcttttttcctccccctttttttcttcatcttctcttttatcttttcttctttttttttttttttttcttttttttttttttttcctctctttttttattatttcttttattttcctcatatttttctttttcttatctcttttttctt

SEQ ID NO: 9105 - DNA, 65 bp, Zea mays
  Clone ID: LIB3137-045-Q1-K1-A12
cggacgcgtggggtttgcttttccttggatcagcagtcgtcgccgtcaggttgagctgcttgtaa

SEQ ID NO: 9106 - DNA, 350 bp, Zea mays
  unsure (1)..(350): unsure at all n locations; Clone ID: LIB3137-046-Q1-K1-A1
acccacgcgtccgggccgcccttnnttttttttttttttttttttttttttttttagacataaaccgtcaccgggtcttgttttcataccatcaggcatatactgtgaacaaatgtacacgcaccgatagccacagggaacacagagtatataagccaagccagcaacacctcagcagcagcggcagcaactgggtggcaatggcgagcaagtagcagcaaccaagatcccagacaccccagtccactggactgggtgacaacaactggagctggatgcacattcatgtcattcaaagggggaaaaaaaaaaggggttaagcccaggagaagaaaaaaaaatttgttctt

SEQ ID NO: 9107 - DNA, 430 bp, Zea mays
  Clone ID: LIB3137-046-Q1-K1-A10
aaaaactactggggccgccaccgccacagtcccgccccgccccgcccccgcttcccgagcggagggagcgactcagcaagcgcgcaacggaaccagccgccgcggcgcgccatggcgccgttccagatgcgtttcgggctccagatctctcccgcgcgctccgacgacgacgaggaggaggacgacgacgacgacaacgaggaggagtatgacgagatggcgagcgaggggacggcctcgccgccgatgatgctccggccagggaggggagggggagggctggtgagcgccgtcgtgggcgcgctgcggaggtcgctggtgatgtgcagcgctggcgccgtggatatcgacgacgacgacgacgaggaggagggcgggatcgagatcgggcggcccacggacgtgcaccacgtctcgcacgtcaccttcg

SEQ ID NO: 9108 - DNA, 329 bp, Zea mays
  Clone ID: LIB3137-046-Q1-K1-A9
gcgggcgccctttttttttttttttacttataatcaagatttaaatttcgtccgttgttctggggaagagggtttaagtgaacagctacacatatatctaccgtctgcttcggaagtgaaactaaagaatgagccggccctgccgcgccgccagctccatgtacgctacaccgacactcggaaaaccttgtaaccccaacaagggtcacggtcacgttcgactcctatgctgtatttacagagttcgcaacattgcagccgtattcatctactgatccatggctccatcctcgcctcagctgagaactgtcccaacccggcgtacattc

SEQ ID NO: 9109 - DNA, 278 bp, Zea mays
  Clone ID: LIB3137-046-Q1-K1-B1
ggcgccctttttttttttttttacttataaacaagagcaaaatttcgtcggttgttctggggaagagagtttaagtgaacagctacacatatatctaccgtctgcttcggaagtgaaactaaagaatgagccggcccggccgcgccgccggctccatgtacgctacaccgacactcggaaaaccttgtaaccccaacaagggtcagggtcaggttcgactcctatgctgtatttacagagttcgcaacattgcagccgtcttcatctcctgatccatg

SEQ ID NO: 9110 - DNA, 428 bp, Zea mays
  Clone ID: LIB3137-046-Q1-K1-C1
cgtaatacattgccttttaacacagaactactttactgaggggttatttgaaaacaggggttccgaccagtaagcaagatggatcctgcaatctatggcccgccagaatcatcgatcacagaagcgcacatcactggacagctcaatgggctcacagtacaacaggcggtggacgaggcaaagctgttcatattggactacccatgatgtatatctgccattcctggaccggatcaatgcaatagaggggcggaaggcgtatgcaacccggacaatcttgtttcttaccaaagctggcacattgaaaccgattgctattgaacttagccttcctccgagcaaggcaagcgagccccggccaagcaaggtccttacccctcccgctgatgctacctccaattggctatggatgcttgccaaagctcatg

SEQ ID NO: 9111 - DNA, 398 bp, Zea mays
  Clone ID: LIB3137-046-Q1-K1-C2
gcacaaatgtttctgctgatagctttgagtctctacccattaagataagtgctaaaagagtgggaggcatatcacgtttcatgaaccatagttgtgctcctaacgtattttggcagccagttcagtttgaccatgaagatgatcatcgcccacatatcatgttctttgctttgaagcatattcctcccatgacagagttgacttatgactatggtgacgttggagctgatcctagtggtgtacggtctcctagagcaaagaactgcctttgtgaatcctcaaattgtcggggattctttatctgaccgtggaaaatgcatattctatgattctatctatcaacattcaaccctaccagctagatcctttttggtggcacctgaaagaaaagtaggact

SEQ ID NO: 9112 - DNA, 426 bp, Zea mays
  unsure (1)..(426): unsure at all n locations; Clone ID: LIB3137-046-Q1-K1-C4
cccccgtcgtctctcctctctttcccactttcccacccgtcctccattgctggcttcctgtgtctcgcggagtcgctgcgatctaaccaccgagcacgagcgtcctacgcgccgcggaccttgctcatggccgcggggtcgatccgggtcaccatggaggtgggcgccgacggcgtcgcgctcatcaccatcgccaacccgcccgtcaacgcgctccaccccatcatcatcgcggggctcaaggacaagtacgcggaggccttgcgccgtgacgacgttaaggcaatcgtgctcactggtgctggaggcaagttctgtggaggatttgatatcaacgttttcacaaaggttcatcagactggggatgtatcacttatgccggacgtatccgtcgagctcgtgtcanacatgatggaagagggaaaa

SEQ ID NO: 9113 - DNA, 380 bp, Zea mays
  Clone ID: LIB3137-046-Q1-K1-F10
gccaggtttccttttccccggttttccgctttctttttccagtccccgcccccaaaatcgccgccgggtgtgggccctagatcccgatggcctcgcgccgccgcaccctgctcaaggtcatcatcctcggcgatagtggggttgggaaaacttccttgatgaaccaatatgtgaacaagaagttcagcaatcagtacaaggctacgatcggcgcggatttcctcaccaaggaggtgcagttcgaggacaggctcttcactctgcaaatatgggacactgctggccaagaaaggtttcagagtctcggcgttgcattctaccggggagcaaattggtgtgtcctagtctatgatgttaattctatgaaatcatttgacaac

SEQ ID NO: 9114 - DNA, 391 bp, Zea mays
  Clone ID: LIB3137-046-Q1-K1-F5
ctgtgcgtcttttccacgagaggtaaccttccgtatagtactgccgacatgggcctctcgtgcagcctggtcgtgccgtggctcgcggcggtggccgcgctggccatcaccgccgccccgctcggcgccgatgcctacaagaactacaccgtcggcgacgacaagggctggtacgacggcctaagcctgcccggggtcgactaccaggcgtgggctgacggcaagaacttcagcctcggggatttcctcatcttcaacacggacaagaaccactcggtggtgcagacgcggaacgtgacgctgtacgagagctgcgactacaacgactcggggcccgacgacaccgtcgagtgggccgccgcgccgccggagttcagcaaggacgccgtca

SEQ ID NO: 9115 - DNA, 406 bp, Zea mays
  unsure (1)..(406): unsure at all n locations; Clone ID: LIB3137-046-Q1-K1-G2
ncccagatcgagtcatcaagctatttagccttgagcacgcctagacacgccagcggcaagggcggctcagctggccgtcgcgtttctcgccttgttgtcctcctctgccttcttggccgtgtctggccagaagttcaacgccatcttcagcttcggcgactccatgtccgacaccggcaacctgtgcgtgaacggtccccccgccggcctgacgctcacccagccgccctacggcgagaccttctttggccgcgccacctgccgctgctccgacggccgcctcgtcgtcgacttcctggccgagaagttcgggctaccgctgctgaagccgtcgaagcanggcggctcagacttcaaagcaggcgccaacatggcgatcattggcgcgaccaccatggacttcggc

SEQ ID NO: 9116 - DNA, 454 bp, Zea mays
  Clone ID: LIB3137-047-Q1-K1-A11
cttcggttcgcttagctcgccgtcaccatggttacctccaccttctctccgcgccccgccaccctcaagcccctgcgggcgcgcgccaagcccgccggcctccagctccacctcctcccgttcccgcgcctccgcgtcgcctgcgccaccgccgccggggaggcgccccccgttgagcagcgggacgaagtggagccggcctccgccgcggcatccaacgggacggccgtcaaggtcgaggcgcccgccgcgaagcccgagtccccgcccgcgcccgcgccggtcccggccttccgcgacgccaggtgggtcaacggcacctgggacctcaccaagttcgacaagggcggcggcgtcgactgggacgccgtcatcgacgccgaggccaggagaaagaaatggctcgaagactacccggaggcgacgagcacagacgatgccgtcgtcttcgaca

SEQ ID NO: 9117 - DNA, 294 bp, Zea mays
  Clone ID: LIB3137-047-Q1-K1-E10
gcgaatgggacgaaaggaacacaccaaggaaccacttagttctccaaaagcactggtgaagagacgacccgtttcttctcggcatctttcttctcctccaaagttgatggagaatttacacctacatctgtcttccgagggttaatgaaatcagtgcaaaaacaagctccgaagcttgttgttgggatattgcttctcggtgcaggggcattcttcttaaatagggctgagaagagtcaactatttcagcagcaaggcattgccacaagtattggaaaggtaacctccacaaca

SEQ ID NO: 9118 - DNA, 121 bp, Zea mays
  unsure (1)..(121): unsure at all n locations; Clone ID: LIB3137-047-Q1-K1-H10
gggcccgacccacgcgtgccnaaaagaaaaaataaaaaatataattttaaaatttataaaaaaaaaccaaaaaaaaaaaaaaaaagagaaataaaaaaaagaaaaaaaaggggccgccctt

SEQ ID NO: 9119 - DNA, 431 bp, Zea mays
  unsure (1)..(431): unsure at all n locations; Clone ID: LIB3137-048-Q1-K1-B12
gcgctcgtcgcttccgctccacaggattttctgcgttacccacaaccgtgtgaccgtccgtgctgcgggcgaccccgatccgccgacccgtccgtcccaccacaccccaccgccgctcgcagctatgtcgccgtcggagccgacgcgggaggagagcgtgtacatggccaagctggcagagcaggcggagcggtacgaggagatggtcgagttcatggagcgcgtcgcgcgctccgccggcggcgccggcggaggggaggagctctccgtggaggagcgcaacctgctgtccgtcgcctacaagaacgtcatcggcgcccgcagggcctcgtggcggatcatctcctccatcgagcagaangaggagggcccgcggaacgaggcgcacgccgtcttcattcgcgcctaccgtttcaagatcgagaccgagc

SEQ ID NO: 9120 - DNA, 421 bp, Zea mays
  Clone ID: LIB3137-048-Q1-K1-B6
gaagaggaaaagcaggcttttcttgctttgttatcggtggaagaccgtacactggggcctgggcaaaccctcacagtttggctgtcttgtacgccaaaagatattggtttgcatacatcaatcgtgcatgttgatatcggcaatgagaagattgagcgtgtggcttttcttttggcagatgacaatgtctccaagtcattattttctgataagccttattctaggagacgtgttcaagttaagaaatttgagccttcaccatttgtgccaggttgccgtccaactcagcagcatgttcaaggatacaaacataagcttcctcagtatgcaatacctgcacatatccgtgagctcattgaaagtaaacagacacctgatgtcctatatgatgagttgagcatgataaactattcagaatatt

SEQ ID NO: 9121 - DNA, 468 bp, Zea mays
  unsure (1)..(468): unsure at all n locations; Clone ID: LIB3137-048-Q1-K1-C10
gcgcactcgctcctctcctctcccgtcctatccattctgcacgcccagcatccatccacgcctccggggctccggctccggctccggctccgccatgggcctttcaacagtttactccccggccggaccgcgcctcgtgccggcccctctcggccgctgccgctctgcccagccccgccgcccgcgccgagccccgctcgccaccgtccggtgctccgtcgacgccaccaagcaggcgcaggatggcgtggcgacggcggtcgcgacggaggcgccagcgtcgcggaaggagtgcttcggggtcttctgcaccacctacgacctcaaggcggaggacaagaccaagtcgtggaagaagctagtgaatggtgctgtgtcaagcgccgcccggatgatatcaaatcacctgctgttcanactcgcttttggtgaggttttcggacaagaccaaccaatagcacttaagct

SEQ ID NO: 9122 - DNA, 401 bp, Zea mays
  Clone ID: LIB3137-048-Q1-K1-C12
gcgcaaggtgagatataaaaatatagcatcgcccttgctctggagagtctggatcctcctgaacctgcaagcagcaagcgatgaaaggagggacgcaagcaattagcctgatggtgcaccttgctgtgccatggctctgccttgcttcttgggcagctctgctaccagcgctactagcatctgcaaatgtgggtgcagcagctccgacactgagagcggagtacatgaatttgaacttcagcaccgcttcggcgacccccgacaagtacaagagcttcatcgcttctgttcgtgctggcttggtgagcaaagcggggggcaacagcagcggcatccccgtgctggtcgacgaagacgacccgctcgcgctcgagtcgtttctaaacatcactctggtgaac

SEQ ID NO: 9123 - DNA, 457 bp, Zea mays
  Clone ID: LIB3137-048-Q1-K1-F10
gcgaaaagtgcaaatattcacatagcttttggatttgttgtgtggcagtgatgaatgtggtggctgcggctctcaagttgcaagtcaggacacttttggaactttgggcgccattgtaaaacggagaactggcaacaagctggtaggtttcgtcaccaaccgacatgttgctgttgacttggactacccaaaccagaagatgtatcacccattgccacccaaccttgggcctggtgtttatcttggagctgtcgaaagggcaacatcttttatcacggatgatgtttggtatggaatctatgctggaacaaacccagagacatttgtacgtgctgatggggcattcatcccatttgctcatgactttgacatctccacagtcacaactacagttaggggtgttggtgatattggggatgttaaggttatagatctgcagtgtccacttaatagatta

SEQ ID NO: 9124 - DNA, 460 bp, Zea mays
  Clone ID: LIB3137-048-Q1-K1-F12
gcggcagcttctcaaccggataggtagctccggatcaggtagaacgctgcacaatcccgttcgccggcgccaagatggtgaacgttcctaagaccaagaagacgtactgcaagaacaaagagtgcaagaagcacacactccacaaggtgactcagtataagaagggcaaggatagcctgtctgcccagggaaagcgccgttatgaccgcaagcagtcaggatatggtggtcagaccaagcctgtcttccacaagaaggccaagaccaccaagaagattgttctgaagctgcagtgccagagctgcaagcactactcacagcacgccatcaagagatgcaagcattttgagattggtggagacaagaagggcaagggcacatctcttttctaagcttctcgtccacctgtctggttgttgagttgaagctgtgggtctactactactggtataaaaacatg

SEQ ID NO: 9125 - DNA, 405 bp, Zea mays
  Clone ID: LIB3137-048-Q1-K1-G11
gcgcacacacacacacacacacacacactctacacattcacacacacacacacacacacaggcaagtggtttccaaagccaagtgtgtgtactagcaaccagctagctcgggcggcagcaggcagccatcatgtcggaggagaagcaccaccacttcttcaaccaccacaagaaggacgaggagcagcccgccggcgagtacggttactccgagaccgaggtggtcaccgccaccggcgagggcgagtacgagaggtacaagaaggaggagaaggagcacaagcacaagcagcacctcggcgaggccggcgccatcgccgccggcgccttcgcactctacgagaagcacgaggcgaagaaggaccccgagcacgcgcacaggcacaagatcacggaggaggtcgc

SEQ ID NO: 9126 - DNA, 178 bp, Zea mays
  Clone ID: LIB3137-051-Q1-K1-A4
ctagttctagatcgcgagcggccgcccttttttttttttttttttttttttttttttttttttggtggcttagttcacgtctctttcatcgaaatggcttctcatttttgcctagactctttattttacaagtaagaatttcttcctagatttttatgacccacgggaatttacactg

SEQ ID NO: 9127 - DNA, 134 bp, Zea mays
  Clone ID: LIB3137-051-Q1-K1-A6
ctccttcgcttaatcgcgtctcgtgctcctgttttctgtgtatataaacgcggcaatcgcgacgcccggggaggcgttcgttctccttctccatcccacgcgcgcgcagtccaaggccggatcggcggcctctc

SEQ ID NO: 9128 - DNA, 360 bp, Zea mays
  Clone ID: LIB3137-051-Q1-K1-B6
gcgatcctgttctcggcacctctcgggtctcccgttcgccctgtcccgcattcgtatcctctcctcgctctggccgccgccgcttcccctgcgccccgagccaagatgaatgttgaaaagctcaagaagatggcaggtgctgtgcgcactggggggaagggtagcatgcgcaggaagaagaaggcagtccacaagactacgaccacagatgataagaggcttcagagcaccctgaaaagaataggagtgaacaccattcctggtattgaagaggtcaacatctttaaggatgatgttgttattcagtttgtgaatcctaaagtgcaagcttcaattggtgctaatacatgggtgggcagt

SEQ ID NO: 9129 - DNA, 457 bp, Zea mays
  unsure (1)..(457): unsure at all n locations; Clone ID: LIB3137-051-Q1-K1-D1
gcggctctctcctcttgcgaattcgctcgctcgatcctagctttctcttccaagaagancgcagcgcccagggccggggccacgcaagcctccgccgccacgcgccacctgctggccgccgcctgggcgccggcggcgaagccgcggcagctgagctcgcagctcgcgctgccgtcgtcgtcctcccgcgggccggccccgctccgcgcgtccaccgaggaggcggtggaggcgcctaaggggttcgtggccccgcagctggaccccagcacgccgtccccgatcttcggcggcagcacgggcgggctgctccgcaaggcgcaggtggaggaagtctacgtcatcacgtggacgtcccccaaggagcaggtgttcgagatgcccaccggcggcgccgtcatcatgcgggaggggctcaaccttttgaaactggcgcgcaaggagcagtgcctggcgc

SEQ ID NO: 9130 - DNA, 308 bp, Zea mays
  unsure (1)..(308): unsure at all n locations; Clone ID: LIB3137-051-Q1-K1-G1
gcgcgaccaatctctctggnncctgctgcttcctgataattcgaccttgttccccagtcttggctccttgcactcctcgcggtcctccatctccagcattgtgttctgattcacctgctccaatggctgttctttctgctgctgatgcttccccggtctcagctatcgggtttgagggctatgagaagcgccttgagatcacattctctgaggcacctgtctttgtggaccctcatgggcgtggtttgcgtgccctctccagggcccagattgactctgttctggatcttgcacggagcacaattgtg

SEQ ID NO: 9131 - DNA, 424 bp, Zea mays
  Clone ID: LIB3137-051-Q1-K1-H12
aggacgcctgcttggccgtcaggagttatagaatgtaatcaaggagaagatcaaggaggaggctggccggaggccacaaggacgaccagcacgccacggcgacgaccggcggcgcctacgggcagcagggacacaccggcagcgcctacgggcagcagggacacaccggcggcgcctacgccaccggcaccgagggcaccggcgagaagaaaggcattatggacaagatcaaagagaagctgcccggacagcactgagcgcccataaatacagtggctgtgctggcgcgtcaaagcccgaatgttcagtgttccatagataataagataaatccatgaataaatgtccctacccttgatcatgtgacaaggacagggacagttttcttgtacttggggggtgaatttggacgtggtgatacggg

SEQ ID NO: 9132 - DNA, 420 bp, Zea mays
  Clone ID: LIB3137-052-Q1-K1-F1
tcgacacgccccaacccctgctcggaggtcccttgcgccgcgccccatctttaatggcacttggcttgccagcttcctgcttctccagagcgccggcgctctctcgcggctctctggtgcccacctctgctcttcttcctccagtcgcatctcccttctctctctccctcaagttctctgcgcgtatcgagcttctccacgatggctgccatggagtccaccagcagcgcgcctagctcctattctccatggcgcgtggctctgctactcccctcccatctccctgcgtctctctctactcgctgaccgagctccttccctgcagccgagtttcttcttctacagcccgtcgcgactgctccctttgcctggccgaggcttcccctgctcggtcccctgtcggcctgctcccctcttcct

SEQ ID NO: 9133 - DNA, 386 bp, Zea mays
  unsure (1)..(386): unsure at all n locations; Clone ID: LIB3137-053-Q1-K1-H12
acgggaaaagatcaagtacctagcanattgtaagttggtttctttttgcggacaggttttgaacggggcgtttgatttacagcctagcactggggaggctgccagtgcagacatacatcgtgtattagacttacgggcacctgttattgttaaggttttgaaaggaatgtgcatcatggatgctcagatcttcaaaaggcacctgaaagagttctatccattaattaccaaacttatctgttgtgatcagatggatgttcgtggagcccttggtgatctctttagcaaacagcttactccactcatgtcctgaagtatggcagtatttcctccgttgcatatatctttgtggaatatattcctcatcagcatttttgtgcaaacat

SEQ ID NO: 9134 - DNA, 398 bp, Zea mays
  unsure (1)..(398): unsure at all n locations; Clone ID: LIB3137-053-Q1-K1-H4
acgatcccgcacctacctccttcctctctcaccgaggaccctcgcaccaagaactgagcgggaagagaggtagagaggcaagcgcacgagagtttctgctcctagtctcgtctcgccccgcctccgtctcctttccctctctggttctctctctgcgattctcgtcgcattggttccgttccctcacgaaaggcggtagctttctgtcttccctgatctatctagataatggcgaccacgacgtcagcgaccaccgccgcagcagcagccgccaccaccgccaagccgcgggggtcgtcgtcggccctctgccaaagggtggccggcggcggcaggcggcgctccggggtggggcggtgcgacgccgccggcgtggaagcccatgcgcangccgtggc

SEQ ID NO: 9135 - DNA, 313 bp, Zea mays
  unsure (1)..(313): unsure at all n locations; Clone ID: LIB3137-053-Q1-K1-H7
gttgcgcaggtggacgcagggcctgctggacaggctcgttcccgcgctgggagagcagttgctgagggactaccattcctgggctcaggctcagcagcagcatgaatcgtcttgatgagattggaggtcaagggaaggaggagagattggtcgctcatgtatctacgccactacaagtatccaaggatttagcgaatccagatatacaaggactcgtaaatcaagacgcttgtttttttttggggtgcaccaactggccatcgtcagtctgtgcttttgtcctgtgtccaatactccatcagtnaacccanna

SEQ ID NO: 9136 - DNA, 380 bp, Zea mays
  unsure (1)..(380): unsure at all n locations; Clone ID: LIB3137-054-Q1-K1-E9
gncccgnnccncnncncgcaggggggacccgncaggcacaccnccgaagnccgaaccncccggccccaacacaanggccnccncccncgccgcgcgccgccnccncncccgcgcagccgccgngcgccgnnnccccgnccccnncgccnccgccccagcccccgcgaaggcnccccgcagnnncnccgccgacgcgggaccgccnccgccgcncccgccaccgccgcngcagcccgncgncgagccgcccacgncggagggcgcgggngccnncgccnccnccaccaccgcnggngccggaggggcccacaggncgncgccgggagccgcggcgggggcgcggcgccagggnggngccggcnacgaggaggagcaggaga

SEQ ID NO: 9137 - DNA, 391 bp, Zea mays
  unsure (1)..(391): unsure at all n locations; Clone ID: LIB3137-056-Q1-K1-H10
cggaaaacccggcccgacccacgcgtccgcggacgcgtgggtctctccttttctgtttctctctcctcgcgagctcttcatgccttgttccancgcggtttggcgatggcggcagcccangcgatctcgaaggggagcgtggtgtctccatgcggcaatcgagcggcgccgggcttccttgccaggcggaggggtgccgtggcggcgcggatggcaccgtcagcggcgcggatcgggggcttctggaggaagaacgcgtttcctggcgggaggctaaccctgaggacgaggagatccagggccgcgtcaccgacgcagatgaacatgaaccttgcgcttgggaaatcgatgaggtggtgggagaaggggttgcagccccacatgcgtgaga

SEQ ID NO: 9138 - DNA, 309 bp, Zea mays
  unsure (1)..(309): unsure at all n locations; Clone ID: LIB3137-056-Q1-K1-H6
gaaaaaccgggccgacccacgcgnccgactgattcaaaggcatttttttgaaagtttctgcaagccgttgatcttgcggtcagcggtactaatgtaactgctgttccaccgttgtcgccgcccagtttggacgaacacaggcatcatagtgaataataatgtcatacgtatcatatatatattttttgctcggcgtataagttcctaagaaaaggaggaaaagaaagttactgacatcttcggttttttttttttttttttttttataaaaaaaaaaaaaaaaaaaaaataacgggcggttttttttgt

SEQ ID NO: 9139 - DNA, 420 bp, Zea mays
  Clone ID: LIB3137-057-Q1-K1-A6
ctggcgctttgtccgcctcctccttcatctttccttcgtccccacgagcaaccggtcatgcgccgtctttcagatgttggtgtatcaccatctcctatctggcgacgagcccccggcggattcattcacctacaaggagctcgagaacggcgccctgtgggaggtcgagggaaagtgcgtcacccaaggtcctgttgatgtggacattggtgccaatccattcgccgagggtggtgaggacgaaagcgttcatgacacagatgcgaaagtggttgatattgttgacacatttcgtctacaggagcaacctccttttgacaagaaatcattagtgtcttacatcaaaaaatacatcaagaatctcactgctgtcttggagccagagaaagcggatgagttcaaaaacggtgtcgagggtgc

SEQ ID NO: 9140 - DNA, 431 bp, Zea mays
  unsure (1)..(431): unsure at all n locations; Clone ID: LIB3137-057-Q1-K1-C9
catagatgatcnangtgtttcatatatggctcatcctgttgcttcattagaaggggcacgccaaataatgtcacatatcagtccactatcangcacgtctgtggggcgactcacattaagtatttgttcgagcttgttcaactctggagatagaccaccatgcatacagaggatcttttcgtctatcaatgctgacaccggcaagcagttaaaacagtcagtgaatgttttccacagctttacactgaatctgcgtttgcactcgtcataaaaaccatagatgcgatttactgcccacgcgtccggctagcaccgtcacttgcgctcaccactcctacgcaccgtcgttggtgaacgaatcccttcatcccgtacaccagccatgtnctgacacactgacacacacctggtggaggaagatgctctacctc

SEQ ID NO: 9141 - DNA, 247 bp, Zea mays
  Clone ID: LIB3137-058-Q1-K1-G10
tcggctttgagcacttcggcgacgtcgtgaagatctggttcaccttcaacgagcgggagacgtggtcctatttttgctacggaaccggcatctttgccccggggcggtgctccccaggacaaaaatgcgctaacccaaccgggaactcgctcaccgagccttacattgttgcccacaaccttctgcgagctcatgctgagactgtccatgattgcaacaagcatcacacacgtagcatggacccaca

SEQ ID NO: 9142 - DNA, 65 bp, Zea mays
  Clone ID: LIB3137-059-Q1-K1-E10
cggacgcgtggggtttgcttttccttggattatcagtcgtcgccgtcaggttgagctgggggtaa

SEQ ID NO: 9143 - DNA, 393 bp, Zea mays
  Clone ID: LIB3137-059-Q1-K1-G8
agccttccgcgaccccttggggttttagatcgcgagcggttccctttttttttttttttttttttttttggtgtttttttttttttttttggtttttttttcccaaaaagcagcagagtgcacaagtcccattaccagggaaatgtacattactcagtgaaacagcagttatttcgaaatatgaggagatggcaagcataaaccccaattaaaatccgtcccaacattgtcaccaacccaacgcgaagataaattattcactgcatgcaatacgccaagcacatgcacaagcccacattttacagaaccaaatggggtgcaaacttaagtgcccaatgaccaaaatagctttatgacaaacttaaaagccctgttcgatcaggtaatcgccga

SEQ ID NO: 9144 - DNA, 294 bp, Zea mays
  unsure (1)..(294): unsure at all n locations; Clone ID: LIB3137-062-Q1-K1-C1
gctaatcctataatccatgatttaaaagatttgcgtgccanacagtcaccagggaccacagatgaaattgcagcagaccccatacatcatcttgaaatatttagatcacattatagatataatggatccagagcacccatactcactggaacaaatgaatgtagtgactgaagatttaattgaactcaattatctacgtaatcatgtcatgattacattcaccgcaacaatggagcagtggatnntgacgtctattattggactacgcatacgcgtgaaactcagactgagctt

SEQ ID NO: 9145 - DNA, 469 bp, Zea mays
  Clone ID: 11LIB3137-024-Q1-K1-G4-R2A
cgtaattcggctcgaggacagcgagatgtttatctaatggactctggaactgaaggccatggctgatacgatcattaacatgaggcaacagctatttaatgctctgagatccagaggaacccctggtgattggagccatatcattaagcaaattgggatgtttactttcactgggctgaatagcgaacaagtcgtattcatgaggtaggaataccacatttatatgacatccgatgggacgatcatcatggccgattggatcattaggactgtgcgccatgttgtgaagactgtaccctctgacaccactgggcggatatgatgaatgctacatctggagaccgacctttgtacaatgaagataaaacagttggttgaacgctgaacggagagatctataagcatgaagaattgaaagctaagttgaaaacttatgaatttcaaactggcagggattgtgaagttatag

SEQ ID NO: 9146 - DNA, 416 bp, Zea mays
  Clone ID: 15LIB3137-024-Q1-K1-G4-F2A
atcgttcgcgatctagaacttttttttttttttttttcacataaaccaccacaggaagggtcacagtgacgaatatttacaaaactgagtcttttaagtccataaaaattaaacagtactgctcagggaaaacccaaacacaaggctggcaagtttgaatcacaagcatgtctccattgcttgattgatggaactaaaaacattgatcgggaggaaactgagacaagcaatgggacaacctttgctgtttcaagcattgctgggggataaacataaagttagacagctgtggctgaagcaacgggagtccctaggctttcggcaatagctggaacaaaggccttgtttgagacaggattagtacaggcaggagttctcccttgcagggtttcatacgcagcttggtgaacacccaa

SEQ ID NO: 9147 - DNA, 423 bp, Zea mays
  Clone ID: 21LIB3137-024-Q1-K1-G4-R2A
tcgctcttcgcatcccgaggcggcgcttttggggtcggaagcgacacgggcgcccggcgggtccgcggttggtggtgctactgctagcaagcagcagcaggcgacgctaggcgagagccccagtcggagcaggccaccatgtgcggcatcctcgctgtcctcggcgtcgctgaggtcttcctcgccaagcgctcccgcatcattgagctctcgcgcaggttacggcaccgagggcctgattggagtggtttgcactgtcatgaggattgttaccttgcacaccagcggttggctattatcgatccttcatctggagaccagcctttgtacaatgaggataaaacagttgttgtaacggtgaacggagagatctatcaccatgaagaattgaaagctaagttgaaaacttatgagttccaaact

SEQ ID NO: 9148 - DNA, 574 bp, Zea mays
  unsure (1)..(574): unsure at all n locations; Clone ID: LIB3137-061-C2-F5A
attgataggcagncacaagatttacttagtggaattgtggttcctacaagtgccacaaacgaagctcttgttgaggacaataaaaatgaaaatcaggatgatagtatctggttgaaggaaaaatggtcaattggagagattccgctgggtgaaccgccacagaggcacgttagtcatgtgttttagcaacattcttgtatttctgtgtcgtggaaccactgtcaagtcagcttcactgtctccttccatattgtcgggacaccatcttacaatttctcctccaggttcataaccataacacgtcaaattgggggcataaaatgcacctgaaatgctgattgggcagcgtagaaacttcttgtatcctgcatcacatactctgtctctattgttttcttgttagctccatgtacttcgtcacattcagggctcgtaatatcccggtttcttgttttagggtttgttgagtttagctgtgggttttaaaaagccgatgcacctgtgtttttttttgcggaaattgtaccatacatggaagcagtagtctttgaagaagcggaatttggttcaaaaa

SEQ ID NO: 9149 - DNA, 685 bp, Zea mays
  Clone ID: LIB3137-041-B5_FLI
gggcgatggtcgtcaaagaaaaaacaagattaaagggtgcgtagaaggaggaagtggtaagaaagccaatgaaaatgaaaatgtcacaagtaagaaaatgattcgtgggaggtttaagtgtccaaactgtggtgaatttggccacaggaaagcaagctataaatgtcctttcaatggaacaaagaaaagaaaaaggagaccaaggaaaaatgtgactaaaggttggtttccaaaagatttcgaagcttcgtcgcagctcgtcctgcaagagaacgaagtgcatccactagctacttaactacctgcaagagaacgaaggcgagggtgagggcggcaagggtgtcgaagagaagcaggaggtagcgtggcgtcgccatggaagcatcggaggcttgggattaggtcggaactcagtagcgaagaggacccataacaggtgtgtgagatataggagaatgtgattgtgtttggccttttgttttgtgaaatttgtacgcgatgaaggcaacatgaaactaaaattaggggatgaattttgggagagaatacagaccacatagttgtcgttctgactgctagacagttcggtaagatcccttaggcatcatatgcatatgcatttgtatggttttcatattagaattataattactgaaagcacatctgaatgatgcagattgttttg

SEQ ID NO: 9150 - DNA, 1003 bp, Zea mays
  Clone ID: LIB3137-028-A6_FLI
agttaacgaaagccttttatccaagctcagggaagggaagctcacagtttcgttggatccaatcttttatccaagctcagcgatggcttctcgtcagcagcatcctactagctaccacgccggcgagaccaaggcccgtgccgaggagaagacgggtcaagtgatgggggcgacgcaggagaaagggagggaggccaagcacaaggcgtccgacgcctccgaccgcgccatgggaatgggccacgacgccatggaggcgaccagggagaaggcgcgcgccgccgcggaccgaaccatggggatgggccacgacgccggggaggcggccaaggacagggcgtaccgggccaaggacgcggcctccggtgccgctggccgcgccagggacactgcgtccgacgcggccggcgctgccggggaccgcgcccgcgacggcgcgcagcagaccgggagctacgtcgcgcagacggccgaggccgccaggcagaaggcggccggcgccgcgctgtacgccaaggacaccgtggtggccggcaaggacaagaccggcgccctcctgcagcaggcaggggagaaggtgatgagcacggccgtgggggccaaggacacggttgtcagcacggccgtgggggccaaggacacggttgtcagcaccgccgtgggagccaaggacgcgatgatgaactcgctcggcatggccggcgaggacaaggacggcaccaccaccaccgacgccggcaaggacaccagcacccgcaagcctggcagggactattagaggacacggcagccaaacttctcagtgtttctgttccagaagtttctgatcccatcatttaggttcaaaagtttctcatttcatttcaaactttcagtgtttggtgcatgctgtaaactctcttcaggacgggtcgtttgacatttgtgtcgactgaagcctccgcgctttcgactcaacgatgtatatgtaataataaagtcgcaaagctgttgttttattttc

SEQ ID NO: 9151 - DNA, 1674 bp, Zea mays
  Clone ID: LIB3137-016-A8_FLI
ggcgtgcactccctctctctgggacgactacggccgccgccgcagccgcccccacctacgccaggtgccgaggcattcgttggcctcttcgccggtgacgagaacctaccagacttggagcaagcctctcaacatgtcgtgggccgcaatcgagaatgatcctggtgtttttacggaactgttgcagcagatgcaactgaagggtcttcaagttgatgaactctactcacttgacctggatgctctcaatgatcttcagccaatatatgggctaatattgctatacaaatggcgacctccagaaaaggatgagcgtcctgtcatcaaggatgcaatcccaaaccttttctttgccaaccagataattaacaaagcctgcgcaacccaagctatcgtttcggttctcttgaactctcctggcattacccttagtgatgagcttaaaaagctcaaggaatttgcaaaggatttgccacctgagctcaaaggactggctatagtcaactgcgcaagcattcgtatgttaaacaattcgtttgcgaggtcagaggcctctgaggagcagaaaccacctagcggggatgatgatgtataccatttcataaactacgttccagtggatggtgtcctgtacgagctcgatgggctaaaggaaggaccaataagcctagggaaatgcccaggtggtgttggtgatgcagggtggtggcttaggctagcgcagcctgtgatcaaagagcacatcgacctgttctctcagaacgagataagattcagcgtgatggcgatcttgaagaaccggaaggagatgttcacggtggagatcaaagaactccagaggaagagggagggcctcttgcagcagatgggcgatcccaacgcaagcaggcatgttgagcagtcactcgcggaggtggcagctcagatcgagtctgtgacggagaagatcataatggaggaggagaaggtgaagaagtggaaagcggagaacctgaggaggaagcataactacgtgcccttcctgttcaatttcctcaagattctcgaggagaagcagcagctgaagcccctgatagagaaggcgaaggcgaagcagaagtcccacggccccagctaggtgaaaagccgcaatgcacctacgtactgtctcttttagttggggttccttgggcatgtttggtacctagcctaagccgccgtcaccagccacacttttcccgtcgcagttgtggcggccaattcggccgccacaacttaggcgtggcgtgtggcgccacacaccaaacacaccacttgtaagattggagttcgcgtatatgctttctgtttttagtttaggacaattgcaccaatagggtgcaactgcagatttatccctgtttttttagactttgcgtgcgtgcctttagattttttgaaacgaaactgctgtatgtctcttccgttaaaccgttgtatgtctctacttcggttagtcgtatttagtatttaacggtgtcaagtcttgataatacgtcaagggataattatgttagtgtccctgttttagggtagaactgtatatctacccttgttttttagactttgcgtgtttgcctgtacaattattatgcttaacatgatgaggatgttatgctcttattatgttaaaaacatagttaaattgttgacaaa

SEQ ID NO: 9152 - DNA, 683 bp, Zea mays
  Clone ID: LIB3137-061-C2-F3A
cacctcctgtacagatcctgactcctgcaggcaacagattgccgaggattttaagaatgaaactccactctggaagcttacgtgttatgctcacctcaggagcggtccttgtgacatcacgggagatattagctttgaagagctgagagctaacgcgtatgagcaaggcaggcaagggcatcctctgcagtcaatagtagagggtgaaaaaaaattgaaaaatgcaaagctgacggactttaataatttcctgaacatgccacgtctatcggtatcacaaactccaagctttccaactgtggcttccttccctgaagtgaaaaataactcagcatttggggtttctcaaaataatggaccaccagtgtttagtagtttcagtcaaattggagtaacaactaatatgggacctgggtccagaactacaccaggagtcccaaccaatactctttttggtcaatctacccaaccaagccatccaacatttcctgcacctacttttggtcgttctgatatgaaatttggagtttcaggtccatttggaagccagatatcacaacaatcatctgggagttttcaaggttcaaacatgtccagttttggcaatttctcaaagcctcatgccagctaccagcagtccccttcctcctctagccatcacagagacattgataggcagtcac

SEQ ID NO: 9153 - DNA, 634 bp, Zea mays
  Clone ID: LIB3137-013-Q1-K1-H10-R11C
gaggtgcgctgtgcaagaggtaggacggggcatgcacagcggcggcggctgagggtgcgcatgtagaagcggacccctttcctgtgccctttgatggggagcacgctacgaaaaacgtgtataacacggacggccacacggtgcgacaggagaagagtagcgatatccctgatagcatgaccgccctctaaaggaacgggtggatctaggaaggacgactaccccatgggcgggacgttggggaagagcgtgaggaggcagaccaaggcaagcacgaacccccacgcgaggcgctcgttgccgagcggcgagatctcgtcctgcgccgggatctcctccccgccgcggatgaaggtggcgaataggccccacgccaggcacagcacgctgccgctgatggcgcccgcgcccagcaggacggacgtgccgaacgacagcagctccgtcgtgccgtgcccaaacagtgcctgcgcgatgcgcccgccctccagccgccagatcggaagcaggttcagcgacgtcaccacgatgcccagcagccccgagaacgccagcgggtccacgggcacgcccacgctcttcaccgtgttcgtgagcacgttcccgagctcgtttgcgtagggcccgatcacca

SEQ ID NO: 9154 - DNA, 488 bp, Zea mays
  Clone ID: LIB3137-016-Q1-K1-H12.F2
gaaacaaggcatttcttcttccattctaaatagcaaaggacaacttgcagcaggacacatacacatacaagcacattcgtcccatctgcagcctacgcatcaccgcatactggtaacaaggtactgctaaacatcaaatcactccggacagtcagtctatgccttcttaggggacttggcggccttcttgggcgactttgcctccttgctcccgccactggacgccttctccgccgtctttttgggcagcaaaacagggttgatattggggagcacaccgccgtgagcgatagtcacgccgcccaacagcttcccaagctcctcgtcgttccggatcgccaaaagcacgtggcgcggaataatgcgagtcttcttgttgtccctggcagcattaccggcgagctccagaacctcagcggcgaggtattctaggacagcggcgaggtaaacgggggcgccggtgccgacacgctgcgcgtagcggccct

SEQ ID NO: 9155 - DNA, 618 bp, Zea mays
  unsure (1)..(618): unsure at all n locations; Clone ID: LIB3137-016-Q1-K1-H12.R2
attcgttccaacttcctgacactttctcctcgtccccgacaagccaatcgaagccgagatacggccatggactccaccggcaccggagcagggggtaaggggaagaagggagcggccgggcgcaaggtcggcgggccaaggaagaagtcggtgtcgaggtccgtgaaggccgggctccagttccccgtcggccgcatcgggcgctacttgaagaagggccgctacgcgcagcgtgtcggcaccggcgcccccgtctacctcgccgctgtcctcgaatacctcgccgctgaggttctggagctcgccggtaatgctgccagggacaacaagaagactcgcattattccgcgccacgtgcttctggcgatccggaacgacgaggagcttgggaagctgttgggcggcgtgactatcgctcacggcggtgtgctccccaatatcaaccctgttctgctgcccaagaagacggcggagaaggcgtccagtggcgggagcaaggaggcaaagtcgcccaagaaggccgccaagtcccctaagaaggcatagactgactgtccggnagtgaaatctgatgtttagcagtaccttgttaccagtatgcggtgaatgcgtagctgc

SEQ ID NO: 9156 - DNA, 581 bp, Zea mays
  Clone ID: LIB3137-027-D2-F3A
ggccgagctgtgcttcccatgacacatgcgaagtcaacttgcctgctccggcggttcctcctgctctcccccagccagctctccgccctaattttgctcctcctgcgatgtctcgggggcgatcggctctcacttgttgcagcgcatattgattcttggctaatgtctgctgccttttattctggagcacggttcggcttctccacggcatccaggaaacgtctcttcaccatgctcaatactcttcccagcatatatgaggtcgtcacacgaacagccccgaccgagtccccagaaaaaactcctaaaagcagccacaagactaacaaatctggctcaaagccttcacgcctggtagaacccaactccagggtcccacagatgccacctccaaaggacgaggagagtgaaggggaggaaggtgaaccacaggaagaccatgagagtgcgctgtgcggcgcatgtggcctaggttatgacgacttctggatctgttgcgacttatcccagacatggttccacggcaagtgtgtccagatcaccccaaataaagcggagcacatcaagccagttaagtgccc

SEQ ID NO: 9157 - DNA, 505 bp, Zea mays
  Clone ID: LIB3137-027-D2-R3A
ggtgttgcggaggttcactcttgatctcctacactctgctctcgctttgaaggtggcatgtgagggaccgagtgaaagggatcgacctggagtggaggctgtgcaccagaattgttggctaaggtgcggcgcataggagtttggagcaaggactgtatcttgcatggaactgagacaacctcatatatgcaggaacaataatcgatcatggataaaagacgttgccacgaaaacattcaagatagaaacctagaacaaactacaaagcgcacagacattactcacaaatcatcgtatgcactgcatacacgcgatagacaacctatctcaatcatcccatcaatagcaccttcaatggacaaagctagctatgggaatgaaggaggaacatactaagaccacgagagtactctccacgtctcatggggacgaccatatgaccacaaatgaatctgctgtgactcacacatgacatagaaccactgaacatgtgtgaagagcaccc

SEQ ID NO: 9158 - DNA, 466 bp, Zea mays
  unsure (1)..(466): unsure at all n locations; Clone ID: LIB3137-003-Q1-K1-E1-F2A
tttnntttttttttttttttttttttttttttttttttttttttttttttttttttttttttttttttttttttttttttttttttttttttttttttttttttttttttttttttttttttttttnacaaaaaaaaaaaaattttcggaaaaaaaaaaaccccctttttttttcccggggggttttaaaagggggggggggggggggggccctttcccccccccaagggaaaaaaaccccccccctttttcctttttggggggggccccccccgggggggggaaaaaaaggaaaccccccaaaaaaaaaggggttttaaaaggggggggcccccccggggggaacccggggggggaaaaaaaagaaaggggtccccccccccttttttttttaaaaccggggggggcccccggttttttggggggggggcccccagaaagggtccggttcagggggggggggggg

SEQ ID NO: 9159 - DNA, 329 bp, Zea mays
  Clone ID: LIB3137-003-Q1-K1-E1-R2B
gtggacgccggaggaggacctcgtcctcgtctcctacatccaggaccacggccccggcaactggcgcgccgtccccaccagaaccgggctgatgcggtgcagaagagctgccggcttcggtggaccaactacctccggccgggcatcaggcgcggcaacttcacggagcaggaggagaagctcatcgtccacctccaggccctcctcggcaacaggtgggcggccatcgcgtcgtacctgccggagcggacggacaatgacgtcaagaactactggaacacgcacctcaagcgcaagctgcaggccggcggcggcgacggcgacggcga

SEQ ID NO: 9160 - DNA, 619 bp, Zea mays
  unsure (1)..(619): unsure at all n locations; Clone ID: LIB3137-019-Q1-K1-G7-R2B
gattatttttatattgttatttttttttttttttttttttttttttttttttttttttttttttttttttttttttttttttttaaaaaaagggttttaaccggaaaaataaaattttttttgagggggctttttttgggcaaaaaaaaataaaaaccctccaaaaaaaattctacgggcctttgcctcctaatttgggggggggggaaaaaaaatttcaggggggaaactttaaaataaaaaaggtttttttatgcccccccccaaaaacaactgggggcaaaactgtgtggaagggttttaaaaccccagggaaaaaaactttccaaagggggtgaggaaataccgggtttaaatcaaccctttttgaattgggagaaaaaatttgttttactttatccatcctttgccaataaaaggcctttggctaaaatacccttcctacctttttttaaccttcccccttttttaaaaaacaaaaccccccccccaagtggaaaaaaanaaattcctaaataaatttttttttataaagaaaaacctccttgaggaaaaaatttttattcacccttccccccttttttcccccccttccatttggggtttttttttttttttt

SEQ ID NO: 9161 - DNA, 487 bp, Zea mays
  Clone ID: LIB3137-061-Q1-K1-A1-F3B
ttgacgcgcatcgcgcaggtgctcgtcacgtgcgcgcgcaagtggaacgtggccgtgccctccttctagtcgcggctgcacgagacggtggagggggagtccgacatcgaggggagccgcaagctggagcactctgagcagctggcgtgcctcgacagggcggccgtggtgacggccgaggacggcgcggaggcgaccccgtggcgcctgtgctcggtgacgcaggtggaggagctcaagagcgtgatccggctgctgcccatctgggccagcgggatcgtgttcgcggcggtgtactcgcagatgagcaccatgttcgtgctgcagggcaacacgctggaccagagcatggggccccggttcaagatcccctcggcgactctgtccatggtggacaccatcagcgtcatcgtctgggtccccgtgtacgaccgcgccatcgtgcccctggtgcgctcctacaccgggaggccgctcgggttcacgc

SEQ ID NO: 9162 - DNA, 259 bp, Zea mays
  Clone ID: LIB3137-061-Q1-K1-A1-F3C
cctgtgctcggtgacgcaagatagaggagctcaatagcgtgatcctgctgctgcccatctgggccagcgggatcttgttcgccgcggtgtactcgcagatgagcaccatgttcgtgctgcagggcaacacgctggaccatagcatggggccccggttcaaaatcccctcagcgactctgtccatggtggacaccatcagcgtcatcttctgggtccccctgtacaacctcaccatcttgcccctggtgcgctcctacac

SEQ ID NO: 9163 - DNA, 181 bp, Zea mays
  Clone ID: LIB3137-013-H10-F3B
ccagcccgggcgcgccaggagcagcggagccggcgccgggcgcccgaccagcagtacaggggcgtccggcgccgcccgtggggcaggtgggccgccgaggttcgctaccccctcaagggcgtccgcgtctggcttcggaccttccctttcgccgaggccgccgggcgcgcctacgaccacg

SEQ ID NO: 9164 - DNA, 655 bp, Zea mays
  unsure (1)..(655): unsure at all n locations; Clone ID: LIB3137-027-D2-R3B
cataccaggcccatgcgccgcacagcgcactctcatggtcttcctgtggttcaccttcctccccttcactctcctcgtcctttggaggtggcatctttgggaccctggagttgggttctacctggcgtgaaggctttgagccagatttgttagtcttgttgctgcttttaggagttttttctttggactctttcttggctgttcctgtgacaacctcatatatgctgggaagattattgatcatggtgaagagacgtttcctggattccttgtcgaatccaaaccttgctccaaaataaaatgcaacagacattagccaagaatcactatgcactgcaacaagtgatagccaatctttttcattcatcccatcacgagcaaaattaattccgagagctggctctgggagttcaggaggaacctcctcagcaggcaagtttacttcccatgtctcattgngaagtccatatanacatagattatccttctctgggtcgcacatcacgtagaacttctcaacatcggtggggagcgccctgattaggcggnctgcgcgcgcgtagtcccgaaacgtctccgcgagcgcggaccgcgtgccaggagccgcttctcgtcattctcccgagcttgtcaaggagcgtaggttttgagaggg

SEQ ID NO: 9165 - DNA, 358 bp, Zea mays
  Clone ID: LIB3137-061-C2-R4A
cgattctgacaaatttcatatcagaacgaccaaaagtaggtgcaggaaatgttggatggcttggttgggtagattgaccaaaaagagtattggttgggactcctggtgtagttctggacccaggtcccatattagttgttactccaatttgactgaaactactaaacactggtggtccattattttgagaaaccccaaatgctgagttatttttcacttcagggaaggaagccacagttggaaagcttggagtttgtgataccgatagacgtggcatgttcaggaaattattaaagtccgtcagctttgcatttttcaattttttttcaccctctactattgactgcagaggatgccc

SEQ ID NO: 9166 - DNA, 325 bp, Zea mays
  Clone ID: LIB3137-001-Q1-K1-B9.F27
cgggcagggacgccggcgtcccctggggctggcgctagactgctgcggcgtgggcgggagcacccgcagctggtccggggtgtgcgcgaagaagcagacgcggcggcggcaggccgtgccgtccttgcagggctgggtgcggtagcgcgccgggtggagccagcactcgaagacgccgtgcgcgaagtcgcaggcgtcgccgcgcctgcacccgcccttgcggaagtccgggcaggcggcgcccgagtagtggtacctgcgcgggtcgcgccgccgcgccttctcccccgggtgcgcgaaggggcactcggtccggacgcgtggg

SEQ ID NO: 9167 - DNA, 586 bp, Zea mays
  unsure (1)..(586): unsure at all n locations; Clone ID: LIB3137-001-Q1-K1-B9.R27
ccaggcgctcggatctacctaccagagcatcgtgtcctcgtcgccgaccagcacgctcctgtcgccgcccaagacgcccccgtcagagtcgccgccgctgtcgccggacggtgccgccgccgccttccgccgcgggtcctggccgggcgccgggtcccccgtcaacgacgtcctggcctcgctccgccagctccgcctcggcacggccagctcgtccccgaccggcgggtggggcggctacccggcgtccgcggctgcctacgggtcgcccactgcgggcgggctctacagcctgccctccaccccgagggccacgccgacagccctcgccaccgccaccgcctccggctacatgcccaacctggagccgcttgacgtcagcttcggcggcgacgaggagcccgtggagagggtggagtccgggcgtgccctccgcgccaaggtgttcgagcggctcagcagggagggcgctgtttcctgctacccagctgccggaaccggtggccccgacgtcgggtgggtctccgacctcatcaactgangcggcggcggcggcgggatcgtgctgccatagcagtggagaaaa

SEQ ID NO: 9168 - DNA, 734 bp, Zea mays
  Clone ID: LIB3137-041-Q1-K1-C9.27U0
atagctttcagctatcggcagctcctcgatcgtttcgaagctccaatccgcccggccgcctccgcctgttgccactagctaggtgatcgatcgaatggactgcggtggcgcgctgcagctcccgcctgggttccgcttccaccccaccgatgacgagctggtgatgtactatctcctccgcaagtgcggcggcctgccgctcgccgcgccggtcatcgccgaggtggatctctacaagttcgacccatggcagctcccagagaaggcgttcggtggggagaaggagtggtacttcttctcgccgcgcgaccgcaagtacccgaatggctccaggcctaaccgggcggccgggacagggtactggaaggccaccggcgccgacaagccggtagggtcgccgcgccccgtggccatcaagaaggcgctcgtcttctacgccgggaagccgcccaagggcgtcaagaccaactggatcatgcacgagtaccgcctcgcggacgtcgaccgctcggccgccgcacgcaagaagaccaacaacgcgctcagggtaattcactacaccatgacctttctcaggagaacatatttatctccccgaaatactgacacttgcagttagagggaaaaaatatagagagaagtaaaaaaaaaagattgatgtttgattttaccaatgctgccacaagaacagtggatcgaaatcgaatgtgttgttaggcttgcaactatatatg

SEQ ID NO: 9169 - DNA, 438 bp, Zea mays
  Clone ID: LIB3137-003-Q1-K1-B10.F1
tttttttttttttttttttttttttttttttttttttttttttttatttttttattattcttgtagttagctaatgtataactaacagtgttccaatcgattatcgcacacatgccatgcagcagtccggaaaaaaggggcccaaaacccaggggcaagaaaacgaaaaaaaaaaggggacccaaaggaaaaaggccaaagggcaaagaaggaaccccaaaaggaggggccccggaaaaaggggatgaaccccaggaaggccagaaggggcccccaaaagaagccccgggggaaaaaaagggagacaagaaggcaaggggaggggagaaggaaagccagggaaaagggggagaaaaggggggaagaaggggaggaaatggaaacggggggggggaaaaaaaggggggggggccaaaagaaaagggccccgaggagccc

SEQ ID NO: 9170 - DNA, 455 bp, Zea mays
  Clone ID: LIB3137-003-Q1-K1-B10.F2
atatatgctatgtattaggggaaaaattaggaaaacttgcccaagggggggaaggcaaaaaaaaaaggggcgaaaacaagaactggaaaccgggggggggagcagccttattaaaagaaaacgtaaaaagagggcggggatccacggaaaacccggaaaaaacccgggcgtaaagcccggggggagggacaggggaaaaaagaaggagacggggaggggccagaaagaaacggcccccccgagaaaaaagaaggggttgaggaacgggaaaaccaaaccggggaggggaaaaaacacgaggggggccaaaaaaaaaacaggccggaacgccccggaagtgaaggaaaaaaagggaaaaacggggagaaaagcgggggggaaagaaaaaaggggggggcccccaaaaggcgaaacacggccgactggaaaaaaagacgggaaaaaaaacggaaagc

SEQ ID NO: 9171 - DNA, 536 bp, Zea mays
  Clone ID: LIB3137-003-Q1-K1-B10.R1
cccgttcctctctatctcacacacaggcacaccgagtagaaggcggcagttgcagccagcacaagcagagcaacccgtgggcggcaggcacaattggtgtcggagaggcagcaggcggcggggaaggtggccgccttcaacctcacggagccgggttcgggacgggtcggacctgctggacgacgacgggcgcgagaggcgacggtgaccctgagcatttgcgagcgccacatcatcacggcggtgatcgggtcgggcgtgctgtcgctggcgtgggcgatcgcgcactgggtgtgggtgatcggccccgtggtgctgctggccttctccgccatcacctggttctgctccagcctactcgccgactgctaccgcgcgccgccgggccccggcagggcaagcggaactacacctacggacaggccgtcagtcaatacctggggggagtccaagtacccgctgtgctcgctggcgcatacctcaaccttggtgggcgtcacaatcggctacaccatcaccacgggcatcagcatggg

SEQ ID NO: 9172 - DNA, 575 bp, Zea mays
  Clone ID: LIB3137-003-Q1-K1-B10.R2
cccgttcctctctatctcacacacaggcacaccgagtagaaggcggcagttgccagccagcacaagcagagcgcaacccgtgggcggcagcggcacgcaatggtgtcggagaggcagcaggcggcggggaaggtggccgccttcaacctcacggaggccgggttcggcgacgggtcggacctgctggacgacgacgggcgcgagaggcgcacggggaccctggtgacggcgagcgcgcacatcatcacggcggtgatcgggtcgggcgtgctgtcgctggcgtgggcgatcgcgcagctggggtgggtgatcggccccgtggtgctgctggccttctccgccatcacctggttctgctccagcctactcgccgactgctaccgcgcgccgccgggccccggccagggcaagcggaactacacctacggacaggccgtcaggtcatacctgggggagtccaagtaccggctgtgctcgctggcgcagtacgtcaacctggtgggcgtcaccatcggctacaccatcaccacggccatcagcatgggggcgatcaagcgttccaactgcttccacag

SEQ ID NO: 9173 - DNA, 554 bp, Zea mays
  Clone ID: LIB3137-003-Q1-K1-D10.F1
caactcaactctcgcctttatcctgcagatgtgcctttttcaccatgtcattcaatgtgatacacgggttcgttctgtatagcatcgagatatatttattctaccgaaacagacaaattttcgtcttgccagtttacagcttggagggggattggtaccatccccacggctcatcagagatgtactccgtgacttgcttgacgctcaggtagttatcaatgcccccttctccaagctcacgtccaaatccactgcgcttgttcccgccccagggagcttggcagaagcagggttgcgagcagtttacccagatgcatccagcgtcaatctcctcagataacctctggcagcgctcccgatcaccagaaattacagcaccagccaaaccatactgtgtatcgttggcaagttcgatggcttcatcttcagtgctaaattctttaacgcacaggactggaccaaagacttcctccctccagatttccattgatgtggtgatatcagtaataatagttggttcaataaagaaccccttctcaagatgcgcaggtcta

SEQ ID NO: 9174 - DNA, 560 bp, Zea mays
  Clone ID: LIB3137-003-Q1-K1-D10.F2
caactcaactctcgcctttatcctgcagatgtgcctttttcaccatgtcattcaatgtgatacacgggttcgttctgtatagcatcgagatatatttattctaccgaaacagacaaattttcgtcttgccagtttacagcttggagggggattggtaccatccccacggctcatcagagatgtactccgtgacttgcttgacgctcaggtagttatcaatgcccccttctccaagctcacgtccaaatccactgcgcttgttcccgccccagggagcttggcagaagcagggttgcgagcagtttacccagatgcatccagcgtcaatctcctcagataacctctggcagcgctcccgatcaccagaaattacagcaccagccaaaccatactgtgtatcgttggcaagttcgatggcttcatcttcagtgctaaattctttaacgcacaggactggaccaaagacttcctccctccagatttccattgatgtggtgatatcagtaataatagttggttcaataaagaaccccttctcaagatgcgcaggtctaacacct

SEQ ID NO: 9175 - DNA, 544 bp, Zea mays
  Clone ID: LIB3137-003-Q1-K1-D10.R1
gccagagtcctcacggatggcctcgcacgcatggtcccgctgcggcacgtcttcgtcgacggcgagtggcgccgccgcgcagggcgccgcctccccgtcgtcaaccccaccaccgaggctcacatcggcgagatccctgcggcacagcggaggacgtggacgccgcggtggcgagcgggacggcgctcaagaggaaccgtggccgcgactgggcgcgcgcccggagggccgtccgggtcaagtacctccgcgctatcgccgccaaggtgattgagaggaaacctgatctggctaagctagaggcacttgattgtgggaagccttatgatgaagcagcatgggacatggatgatgttgctgggtgctttgagtactttgcggatcaggcagaagccttggataaaaggcaaaattccccagtttctcttccaatggaaacttttaaatgtcatctccgaaaagagcctatatggggtagttgggctgataactccttggaactatcctcatactgatggctacatggaagataaccccttcattg

SEQ ID NO: 9176 - DNA, 551 bp, Zea mays
  unsure (1)..(551): unsure at all n locations; Clone ID: LIB3137-003-Q1-K1-F12.F1
atctgcaatgcctcaggcctcagcttattagttgtccgtagacgcgaaacgcaaatattacaccaaaaaattctagcacatcgtgagtgacagttggctcggtaaaaaaaatacacaaggcgtactcccttccaaatgggaagctaaacaatatatatccacagtgcacaccaacagaacaccggcccccctcaacgccgccgcgtgccctcgtcacaacccccccgcggattctgcagtccaagggagagatcaagactcctggggagcttcaaacctcgagggagtatcgatccccatcatgcacatgagtcctgatatcaggatgatgagaagcactatcccaacgaaagttccttcgaggagactcgacttgacgaggcactccacatcgcattntttcgccctggacagctttcgtgccgttagtcttcttctccgcgagatgcctacccagcggcaggccggaaaggctctccagcaaaccagacggttgggacgcatagaggaccgtgtatttggctcccgacaagtccagcgagtccacaagc

SEQ ID NO: 9177 - DNA, 559 bp, Zea mays
  Clone ID: LIB3137-003-Q1-K1-F12.F2
atctgcaatgcctcaggcctcagcttattagttgtccgtagacgcgaaacgcaaatattacaccaaaaaattctagcacatcgtgagtgacagttggctcggtaaaaaaaatacacaaggcgtactcccttccaaatgggaagctaaacaatatatatccacagtgcacaccaacagaacaccggcccccctcaacgccgccgcgtgccctcgtcacaacccccccgcggattctgcagtccaagggagagatcaagactcctggggagcttcaaacctcgagggagtatcgatccccatcatgcacatgagtcctgatatcaggatgatgagaagcactatcccaacgaaagttccttcgaggagactcgacttgacgaggcactcgccatcgcatttttcgccctggacagctttcgtgccgttagtcttcttctccgcgagatgcctacccagcggcaggccggaagggctctccagcaaaccagacggttgggacgcatagaggaccgtgtatttggctcccgacaagtccagcgagtccacaagctgggaaagc

SEQ ID NO: 9178 - DNA, 532 bp, Zea mays
  Clone ID: LIB3137-003-Q1-K1-F12.R1
atcacctacacagacacgtgtaccggtcaagatctgaagaaataccacaacatggatgccatcaatgacctggtagtgtcaggggtagcgtcaaggagagccaaccacccaagtggacagaccgatgtaatctgcttctgtagcggcgggttcgagaatccaggcactgcgaaatcagaaggagagctgctttcccagcttgtggactcgctggacttgtcgggagccaaatacacggtcctctatgcgtcccaaccgtctggtttgctggagagcccttccggcctgccgctgggtaggcatctcgcggagaagaagactaacggcagaaagctgtccagggcgaaaaatgcgatggcgagtgcctcgtcaagtcgagtctcctcgaaggaactttcgttgggatagtgcttctcatcatcctgatatcaggactcatgtgcataatggggattgatactccctcgaggttttaagctccccacgagtcttgatctctccctttgactgcaaaatccgcgggggggggttg

SEQ ID NO: 9179 - DNA, 574 bp, Zea mays
  Clone ID: LIB3137-003-Q1-K1-F12.R2
atcacctacacagacacgtgtaccggtcaagatctgaagaaataccacaacatggatgccatcaatgacctggtagtgtcaggggtagcgtcaaggagagccaaccacccaagtggacagaccgatgtaatcgtcttctgtagcggcgggttcgagaatccaggcactgcgaaatcagaaggagagctgctttcccagcttgtggactcgctggacttgtcgggagccaaatacacggtcctctatgcgtcccaaccgtctggtttgctggagagcccttccggcctgccgctgggtaggcatctcgcggagaagaagactaacggcacgaaagctgtccagggcgaaaaatgcgatggcgagtgcctcgtcaagtcgagtctcctcgaaggaactttcgttgggatagtgcttctcatcatcctgatatcaggactcatgtgcatgatggggatcgatactccctcgaggtttgaagctccccaggagtcttgatctctcccttggactgcagaatccgcggggggggttgtgacgagggcacgcggcggcgttgaggggggccggtgttctg

SEQ ID NO: 9180 - DNA, 512 bp, Zea mays
  Clone ID: LIB3137-004-Q1-K1-B3.F1
cacaggtcaacagaatatgatgtatttatcagcacttcaccagtgcctgcggcttgccagcaaagaaattgcagccgacagcttgacataatacagtaaacagtaacgaacacacaactgcaacccacctgccttcagtaattttgttatactgccttatgtacataataaaaaccagttcagctccggcacattttattggctaccgtctgccgcgcctaaattactgaaggtccttcaggtttcagtcttgtaccaagtgctacgcagtcgcaggttgcgcaactactgtgggctgggtcaattgcaagtggcacggtcttcgccagctcgcggaacttcagtatgtagaacatctcaaggtagcgcctcgtctccagcctctcgagcttcgacacgtacttccagaaaccgtagaccccggccagtgtcatcaacctctctgagtatatcttccatgtggacttctcgtatatgcgctgagccctggtccagatattttcacccagtga

SEQ ID NO: 9181 - DNA, 486 bp, Zea mays
  Clone ID: LIB3137-004-Q1-K1-B3.F2
cacaggtcaacagaatatgatgtttttatcagcacttcaccagggcctgcggcttgccagcaaaaaaattgcagccgacagcttgacataatacagtaaacagtaacgaacacacaactgcaacccacctgccttaagtaattttgttatactgccttatgtacataataaaaaccagttcagctccggcacattttattggctaccgtctgccgcgcctaaattactgaaggtccttcaggtttcagtcttgtaccaagtgctacgcagtcgcagttgcccaagctactggggctggtcaattgcaagtggcacggtcttcgccagctcgcggaacttcagtatgtaaaacatctcaaggtaccgcctcgtttccagcctctcgagctctgacacgtacttccaaaaaccgtaaaccccggccagggtcataaacctctctgagaatatcttccatggggacttctcgtatatgccctgcaaccc

SEQ ID NO: 9182 - DNA, 556 bp, Zea mays
  Clone ID: LIB3137-004-Q1-K1-B3.R1
gggtacggaagtcatacccatgactcgacacaccatactcacaatttgcttataaatttcaagagtggggcctggagaaaggttggggtgatacagcagggcatgtgtttggaaatgatccatctccttctagatattattcaagcgccacacccatctgacactagagaaattcttgtgggaggatcccatggatttttaacgttggtgtggtatcccctcatggatactttggtcaagctagtgtattagggcttgccagacacaggaggacaaatcgtctatatactggagcaaatcgggcacgaggaaatgagatgggtggcgtgtaaagagcgagggcgtgggggtgccccgagagtgtgagggggggggggggtggaggggggggagggggggggggggaggggggagggggggaggaggggggggggggggagggaggggggggtgaaggggtgcggggcggggggggggggggggggggggggggagggggggggggggggaggggggggggaggggggggggagggggggagggggggggggggggg

SEQ ID NO: 9183 - DNA, 452 bp, Zea mays
  Clone ID: LIB3137-004-Q1-K1-B3.R2
cggacgcgtgggcaaagctccctgctgacacaccatactcacaatttgcttataaatttcaagagtggggcctggagaaaggttggggtgatacagcagggcatgttttggaaatgatccatctccttctagatattattcaagcgccagacccatctacactagagaaattcttggggaggatccccatgatttttaacgttgttgtggtatcccctcatggatactttggtcaagctaatgtattaggcttgccagacacaggaggacagatcgtctatatactggaccaagtccgtgcactagaaaatgagatggttctacgtttaaagaaacaagggcttgatgtttccccaaagattctcattgtaactcgactgataccaaatgtcataagaacattatgctatcagcgatttgtgagaattagtggaacacaggatactaactta

SEQ ID NO: 9184 - DNA, 448 bp, Zea mays
  Clone ID: LIB3137-038-Q1-K1-C1.F1
cagctaacaaaccagtttatatttgatacagacaagactacaagagtagccgctacttaataacataagctttacattacgagggtttaatttccgggcgggaagtcaccgtcgtcgctcgttgtacaggcagggcctagtcgtacacaggaaacagcaaccagcagctgagctgagctcaaaggggagattgatctggggatgatgatgtcgccgatgttgttgtgccacgggtcggcgaggtgggaggcgaggttctccagcgggccggtgccggggtacgccgactgctggacgcagaagccgacgaaggcagcatgggaaggcggccgttcttgatctccttgagcttgtactcctcgaacttggcggggtccttggaggaagccggagcggtgtcgaaggcgccgcggtgggtactttcttctttctcggggtccttctccat

SEQ ID NO: 9185 - DNA, 528 bp, Zea mays
  unsure (1)..(528): unsure at all n locations; Clone ID: LIB3137-038-Q1-K1-C1.F2
aagctaacaaaccagtttatttttgatacagacaagactacaagagtagccgctacttaataacataagctttacattacgagggtttaatttccgggcgggaagtcaccgtcgtcgttcgttgtacaggcagggcctagtcgtacacaggaaacagcaaccagcagctgagctgagctcaaggggagattgatctggggatgatgatgtcgccgatgttgttgtgccacgggtcggcaaggggggaggcgaggttctccagggggccggggccggggtacgccgactgctggacgcaaaagccgacaaaggccaccatggggagggggccgttcttgatctccttgagcttgaactcctcgaacttgggggggtccttggagaagccgagcgggtcgaaggcgccgccggggtacttttttttctggggggccttctccatggggcgctggtgctcggcgaaggcgatggccacgaactcgatcaccaggatggtcggnagcgtgccccacggaaccggggcgccca

SEQ ID NO: 9186 - DNA, 545 bp, Zea mays
  Clone ID: LIB3137-038-Q1-K1-C1.R1
ccctccctctctgcctgaccagctaggatcagcggaacagcaatggtgatggcgtcgtcgagcgggctgaggagctgcagcgccgtgggtgcccagcctgctgcgcacgtcgtcccggtccggccgcctggcgccagttctgcgcaacgccaccacctctggccgcgtcaccatgtccgcggagtgatgcccggccagccacgccctgcccacctcgacggctcctctcccggggacttcggcttcgatccgctgggcctcgcgaccgtgccggagaacttcgagcggttcaaggagtcagaggtgtaccactgccgctgggccatgcttgccgtccccgggatcctggtgccggaagctctgggcctgggcaactgggtgaaggcgcaggagtgggcggccgtccccggcgggcaaggccacggtacctgcggcgccccgggtgccgtgggggcagcttgccggaccaatcgctggtggaatcgaggttcgtgggccatcggctttcgccggagcaccaagcgcaccatgggagaaggaccccg

SEQ ID NO: 9187 - DNA, 576 bp, Zea mays
  unsure (1)..(576): unsure at all n locations; Clone ID: LIB3137-038-Q1-K1-C1.R2
ccctccctctctgcctgaccagctaggatcagcggaagcagcaatggtgatggcgtcgtcgagcgggctgaggagctgcagcgccgtgggcgtgcccagcctgctggcgccgtcgtcccggtccggccgcctggcgccgttctgcgccaacgccaccacctctggccgcgtcaccatgtccgcggagtggatgcccggccagccacgccctgcccacctcgacggctcctctcccggggacttcggcttcgatccgctgggcctcgcgaccgtgccggagaacttcgagcggttcaaggagtcagaggtgtaccactgccgctgggccatgcttgccgtccccgggatcctggtgccggaagctctgggcctgggcaactgggtgaaggcgcaggagtgnggcggccgtccccggcgggcaggccacgtacctgggcgccccggtgccgtggggcacgctgccgacatcctggtgatcgagttcgtggccatcgccttcgccgagcaccagcgcaccatgggagaaggaccccgagagaaagaagtaccccggcggcgccttcgacccgctcggct

SEQ ID NO: 9188 - DNA, 525 bp, Zea mays
  Clone ID: LIB3137-041-Q1-K1-C2.F1
ccacaaaattaatgctctgagattatccagccgagtataattaaacaccagtctggttgcaaacaggaaggagacgctatggtctctccactgcaacagataaacaaaactgcgagaagcaaaggtggtgtctgctgaacatcatcaacgctcgatcaatcttagaccatcattctgcttcgaaaacatcaatcacctcccgcccttgcccttacctttccctcctcttccaccagcccctttgctaaacccttttccggtccctttcccactacccctccccttaccgtgcctatcaggctgctgctgctcttctggaacttgttctggaatttgccgtccttcgcagatttgttcttcaaccgcgtgatttccattgccttctgctgcctgcccttctgcatttgctcgtgattccttatttcagagggcacgttggcatttggtatagatctgcggccaatggccgtgaaatgcttcttgttgcctctctggtacccgcctgaactggatgtgccctcgtct

SEQ ID NO: 9189 - DNA, 539 bp, Zea mays
  Clone ID: LIB3137-041-Q1-K1-C2.F2
ccacaaaattaatgctctgagattatccagccgagtataattaaacaccagtctggttgcaaacaggaaggagacgctatggtctctccactgcaacagataaacaaaactgcgagaagcaaaggtggtgtctgctgaacatcatcaacgctcgatcaatcttagaccatcattctgcttcgaaaacatcaatcacctcccgcccttgcccttacctttccctcctcttccaccagcccctttgctaaacccttttccggtccctttcccactacccctccccttaccgtgcctatcaggctgctgcctgctcttctggaacttgttctggaatttgccgtccttcgcagatttgttcttcaaccgcgtgatttccattgccttctgctgcctgcccttctgcatttgctcgtgattccttatttcagagggcacgttggcatttggtatagatctgcggccatggcccgtgaaatgcttcttgttgcctctctggtacccgcctgaactggatgtgccctcgtctgcaaagttgccag

SEQ ID NO: 9190 - DNA, 547 bp, Zea mays
  unsure (1)..(547): unsure at all n locations; Clone ID: LIB3137-041-Q1-K1-C2.R1
ctccctacttcccagccaccccatggctcgcttaacccccacgagtccaaatcctccaggaagcccaagccctcctcctcctccgccatggggcccggagcggaccggnatgcgatgtccacgcggcggccgaagcgtgcaagtcggtgggcggcgtcagaagaagtccaagtcgggcgggttcgagtcgatggggctctgcgaggaggtgtacgcggggtgcgccacaaagggtacgtcgtgcccacgccgatccagcgcaagaccatgccgctcatcctcgcgggcgtcgacgtcgctgccatggcccgcacggttccagggaagaccgccgcattcctggtgcccatgctgcaggcctccgcgccggacccgagcgccgggtccgcggtcaatcctctcacctacccgcgacctcggaatgcagacgctcaagttctccaaccagctcggcaagttcacagacctaagaaccagcataattgttggtggagatagcatggagagtcagtttgaggacctgtcagagtgtcctgatatcataatt

SEQ ID NO: 9191 - DNA, 569 bp, Zea mays
  Clone ID: LIB3137-041-Q1-K1-C2.R2
ctccctacttcccagccaccccatggctcgcttaacccccacgaagtccaaatcctccaggaagcccaagccctcctcctcctccgccatgggcgccggagcggagccggatgcgatgtccacgcggcggccgaagcgtggcaagtcggtgggcggcgtcagcaagaagtccaagtcgggcgggttcgagtcgatggggctctgcgaggaggtgtaccgcggggtgcgccacaaagggtaccgcgtgcccacgccgatccagcgcaagaccatgccgctcatcctcgcgggcgtcgacgtcgctgccatggcccgcacgggctccgggaagaccgccgcattcctggtgcccatgctgcagcgcctccgccgccgcgacccgagcgccggcgtccgcgcgctcatcctctcacctacccgcgacctcgcgatgcagacgctcaagttctccaaccagctcggcaagttcacagacctaagaaccagcataattgttggtggagatagcatggagagtcagtttgaggacctgtcagagtgtcctgatatcataattgccacgccaggca

SEQ ID NO: 9192 - DNA, 556 bp, Zea mays
  unsure (1)..(556): unsure at all n locations; Clone ID: LIB3137-044-Q1-K1-B7.F1
gaattggaacaatgcgttattagccacggtgctggagagtatgcctccagaacctctcgtggcgcaaaaacagagaaaattttcggttccaaactacacaccagttttttatgggctgcacccacatcatgaggcccccgatttctaagctggcgtaagaatcttcttgctgggcttcttcgcggcgttgaactgtttcaaccacttggcagactccttcatgtagcgcgtgcagttattgttgcggtcgacgtagacaatgccataacgttcggtgaagggacgaaccattcaaagttgtccagcagagaccaagcgaagtagccttgcacatttgatcccaagctgcatgaacagatccattaattcaagcattatcttgattgaaccatgcatgcgccacatataaatgattgcaacagaacaaagagcaataaaaaacggaggcgaaatatatactagagataagttctagtgtagattcatactctattgattccttaagagtagcggtgtggcngctggatgtaatctagcctttttgtagtcatttaag

SEQ ID NO: 9193 - DNA, 534 bp, Zea mays
  Clone ID: LIB3137-044-Q1-K1-B7.F2
gaattggaacaatgcgttattagccacggtgctggagagtatgcctccagaacctctcgtggcgcaaaaacagagaaaattttcggttccaaactacacaccagttttttatgggctgcacccacatcatgaggcccccgatttctaagctggcgtaagaatcttcttgctgggcttcttcgcggcgttgaactgtttcaaccacttggcagactccttcatgtagcgcgtgcagttattgttgcggtcgacgtagacaatgccataacgttcggtgaagccggcgaaccattcaaagttgtccagcagagaccaagcgaagtagccttgcacatttgatcccaagctgcatgaacagatccattaattcaagcattatcttgattgaaccatgcatgcgccacatataaatgattgcaacagaacaaagagcaataaaaaacggaggcgaaatatatactagagataagttctagtgtagattcatactctattgattccttaagagtagcgatgtggcgctggatgtaatct

SEQ ID NO: 9194 - DNA, 308 bp, Zea mays
  Clone ID: LIB3137-044-Q1-K1-B7.R1
gaaaaaaagagtgtcacaaacaactactccctccggtttcctattagttgtcgttttggataaggttcgagtcaaacttataaaattttgactacaaataactatttcgttatttagttttggaacataatatttatatatgcaccaatttgtcataaaaagtacttttataaaagtataaatgtattaagagttaatttgtattttaacaaaaaaacattggtcaaagttatattttggagaccatgtcgttgttctaaacgataactaataggaaaccgggaggaagggatattttaccggaatga

SEQ ID NO: 9195 - DNA, 551 bp, Zea mays
  unsure (1)..(551): unsure at all n locations; Clone ID: LIB3137-044-Q1-K1-B7.R2
gnaaaaaaagagtgtcacaaacaactactccctccggtttcctattagttgtcgttttggataaggttcgagtcaaacttataaaattttgactacaaataactatttcgttatttagttttggaacataatatttatatatgcaccaatttgtcataaaaagtacttttataaaagtataaatgtattaagagttaatttgtattttaacaaaaaaacattggtcaaagttatattttggagaccatgtcgttgttctaaacgataactaataggaaaccggagggagtatattttagcggaatgattaataatctaatggtatacatgacgtatgggcttctaagcaagccatgtgcggaaatgcagaatcggcgcatagcctgcatcggcggacctggacatgttgggctggagtcctaagatgacctttttgcgagatatttgactcaaacaatctaaccaactcaactaaactagatacttttggctcttttatttcttttcacgaaacttttgtcaacgtaggtttttagtttggtatacttatt

SEQ ID NO: 9196 - DNA, 258 bp, Zea mays
  Clone ID: LIB3137-044-Q1-K1-D9.F1
aaaaaaaaaaaaaaaaaaaaaaaaaaaaaaagagaaagaaaaaaaaaaaaaaaaaaaaaaaaaaaaaaaaaaaaaagaaaaaaaaaaaaaaaaaaaaaaacccaaaaaaaaaaaaaaaaaaaaaaaaaaaaaaaaaaaaaaaaaaaaaaaaaaaaaaaaaaaaaaaaaaaaacaaaaaaaaaaaaacccggaaaaagaaagaaagataaaggggaagaaaaaaagggaaaggaaaaaaaggaaaaaaaagaaaggggg

SEQ ID NO: 9197 - DNA, 484 bp, Zea mays
  unsure (1)..(484): unsure at all n locations; Clone ID: LIB3137-044-Q1-K1-D9.F2
tttttttttttttttttttttttttttttttttttttttttttttttttttttttttttttttttttttttttttttttttttttttttttttttttttttttttttttttttttatttttttntttttttttttttggaaaaaaaaaaaaaaaaaaatttttggaaaaaaaaaaaaaaagggaaaaaaaaaatttaaaaccaaaaaaaaaaaaaaaaaaaaaaaaaaaaaaaatttaaaaaaaaacaaaaaaaaaaaaaattggggaaaaaaaaaaaaaaaagaaaaaaaaaaaaatttgaaaaataaaatccaaaaaaaaaaaaaacccggaaaaaaaaaaaaaaaattttgggaagaaaaaaaaaggggggcaaaaaaaggaaaaaaaaaaaaaaaccttattttggtgggaaaaaaaaaacaattttaaaaagaacccccccggggggggacccccaaaaaaaaaaaaaaaacttttttc

SEQ ID NO: 9198 - DNA, 404 bp, Zea mays
  Clone ID: LIB3137-044-Q1-K1-D9.R1
aaaaaagcaatacatcattgtctgaaacatgatacacgtttgaacagacatttaaatccacaaagataaacacactacacaaagaacaaagctttgtagaacccccggaagccttgcatctgtggcattccaagagataagcagaatggggggggtgttgacattgatgtgccctcagacgaactcccccgcatcagtagtatgatttccttggattgttcagagggtttggcctatagcggtatccaagcatcatccgtttcttgtattgctcatagatgtcatcttcagatgtgacctcaccaggctggacagcccaacaccaagatgatccttcttcacatctccagccataacgggatctgcacggactcttctctcgctcccaaggcagtcgaaagatg

SEQ ID NO: 9199 - DNA, 531 bp, Zea mays
  unsure (1)..(531): unsure at all n locations; Clone ID: LIB3137-044-Q1-K1-D9.R2
aaaaagnaatacatcattgtctgaaacatgatacacgtttgaacagacatttaaatccacaaagataaacacactacacaaagaacaaagctttgtagaacccccggaagccttgcatctgtggcattccaagaaatatgctgaataacgaacttcttgacatttatctcccctcagacgaactcccccgcatcagtagtatgatttccttggattgttcagagggtttggcctatagcggtatccaagcatcatccgtttcttgtattgctcatagatgtcatcttcagatgtgacctcaccaggctggacagccccaacaccaagatgatccttcttcacatctccagccataacgggatctgcacggcctcttctctcgctcccaaggcagtcgaaagatgaaatgccgccacctccttctcttcaaggtcctcctaagaagggacaccacatgggtgatttcattgctcaagaagaacttgaaaagtttatggcacggtgtaatgatgctgctgcacatatggctac

SEQ ID NO: 9200 - DNA, 493 bp, Zea mays
  Clone ID: LIB3137-045-Q1-K1-F10.F1
gctgctagcttgatttattcttagtaggtagagaggcaacaaaaacacgtgaaggcttgcagcaaccatataattattgttgtccacgtacgtcctcatcctccgtaagcttctggtccttgcagggcacgttgtccccgtaccccacccggagcatatcgcagtacctcttgtagtagccgacccggtccttggcgccgtcggtggactggcccttgccgcactctagcccgccgttgatgatgttcgaggtgaggccatatccggggagcctcccggcggcgcggtcggtggcggacggcgtcaaggcgcgcgtcatcacgggtggcacgacgtcttgggcgactgcggcgtcatccagaaccagatggccgtcttgaaggctaccacggggtcgctcgccaccaggtccgggttgcccaccaggttcaggttcagcgcttgcccggcgagcctgtagttgtactcatgagttagctgtatgggtcctcgt

SEQ ID NO: 9201 - DNA, 488 bp, Zea mays
  Clone ID: LIB3137-045-Q1-K1-F10.F2
gctgctagcttgatttattcttagtagggagagaggcaacaaaaacacgtgaaggcttgcagcaaccatataattattggtggccacgtacgtcctcatcctccgtaaggcttttggtccttgcagggcacgttgtccccgtaccccacccggagcatatcgcagtaccttttgtagtagccgacccggtccttggcgccgtcgggggactggcccttgccgcactttaacccgccgttgatgatgttcgaggggaggccatatccggggagcctcccggcggcccggtcggtggcggacggcgtccaagcgccggtcatcacggggtggcacgacggcttgggcgactgcggcgtcatccaaaaccaaatggccgtcttgaaggctaccacggggtcgctcgccaccaggtccgggttgcccaccaggttcaggttcagcgcttgcccggcgagcctgtagttgtactcatgagttagctgtatggg

SEQ ID NO: 9202 - DNA, 422 bp, Zea mays
  unsure (1)..(422): unsure at all n locations; Clone ID: LIB3137-045-Q1-K1-F10.R1
gtgggcagggctttacgacggtgctgttcgtggtcgtggcaggcgccggctgctcgggtcggggccagcgcgcagcaggnngcgtgtggagcatcatcacccggcccatgttccagagcatgctgagccaccgcggcgacacgggtgccagggcgccttctacacctacgacgccttcatcgaggccgccagcaagttccccggcttcggcaccaccggcgacgagcagacgcgcaggcggnagctcgccgccttcttcggccagacgtcccacgaaaccaccggtggatgggcgactgctccgggtggaccgtttgcctggggatactgccgggtgaaggaacagaacccgacggacccaccctactatggacgagggaccatacaactaactcatgagtacaactacaggctcgccgggc

SEQ ID NO: 9203 - DNA, 567 bp, Zea mays
  Clone ID: LIB3137-045-Q1-K1-F10.R2
gtggacgagggctttagcgacggtgctgttcgtggtcgtggcaggcgccgcgctgctcggcgtcggcggcgccagcgcgcagcagggcgtgtggagcatcatcacccggcccatgttccagagcatgctgagccaccgcggcgacagcgggtgccagggcgccttctacacctacgacgccttcatcgaggccgccagcaagttccccggcttcggcaccaccggcgacgagcagacgcgcaggcgggagctcgccgccttcttcggccagacgtcccacgaaaccaccggtggatgggcgactgctccgggtggaccgtttgcctggggatactgccgggtgaaggaacagaacccgacggacccaccctactatggacgaggacccatacagctaactcatgagtacaactacaggctcgccgggcaagcgctgaacctgaacctggtgggcaacccggacctggtggcgagcgaccccgtggtagccttcaagacggccatctggttctggatgacgccgcagtcgcccaagccgtcgtgccacgccgtgatgaccggcgcctg

SEQ ID NO: 9204 - DNA, 211 bp, Zea mays
  Clone ID: LIB3137-050-Q1-K1-F9.F1
gagtcgaaacactatcgctcgcattgaacgcatccaagtttttctacaacttatctgcggcacatttacagcgtgctacaactagcaatagaggtaaattaaccacgtttataccgaaagtgtagtatacatatagcaaagctacaacgaaactatacagttgtttctctatatatctccccattttacccttctcctatcacttgaatgc

SEQ ID NO: 9205 - DNA, 310 bp, Zea mays
  Clone ID: LIB3137-050-Q1-K1-F9.F2
ttttttttttttttgagtcgaaacactatcgctcgcattgaacgcatccaagtttttctacaacttatctgcggcacatttacagctgctacaactagcaatagaggtaaattaaccactttataccgaaagtgtagtatacatatagcaaagctacaacgaaactatacagttgtttctcctatatatctccccaattttacccttctccctatcacttgaatgcttgaggatgatgccattgttccattcccctgtgctcatataaagctacacactgtctggtagataagcctcaatgctacagttc

SEQ ID NO: 9206 - DNA, 259 bp, Zea mays
  unsure (1)..(259): unsure at all n locations; Clone ID: LIB3137-050-Q1-K1-F9.R1
ggctagcgaanggtgaggagaacaaagatcagtgagcgaatccgaaagctgcaaaactcgttccgaacatggacaagcaaaccaacacatctgacatgctagatttggctgtcgactacatcaaggaactccagaagcaggttaaggtaagcaatccagtaagttctctgcagatgagcacttgtcaggccctgtttggaacctaggtctaatagttagccggctaacaaattgttagctgggctgagccaactaatga

SEQ ID NO: 9207 - DNA, 266 bp, Zea mays
  Clone ID: LIB3137-050-Q1-K1-F9.R2
cggacgcgtggggctcaggtgaggagaacaaagatcagtgagcgaatccgaaagctgcaagaactcgttccgaacatggacaagcaaaccaacacatctgacatgctagatttggctgtcgactacatcaaggaactccagaagcaggttaaggtaagcaatccagtaagttctctgcagatgagcacttgtcaggccctgtttggaacctaggtctaatagttagccggctaacaaattgttagctgggctgagccaactaatga

SEQ ID NO: 9208 - DNA, 151 bp, Zea mays
  Clone ID: LIB3137-057-Q1-K1-A12.R1
atcacctacacagacacgtgtaccggtcaagatctgaagaaataccacaacatggatgccatcaatgacctggtagtgtcaggggtagcgtcaaggagagccaaccacccaagtgcggagaccgatgtaatcacgttctgtagggggcggg

SEQ ID NO: 9209 - DNA, 532 bp, Zea mays
  Clone ID: LIB3137-058-Q1-K1-E12.F2
accgctgcaaaggtaagcactaggatgctgctcttatttcaggaaaagggctccaaggccactacgattattattcaaggagcaacatcccatccaggaaacaaagggagcaccacgcctgactgcacacacaccaccaccaccaacgttccctttcaaccgacgcaacgcaaactactaacagtccatcagactactaaaaaagcgacacccggatcaatgatggaacaagaccttgacaaggtaggtaaatttaactcttgaagcaaagagcagcaacgaacgcccgccgcctagcaaaagcagactctttttttcgcctccgggaagggaaaaaaagaaagaaatggcaagggaaaagacacgacactccgagtgctccctctcgctcatcgatcgatcaggtctgtggccgccgtcgcgcatcacttgctggagggctctccctccacggccagcggcacggtgctcgccatggtgcggtacttgagcgcgtacagcatctccaggtaccgccgggtctcgcgcctct

SEQ ID NO: 9210 - DNA, 567 bp, Zea mays
  unsure (1)..(567): unsure at all n locations; Clone ID: LIB3137-058-Q1-K1-E12.R1
cccgngagattgaggagctcctagtacagccaaaccgagaacacggagcacaagttcgttctgaacgacaggaacaagccaatcatcttctccatggctcgtctcgaccgtgtgaagaacttgactgggctggtggagctgtacggccggaacaagcggctgcaggagctggtgaacctcgtggtcgtctgcggcgacatggcaacccttccaaggacaaggaggagcaggccgagttcaagaagatgtttgacctcatcgagcagtacaacctgaacgggcacatccgctggatctccgcccagatgaaccgcgtccgcaacggcgagctgtaccgctacatctgcgacaccaagggcgccttcgtgcagcctgctttctacgaggctttcgggctgacggtggttgaggccatgacctgcggcctgcccacgtttgccacagcctacgggggtccggccgagatcatcgtgcacggcgtgtcttggctaccacatcgacccttaccagggcgacaaggcgtcggccctgctcgtggacttcttcgacaaatgccaggcggacccg

SEQ ID NO: 9211 - DNA, 562 bp, Zea mays
  Clone ID: LIB3137-058-Q1-K1-E12.R2
cccggagattgaggagctcctgtacagccaaaccgagaacacggagcacaagttcgttctgaacgacaggaacaagccaatcatcttctccatggctcgtctcgaccgtgtgaagaacttgactgggctggtggagctgtacggccggaacaagcggctgcaggagctggtgaacctcgtggtcgtctgcggcgaccatggcaacccttccaaggacaaggaggagcaggccgagttcaagaagatgtttgacctcatcgagcagtacaacctgaacgggcacatccgctggatctccgcccagatgaaccgcgtccgcaacggcgagctgtaccgctacatctgcgacaccaagggcgccttcgtgcagcctgctttctacgaggctttcgggctgacggtggttgaggccatgacctgcggcctgcccacgtttgccacagcctacggcggtccggccgagatcatcgtgcacggcgtgtctggctaccacatcgacccttaccagggcgacaaggcgtcggccctgctcgtggacttcttcgacaagtgccaggcggac

SEQ ID NO: 9212 - DNA, 609 bp, Zea mays
  Clone ID: LIB3137-028-Q1-K1-A6-f6
caacactgaaagtttgaaatgaaatgagaaacttttgaacctaaatgatgggatcagaaacttctggaacagaaacactgagaagtttggctgccgtgtcctctaatagtccctgccaggcttgcgggtgctggtgtccttgccggcgtcggtggtggtggtgccgtccttgtcctcgccggccatgccgagcgagttcatcatcgcgtccttggctcccacggcggtgctgacaaccgtgtccttggcccccacggccgtgctgacaaccgtgtccttggcccccacggccgtgctcatcaccttctcccctgcctgctgcaggagggcgccggtcttgtccttgccggccaccacggtgtccttggcgtacagcgcggcgccggccgccttctgcctggcggcctcggccgtctgcgcgacgtagctcccggtctgctgcgcgccgtcgcgggcgcggtccccggcagcgccggccgcgtcggacgcagtgtccctggcgcggccagcggcaccggaggccgcgtccttggcccggtacgccctgtccttggccgcctccccggcgtcgtggcccatccccatggttcggtccgcggcggcgcgcgc

SEQ ID NO: 9213 - DNA, 622 bp, Zea mays
  Clone ID: LIB3137-050-Q1-K1-G10-f9
ggcgcggccgggatgatataaatacctgctgttcaaactcgcttctggtgaggttttcggacaagaccaaccgatagcacttaagctactcggctcagaaagatcgtttcaagccctcgaaggtgtagctatggaactggaggactcgctgtatccactgctgagggaagtcagcattggcatagatccttacgtagtctttcaagatgtagattgggcccttcttattggcgctaagccccgaggtcccggcatggagcgagctgcgctactggatatcaatggccaaatctttgctgaccaggggaaagcacttaatgcggtcgcctcgcggaacgcgaaagtcttagttgttggaaatccctgtaacactaatgcgctgatttgtttgaaaaatgccccaaacataccggcaaaaaactttcatgcattgacgaggttggatgaaaatagagcaaagtgccagctggcactaaaagcaggtgtattttatgacaaagtatcaaacgtgactatttgggggaaccattcgacgactcaggttcctgacttcttgaatgccaaaattgatggaagaccagtgaaagaagtcattaaggataccaagtggttagaggaagag

SEQ ID NO: 9214 - DNA, 597 bp, Zea mays
  Clone ID: LIB3137-028-Q1-K1-A6-f5
catgcaccaaacactgaaagtttgaaatgaaatgagaaacttttgaacctaaatgatgggatcagaaacttctggaacagaaacactgagaagtttggctgccgtgtcctctaatagtccctgccaggcttgcgggtgctggtgtccttgccggcgtcggtggtggtggtgccgtccttgtcctcgccggccatgccgagcgagttcatcatcgcgtccttggctcccacggcggtgctgacaaccgtgtccttggcccccacggccgtgctgacaaccgtgtccttggcccccacggccgtgctcatcaccttctcccctgcctgctgcaggagggcgccggtcttgtccttgccggccaccacggtgtccttggcgtacagcgcggcgccggccgccttctgcctggcggcctcggccgtctgcgcgacgtagctcccggtctgctgcgcgccgtcgcgggcgcggtccccggcagcgccggccgcgtcggacgcagtgtccctggcgcggccagcggcaccggaggccgcgtccttggcccggtacgccctgtccttggccgcctccccggcgtcgtggcccatccccatggtt

SEQ ID NO: 9215 - DNA, 601 bp, Zea mays
  Clone ID: LIB3137-060-Q1-K1-D9-f5
ataattgacagacaacaacagcatcgaatttgtaagccaaattctgcaaaaagatcggaattaaaacaagctgaacagagcgtgtgcaaccatgggctggctggctggctggttcctctcctcaccgtcgtcctcccttccccttgcccttgctcaggaagtggtggcgcttcaacctcttcttccggatcaccacgtcggtcttgatgttctccgagaatggcatgccgaggaggaccagcagcctgaacgcctcgttgtccgtcttggcgctggtgacgatggacacgtccatgccgttcttcttcccgcccacctcgtacgggatctccgggaacacgccctggtcacggaggccaaggctgtagttgccgtgcccgtcgaagctgttggggttgacacccaggaagtccatggtcctagggagcccaaggttgatgagcctatccaggaagttgtacattatcctgccgcggagggtgactgcgataccgatggtgtttccctcacggatcttgaagctggccacggacttcctggccttggtcttgacgggccactgcccggtgatcatggccaggtccttcatggcggcatccac

SEQ ID NO: 9216 - DNA, 608 bp, Zea mays
  Clone ID: LIB3137-060-Q1-K1-D9-f6
tggctggctggctggttcctctctaaccgtcgtcctcccttccccttgcccttgctcaggaagtggtggcgcttcaacctcttcttccggatcaccacgtcggtcttgatgttctccgagaatggcatgccgaggaggaccagcagcctgaacgcctcgttgtccgtcttggcgctggtgacgatggacacgtccatgccgttcttcttcccgcccacctcgtacgggatctccgggaacacgccctggtcacggaggccaaggctgtagttgccgtgcccgtcgaagctgttggggttgacacccaggaagtccatggtcctagggagcccaaggttgatgagcctatccaggaagttgtacattatcctgccgcggagggtgactgcgataccgatggtgtttccctcacggatcttgaagctggccacggacttcctggccttggtcttgacgggccactgcccggtgatcatggccaggtccttcatggcggcatccagccccttcgagttccctgcctccgcgcccagaccgcagttcaccacaatcttctcgagcttgggaacctggtggacattggtgtagccgaactcctcggtgatgag

SEQ ID NO: 9217 - DNA, 603 bp, Zea mays
  Clone ID: LIB3137-060-Q1-K1-D9-f7
ccgcccacctcgtacgggatctccgggaacacgccctggtcacggaggccaaggctgtagttgccgtgcccgtcgaagctgttggggttgacacccaggaagtccatggtcctagggagcccaaggttgatgagcctatccaggaagttgtacattatcctgccgcggagggtgactgcgataccgatggtgtttccctcacggatcttgaagctggccacggacttcctggccttggtcttgacgggccactgcccggtgatcatggccaggtccttcatggcggcatccagccccttcgagttccctgcctccgcgcccagaccgcagttcaccacaatcttctcgagcttgggaacctggtggacattggtgtagccgaactcctcggtgatgagcgggacgaccttctggtcgtagacggccttgagccggtgcaccttctgggcttcggatgggtcgacgagcacgatgccggagggcgatgtcggcggctgcgtgggcttgggcggcgcctcggtagcggcggaggccacgacgcggagagctcggcggggagccgcggagggcaggagcaggcagcggcgggcggatgaggaagag

SEQ ID NO: 9218 - DNA, 677 bp, Zea mays
  unsure (1)..(677): unsure at all n locations; Clone ID: LIB3137-003-Q1-K1-B6.F9
tggtancaataaaaagtataacaagacatgggaatgttccagtggaagattttgatatggtggttgatacaaatatcaaggggacagcaaatgtgcttcgtcattttgtaccacttatgatagcgaggagacatgggattataattaatttaacctctggttggggaagatccgctgctgcagaagtcataccgaaagccaccaaatgcattatagttgatcctttctgttgaatcaaaatccttagtgcatactaaattgcacgttgccatttcaggttgctccatattgtgcttcaaagtgggcgattgagggcttgacacgctcgttggctaaagagctgcctcctggaattgcagccattgctcttagccctggtgtcgtgaatactgacatgcttacttcatgctttggaagttcagcagcgttatatcaaacaactgaaacatgggcacccaaggcagctacaatgatactaagcctttcactggacgataacggtgcctccttgactgtatgaagtggtgaaattttgtgctcaactgattactgatggggggtctgtatatttttgcgagattatggtgatgntaaatagtagttattatgtgtgtgcactctgatgtgcctagctgctgcctgaacgttattggttaaccttacctttatggccctat

SEQ ID NO: 9219 - DNA, 384 bp, Zea mays
  Clone ID: LIB3137-020-Q1-K1-D4.F10
tcttctgtgattgatcctaaatccaccatatcttttccccagcctgttttgtcttcatatccacagctgatgacatgtatagcttccttcagaagagaagctggactggcactcttcagggttccaccgttctcaagaagtgtggatgcaacaaaaactgaagactggccaaatttcttttccaacttctgttgatttacaatactagccttttcattttcagctcctggagcggcttcatcaatttcaccaagagcatatgcaggggcttgattttcctttttcttaaaaagtttctttatcttctcaaatttaggtttagaggtcttggtcttcttcttggtcttcctgttaccaaaacagcaacagcaaatgcaccacttt

SEQ ID NO: 9220 - DNA, 458 bp, Zea mays
  Clone ID: LIB3137-020-Q1-K1-D4.R10
tggttggcggtaatttactgcatacctaaacggccgccttcaaggttccgcacctctcaatctttccgatcgtcttaccaggttcttcggtgggctcttggttcaattgaaattttcttcagcaaccactgccctctctggtatgggtatggtggtggactaaagttcctggaaaggttttcgtacattaactccatcgtatacccttggacatctatcccgctcttggcctattgcacattgcctgccatctgcttgctgacagggaaatttatcacgccagagcttaacaatgttgccagcctgtggttcatgtcacttttcatctgcatttttgctacgagcatcctggaaatgagatggagtggtgtaggcatcgatgactggtggagaaacgagcaggtttgggtcattgaaggcgagacttcacatctctttgctgggttacagggactcct

SEQ ID NO: 9221 - DNA, 696 bp, Zea mays
  unsure (1)..(696): unsure at all n locations; Clone ID: LIB3137-041-Q1-K1-C9.R2
gacttcctcagcaatcaatcagctttccagcgatcggcagctcctcgatcgtttcgaagctccaatccgcccggccgcctccgcctgttgccactagctaggtgatcgatcgaatggactgcggtggcgcgctgcagctcccgcctgggttccgcttccaccccaccgatgacgagctggtgatgtactatctcctccgcaagtgcggcggcctgccgctcgccgcgccggtcatcgccgaggtggatctctacaagttcgacccatggcagctcccagagaaggcgttcggtggggagaaggagtggtacttcttctcgccgcgcgaccgcaagtacccgaatggctccaggcctaaccgggcggccgggacagggtactggaaggccaccggcgccgacaagccggtagggtcgccgcgccccgtggccatcaagaaggcgctcgtcttctacgccgggaagccgcccaagggcgtcaagaccaactggatcatgcacgagtaccgnctcgcggacgtcgaccgctcggccgncgcacgcaagaagacccaacacgcgctcagggtaattcactacaccatgacctttctcaggagaacatatttatctcccccgaatactgacactttgcagttgagggaaaaattttgagaggagntaaaaaaaaagatggatgtttgattttaccaatgct

SEQ ID NO: 9222 - DNA, 525 bp, Zea mays
  Clone ID: LIB3137-061-Q1-K1-A1-F4A
cccgtgttctaccgcgccatcgtgcccctggtgcgctcctacaccgggaggccgcgcgggttcacgcagctgcagcgcatgggcatcggcctcgtcgtctccatcttctcatggtggcggcgggcgtgctggacatcgtgcggctgcgcgccatcgcgcggcacggcctgtacggcgagaacgacatcgtgcccatctccatcttctggcagataccgcagtacttcatcatcggatgcgcggaggtgttcaccttcgtggggcagctggagttcttctacgaccaggcgcccgacgccatgaggagcatgtgctccgcgctgtcgctcaccaccgtcgcgctcggcaactacctcagcacggtcctggtgaccatcgtcacccacatcaccaccaggcacggccgcatcgggtggatcccggagaacctcaaccgcggccacctcgactacttcttctggctgctcaccatgctcagcctactgaactgtcttgcctacctggttattggcagctggtgcaagt

SEQ ID NO: 9223 - DNA, 303 bp, Zea mays
  Clone ID: LIB3137-061-Q1-K1-A1-F5A
tccttgcctacctcgtcatcgccagctggtacaagtacaagaagacggccgatgattaccctggcgccaaaggggagcacggtacagagcactgatgggcgagagatggcggaaatggagtgatttctatgtgtggttagctgtctgtcgacttgttttgccacagtttgggtgcttaaacgttaacgtaagtactagttcaatataggtgtctggggggcgaattggttgtttacatgtcatgtgttggttttatatatgcgcaatgttcgatcttagtggaataagtcaagcgctcttatg

SEQ ID NO: 9224 - DNA, 623 bp, Zea mays
  Clone ID: LIB3137-061-Q1-K1-A1-R4A
gggcacgatgtcgtcctcgccgtacaggccgtgccgcgcgatggcgcgcagccgcacgatgtccagcacgcccgccgccaccatggagaagatggagacgacgaggccgatgcccatgcgctgcagctgcgtgaacccgcgcggcctcccggtgtaggagcgcaccaggggcacgatggcgcggtcgtacacggggacccagacgatgacgctgatggtgtccaccatggacagcgtcgccgaggggatcttgaaccggggccccatgctctggtccagcgtgttgccctgcagcacgaacatggtgctcatctgcgagtacaccgccgcgaacacgatcccgctggcccagatgggcagcagccggatcacgctcttgagctcctccacctgcgtcaccgagcacaggcgccacgggctcgcctgcgcgccgtcctcggccgtcaccacggccgccctgtcgaggcacgccagctgctccgagtgctccagcttgcggctcccctcgatgccggactccccgtccaccgtctcgtgcagccgcgacttgtcggcgggcacggtcacgtttcacttgcgcgcgcacgcgacgagcacctgcgcgatgcgcgtcagcggggctg

SEQ ID NO: 9225 - DNA, 386 bp, Zea mays
  Clone ID: LIB3137-061-Q1-K1-A1-R5A
ttgcggctccccttgatgccgactccccgtccaccgtctcgtgcagccgcgacttgtcggcgggcacggccacgttccacttgcgcgcgcacgcgacgagcacctgcgcgatgcgcgtcagcgggctgcccccgggcttctggtgcctgtacagcggcgtgcccacgaagaagctgccgacggcgatggccatgaccacggcggggatgccgaagccccagccccagcccacgtgcgtctgcacgtacaccagcaccgtggacgccaccagcgcgccgatgttgatggagaagtagaaccagttgaagaaggagctcttgctcttcttctcccgctcgtcgttctcgtcgaactggtcggcgccgaaggaggacacgcacggcttg

SEQ ID NO: 9226 - DNA, 1045 bp, Zea mays
  Clone ID: LIB3137-001-B5_FLI
gcaagcccaagtgcccaatcaacaaacccagaccgccagacggcaaccgttgtcatctctcactccacggcgccggccatcgtcactcacacgcccagcaccgcagcacgacaccatcgcgccctggccatcctcccgttcacgtgcacctaccgcacgcaccaccgcggaaagtaaccccgagatccagcgccatcggcacgaccaggcctgtccagggatggggcggagaggggagccctactacgtcgaagcggcgccgccggtggacgtgaacaagaacacagagtggttcatgtacccgggcgtctggaccacctacatcctcctgctcttcttcgcttggctcctcgtcctctccgtctctggttgctcccccggagcagcctggaccgtcgtaaacctcgcgcacttcgccatcacttaccacttcttccattggaagaaaggaaccccttttgctgctgatgaccaaggcatctacagcagattgacatggtgggagcaaattgacaatggtcagcagcttactcggaacagaaagtttttgactgtggtacctgtggtgctgtatctgatcgcatcgcacttgactgactacaagcagccgatgtttttcctcaatacaatggcagtttttgtgctagttgtggcaaaattgccaaacatgcacaaggtccgcatatttggaatcaatggagacatctgaggaccactgcaggaagtacatggatgcaatgccatgatgtgatgaagagctaaacagaacaagcagtgtgtttctcaaacttgacacaactgtctgtaatatatgtacaggtttaggaagaactgtaaatgttactctaccatagaagctttgccagcggactggcctgtgttgttgccgttgctgctttcttttgagtttcactggaaggggaaacggtaactccggtaaacaaccaccagcatgtggataagaaataaggaagtgtgtagcagatgctatttggtatctggttcgattgaaccaagaaatcagttaagttcatatttttgtctt

SEQ ID NO: 9227 - DNA, 601 bp, Zea mays
  Clone ID: LIB3137-004-H8_FLI
gggagaaggggtgtgctggcaagtatacactactcagagatgaagaaaacccacggtggacaatctttgagaggcggcttccttgctgtggttgtgggataggatggtcttcttttcttttagggttcttgtgtcctttgatttggtactttgcagccactctttactgctgcaagtactacaacaaggatcctcgagagcgccctgggctagctgcatcagctgttgcggcactcatcttcacagtcctggcactcatcgctctctctgtggcactgataatctatatataaaacgaggaatgaacttgcgcttgcttgaaatgcgtactcaggcactcatcttcacagtcctggcaaccatccatagctctctgtggcacagacatctgaaacccaaagcgaggaaaacgcggtagctggacctggcattcagaaggaacttgtaattttagtgatagtagcatatctttgcaatcatcctttcatgtatcactatatcaagttgttgatttaaatgctgcatcggttgacctgtcggctgctgttgtctatcaacgaggatgatcattgctctatcgcaaactgcgtgctccgtgatc

SEQ ID NO: 9228 - DNA, 980 bp, Zea mays
  Clone ID: LIB3137-011-C8_FLI
caaagcaatacaaggctggactcagcgtcctggaagatgacatattcgaagtggatcagccaaaggacctgttcctctactgctactacggagggatgatttacattgggctcaagaagtttcctaaagctttggagcttcttcacaatgctgttaccgccccaatgtcaacattgaacgcgattgctgtagaagcttacaagaagtatatcctagtttcactcattgtgaatggacaggtcccatcatttcctaagtatacatccatatcagcccaaaggagtatgaaaaaccatgctcagatttattttgagctttctacaagctatagcaacggtcgctacactgatttagagacatttgtcgaatcaaattcagcagcatttcaatctgacaacaacctagggttggtgaagcaagtgctctcatcgatgtacaaacggaacatccaaaggctgacccagacttacttaactctttcacttgaagatattgctaggtctgttcaacttgaaacaccagaggatgctgaaatgcatgtacttcgcatgatcgaagatggagagatccatgcaaccataaaccagaaggatggaatggtcagctttcatgaagatcctgagcaatataaaagtgttgagatggtggagcatattgactcgtctatccagaggttaacggcattgtccaagaagttggcttcaattgatgagaacatgtcatgcgacccttcatatttgttgaagacgggaagggatcgtggaagatttgactacgatgacttcgactctgttccacacaagtatttttgagatgatccgagccctacgtgattctgaagtacgatcatcaacgtagcagccattttgtaaagttgtctttagttcgatcgattaatggcttttgaaaattttgaaaaatcttgtttaaagaatgggtctgctagcatatttctcctccaatttggagacaagatttca

SEQ ID NO: 9229 - DNA, 1639 bp, Zea mays
  Clone ID: LIB3137-014-E7_FLI
cctcaatccgcagcagttgacaaagcaactccagttcgcccaaaatctccagccattgataaagcaactccaattgctcccaaatctccaccagttgataaagcctctccagctctgccaaaatcattatcaggtgctaaagatgcgctttttccttctaggtcgctgcagattgataagtttactccagccgccccaaggttatcacaagatgataaggctgctctgccttcttcagaacagtcacatatatctccagctactagttctgaagctcaaggggcaactactaggaaggtcacaaccaccacctcactttcagaggctgctgcagcatggaggccttcaagtgctcctgtgttacccacaccaagatcaaccgggccagctgcttcacatattcaaacttccacattgctttcccgctctatgagtgaagcagctgggagaaggccagtaaatgatccttcattttctgccccatcttatactccacagacctaccggaatgcaataattggtaagtctggtctgtctatgacctccgcaagccttgcgtatcagccgtcttctctggatcaagacactgctccttcacggcctctatcagcatatgcatcaagtacagtcatgatgcctcctgcaggaagatctgatcagtcatcagctaggcatggattcaagtctgggcctggtaagttagaagcacatgacggctggcagcagtggaaaggtgacagtaatgttgatatgcatctctggagggaccacgctccttaccaacaaatgaccaacagtcaagcatatgagcagtctcggagggacgatacttatcagcaagcatgcagcagaggaacagaaaagttcagcaggcatgcaggactgcaagctaggcagcagttccaaaccgagacacccgccagtcatgtatggcatcaaccgcaggggccagtggcagaagaatttccacaccttgacatcataaacgacttgcttgaggaggaccagatcaacggcagtataccggagtcgtttcgtcaagactacaacgtgtttggcctgccgttttcaccgagaggaaacttgtcagacatggaaatggcttctgttagaagtcccgctcggttcaattcacccaagtacgatggtggattgtcgggggcttatgacatgaatgctgtcaatgggttgagggaacggcagtttccctcgttggatatctactctaatggcctgtctgacgtgagtgcttctaagccttggctgaatggctctgccagtccatcggtgagccttggggtcaacacaaatggataccacccccaggtgggtgagtacctgggaggtggggtgaacggggtctccttgtggcgccgccatgccaacggccgctggtaatgcgaggtgcctgtatacaatcatacagtcggaataatgttttgttgtaacagatggtttcgggcctgagctgatgcgccatgtaattaaaagtttttaagttttaaaagggaaagaaagagatacaccctgtaaagtctgcgcctttattaggataatttgagtgcttttctggttgaagttgaacactgacctaactttgttaaatttcaaagctaaatttggcggtggcctgtgggag

SEQ ID NO: 9230 - DNA, 1500 bp, Zea mays
  Clone ID: LIB3137-018-F11_FLI
cggacgcgtgggtccgctttcggcgccgtcgccactcgccaccatctccaccgcctcctctcgacaagcatcccctcccatacccatggcaactgaccgtctcctccaccttctccgagcgccgacaggctctccggctgccgcggccaccacccgcgcggtttgttggggtcgtccacggacgcagcgcgtcgacgtcttgcagggtgcttcggggattcgccgcgcgtccgtgtcctgctcgagcactagctctggcgggcaggggggactaacatataaggatgcaggcgtggacatagacgccggcgccgagctcgtgcgccgcatcgccaggatggcacccgggattggcggcttcggcggtctcttcccctacaatgacgattatcttgttgctagcaccgatggggtggggacaaagctgaagcttgctttcgaaactggtattcatgatacaatcggcattgacctggtggcaatgagcgtcaatgacattgtaactctaggtgcaaaaccattgttcttcctagattactatgcaacgagcaagcttgatgttgatcttgcagagaaggttatcaaggggattagggatgggtgcgaacaatcagattgtgctctcctaggaggggagacagcagaaatgcctggtttctatgcagagggtgaatatgatctaagtggttttgctgtgggtgttgtgaagaaggataaagtcattgatggaaaaaacattgttaagggagatgtgcttataggtcttccttccagtggtgttcattctaacgggttctctcttgttagaagagtactggagaaaagtggactttctttggatgatcagctcccaagaaacgatggcataacaaatacggttggtgaagctctaatggcaccaaccttcatctatgttaagcaggtgcttgagattattagcaaaggtggcgtgaaaggactagcccacatcactggtggtggctttactgacaatatcccaagagtattcccctccggatgcggggcaaaaatttttactgggtcatgggaaatacctccaatcttcagttggcttcaacaggctggaaacattgatgatgcagagatgcggcggacattcaatatgggcattggaatggttcttgtggtaagtcgagagacagcagacagaattattgaagacacccatggatccagtcctgcttatcgcattggagaggtgattgagggtgatggggttcagtatgtctgacctcgtatgccttttatagtggcttgagacttgttggtctgctctgcaaagcagcagagtttatgtaacaacataatcttgtggtgttaagttctgcaccactactcccgctagaaagtgaagggtaaccaaataattatttgattggatccacgggaacttctctaaaggcttaccagaggaggccattagggggaaatacagttgttgagaatttttcatggagagcggtattgttttcgttgagt

SEQ ID NO: 9231 - DNA, 498 bp, Zea mays
  Clone ID: LIB3137-028-A4_FLI
gcgctctggaggcgccaggaggaggaggaggaggaggaggagaagaggccagccaggaccaggagcggcagctgcacgcgctcctcgtcgcggccgacaagtacgacgtgccgttcctgaggcgggcatgcgaggcgcggctggcggcgggcgtggcgccccggaacgcgctgcggacgcttgaggtcgccgagctgagctccagcgccgcgctcatggagcgcgccatgggcgccgtcgtggagcacgccgaggaggtcgtgttctcggcggagtacgagcggttcgccgcacggaacgcggggctgtgcgtcgagatcacccgcgcgctgctggccaggatgccgacgccggcgaggagtgatggcccgtgcttagagcttggaagcagctgatgcatgcagttgtattgtatatttgtatcagatgatggatcggaaagaatactcttgtttcagtttcgagtcacgacaatatgtaaacgcataagttcttctg

SEQ ID NO: 9232 - DNA, 2031 bp, Zea mays
  Clone ID: LIB3137-035-B5_FLI
cgctttgttaacaaagaattccctcatagccgccgccgccgccgccgccgccgctcatctcgccgagaggtgacgggaccgaggaactcgccgagttctaagatagagaatcgcttttcacagcctggggtctgctgcgtagggtggtgttgaaggggagaagtttaagatctgttccacagatcacgcgtgcgcgctcgcgaatcgggggttccacacatagcttcgtcgttttgaatttgatgtactaatggagtctaagggtggcaagaagtctagcagtagtcgttccatgatgtatgaagctccccttggctacagcattgaggacgttcgacctgccggaggcgcgaagaagttccagtctgctgcttactccaactgcgcaaagaagccatcctgatatcccttttggcttcctcgttctagtagtttaggatttcttttctgacacttcgattcttaccaatccccctggcctgctgctttcctgacaatcgaccagttccccagtcttgctccctgcagtcctccctcctccatctccagcgttgtgttctgactcacctgcaccaatggctgttctttctgctgctggtgctcccccggcctcagctatcgggtttgagggctatgagaagcgccttgagatcacattctctgaggcacctgtctttgtggacccccatggcagcggtttgcgtgccctctccaggtcccagattgactctgttctggatcttgcacggtgcacgatcgtgtccgagctctccaacaaggattttgactcctatgttctctccgagtcaagcttgttcatctatcctctgaagattgtcatcaagacctgtggcactaccaagctcctgctcacaattccaaggatcctagagcttgctgaagagctgtctatgcctcttgctgctgtgaagtactcccgcgggacgttcatctttcctggcgcacagccagccccccaccggagcttctccgaggaagttgctgtacttaaccgatactttgggggcctgaagtctggtggcaatgcttatgtgattggagatgcagcaagaccaggacagaagtggcacatctactacgccactgagtacccagagcaaccaatggtcaaccttgagatgtgcatgactggtctggacacgaagaaagcttcagtcttcttcaagactaatgctgatggcaacacaacatgtgccaaggaaatgacgaagctctctggtatctctgaaattatccctgagatggagatctgtgattttgacttcgaaccctgcggctactccatgaatgcaatccatggctctgcgttctccacgatccatgtgacgcctgaggatgggttcagctacgccagttatgaggttatgggcttggatgccactgccctgtcttacggtgaccttgtcaagagggtccttgggtgcttcggcccctcggaattttctgtcgccgtgaccatcttcggcgggcggggccaagctgggacatggggaaaggaacttggtgcggaggcttatgactgcaacaacatggtcgagcaggagctgcctggaggtgggatcctcatctaccagagcttctgtgctgctgaagacgccgttgctagctcgcccaaatccgttcttcgctgctttgatggcgagaatgcagcaccttttgcgaaggactgcaagctggctaatcttgtctgcttggaggaagttggatgctatcgaggagaaggatggagtgcttgatgagtaagacgggtttctggtgtcgatttgcttctgagtttttttctttttatatcgttgcgatctcgtggttgtcgtttggttagcagccaagccaggctattagtacgaagaatgtcgtctataaacatgtgttcctacgttgccacatgctgagtcaatctgtatacagctagctctaggtggtcagctgcgtctaccacaatgagcatacatgtatggataaatcttctgtgaaagcattcgatgaataagggttgttttcgtgaaaaaa

SEQ ID NO: 9233 - DNA, 856 bp, Zea mays
  Clone ID: LIB3137-030-F10_FLI
gaagatcaagatcgagatcaagatctcgttcaccatcccattctaggcgtcatggccgtgggatacatgctgaaagcaattattggagcaagcaaaaggctcctagggttgaatatattactgaatttggaggttccgatgataccagtgaaccaaaagtttcagggatctctccgccttcgtctccaatacgaattgacatacctaaccggttgtctggtggtcaaattcttgaggcacttcacagtgatcctgcctcttctttgtctgtggaacaggaaagaactgcaaaacttttgaaaccttcccccagtacatcatcagcattagctaaactaagcaaggttgcttctgggggaactggtaaaactccccagactgaaaagaaagaaacaccacaagaaagacttaagaggataatgagcaaacagcttaacaagcaaattaaaaaggacacggctgctgagattgccaagaaacgagaacaggaacgacaaaggcaggaaaaacttgctgaagttggtcgatacaagcgtcgtagccgcagtagaagtcttagccgttccccaccaagcacagaaggcggcgatatagcagaagccgtagtaggagcagaagcccaagaaggtaccgatcccgctcgctctccagttcccggtcgccctctcgctctccaaggtaccgaagcaggtcaagacactgaaaatatccaggcagccactaacaaagtgccttgccatgttgtagttaatttattttatagactttttcattcctgcagcgatgtgtactcatgagaagcctccgtttttgttttcttagtcctattatcgacagtgtgtgttccttgtgtttc

SEQ ID NO: 9234 - DNA, 878 bp, Zea mays
  Clone ID: LIB3137-058-H6_FLI
ccaaaccttctggcttctgcactgctctccaccacccctcaacgaagcctctggtgcctcggccaccgcagcagcctggccctgacccggcccccgggcgtggtgtcaggtctcaggtgtggtggcgctttctcctctccggcacggtggccgcgtcatcccagctctcccgcgcggcggcggccgtttcctctcctgcgctcctcctgccgcacacagccagaaaattgcagctgaagtttgtttgaggataggcgacagctttgcgagtccttcgtgttgaaggagaaattgtagctgaagtgaaaaaacagcagggaacgatggcactatcacgaagtatgagagcatgtttgcacagtggaagacttgcacttcttgccatattggtctctggtggaattgtattgcaaatcttggcttgtgctctctataacaactggtggccaatgctaacagttctcatgtatcttatcctaccaatgcccctcatatttttcctgggttctgatacttcctccatgatgtccaatgggggagacggctgggtgaacttcacgaaattcttgacgggcgcatcaatagtagggagcatcgccattccgtcgatcctgaagcatgcgggcgtcattggatggggagccctgacgatggagctgtcatcctttgtggtctttggcgtggcaatcctgtggttcctccagatgaacggtgaagacgagtacagcggagtgttctaatccaaacctgctgctgctggttctcttgccagcgtggcactctgtgcatggtagttgtgaactgggctgtactgctacaacaggggaagcattgccctgggacctgatttactgacaccagtacatgtttggtctgcg

SEQ ID NO: 9235 - DNA, 592 bp, Zea mays
  Clone ID: LIB3137-001-A5_FLI
gcgcccccaattcccgctccccacgcacccagacacgccgagcgggagaggaagcgacagccagcagccgaggcggccagcgccagcgcaggcatgaccactcccactcccagtgccgacggctcgcccccgggctcctccgacctcgtgcccccttcctaccccgagatgatcgtcgccgcgatcaccgcctcgccgatgagaacggctccagccaggccgccatcgcgcgccgcatcgaggcgcaggcccgcggcgacctgccggcctcgcacccggcgctcgtcgccgcccacctctcgcgcatgtccgccgcaggggagctcgtcgccgtcgcgggggggaagtacgcgctgcccccgccgccggcgcagccggcgccggagtcaccggctgacgacggcgaagacgacgacgacgacgacgactgcgccgacgaggtggacgaggaagaggaggcgccggagcctctgctcgtgcccgtgcctgtgccgcagccgcccgccaagcgcgggcgtgggaggcccccgaagccgcggcccgcgggcttccccatcggcgtccccggagccgccgcgtcccccgccgccgc

SEQ ID NO: 9236 - DNA, 2402 bp, Zea mays
  Clone ID: LIB3137-002-E2_FLI
ggactggacccccaacccaacaacagcagcaggaacaggaaaaagaaaaaactctctcccattcccatctcgcctcccacctcctccgcctcgccgccgcggcaggcaccgccaccaatcttctcttccgccccctcgttcgttcgctcgctcgctcgccaggagatcgactcgaggcgaggccatgaagtacgtgctggtgaccggcggcgtggtgagcgggctcgggaagggcgtgacggccagcagcatcggcgtcgtgctcaaggcctgcggcctccgcgttacgtctatcaagatcgatccatacctcaacaccgatgctggaaccatgtccccatttgagcacggcgaagtgtttgttttggacgatggtggtgaggtggacttggaccttggaaactatgagcgatttctggacatcaagttgactcgtgacaacaacataaccacggggaagatataccagtctgttattgacaaggaacgtagaggagattacctaggaaaaactgttcaggtcgtgccacacatcacagatgaaatacaagattggattcaacgtgtggcaatgaatccagttgatgacaccgaagagccagccgatgtttgtgtcatagaacttggtgggactataggggacattgaatcaatgcctttcatagaagcactaggccaattttcgtaccgtgtagggcctggaaacttttgcttggtgcatgttagtcttgtaccagttctaaatgtagttggtgagcagaaaacaaagcccacccaacatagtgttcgcggacttcgaggacttggactcatgcctgatattttggcatgtcgcagtacacagccacttgaagaacacgtgaaagtgaagctcgcacaattttgtcatgtcccgataccaaatatcattaatctccatgatgtcgccaacatttggcacattcctttgttgctcagagatcagaaggcccatgaagctattttgaaggtgttagaccttcagtgcgtgagtaaagttgctcgagaaccccaattgtctgaatggactgaaagagtcagcagatgtgacagattgaaatctccggttaggattgcaatggttggaaagtatactggcctgtcagattcctacctatctgttataaaggctcttttgcatgcgtcggttgctttggacaggaaacttgtggtggactgggttccttcctgtgatcttgaagattctacagcaaaagagactcctgacgcctatgaaaaggcatgggagtcgttgaagggtgcagatggtgtgttggtgccaggaggttttggagacagaggagtccaagggaaaattctggctgcaaaatacgcgcgagaaaacaacgttccatatcttggcatttgcttgggcatgcaaattgcagtgattgagtttgcacgctctgtcatgaagttgcacggtgctaacagcacagagtttgatccaaccacaaaaacaccatgtgttgttttcatgccagagggatccaaaactcatatgggggcaacgatgcgccttggatcaaggaggacctttttccaggccactaactgcaaatctgctaaactgtacggcaatgcttgctacgttgacgaaagacaccgccacagatacgaggtgaatcctgacatggtcccagaatttgagaaggcagggctttctttcgttggcagggatgagagtggcgaacgcatggagattatcgaactaccaactcataggtttttcgtcggagcacagtttcaccctgaattcaagtcaaggcccggcaagccatctccgcttttcttaggattggtagcagcgtcatcaggccagcttgaccacttgctccaacgtggccttaccagttcagtaggcagagacatctgcggcaaagggggagcgcagaaaccaaaagcttgccagaacgggcatgtcatgaagccactgaatggcctggtgcacgggcactattcagcgactcgctgcaatggcgtcattcccatctagcagcacagatctgcgaggctgttttcgcttgttctttttctttccgttctacctaccagggcaaccaggaagagaagggctgtttgctctacagcgacacggcagccgtttccgatgttttaacgaggaagcatttggcatgcaaagctgtcgcgcgcattaagaggcaaatctagcagcttattagctagggttcgattagtagtagtagtaaatccgatgttacgttgctggtttatttgttcgtttgtttgctaagaaagattacaagggctagtgatgtgcagctagctccagtgtagcctgccgtctcgccccatttgtacattgtaaaacaaccgctactctccgtgattgactgaatggatgagtataaacgtattggacc

SEQ ID NO: 9237 - DNA, 1992 bp, Zea mays
  Clone ID: LIB3137-008-D8_FLI
cggacgcgtgggtaggtagtcttatgtttgcatctccctggcaaccggtaattggtgacaagcatcagagactgtgtgtaactccaattgcagttgattgttcttcgtcagtaaaattctctgtgaaaggtttcaatatagttcagccaaccacaaaattactttgtgtgtttgatgaaaaatatttaattcaagaagagacacaaatgctacttgaagattcaactatgcagcaaggccctcaatgcctgaccttctcttgttcctttccttgtacaagtggaagaggattcatagagattgaagactatgatcaaagcagcctttctgttccctttgttgtcacggacaaagatgtatgttctgagattcggatgttggagcatggattggatttagtttcatttgatcaaacctccaaaagaatagatgatctgatgatttatcgcagtcgagcattacattttttgcatgaaatcggatggcttcttcaaaggagccatgtgcgagctacgtctgagcagcgacaatattgtcctgaccgcttccctgttgcaagatttagatggctgctatcctttgcagttgatcaggaatggtgtgctgttctaaggaagcttctgaacaccatgttccagggtgatattgatgtattgtcaccaattgaatttgccttgggagaaaatctattgcatactgcggtcaaaaaacgctcaaagcctttagttgaatttctattaagatacaccacaacaaatattgctccagtgggcggtggagatggtgctccagttcagttcttgttcactcctgcgatgactgaactgtcaaatatcacacctcttcatattgcagccacaatcagtgatgctattggtgttttagatgctttaactgatgatcctcagcaggtaactactctaaattgccatgttcttacctgttgtagcctgctttaactaaaaaaaagcacatctacattcaaatttcaaagtagcagatttccgattcttagtgtaaaacagttaaaataaaaactaagaccaccatttattgttagaacctaagtctgcacctgaaatattttcatctgaaatgcattatgtacatatcaagaaaaagaaaggacttccatcaaaacattggtttgtgtattacattgattgttgaatagatcgtgtagggtgtataatatcacatcagagttccgcatgaggtgtagtatgataaaaattcatttaccttaaaaacattttcttttacttttgagaatttgtgcaagcactgaaacatttgctgtctggcttctttctgcctaaatgtctcagttgggaatcaaagcgtggaagaatgctcgtgacgccactggcttcactcctgaggaatatgctgcaaagagaggcaacatatcctatattcaaatggtacaggacaaaattgacagaagggtgaccagagctcatgtctcggttaccatccccagcacaattgatactgtcggaaagcatggtagccgaatgaagcctgccgatcaaatcacatttggtgttgagaaaaaacaactaagcatcaaccaaacattgagctgcagacagtgtgtccagcaggcccagcagcttgcattccatccccggacaaataggtttctgtctaataggactgcgatgctttccttggtctccattgctgccgtctgcgtctgtgtgggattgatcatgaagagcctgccacaagttggttgtatgaagcctttcctctgggacaatatacgttggggccccaattgatagactgcagaagagccagcccgattgtatcagtgtatgatgaagatgtttgcgccgagcgaagctagtttcttgtaatgtacatgtttcttatactaaatgtctaacttatttctgtttatagtaaaacctgtgaacttgcctagcttgtaactccattgcatttgcatcctgactgaagtaaagcttttacttgttttggttg

SEQ ID NO: 9238 - DNA, 1375 bp, Zea mays
  Clone ID: LIB3137-008-F2_FLI
ctggtttctttccccttggccaagcccaagcccaaacccgggaaccccgtctttaaaaagtacaccctcgactcgtcctccgcattccccgtttgccttgtttaccattcctccccaaaacacatcctgcgatcctcgaagcctccgccgagcatcgatcatgtcggcctactgcggcaagtacgcggatgagctcatcaagaatgctgcctacatcggcacccctggcaagggtatccttgctgctgatgagtcaactggcaccattggcaagcgcctttccagcatcaatgtcgagaacgtggaggagaaccggcgggctctccgtgagctcctgttctgctgccctggtgccctccagtacatcagcggtgtgatcctcttcgaggagaccctctaccagaagaccaaggatggcaagccttttgtcgatgtcctcaaggagggaggcgtcctccctggcatcaaggtcgacaagggcaccattgaggttgttggcaccgacaaggagaccaccacccagggccacgatgacctcggcaagcgctgcgctaagtactacgaggccggtgcccgctttgccaagtggcgtgctgttctcaagattggccccaacgagccgtcacagcttgccattgacctgaatgctcagggtctggctcgctacgccatcatctgccaggagaacggtctggtgccaattgttgagcctgagatccttgttgatggccctcatgacattgatcgctgcgcttacgtcactgagacagtccttgctgcctgctacaaggctctcaacgagcaccatgtcctcctggagggtaccctcctgaagcccaacatggtgactcctggctccgactctaagaaggtgacacctgaggtgatcgcccagtacaccgtccgtaccctccagaggaccgtccctgctgctgtgcctgctgttgtcttcctctccggtggacagagcgaggaggaggccaccctgaatctcaatgccatgaacaagctcagcaccaagaagccatgggccctgtccttctccttcggccgtgccctccaggcgagcaccctcaaggcctgggctggcaaggtggagaacgtggagaaggctagagcggccttcctcgccaggtgcaaggccaactccgaggctaccctcggcacctacaagggtgatgctgccgccgacaccgagagccttcacgtcaaggactacaagtactgagttgcttctctttgcgatcccgttgttttggaactcctgcctgcgagtaggttgctgagtgttgtttgcttgttagagcttttatattcggacatgaaaaaaacatgcttcctatgtggatgatggttatctttatattcgtatatt

SEQ ID NO: 9239 - DNA, 784 bp, Zea mays
  Clone ID: LIB3137-010-C9_FLI
gtgcattcttatgttttgcgcaactgacataccaagcaatgccgagagctagacgcaacaataataccattcctcaaagtagatctttactattatgccatgatatattcaaatcatcttctcaagaaagattgtgctaaacactttaaaggggtcaagagtcacgcatacggtgaagagatagaaaagagtttcacaaagctgcttgtagaagaactaaaacaaagagaagaggaggcaacacaggctcaacaagaggctgatgttaagttgctcgaggccaaaaagttagcttcacagtatcagaaggaggctgacaaatgcagctcaagcatggataacctatgaagaagctagggagaactcagcggaagcattggtccaacaaaagaaactgacttctttgtgggagcaaagggcttgggagcttggatggagacccgagaatgtcaaggcacttctaaagtagtaaaaccagtggaaggtgttggatactatgtgtagcaatagatcttattgcaaatacgggcccactaagagctcgagacgatgaggaaacaaatgtgtttctggttgagcggactcgactcacttgacatgccaaggggcctacttgtccatagtaaatttatattcaatttgtagtataattccattgttgtttgtgaacactgttgtgtgttgggatggtcataggattacattgttcattttttctgggtgttctaaaaggagaaaagtttgtctaggggtggtgacaataaagaaattatctgcagttctt

SEQ ID NO: 9240 - DNA, 1809 bp, Zea mays
  Clone ID: LIB3137-013-D9_FLI
ggaattcgaagatgaagaagacaatgatgactcagtacctgataacaaggatgaatcagaggaagaagagcctatgaatgatgatgtatatgaatttactgaaggattaagaggcagaaaagctaataggatggaagaagctggttcaacaggctcttcttctggaagcaggagattaccaccacctgtaccttcctcatcttcaaaaaaaattgcggtctctatctgcattagatgcccgcccaggcactttgtcaaagagaactccggatgacctagaggaaggtgagattgcaatgtctggggactcacatatggacctccagcagtcagggagctggaaccatgaacgtgatgacggtgaggatgaacaagtactacaaccgaaaataaaacgcaaacgaagtattcgtcttcgtccaaaacctaatgcagaaaagcaggaagatagatctggagaaggggccttccctcagcgtgctgccaggcagcaagacgcggttcatcctatagtgaaacagaagcgcaacatgtcatctaggaaggtttcaccggcttctaggtctgggaaattgagtcacttgtctgggtctggtgaggggtctgctgaactctccaaggaaaattggagcagtaaggccattgattccactgcccctgagttcggtggcacaaagatgtctgacagtatgcaaagaaagtgcaaaaatgtgataagcaagctttggaggaggattgacaaagaaggtcatcaaatgatacctaacatatcttcttggtggcggaggaatgagaattcgtcgttcagaggtccggctggtagcacacttgacctacaaaaaatcgagcagcgagtcgatgggttggagtacggcgctgtaaccgagttcatagcggacatgcagcagatgttgaaaagcgtggtccagcacttcagctataggcatgaggtccggatagaggccgagaccctccacaacttgtttttcaacataatgaagatcgccttcccagactcggacttcatggaagctaagaacgccatgtcgttttcgaatcctggaagcggtgctgccgctgccccatcatcgtcaaagcacgccgcaccatcccttaagcgcagcagagccagtgccagtgccagtgccagtgaagcagagcagcagcatggctcgggacacagcagcaggcacaatcagcctagcgaggcggtcccgcccagccggtcccacagctccaggtcagagagagaccccagacatggcggcagcagggatcagcacctccaggacggcgccgctgggttgctgcaccctagcgacatgttcatcgtgaagaagaagaggcaagagcgcgcgaggagcggcatcgggtccccttccagctcgggccgaggcgccggacctctgtcgccggccaaccctgggcgtccgggccctgccccctcgcccagaggtgccaggacgccgttccagagggatccaccgccacacccgtctcagcagtcgatgcattccgctgggtctggatggggcagcggcggtgcgcattcggatcatcaagcgggggcaagctcgtcagcacccggcatcggagacatccagtgggcgaagcctgccaagaggctgaggaccgacagagcaggcagaggcggccgagcctaacggttggttcttctttagcgtcatatggatgtgtaaatgcatccacgtagcggatggaggcgtttgataataatcgtcagtgtatttagttcatcgtcctagcaagtcaaactttgctggcagtttttaaaacagttttttaagg

SEQ ID NO: 9241 - DNA, 1207 bp, Zea mays
  Clone ID: LIB3137-013-F4_FLI
ggtgttgaacgcgacgtcgtggtcgggcgggcgtcgtccccggcgcgaggcgtacgcgacggttctgcactcgtcggacacgtacctgtgcggcgcgatcgtgctggcgcagagcatccggcgcgcggggtcgacccgcgacctggtcctcctgcacgaccacacggtgtcgaggccggcgctgcgcgcgctgtcggcggccgggtggacgccccggcggatcaagcgcatccgcaacccgcgcgcggcgcggggcacctacaacgagtacaactacagcaagttccggctgtggcagctggccgactacgaccgcgtggtgttcgtggacgccgacatcctggtgctgcgcgacctggacgcgctgttcgcgttcccgcagctggcggcggtgggcaacgacggctcgctcttcaactcgggcgtgatggtgatcgaaccgtcggcgtgcacgttcgacgcgctcatgcgggggcgccggaccgtccgctcgtacaacggcggcgaccaggggttcctcaacgaggtgttcgtgtggtggcaccgcctgccgcgccgggtcaactacctcaagaacttctgggccaacaccacgggggagcgcgcgctcaaggagaggctgttccgggcggacccgcccgaggtctggtccgtccactacctggggatgaagccatggacgtgctacagggactacgactgcaactggaacgtggcggaccagagggtgtacgccagcgacgaggcgcacgcgcgctggtggcaggtgtacgaccagatgggggaccacatgcgcgggccctgccgcctctccgagcggaggaaggtggagatcgcatgggacaggcacgtcgccgaggagctcgggtacaccgaccagcactggaagatcaacatcacggacccgcggaaatgggactgatccacgactactccgtccgtcgcctgctgcattttcgtacataataccccacacgtagctggtcgagagccagatcgctaggcgcgcagcattttggttcgtgggtacatttaggccagctcagtttcataagtggagctgttgttccgaggtttttagcttcacgtacgaacagcttttccgatgaagctgaggggttttcgtgatcttatttggcaaatcagctttgcattggacaataaacaaataaaatgaccgtaatgctctctgcttttgtttccttct

SEQ ID NO: 9242 - DNA, 1703 bp, Zea mays
  Clone ID: LIB3137-017-B2_FLI
ccgctcggccaccagctttgaccgcctcccctcccctccgctccgctcctgttcctccataccccactcccccgcaggagcggcgcggcggcggcaaaggcaaaggcaagatgttcgggcgcgcgccgaagaagagcgacaacaccaagtactacgagatcctcggggtgcccaagtcggcgtcccaggacgacctcaagaaggcctaccgcaaggccgctatcaagaaccaccccgacaagggcggtgaccccgagaagttcaaggagctcgcacaagcctatgaggttttgagtgatccagagaaacgtgagatttatgatcagtatggtgaagatgcccttaaggaaggaatgggtggtggtggatcccatgctgatccatttgacattttctcatcattctttggaccctcttttggaggaggtggtggaagcagcaggggaagaaggcaaaggaggggagaagatgtagtccactcacttaaagtttctctggaagatctttacaatggaatctcaaagaagctctctctttcgcgcaatgtcatctgctccaagtgcaagggcaagggctcgaagtctggtgcttcaatgaggtgccctgggtgccagggctcaggtatgaaagtcaccattcgtcagctggggccttccatgatacagcagatgcagcagccttgcaacgagtgcaaggggactggggagagcatcaacgagaaggaccgctgcccagggtgtaagggtgagaaggtcgttcaggagaagaaggttcttgaggttcatgttgagaagggaatgcaacacagccagaagatcaccttccctggtgaagctgatgaagcgcctgataccgttactggagacattgtattcgtcctccagcagaaggaccactccaagttcaaaagaaagggtgaagatctcttttatgagcacaccctgtctctgaccgaagctctatgtgggttccaatttgttcttacacatctggacaacaggcagcttctgatcaaatcaaaccccggcgaagttgttaaacctgaccaattcaaggcaataaacgacgaggggatgccgatttaccagaggcccttcatgaaggggaagctctacattcatttcacggtggagttccccgactcgctggcaccagagcagtgcaaggctctcgagtcggtacttccgccaaagccttcgtccaagctgacagacatggagatcgatgaatgcgaggagacaaccatgcatgatgtgaacaacatcgaggaagagatgcgcaggaagcaggctcatgctgctcaggaggcgtacgaggaggacgatgagatgcctggtggagcccaaagagtgcagtgcgctcaacagtaagcagactaccataatgggattcaaggcactttggttgctcttcaattatgcgagtgcgcctgtggactgtatggttctatggttttgctgtcgctgagctacgaagtaggaagctgatgcgcccctggctctgcaagcgggggaatgtatcctttttttgctgcaactggaaaatgctacccaggcatagctggctaccttataacttttgcttgtgagatttgctagagtgacgattttaatttataggtggacttaatgtttgtgtaaggctaggcataacatcatgtctcaatggacgttgccgttgcacattggtgcattttattttaa

SEQ ID NO: 9243 - DNA, 614 bp, Zea mays
  Clone ID: LIB3137-014-A1_FLI
cccttagctcggagtcggacacccacccgccacgaccaccagaccactcgcttccccgaagcttcagctccgcgcttctctgttcgagctagccagcctccagcaagagcgagcgagcgagggcaacgggcatggcggcggctgtgtccttctcccgggtgcgagctctcccgacgtggtccagctccgtgtccggcgacgaccaccaccgctcctactccgcggcgctggccatgtcggtgtcggtgcggccccggtgtcgcgcgcggtcgccggcgcggatgatgggcaacgtgaacgccggcaaggggctgttcgcgccgctcgtggtggtggcgcgcaacatcatcggccgcaagcgcttcaaccagctcagggggaaggcaatcgcgctgcactcgcaggtcatcaccgagttctgcaagaccatcggcgccgactccaagcagcggcagggcctcatccgcctcgccaagaagaacggagagaagctcggattccttgcctgagacgaccatgttctacgcacatatataagtatataatctataagtactacatcatcaagtagtggcggacaatgataattatattgataccttcttccttgctcc

SEQ ID NO: 9244 - DNA, 1246 bp, Zea mays
  Clone ID: LIB3137-017-C4_FLI
ggcagcaggagcagtagcgtccgtccggtccgcgcgcgttcccctccccgaccggcaggttccccgtccacgcccggccattcatccgtttcccactgctcctccgtggctcagctctgctccctgtatctctgggtctgcccctctgctctcccggtctctcctcttcccgtcccgcccagcgcgtcccccaaggaagccccgacgccacggcatggggatcgtggaggaggcgcacaacctgcgcgtggtgggcgaggggaagcgcggggtcatcgtgctggcgcacggtttcggcaccgaccagtccgtctggaagcatctggtgccgcacctcgtcgccaactaccgcgtcgtgctcttcgacaccatgggcgccggccccaccaacccggactacttcgacttctcccgctacgccacgctcgagggctacgcgctcgacctcctcgccatcctccaggagctcggcgtccagtcctgcatctacgtcggccactccgtctccgcgatcatcggcgcgctcgcgtccatctccaggcccgacctcttcaccaagctcgtgctcctctccgcgtccccaaggtacctcaacgatgtggactactatggcgggttcgagcaagatgagctggatgagctgtttgaggcgatgcaatcaaactacaaggcctggtgcttaggttttgcacccctgtgtgttggaggagatatggaatcagtggcagttcaggagtttagcaggacactcttcaatatacgtccggacattgcacttaatgttgcccagacgatcttccagagcgatgtgcgcagcctcctcccgcacgttagtgtcccatgccacattgttcagagcaccaaggatctcgcggtgccagttgtggtgtctgagtacctgcacaggcaccttggtggcgactccatcgtggaggtgatgccctctgaaggccatcttccccagcttagctctccagacattgtaacccctgtcttactccggcacatccagcatgacatcgcagtctaggttggccagtcgttccaacaagacaatgagcactcgaagctgtctactgcctgtttgtatgatatcccgcttaattgttcaacgtaggattgcatctatttgatgctctaagaagatttcaaaggtgttatgtagtgttggctgtggaaattgtagcatatatgaccatgtaatttattgttcgtctaatgtaggataccgtgttggatgctcttg

SEQ ID NO: 9245 - DNA, 996 bp, Zea mays
  Clone ID: LIB3137-023-A11_FLI
tcctccccgctagggttttgccagcatggccgccgccgccgcccggaggctcctctcccgccgcgcctcctcgtcctccctctccgcgctcctccgtcacggcgctgtcccggagcagtcgctggtgttgcgcccggctgttgtcgcggcggcctcccgcctcggcttccagcgcgggatggcgcggcggcctggcggggacggctacgtctcgacgcggtctggcgcgggcggggaccgcgcgcccatggccacggagatggcgccgctgttccccgggtgcgactacgagcattggctcatcgtgatggacaagcccggcggggagggcgccagcaagcagcagatgattgactgctacatccagaccctcgccaaggtccttggaagcgaggaggaggcgaagaagaagatctacaacgtctcgtgcgagcgctacttcgggtttgggtgcgagatcgatgaggagacatctaacaagctcgaggggctccctggtgttctctttgtgctcccggattcgtatgttgatgctgaatacaaggactacggagctgaactcttcgtcaacggtgagattgttcagaggactcccgagaggcagaggagggtggagcccgtgccacagagggcagcagacaggccgaggtacaatgacagaacccgctacgcacgcaggagggagaaccagcgatgaactttgcgataaaatcataaaaaataccacagcaacaagtcccaggtggtttcagctctggaattcaaggatcaccgagtatcgcctgtattaaattggcaatctcactttacgtgcagtctagagtatcgtttctatgtgctcagcttggacgtattgtattctgtaattacagctacttggagatttggaaggacctggcttgcaacgtagtatatctctagtcttttttctctgtggcaatgtataattgctatgaataccagattgagatggttgcatactgttcgcagctcaat

SEQ ID NO: 9246 - DNA, 1093 bp, Zea mays
  Clone ID: LIB3137-023-A6_FLI
cctgaagtggccaaagacattcattgttgtatcacacgcaagggagtttttgaatacggttgtcaccgatatccttcatctgcatggtagaaaactacatgcttacaaaggtgactatgacacatttgagaggacaagggaagagcaccttaagaatcagcagaaagcctttgaaacaaatgagaaggccagacagcacatgcagacattcattgacaagtttcggtacaatgcaaagagagcatcacttgttcaatcaagaatcaaggcattggagcgaatggaacatgttgatgcagttgtcagcgatccagactataaatttgaatttccgaccccagatgaccgccctgggccaccaatcatcagcttcagtgatgcctcatttggttaccctggagggcctaccttgtttaaaaatttgaattttggtatcgacctggacagccgcatagcaatggttggtcctaatggcattggcaagtccactatactgaaactaatttctggggatctgcagccaacttctggaacagtatttcgctctcccaaggttcgcatggctgtattcaatcagcatcatgttgatggccttgatttgacggtgaatccccttttgtacatgatgaagtgctatccgggtgtgccggagcagaagttgagggcacatctgggttcgtttggtgtttcgggaagccttgccctccaatctatgtacactttatcaggtggtcagaagagtagggttgcattcgcgaaaataaccttcaagaagccgcacatcattctccttgacgagccttctaaccatcttgatctggacgctgttgaggcgctcatccagggtttactcatttttcagggaggggtgctgatggtgagtcacgatgagcatcttatcactggaagcgtggacgagctttgggtggtgtcggaaggcagggtgaccccgttctcgggcactttcaaggactacaagaagatgctcaagtaacaaaaacatgtattatcgaccatagcctatatatctatatgcttgctattacgttgtattaccgtataaattttgggagtaaagcatcgaaattattat

SEQ ID NO: 9247 - DNA, 1377 bp, Zea mays
  Clone ID: LIB3137-023-G12_FLI
gctagcaatacatcgctagctcacttgatatacatattgcatcggcataaaaactgaatttaccatggcccacttgatctcttctgcaatcgcaggcgcgggcaacttggtcgctgatggaatcagtggtgtcactggcgtagcgtcgcaggttgtagaaggcgtagaggacactttaggcagtatcgtagaagcaatcgaccaaggagtcaaggatgaggaccaactggatttgcccaagtacgtgtgtttcaagggagataatggtctgtacctgagtgctcgaacagttgaaggccacccctacctgcagtttgcatcggaagacattggcgacccaagtgtgaggttcatcacctacaaccacaaggtgaacggcaaacgggtggtgcgcttcaagtcgaaccatctcggcaagttctggaggcggagccccaactggatctgggccgacaccgacgacaccagcaccaacaactccgacaccctgttcgaggtcatcaagatcgacgaggatggtgtgtacgcgctccggaacctcggcaacaaccacttctgccacaggctgacctacgacggcaaggagagctgcctgaacgccacaattccgaccatcaggaaggaggcgcacatcaagatcgaagaagccgtcctctcccgaaagatctccaacatcgagtaccacctcaagggcgccaagatcttcgacaagaaggccaagaccctcatcactcgagaggcggtgaacggcaccagcacggacagcaagaccaccatcaccctcaagtacagcgtcatcaagggcaagctatgggattcgagcaagtccatgaagctgggggtcaccaccaccattgaagctggggttcctgtggtcttacccgcaaccattgaggtccagagcgagttcaactccacctacagctggggcgagtccatcatcgagaaagaagagtactccaacgcctacgaggtcgttgtgcctgcatactccgtcgtcacggtcagtgtactcgccacacagggcatctgccaagtccccttctcttatactcaagaggacgttttgactaccggagagaggaaggttttcaagtttgatgacggcatcttccgtggtgtcaacagctttggtttcaagtccgaggtcacggaaaggaagctctccaaggacgacgactgagcgatatatcgtccatagtctctcgataaacttcgatcggtgtgatttataaataagccatattaatgtaataatgctttaataagcagttcagtatatgtgtgtcgtcaaaatcacgtttttatactactatgtgtgcatgcatactttatgtgtaatgctttacttgtaatttattgcgaataaacaaagag

SEQ ID NO: 9248 - DNA, 639 bp, Zea mays
  Clone ID: LIB3137-024-C2_FLI
gaggcagttggctatgctcttactgcaccagcaggtcaaatggatctctctctgtgggagcgattttatttgcagggtatagattcactaatgactttgtatgagctggattattggcctccccaagacaaggaagtgaaccagcgtagcctaacactgcccgccgtggggctgctccagggctgcgttggactcaggaagctcttcgtccatggcaccacgcatgagcatttcctgacctttttcttgaaggtgccaaatctgagggacatgcagttacgggaggactactatcccgcaccagagagtgatatgatgaacacagaaatgcgagccgagtcttggctccggttcgaggtgcagctgaacaacaggctaattgaggattaacggtgaatttggtgagctgtgagagcatcagatgaatacagagaggtgctgatttacttgaaccaagtggagttgatgccggggtggtgctgtgcgatggatgatcacggaagtagcaagggtagctgccgtgcttgtgtatccgacaaatatcggtgatctttactagttgcttttccttttaaaaataagagtgtatgataagggagttgatgcagaattcagatatttgcatgagtttggacgatt

SEQ ID NO: 9249 - DNA, 1225 bp, Zea mays
  Clone ID: LIB3137-027-A10_FLI
cctcaccggctccattcgaccattccatcctttccttatcccctcccgcttcgtctcccttcctggcttcctttcttcgccatggcaaccatgtccctccgctgcctcgccatggccatggccgacaccgcgctcccgcccgcccacaagctcctccccacagtttccctcccgctcctctcctcgtccacccgcgccgcgccgctcctcctcttcgccaggcgccgcctgccgctcgcgcccctcgttacctcctccgacgccgttgaggccaagtcggcagacgaggaggaggagaaggccggagagcccgtcgaaatggaagctggggagtttgaggaggtgctagcctcaggcggcgagggtgaggggcagtacgccgcggtggagccgccagaggaggccaaggtctacgttgggaaccttccctacgacgtcgacagcgagggactcgcgcagatcttcgaccaggccggcgtcgtcgaggtcgccgaggttatctacaacagagaaactggccagagccgtgggtttggttttgttaccatgagcactgttgaggaagctgacaaagccattgagatgttcagccgctatgatattagcgggaggcttctgaatgtaaacagggcatcttctaggggcactcgcatggaaagacctcagagacaatttgcaccagctttcagagcttatgttggcaacttgccatggcaagttgatgactctaggctggtgcagttgttcagcgagcatggagaagttgttgatgctaaggttgtctacgacagagaaactgggcgctcacgaggattcggttttgtatcaatggtgtcaaaggaggaactcaatgatgctatttcggccctagatggacaggaattggacggccgccctcttcgagtgaatgttgcagcagagcggccacagaggggcttttgatgcggttgtatgagagagatgactgtttgtttgtaatgagcatggagacacagagacacaatggaggagcaatggtacaaattagcggaagcggatgctgtcacaagttgctagatctttctcccttagcttcctgacatttggttcttgccacagctttttgatgcttctcttggcagctggacttaatggtttgctattcttgtcgacatcacgagttgaattgtcaaactagtctcttatgttctatgctgatttgccttaaccagattctcagcatggc

SEQ ID NO: 9250 - DNA, 1687 bp, Zea mays
  Clone ID: LIB3137-030-H3_FLI
cggccgttttctacgggcggtgcagtggacgggagtagtaccctttctttctcttcgaagaaaatgcggcggcgtgtggtataaaccccgcccgtcacgccgggccgtccgtgcgtttccttttgtcttcgcttgcttcctttcgaaagtccttgcgtcacactcgccgatcgatcgagtctctccggattccagagaggcccaactgccgaagccatcgatcgccgccacctcttcgagcagaatagttgagaatggctgacgaggatatccagcctatcgtatgtgacaatggcactggaatggtcaaggccggtttcgctggtgatgatgcgccaagagctgtcttccccagcattgtgggaagaccacgccacaccggtgtcatggtcggcatgggccaaaaggatgcctacgtaggtgatgaggctcaggccaagagaggcatcctgacactgaagtacccgattgagcatggcattgtcaacaactgggatgacatggagaaaatctggcatcacaccttctacaacgagctccgtgtttcgcctgaagatcaccctgtgctgctgaccgaggcccctctcaaccccaaggccaacagagagaaaatgacgcagattatgtttgaaaccttcgaatgcccagcaatgtatgttgctatccaggctgttctttcgttgtacgctagtgggcgaacaactggtattgtgatggattccggtgatggtgtgagccacacggttccaatctatgaaggatacacacttcctcatgctattctccgtttggatcttgcggggcgtgacctcaccgaccacctaatgaagatcctcacagagagagggtactccctcactacgagcgctgagcgggagattgtcagggacataaaggagaagcttgcctacgttgcccttgattatgaacaggagctggagactgccaggagcagctcctctgtcgagaagagctacgagatgcctgatggtcaggtcatcaccattgggtcagaaaggtttaggtgccccgaggtgctgttccaaccatcccttgttggcatggaatcgcctggcgtccatgaggccacgtacaactccatcatgaagtgtgatgttgatatcaggaaggatttgtatggtaacgttgtcctcagtgggggatctaccatgttccctgggattgccgatcgtatgagcaaggagatcacgtccctggctcctagcagcatgaaggttaaagtgattgcgccacctgaaaggaagtacagtgtctggatcggtggctctattttggcttctctcagcacttttcagcagatgtggatctccaagggagagtatgacgaaactggtccgggcattgtccacatgaagtgcttctaagtttttttgggaaatttttccaaaaaaaaaaagaagtttctggggaagttcgacatggtacgtcaggcgttaccggctcattgtgaaccaatacatgaactgccatgataaggttataagcagaaataacagtagcactggctccaattcctgaagatgagtctggtgctccctgctgtatgaaatggatcccactcgtatattcgtcaccgcgccgcactggtgtaacgtgttgcctcagagtttgcttttagctggttccttttttaaaaataagtactgtttttggttggctaccagtc

SEQ ID NO: 9251 - DNA, 1363 bp, Zea mays
  Clone ID: LIB3137-033-H11_FLI
cggacgcgtgggcccagctcgctcgtcccagctgatcaggtcgagcacctagtagcgacctgctcgatcatcagtgtagagtgtcggtaggtgtctgtctctcttggtggctggttgcaacggtcatggcgacgtcgtctcgtcgggtgcccttgctgctgctgtgcctgggcgtgctggtgtcctgctccttcgcggcgggcagcttggaccaggagctggacatcacgtggggcgacgggcggggcaaggtccttgacaacgggcggctgctgacgctgtcgctggaccgcacgtccggctccgggttccagtcccggcacgagtacctgttcggcaagatcgacatgcagctgcggctggtgccgggcaactccgccggcaccgtcaccgcctactacctgtcgtcgcagggcggcgcgcacgacgagatcgacttcgagttcctgggcaacgtgtccggcgagccctacacgctgcacaccaacgtgttcacgcgggggcaggggcagcgggagcagcagttccgcctctggttcgaccccaccgccgacttccacacctactccatcctctggaaccccaagcacgtcatcttcatggtggacgacatgcccatcagggacttccgcaacctggagagcaagggggtggcgttccccaagagccagccgatgcggctctactccagcctgtggaacgcggacgactgggcgacgcagggcgggcgcgtcaagacggactggtcccacgcccccttctccgcctcctaccgcgggttcaaggccgacgcttgcgtcgccgtcgcgggcggccggacccgctgcggcgccaccgtcggcaccgagggcaccggcgcccccgcctccgccgccggcgccggggactggtacaaccaggagctggacctcaccctgcagcagcggatgcgctgggtgcagcgcaagtacatgatctacaactactgcaccgaccccaagcgctaccagcagggcctccccgccgagtgctccatgcagtagcgcccggttattcctcgcccgtccaacaatggcgcgcgcgcgcgtgtgtgtgcatgtggtccgctctactgctaccgctacgacgatcggtgtcgatcaccggatcaaggcaagacgaaaggcatcgaaacatggtagataaataaaggacttgacgatttgtaacgcagtagctggtgcgtgcgtggtgtggtggtaagaaattcttctgctgcctgtgttcttgtagcctcctcgtcctcgcccaccctgttggtacgtgtacggtgtacgtagtctgccgccgcgcgctgttcgtgttcgtcgtgtctcgtgtctgtattatactcgtcctccccatc

SEQ ID NO: 9252 - DNA, 1519 bp, Zea mays
  Clone ID: LIB3137-028-E3_FLI
cctagtcgcacactcaatgctagtgagtgtgtggctcgggggtgcgcgttgcaatgtgcaatgcttagtcctacgttccgtgttcgggaatacgaggtgcaggatgcaatccctgcttccataggatttaacactagtgacggcccagtttcaacattgtcaagtgatgcattgttccggagaggcctgcactttcccagtgttaagatcattactctagagaagaatgacagttttagttttgatgcatattatgtggatgctaatgaattgcctcctggtacctcaacagacatcggtagttttcagattggcccattccaagcacataccgaagcttctaaagtcaaagtaaaaattcgcttgaatctacatggtttggtttcagtcgaatctgccgttttgataaatgattatcaaaggaatggaagttctactgatcatatggaggtggatagcagtggtgatgacatgcagggtcacaagtcaagaagtgaaaggtctatccagcggcaggagttgccaatcactgagtacatatatggtgcaatgagcaagcatgaattgctggaagctcaagagcaagaacagcaattggcttatcaggataaacttgtggaatggacaaaggacaggaagaatgcattagaatcttatgtatatgacacccgtaacaagctttctgagaggtaccggagctttgctactgattcagaaagggaacaaatctcagttaatttacaacagactgaagattggctttacgaagaaggtgatgatgagacagaagcagtttacagtagcaaacttgaggagctgaaaaagcttgtagatccaattgaaaatcgttgtaaagatgacgaagtgagagctgaagccatgagagatcttttgaagtgcattgttgaccacagaaatgctgccaagtcattatccacacctgaaagagatgctgttgacaatgagtgcaataaagctgagcagtggctaagggaggggtcccaacttcaagaatccttgcccaagaatgtggacccagtactttggtcctgtgaaatcaagagaaaggaagaagagctggatacgttctgtcgaaacataacaaggcacaagggctctccagcaaggacagatggcagcaggggttcagattacatgcctacacctgatagagattaaatattttcacgatcacgaggtttctttactgtacggccacacatgtcttagaccttgttcgtttacgtcggattgcacccggaatcgttccagctaatcaaagtttatataaattagagaagcaatccggctaggaatcgttccgacccaccaatccggtagaaacgaacaaggccttaatcattttgtagcatatatatgaatgaacgagttcctgctaacaccgtcatataatcgactctgtacaacactaggcccgccattgggtgaccgcttcttggttctccaaggtgcagttgtcacttgagagcctactgatcatgattgtcgatacctgtga

SEQ ID NO: 9253 - DNA, 1633 bp, Zea mays
  Clone ID: LIB3137-040-F10_FLI
ccctttcaatttttttaatctccgcttccactgttccaccaaaccaagccgagaaatttctcctaaatttcagatcaaatcctcctcctcctcctcctccccctccccctctccgaggattctgcccagcagcgcggcgatccgcctcgatccggaatggagcgcgtcttctccatggaggagatccccaacccctactgggccccgccgcaccctcaaccggcggccggcggcgctgttgctgcaccaggtggagtaggaggagcgggggacgcggcgggcgcgatgaaccggtgcccatctgagtggtacttcgagaagttccttgaggaggccgtgctcgacagtccgggtcccgtcgccggcgtgggtagaagcagcggacaagctggagttgaggcggcggagagcaagccgctgggcgccgcggcgccggcgtccgtctcgagctcggtcgttgaccccgtcgagtacaacgcgatgctcaagcagaagctggagaaggacctcgctgccatcgctatgtggagggcttctggtgcagcacctccagatctttctgcgactgctgcttccttgccaagtgtcggtgttccgcatgcagctcctcttaaacccgtcggaggtactgaaagtctagttcaaaacatgctagctggtgctccagtaggggggtcaggtccacatatagtacaaattgctgatatccctgttaagcaaaccactagctcttcctcacgagagcagtcagatgatgatgacatggaaggcgatgctgagacaaatggaaatggaaaccctgttcaacaaagacaacagagaaggaagcaatccaatcgggaatcagccaggcgttcgagaagcagaaaggcggctcacttgaatgaactggaggcacaggtagcacagttaagagtcgaaaactcttcgctgctaaggcggcttgctgatgttaaccagaagttcaatgaagctgctgttgacaatagggtgctaaaggcagacgtcgaaaccttaagagcaaaggtgaagatggcagaggactcggtgaagcgggtaacaggcatgaacgcattgtaccctgccgtgtcggatatgtcttccctcagcatgccattcaatggctccccttctgactccgcctctgatagcaccgtcccggtacaagatgacctgaacagttacttcgccaacccaagcgaaatcggaggcaacaacggttacatgccagatatagcctcctcggttcaacaggacgacaatttttgtcaacgggtatcaggctgctggcaagatgggcagaacagactcgctgcagcgggtggcaagcctggagcacctccagaaaagaatgtgcggaggcccggcttcatccggctcgacctcctaggtttcatatgaaaaagtccctggtgcctaacggcaagaatgctaaattaacaatttcaacatgctttgtactggacattgataatcctgcgatgcgcattagtgcgttatggacttgtgggtcaattgctatttggcgtgtgctggctgctcactgtagtgagcagaacaagttccagtttctatcgaagagcaacctctccttttcgctagtgacttatgaatggtcgatggtttattagcc

SEQ ID NO: 9254 - DNA, 1255 bp, Zea mays
  Clone ID: LIB3137-041-E11_FLI
cgcaatcatacttcctaccctccccacctcttccacggttccaccccgtccctctcctctcgagaagcacccgcaccatacatcttccggcgcccgacgcggacggcgagccgctgctgctgctgccgccggaggaggaagggcaccagggccagcgggtgcaggaggaggaggagcagcagcaggccgccggccgcttggggctgtgccacatgccgctctggggggccgccgcgtccgcggcgccggcagccgagggcgacgccgcccgcgcgccgtcgggatccggcggcggcgtcaaggtgatccggtcgctgctccccacccggcgccgcctccgcctagatccgcccgccaagctctacttcccatatgagcccggcaagcaagtccggagcgcggtcaggatcaagaacatcagcaagtctcatgtggccttcaagttccaaacgactgcaccaaagagttgcttcatgaggcctccgggcggcgtgcttgctccaggggaaagcatcatagcaacagttttcaagtttgtggagcatccggagaacaacgagaagccgatggacaagtgcaaggttaagttcaagattgtcagcctgaaagtcaaagggccggtggagtacgtccctgaactgtttgatgagcagaaggaccaggtcgcggttgagcaaatattgcgggtagtattcttggatgctgagcgcccaagcccacaaatggacaaactcaagcgccagctagctgaagcagaagcagcccttgaggcacgcaagaaacctccagaggacaatggtccccgtattgttggtgaaggccttgtgattgacgaatggaaggaacgaagagagaggtaccttgctcgccagcagattgaaggtgttgattcggtgtagacacgaggcagccctgtaaactatgcagaatgaacataccgttttatgggcacgcactccagctgtcaaatggatttgaagcttgattttgcgaaggttcggatttggagcaatcaagcaacaatgaggcttttgtgtatttggggttcacgctgaacttctgtcctgggtttgggtgtgtgtagataagcagccactgcttggtaatagtacgtccttcagccatgtactcgtgttgttgaatgtgggtctctatgtgaatgtgatgcattctctagctgctgtcctgtcaacattaaaagtgtaattgtaatgtcaaaaggcacactccaaggtgattcagtggtagttctgcc

SEQ ID NO: 9255 - DNA, 1587 bp, Zea mays
  Clone ID: LIB3137-041-E5_FLI
cggacgcgtgggcgagccggcgccggcgccaccgctgccgccgtccccgcacaacccggttccctctccgtacccgtcgctggatcgggcggggagctacggctacggatccggccctggctccgggtacggccaggagctgtacccgcccaagccggcgggcgggtggtccgacgacggagcgtacgcttacaacggcggcgacgcgccggagccgtacgggtccaggggcaccgcaccgaggccgggctcgggatccgcgctgtttgatgactacgggaggtccattggctcagctgccgataggggtggccgtgggggtagcgcggccagccccaaggtggtgagggccgtgcccaaggcagagacatcagaggacgtcaggggtggggtgcagaagttcagggtcaagctgctgccggagggcgctgggagccccatggatgtgctctgtcaggttggtctggatggaattcggatgcttgatcccaacactggtaggacactaagaatatatccccttgaaactgtaactagatgtgatgtattagattcctctatttttgccttttggtccaagagttcagtagatgttgaaggaaaaagaataaggctgaaatcaaacagctatacatccaacaccattcttgacactgtcacagctgcgactgtgcagttcaaggagatgggtgaaagcagcatttcaagaagtagagcaattgctgatgcatccaagcccgctgagcagcaaaatgagaggaagaaaaatttccttgattggaggaatttaatgaagcctatgaatgaggagaaagatcactgggtcccagatgaagctgtcagcaagtgcacagcatgcgcagcagatttcagtgctttcaaccgcaggcatcactgtcgaaactgtggtgatattttttgcgataagtgcacccagggaagaactcctctgactacagatgcagatgctcaaccagttcgagtttgtgacagatgcatggctgaagtaacgcaaagacttaacaatgcaagggaagtggctaatcgacctattgttcacagccacgaggatcttgccaaaaaacttcaggaagccatggatataaataaaaggtcgtcttcaggaacaaggtcttcagatgtttctggcaagcggatgcgggaggtcgcatgcccaacctgcacggtccatcttcaggtcgaggttccagcttctggttcggagacgatagagtgcggcgtatgtcagaaccctttcctcgtcagcgcccgttgaaccgagttcagcggcttcaggcaccgtgcggcggagtcttctcggattcgcaagcgaagagtcggtcctgttcaatcgagcctggcgctgaattccggctatccctgtctgtctgtaccctaattctgcacggaagtctgtcactgcaagttgttagtaagttatatggatgagttgagtcgtttgcaagttgttagtacagttgtgagtttgctttgagaagcaagcagggtcatgtgtttgtactgccaacaactaactttgctgttgttacatgagaaaaaaaaaacggtgtaaactttgctgttgct

SEQ ID NO: 9256 - DNA, 1561 bp, Zea mays
  Clone ID: LIB3137-045-B6_FLI
cgcgcacagaaacacaagcgagtaccagagcagctaggagtggtcagtaatggcgcagcttagagcagccgccgacgagcagcaggaggcggcgatgcacggcgtcgcctccggcgacgggaacgagagcaacaagaaggcgcgcgcggggctctgtggcctgctccgcgagcgcaaggtggtggacctggcgcgggccaagcggcggctggtggaggttccctacaccgcgacgctggcgcacacggccaacgcgctcctggcagcgcgcgtctctgccgtggccgtggctgcgccaccgggccactggatcggcgccggcggctccatgatcctcgagtccgacccggccaccggcgccgtccgcaagcactacatcggcatggtgaacatgctcgacatccttgcccacatcgccgaggccagcgacgacgacgaggcggccgacctcgaccgccggatggccgtgccggtgtcctccgtcatcggacactccctcgagggcctcactctgtggacgctccacccgagcaccagcgtggtggactgcatggagacgttcagcaagggtgtgcaccgcgcgctggtgcccctggagagctcggcggacaacgtggtggcgctggagctggtggagtcggcgccggggtaccggatgctcacccagatggacgtggtgaggttcctcagggcgcacggcgcggagctcaggggcgtgctgttgcgcaccgtgcgcgagctcggcgccgtgaacgacaccgtgttcgccgtctctggcgttaccaaggtgatcgacgtcatcaaggcgatgcgggcggcgtcgctgaccgccgtgcccgtcgtggacgccgggagcgggcaaagggcggtcgagacgttctcggcgacggacctgcgggactgcccggtggcgcggctgcaggcttggctggggatcagcgtgatggagttcaagaggaaggtggctgagtaccgcgccagcaccaggcttgtggtccccggcgccgacgccacggacactggcacccctgtcgccgggtacgccgacacccccgcggctgccgccgccactgacgaagagcagagcgagcagcaggagtcggcgctggtgacgtgctcccaggagagcaccctcggcgaggcgatcgaggcggcgacatcgaggcacgtgcaccggctgtgggtggtcgacgaggaagggctcttgcgtggggtcgtgtcgctcaccgacatcctccgggcagtgcgggaggccgcgctcggcgaggacctggagctgcacagcatcgtgccgtgagcccgtgggccgtgagtcgtgacgtccaagaacaagctcgtagctgtttctgcccatagtgtccgtccacctgtcgtgctcctgcagaggagggggaaaagggcgatcgagacgtgttggcgacggccgaccggcgaccgccgccgagctcgttttgccttgttgctttgtttgttatatggccctggctccgatccgggcttcgtatttcgttgacaggccttcatcgtgacgccttattttgcatcgttttattgatcaacc

SEQ ID NO: 9257 - DNA, 1314 bp, Zea mays
  Clone ID: LIB3137-027-D2_FLI
ctcattggaaggcccgcgactgcggctgcgcctgcgcccgaccaaacgtaggagacccatctcctctcttttctttccaagaaaagtcttctcttctctgtctcagcgccgacgcttcccaactccttccaatcgattcttcgtctcgtcctcgtgtaatccccagcttgccctcctcgctcttccctctcaaaaccctacgcctccctgaccaagctccggggacgaatggacggaggagccggcttccctggcacgccggtcccgcgctcgccggaggacgttttccgggactaccgcgcgcgccaggccggcctaatcagggcgctcaccaccgatgttgagaagttctacgtgatgtgcgacccagagaaggataatttatgtttatatggacttcccaatgagacatgggaagtaaacttgcctgctgaggaggttcctcctgaactcccagagccagctctcggaattaattttgctcgtgatgggatgaatgaaaaagattggctatcacttgttgcagtgcatagtgattcttggctaatgtctgttgcattttattttggagcaaggtttggattcgacaaggaatccaggaaacgtctcttcaccatgatcaataatcttcccagcatatatgaggttgtcacaggaacagccaagaaagagtccaaagaaaaaactcctaaaagcagcaacaagactaacaaatctggctcaaagccttcacgccaggtagaacccaactccagggtcccaaagatgccacctccaaaggacgaggagagtgaaggggaggaaggtgaaccacaggaagaccatgagagtgcgctgtgcggcgcatgtggcctaggttatgacgacttctggatctgttgcgacttatgcgagacatggttccacggcaagtgtgtcaagatcaccccaaataaagcggagcacatcaagcagtataagtgcccctcgtgcacaggaagcaagagggccaaggcttgattctatctatctacgatatagatatgaattgcggacaatgctccaagaaccgaggagcctttgacgagagttgtaagatgaatcttccgggtagggcagctaatagatttgaatacttcgtgtggatactgtcggcattggtgcttgagatgcctcaaaatatagtgtcagtactgatcaactgttaactgttgtagtttgtggggccctcaggcatctatgttctgtagtctactgtgtggtggtttagataccgtctatgccatttgtgatgaagcagtcgttttaaagttagatcccagtaatttccctact

SEQ ID NO: 9258 - DNA, 1665 bp, Zea mays
  Clone ID: LIB3137-061-C2_FLI
gacgaaaccctaggacttgagatccagcgcacggctcgggtcctcctcaccgttcccggcgatggaacggcggcaggagctctgcaggaacttccagcgcggcagctgcaagtacggatcgcactgcaggtttgtgcacgcctcctctcagcagcagcagcagcagcagcagcagcaggcgaagcccaacccgtttgggttcggcttagggagtaggcagcagcaacagcagcagtcttcgtttcgtgcgcagttccagcagcagcagcagcagaagcccaacccgtttggatttggagtgcaaggcggtgcggctgcacagtccagaaacgctcctggccaggcaaagccatttcaaaataaatgggtaagggacccctcagccccaacgaagcaacaggaagcggcacagccaccagcagcagcccacacctcctgtacagatcctgactcctgcaggcaacagattgccgaggattttaagaatgaaactccactctggaagcttacgtgttatgctcacctcaggagcggtccttgtgacatcacgggagatattagctttgaagagctgagagctaacgcgtatgagcaaggcaggcaagggcatcctctgcagtcaatagtagagggtgaaaaaaaattgaaaaatgcaaagctgacggactttaataatttcctgaacatgccacgtctatcggtatcacaaactccaagctttccaactgtggcttccttccctgaagtgaaaaataactcagcatttggggtttctcaaaataatggaccaccagtgtttagtagtttcagtcaaattggagtaacaactaatatgggacctgggtccagaactacaccaggagtcccaaccaatactctttttggtcaatctacccaaccaagccatccaacatttcctgcacctacttttggtcgttctgatatgaaatttggagtttcaggtccatttggaagccagatatcacaacaatcatctgggagttttcaaggttcaaacatgtccagttttggcaatttctcaaagcctcatgccagctaccagcagtccccttcctcctctagccatcacagagacattgataggcagtcacaagatttacttagtggaattgtggttcctacaagtgccacaaacgaagctcctgttgaggacaataaaaatgaaaatcaggatgatagtatctggttgaaggaaaaatggtcaattggagagattccgctgggtgaaccgccacagaggcacgttagtcatgtgttttagcaacattcttgtatttctgtgtcgtggaaccactgtcaagtcagcttcactgtctccttccatattgtcgggacaccatcttacaatttctcctccaggttcataaccataacacgtcaaattgggggcataaaatgcacctgaaatgctgattgggcagcgtagaaacttcttgtatcctgcatcacatactctgtctctattgttttcttgttagctccatgtacttcgtcacattcagggctcgtaatatcccggtttcttgttttagggtttgttgagtttagctgtgggttttaaaaagccgttgcagctgtgttttttttgcggaaattgtaccatacatggaagcagtagtctttgaagaagcggaattttggttc

SEQ ID NO: 9259 - DNA, 1839 bp, Zea mays
  Clone ID: LIB3137-033-A12_FLI
gtcttccccaccgaagcagggtgatgcggagggcgtcgccttcgctgtctccggcgaggggcccggcggtcttcgccgccgcggtcgtggtgtttctgccggtcttattccccgggttgttctcccctcttggccacgctttcccttctgtcttctcggagtggaatgcccctaagccaatgcatccttctcttttgaatgaggccttgcgatggacagctacagacggacaaaagaaagatctatggtcacccttgccatatcaggggtggaaaccatgcttaacgccatcagtttctcacaaattacctctggaaccaagtggatacatccaagtatttcttgatggtggattgaaccaacaaagaatggggatatgtgatgccattgcagttgcaaagattcttaatgctactcttgtgatcccacatcttgaagtaaaccctgtttggaaggattcaagctcatttgaagaaatttttgatgtggatcactttatcaactccctaaaagatgaagtttccattatcaaagtgcttccaaaagaattttcttggagcacaagagagtactatggcacaggcatccgtgctacaagaataaaaactgcacctcttcatgcctcagcaaattggtatttggagaatgtcagtcctatcctgcaaagctatgggattgttgcgatcgctcccttttctcaccgccttgcatttgatgatttgcctgtggatcttcaacgcttgcgttgtaaagttaacttccaagctctggtcttccgttctcacattatctcacttggagaaacacttgtgaagcgcttgaggtctccggtccgggttcattccagtaaatctatccatcaagttgtaggagacacaaatcaagctgaaaaatatgcagttttgcatctccgttttgataaggatatggctgcacattctgcatgtgactttggaggtggcagagctgaacagctagctcttgctaagtacaggcaagttatatggcaaggaagggtattaaattcacagctaactgatgaggagcttcggaacacaggacgctgcccattgaccccagaagagattgggctgttactggtagcccttggctttgacaacagaactcgactctatcttgcatctcacaaggtatatggtggagaagccaggatctctagcttgcgcaaactatttccgttgatggaggacaagaggagccttgcatctgaagatgaacttgctaatgttgaagggaaggcttctgttctagcagctcttgactattatatcagcatgcatagcgacattttcatatctgcatctcctggaaacatgcacaatgctttggtggctcaccgaagctatgagaacttgaagaccataaggccaaacatggcactgcttgggcgcacctttgcgaataagagcatggagtggccagagtttcagcaggttgtacaggcaggacacaaaggaagatacgggcaaatccggttgagaaaggcaacgcaatccatctacacttatcctgcacctgactgtatgtgccaaggataggctactggtttcaaaatttcagaaaaccaatcggttctgcagcaaatgaaggtcgaggatcgccgtctcaaatgttgcattgcggttagtacattccagctgccactagatatgcaagtttgatttttttgggacagctgctatgtactggatctcttctctctctctctctctctctctctctctctctctctctctctctcttcacaatacagtttggtgcagatgcagtttatagatattctcatattcgtggttgtgacgggtgttaagataaaaa

SEQ ID NO: 9260 - DNA, 2713 bp, Zea mays
  Clone ID: LIB3137-033-B6_FLI
cggacgcgtgggcgcgtcgcctcctcccttcccccaccccgccgccgccctcgcgtccgtccgtccgtgcctagttattagggttcggtcgccgccatggcgatcctctcggcgctcgccaccgaggtgctcatccccgtcgccgccgtcatcggcatcgccttcgccgtcgtgcagtgggtggtcgtgtcgcgcgtgaagctctccccggccgcgtccggcggcagcggcggcaaggccggctacgccgactccctcatcgaggaggaggaggggctcaacgaccacaacgtcgtcgtcaagtgcgccgagatccagaacgccatctccgaaggagcaacatcgtttcttttcaccgagtaccaatatgttggtatcttcatggctatcttcgctgttgtgatcttcctcttccttggttcggttgagggattcagcacgaagagccagccctgcacatatagcaaggacaagtactgcaagcctgcgctgttcactgcactctttagcactgtgtccttcttgcttggcgccatcacctctctggtctctggtttccttggcatgaagattgccacatatgcgaatgccagaactaccctggaagctaggaagggtgttggcaaggcttttatcactgctttccgctctggcgctgttatgggtttcctgcttgcatcaagtgggcttgtggttctgtacatcacaattaatgtatttaagttgtattacggtgatgactgggagggtctttttgagtccatcactggctatggtcttggtgggtcgtccatggctctcttcggaagagttggtggaggtatctacacaaaggctgctgatgttggtgccgatcttgttggaaaggtcgagaggaacattcctgaggatgatcctaggaacccagctgtgattgctgataatgttggtgacaatgttggtgacattgctggaatgggatctgatctctttgggtcatacgcagagtcttcttgtgctgcccttgttgttgcgtctatttcatctttcggaatcgaccatgatttcactgggatgtgctacccactccttgttagctctgttggtatcattgtctgcttgatcaccaccctttttgctactgatttctttgaagtcaaggctgtgaaagaaattgagcctgcacttaagaagcagctcatcatctccaccgtcctgatgacttttggtattgctctaatcagctggttggcccttccagctaagttcaccatctacaacttcggtactcagaaggaggtttccaactggggtttgttcttctgtgtttcaattggtctgtgggctggtttgattattggttttgtcacagaatactacactagcaatgcatacagtcctgtgcaagatgttgcggattcgtgcagaactggtgctgccactaatgtcatttttggtcttgctcttggatacaagtcggttatcatcccgattttcgctattgctgttagcatctatgtcagtttctccattgctgcgatgtacggcattgcagttgccgctcttggtatgctgagcacaatcgcaactggtcttgctattgatgcttatggtcccatcagtgacaatgctggtggtattgctgagatggctggaatgagccacagaatccgtgagagaactgatgctcttgatgctgctggcaacacaactgctgctattggaaaggggtttgccattggttcagctgctcttgtgtccctggcgctttttggtgcctttgtcagcagagctggagtgaaggtcgtcgacgtcctctcccccaaggttttcattggtttgattgttggagccatgcttccgtactggttctctgccatgaccatgaagagtgttggaagcgccgccctgaagatggtggaggaggtccgcaggcagttcaacaccattcctgggttgatggagggaacagccaagcccgactacgcaacctgtgtgaagatctccactgatgcttccatcaaggagatgattcctccgggcgctctggtcatgctgactcccctcatcgttggaaccctcttcggcgtcgagactctctccggcgttcttgctggtgcccttgtttctggagtgcagatcgccatctctgcttccaacaccggcggtgcatgggacaacgccaagaagtacatcgaggctggtgccagcgagcacgcgaggacccttggccccaaggggtctgactgccacaaggccgctgtgatcggtgacaccatcggtgaccccctgaaggacacctccggcccgtccctcaacatcctcatcaagctcatggccgtggagtccctcgtgtttgcccccttctttgccacccagggtggcctgctcttcaagtacctgtaaaagggacaacaccaagcacacagcagaagtatacgatctcccgaccgaccgtggacaatatcgaataactcctgccaaatcgccagttcttttgtgtactgtgcgctagccgccgcctagctgcactgctgtattttttgtttcaggattgctgctgctgttcgcacattcaatctttggggcctcccggagccgccggaggcgcgttttactgttagccttactactcttactccctgtagctccacgtagaagagaaccgatgtcctgcgtctggcaatttttcttagtccctcgatgatggcgatgatgctgaaacctttttttg

SEQ ID NO: 9261 - DNA, 437 bp, Zea mays
  Clone ID: LIB3137-001-Q1-K1-B9.F2
agacattaaaccatttacttgatccaaagattacacggcaagttcacctccaatagcgggtgaactgagatttcggcacctactaaagatatatagcaagtacaacaaaataagctgtaggggaatgctgggtctcaataaacagatcacatcaacatcaacaacaaaatgggggtagtaatccacaagcaggttgcaatcgccaactagccggatgcatagtgcacagacgacggaagaacttgaaacaacatcaaactgaacttgctgcggaatcacaggaacaccaaagctggaaatccggacagacttagacgggaccgaaggacctcggcatgcttggtaggacacaagagggcacaaaccaccgtcgtcgacgactacgacatgtacactagcttacatatttggttggggctttggaattgggccgtgcc

SEQ ID NO: 9262 - DNA, 279 bp, Zea mays
  unsure (1)..(279): unsure at all n locations; Clone ID: LIB3137-001-Q1-K1-B9.F7
gagtaccgaaccccccacgtcgaccgctcggccgctttacgcaagaagaccaacaacgctgctcccggtaattcactacaccatgaccntttctcaggagaacatatttatctccccgaaatactgacacttgcagttagagggaaaaaatatagagagaagtaaaaaaaaaaagattgatgtttgattttaccaatgctgcaacaagaaacagtggatcgaatcgaaatgtgttgttaggcttgcaactatatatgcagattcttagataagaagaat

SEQ ID NO: 9263 - DNA, 326 bp, Zea mays
  Clone ID: LIB3137-001-Q1-K1-B9.R2
cccacgcgtccggaccgagtgccccttcgcgcacccgggggagaaggcgcggcggcgcgacccgcgcaggtaccactactcgggcgccgcctgcccggacttccgcaagggcgggtgcaggcgcggcgacgcctgcgacttcgcgcacggcgtcttcgagtgctggctccacccggcgcgctaccgcacccagccctgcaaggacggcacggactgccgacgacgcgactgcttcttagcgcacaccccggaccagctgagggtgctaccgcccacgccgtagtagtctagcgtcagtcccaggggtcgcccacgttctgccccag

SEQ ID NO: 9264 - DNA, 587 bp, Zea mays
  unsure (1)..(587): unsure at all n locations; Clone ID: LIB3137-001-Q1-K1-B9.R6
acaggaacacccgagctggaaatccggccagtcttcgtcgtcaccgntcggccctcgccatgtcttcgcagcacacaagagggcacaaaccaccgccgccgccgcctacgacatctacacttccttacatattttcttttccttggaaattttccgctacctcaagaaccccaaaacaaatccaccccctagcatcaaccctccacccaaccagccgagaatattcacagggcgatagatatctatgtacagggtaattagcggaattatctggaaccaaaggggaacatttttttatgccatccttctctgttacggcttaccagttaccaccaccttttttctccactgctatggcagcaccgacccgccgccgccgccgtcttagttgatgaggtcggagacccacccgacgtcggggccaccggttccggcagctgggtaacaggaaacagcgccctccctgctgagccgctcgaacaccttggcgcggagggcacgcccggactccaccctcttcacgggcttcttcgtcggcgccaaagctgacgtcaagcggcttccagttgggcatgttagcccgaggc

SEQ ID NO: 9265 - DNA, 554 bp, Zea mays
  unsure (1)..(554): unsure at all n locations; Clone ID: LIB3137-041-Q1-K1-C9.R6
agacacactggatactgcacgagtacctgcctcgcggacgtcgaccgctcggccgccgcacgcaagaagaccacaacgcgctcagggtaattcactacaccatgacctttctcaggagaacatatttatctccccgaaatactgacacttgcagttagagggaaaaaatatagagagaagtaaaaaaaaaaagattgatgtttgattttaccaatgctgcaacaagaaacagtggatcgaatcgaaatgtgttgttaggcttgcaactatatatgcagattcttagttaagaggaattgaaaaaggctctagagacatgtaaagcgcgggcggcgtggcgtcacggctcacgcacgccgcgatagagacaagcgcggcaaccatggtccatggccggggcagagccgccgcctgatcttatcgcccgcgcacaaattaccacatgcgcggcgcgcaccggatcccgacgtcacgtcgacctcatctccaagcctcttccaacacctccaaatggtactggatgactgngtgctttgccggatctcaacaagaag

SEQ ID NO: 9266 - DNA, 471 bp, Zea mays
  Clone ID: LIB3137-061-Q1-K1-A1-F4B
gtccccgcgtacgatcgcgccatcgtgcccctggtgcgctcctacaccgggaggccgcgcgggttcacgcagctgcagcgcatgggcatcggcctcgtcgtctccatcttctccatggtggcggcgggcgtgctggacatcgtgcggctgcgcgccatcgcgcggcacggcctgtacggcgagaacgacatcgtgcccatctccatcttctggcagataccgcagtacttcatcatcggatgcgcggaggtgttcaccttcgtggggcagctggagttcttctacgaccaggcgcccgacgccatgaggagcatgtgctccgcgctgtcgctcaccaccgtggcgctcggcaactacctgagcacggacctggtgaccatcgtcacccacatgaccaccaggcacggacgcatcgggtggatcccggtgaacctgaaccgtggccaccttaactactttgtctggctgctc

SEQ ID NO: 9267 - DNA, 592 bp, Zea mays
  Clone ID: LIB3137-013-H10-A12P1-A
gcggtgaacatcctggaatagcctcgatggttccagacggcgaacgaacggggtgaggaaatgtttcccaccggcctgctgtccattgctcctagaagcatcgcgtcgtggatcggctttctccgtgctccacctcgtcggcctcatgccccgtagccccgactccccatctgccgcctccacctcatgggccgccgggtccaccctcgccgtccagcttggcgacatctttaccgtggtggcgacgagctccgcctcctgcaccccctccgcctcctggccccttccgctgaggcccgcgtcggcgcgttcctgccatagtcggcaaccaataggagcgtaaaactggagctagggattgaagctgttgcaggtacatgtcatatataaatggacatgggcaggcactcccgctgagggtgcttcttggcttcgtctgtagaggcttgctgatatttggcataggatattgttaatttgggggtatgatgcatggattatttgagatctttgagcagataaagcaatcattatcatctccaagggagggtattgatttatggccgtgattccccttctccagcaaagccat

SEQ ID NO: 9268 - DNA, 498 bp, Zea mays
  Clone ID: LIB3137-013-H10-A1P1+A
gggcaggcactcccgctgagggtgcttcttggcttcgtctgtagaggtttgctgatatttggcataggatattgttaatttgtgggtatgatgcatggattatttgagatctttgagcagataaagcaatcattatcatctcaaagggagggtattgatttcatggccgtgattccccctctcccagtcaaagccatccaagccgcaattacttcagggacagggtgttcactggggctagaaggattctgtttttattgcacgacacatgacaacatatccaagtagtccttgattgatttagcagcagggagtaagcgtcttgctaaaagtggctccacagcgatcgtcttgctaaaagtggttgtacaggtgatcgcttgaaggaaactcaggttcaagaaggacacatgagtatccgagaaaaaactcctcaaatcctggaatagcctcgatggttccagacggcgaacgaacggggtgaggaaaagaacccac

SEQ ID NO: 9269 - DNA, 347 bp, Zea mays
  Clone ID: LIB3137-013-H10-A7P1-A
aggcggagggggtgcaggaggcggagctcgtcgccaccacggtaaagatgtcgccaagctggacggcgagggcggacccggcggcccatgaggtggaggcggcagatggggagtcggggctacggggcatgaggccgacgaggtggagcacggagaaagccgatccacgacgcgatgcttctaggagcaatggacaacgggccggggggtttgtttactaaccccggtcagtcgccggttggaaccatcgaggctattccaggatttgaggagttttttctcggatacttatgggcccatcttgaacctgagtttacttcaagcgatcacctggacaacccactttt

SEQ ID NO: 9270 - DNA, 378 bp, Zea mays
  Clone ID: LIB3137-013-H10-B10P1-A
aagagggaggcagtgttaggaagacgcttacagagtggtggtaaaacaagcagggtttttttggatatgcagccatcgagcagtgcaagggtggacaggaggcgcttcaaccccagtgaacaccctgtccctgaaggaatgcggcttggatggctttgactgggagagggggaatcacggccatgaaatcaataccctccctttgagatgataatgattgctttatctgctcaaagatctcaaaaaatccatgcatgatacccacaaattaacaatagcgtattgccaaatataagcaggcctgtacagacgaagccaagaagcaccctcagggggagggctgggccatagccattaataaaatgacatggacctgca

SEQ ID NO: 9271 - DNA, 616 bp, Zea mays
  unsure (1)..(616): unsure at all n locations; Clone ID: LIB3137-013-H10-B12P1-A
accgcggggaacacagacgaagccaagaagcaccctcagcgggagtgcctgcccatgtccatttatatatgacatgtacctgcaacagcttcaatccctagctccagttttacgctcctattggttgccgactatggcaggaacgcgccgacgcgggcctcagcggaaggggccaggaggcggagggggtgcaggaggcggagctcgtcgccaccacggtaaagatgtcgccaagctggacggcgagggtggacccggcggcccatgaggtggaggcggcagatggggagtcggggctacggggcatgaggccgacgaggtggagcacggagaaagccgatccacgacgcgatgcttctaggagcaatggacagcaggccggtgggttcttttcctcaccccgttcgttcgccgtctggaaccatcgaggctattccaggatttgaggagttttttctcggatacttatgtgtccttcttgaacctgagtttccttcaagcgatcacctgtacaaccacttttagcaagacgatcgctaagttcacctgtggagccacttttagcaagacgcttactccctgctgctaaatcaatcaaaggactactntggatatg

SEQ ID NO: 9272 - DNA, 205 bp, Zea mays
  Clone ID: LIB3137-013-H10-B4P1+A
accgaacggcacgagaaaaggggaaggaacgaggagacgcgatttttttgaaacccaggtccaagaaggacacagaggggggggggaggaggcttctcaaaccctgcaacaccctccacggttccagacggcgaacgaacggggtgaggaaaagaacccaccggcctgctgggcattgctcctagaagcatagcggcagggagcg

SEQ ID NO: 9273 - DNA, 617 bp, Zea mays
  Clone ID: LIB3137-013-H10-B6P1+A
ggctggctgatatttggcataggatattggtaattcgagggtatgatgttaggattatttgagatctttgagcagataaagcaatcattatcatctcaaagggagggtattgatttcatggccgtgattccccctctcccagtcaaagccatccaagccgcaattacttcagggacagggtgttcactggggctagaaggattctgtttttattgcacgacacatgacaacatatccaagtagtccttgattgatttagcagcagggagtaagcgtcttgctaaaagtggctccacagcgatcgtcttgctaaaagtggttgtacaggtgatcgcttgaaggaaactcaggttcaagaaggacacatgagtatccgagaaaaaactcctcaaatcctggaatagcctcgatggttccagacggcgaacgaacggggtgaggaaaagaacccaccggcctgctgtccattgctcctaaaagcatcgtgtcgtggatcggctttttccgtgctccacctcgtcggcctcatgccccgtagccccgactccccaatctgccgcctccacctaatgggccgcccggtccaccctcgccgtccaagttggcgacatctttac

SEQ ID NO: 9274 - DNA, 595 bp, Zea mays
  Clone ID: LIB3137-013-H10-B7P1-A
ccacgacgcgatgcttctaggagcaatggacagcaggccggtgggttctttttttcaccccgttcgttcgccgtctggaaccatcgaggctattccaggatttgaggagttttttctcggatacttatgtgtccttcttgaacctgagtttccttcaagcgatcacctgtacaaccacttttagcaagacgatcgctaagttcacctgtggagccacttttagcaagacgcttactccctgctgctaaatcaatcaaggactacttggatatgttgtcatgtgtcgtgcaataaaaacagaatccttctaaccccagtgaacaccctgtccctgaagtaattgcggcttggatggctttgactgggagagggggaatcacggccatgaaatcaataccctccctttgagatgataatgattgctttatctgctcaaagatctcaaataatccatgcatcatacccacaaattaacaatatcctatgccaaatatcagcaagcctctacagacgaagccaagaagcaccctcagcgggagtgcctgcccatgtccatttatatatgacatgtacctgcaacagcttcaatccctag

SEQ ID NO: 9275 - DNA, 616 bp, Zea mays
  Clone ID: LIB3137-013-H10-C11P1-A
gtgaacatatataaatggacatgggcaggcactcccgctgagggtgcttcttggcttcgtttgtagaggcttgctgatatttggcataggatattgttaatttgtgggtatgatgcatggattatttgagatctttgaacagataaagcaatcattatcatctcaaagggagggtattgatttcatggccgtgattccccctctcccagtcaaagccatccaagccgcaattacttcagggacagggtgttcactggggctagaaggattatgtttttattgcacgacacatgacaacatatccaagtagtccttgattgatttagcagcagggagtaagcgtcttgctaaaagtggctccacaggtgaacttagcgatcgtcttgctaaaagtggttgtacaggtgatcgcttgaaggaaactcaggttcaaggacacatgagtatccgagaaaaaactcccaagaaatcttcccaaaactgaatgttgccttctaccatcaacaacctttgaagttctcgggtgtttatttttgtatgttctctacaattatgtgtatatatatatatattcatccttttcaagacaatttttataaatataacaacttgattt

SEQ ID NO: 9276 - DNA, 390 bp, Zea mays
  Clone ID: LIB3137-013-H10-C1P1+A
agaacaggttccagacggcgaacgaacggggtgaggaaaagaacccaccggcctgctgtccatttttcctagaagcatcgcgtcgtggatcgggtttctgcgtgctccacctcgtcggcctcatgccccgtagccccgactccccatctgccgcctgcacctcatgggccgccgggtccaccctcgccgtccagcttggcgacatctttaccgtggtggcgacgagctccgcctcctgcaccccctccggctcctggccccttccgctgaggcccgcgttggcgcgttcctgccatagtcggcaaccaatacgagcgtaaaactggagctagggattgaagctgttgcaggtacatgtcatatataaatggacatgggcaggcactcccg

SEQ ID NO: 9277 - DNA, 316 bp, Zea mays
  Clone ID: LIB3137-013-H10-C2P1+A
acctcgagaacacttgattgatttagcagcagggagtaagcgtcttgctaaaagtggctccacaggtgatcttagcgatcgtcttgctaaaagtggttgtacaggtgatcgcttgaaggaaactcaggttcaaggacacatgagtatccgagaaaaaactcccaagaaatcttcccaaaactgaatgttgccttctaccatcaacaacctttgaagttctcgggtgtttatttttgtatgttctctacaattatgtgtatatatatatatattcatccttttcaagacaatttttataaatataacaacttgattt

SEQ ID NO: 9278 - DNA, 172 bp, Zea mays
  Clone ID: LIB3137-013-H10-C4P1+A
taacgcaatcattatcatcttaaagggagggtattgatttcatggccgtgattccccctcttccagtcaaagccatccaagccgcaattacttcagggacagggtgttcactgggcttagaacgattctgtttttattgcccgacacatgacaacatatccaagcattcctt

SEQ ID NO: 9279 - DNA, 650 bp, Zea mays
  Clone ID: LIB3137-013-H10-C5P1+A
cagctgcaatccctagttacagttttacgctcctatggtcagccgactatggcaggaacgcgccgacgctggccttagcggaaggggcgaggaggctgatggggtgcaagaggcggagctcgtcgccaccacggtaaagatgtcgccaagctggacggcgagggtggacccggcggcccatgaggtggaggcggcagatggggagtcggggctacggggcatgaggccgacgaggtggagcacggagaaagccgatccacgacacgatgcttctaggagcaatggacagcaggccggtgggttcttttcctcaccccgttcgttcgccgtctggaaccatcgaggctattccaggatttgaggagttttttctcggatactcatgtgtccttcttgaacctgagtttccttcaagcgatcacctgtacaaccacttttagcaagacgatcgctgtggagccacttttagcaagacgcttactccctgctggtaaatcaatcaaggactacttggatatgttgtcatgtgtcgtgcaataaaaacagaatccttctaggcccagagaacacccttgtcctgaagtaattgcggcttggatggctttgactgagagagggggaatcacgggcatgaaatcaatacccttccc

SEQ ID NO: 9280 - DNA, 319 bp, Zea mays
  Clone ID: LIB3137-013-H10-C6P1+A
aaatcaagttgttatatttataaaaattgtcttgaaaaggatgaatatatatatatatacacataattgtagagaacatacaaaaataaacacccgagaacttcaaaggttgttgatggtagaaggcaacattcagttttgggaagatttcttgggagttttttctcggatactcatgtgtccttgaacctgagtttccttcaagcgatcacctgtacaaccacttttagcaagacgatcgctaagttcacctgtggagccacttttagcaagacgcttactccctgctgctaaatcaatcaaggactacttggatatg

SEQ ID NO: 9281 - DNA, 559 bp, Zea mays
  Clone ID: LIB3137-013-H10-C7P1-A
ggggaacacacccagcgaggctatgacaagattgtgaggagttatttgtcggctacttattgtgtcttcttgaacctgagtttccttcaagcgagtatctgtacaaccacttttagcgagactatcgctaacttcacctgtggagccacttttaacatgacgcttactccctgctgctaaatcaatcaaggactacttggatatgttgtcatgtgtcgtgcaataaaaacagaatccttctaaccccagtgaacaccctgtccttgataaaattgcgcgttggatggctttgactgggagagggggaatcacggccatgaaatcaataccctgctttagagatgataatgatagctttatctgctcaaagatctaaaattttccatgcatcatacccacaaattaacaactatctttgccaaatatcaggaagcctttacagacgaagccaagaaacccccttagcgggagtgcctgcccatgtccatttatatatgacgtgtacctgcaacagattcaattcctagctccagttttacgcttctattgctggacggct

SEQ ID NO: 9282 - DNA, 708 bp, Zea mays
  unsure (1)..(708): unsure at all n locations; Clone ID: LIB3137-013-H10-C8P1-A
aacactcttagcaagacgatcgctaagttcacctgtggagccacttttagcaagatttttactccctgctgctaaatcaatcaaggactacttggatatgttgtcatgtgtcgtgcaataaaaacataatccttctagccccagtgaacaccctgtccctgaagtaattgcggcttggatggctttgactgggagagggggaatcacggccatgaaatcaataccctccctttgagatgataatgattgctttatctgttcaaagatctcaaataatccatgcatcatacccacaaattaacaatatcctatgccaaatatcagcaagcctctacagacgaagccaagaagcaccctcagcgggagtgcctgcccatgtccatttatatatgacatgtacctacaacagcttcaatccctagctccagttttacgctcctattggttgccgactatggcaggaacgcgccgacgcgggcctcagcggaaggggcgaggaggcggaggagctgcatgaggcggagctcgtcgccaccacggtaaagatgtcgccaagctggacggcgagggtggacccggcggcccatgaggtggaggcggcagatggggagtcggtgctacggngcatgaggccgacgaggtggagcacggagaaagccgatccacgacacgatgcttctaggagcaatggacagcaggccggtgggt

SEQ ID NO: 9283 - DNA, 279 bp, Zea mays
  Clone ID: LIB3137-013-H10-D12P1-A
acattatattaaggggggtgttatggcgatcctttttaagctcccgttctaggcgggcactgggctaagattgttatgcacaaactatcatgcttgttgatacaagagaagcttgtaaggtaccacgtttgtaaaggtgcagacgtgagaatagtaaagcctattcgaaactctaatctgatgctatggtcaacgacacggggggaaaaccacggcgtgcatgttaaatggcggatgctttcgctcactgcgctatgccgagccgatccattgcctcac

SEQ ID NO: 9284 - DNA, 127 bp, Zea mays
  Clone ID: LIB3137-013-H10-D1P1+A
ctagctgaacaggcaagaatgacccttgatgccatgaagcggaggcatataacatgaactgtgttctacatcgcatgatgccactaacgagatatacggacaaagccgcaccacgaactgatgcttg

SEQ ID NO: 9285 - DNA, 443 bp, Zea mays
  Clone ID: LIB3137-013-H10-D2P1+A
aaatcaagttgttatatttataaaaattgtcttgaaaaggatgaatatatatatatatacacataattgtagagaacatacaaaaataaacacccgagaacttcaaaggttgttgatggtagaaggcaacattcagttttgggaagatttcttgggagttttttctcggatactcatgtgtccttgaacctgagtttccttcaagcgatcacctgtacaaccacttttagcaagacgatcgctaagttcacctgtggagccacttttagcaagacgcttactccctgctgctaaatcaatcaaggactacttggatatgttgtcatgtgtcgtgcaataaaaacataatccttttagccccagtgaacaccctgtccctgagtaattgcggcttggatggctttgactgggagagggggaatcacggccatgaaatcaatacc

SEQ ID NO: 9286 - DNA, 116 bp, Zea mays
  Clone ID: LIB3137-013-H10-D3P1+A
gaacgcgccgacgcgggcctcagtggagggggccagaaggcggcgtgtttgcaggaggcggagctcggcgccaccacggtcggacgcgtgggcagacgcgtggtcttactcgtggg

SEQ ID NO: 9287 - DNA, 716 bp, Zea mays
  unsure (1)..(716): unsure at all n locations; Clone ID: LIB3137-013-H10-D6P1+A
ttgacagaaatgattgctttatctgctcaaagatctcaaataatccatgcatcatacccactatgtaacaatatcctatgccaaatatcagcaagcctctacagacgaagccaagaagcaccctcagcgggagtgcctgcccatgtccatttatatatgacatgtacctgcaacagcttcaatccctagctccagttttacgctcctattggttgccgactatggcaggaacgcgccgacgcgggcctcagcggaaggggccaggaggcggagggggtgcaggaggcggagctcgtcgccaccacggtaaagatgtcgccaagctggacggcgagggtggacccggcggcccatgaggtggaggcggcagatggggagtcggggctacggngcatgaggccgacgaggtggagcacggagaaagccgatccacgacgcgatgcttctaggagcaatggacagcaggccggtgggttcttttcctcaccccgttcgttcgccgtctggaaccatcgaggctattccaggatttgaggagttntttctcggatacttatgtgtccttcttgaacctgagtttccttcaagcgatcacctgtacaaccacttttagcaagacgatcgctaagttcacctgtggagccacttttagcaagacgcttactccctgctgctaaatcaatcaaggactaacttggatatgttgtcatgtgtcg

SEQ ID NO: 9288 - DNA, 173 bp, Zea mays
  Clone ID: LIB3137-013-H10-D7P1-A
gccaccgcggtgaacatatatcagagtgcatggccagccactcgcgctgcgggtgctatgtgagttattttactcaggctgcgcgctatgctgcacacgatatgcttactgcgcggatgtggtgcgtgatttatagcggatctcagacacacaggcaacagttatgaccatga

SEQ ID NO: 9289 - DNA, 568 bp, Zea mays
  Clone ID: LIB3137-013-H10-E12P1-A
accgcggtgaacagttgttgatggtagaaggcaacattcagttttgggaagatttcttgggagttttttctcggatactcatgtgtccttgaacctgagtttccttcaagcgatcacctgtacaaccacttttagcaagacgatcgctaagttcacctgtggagccacttttagcaagacgcttactccctgctgctaaatcaatcaaggactacttggatatgttgtcatgtgtcgggcaataaaaacataatccttctagccccagtgaacaccctgtccctgaagtaattgcggcttggatggctttgactgggagagggggaatcacggccatgaaatcaataccctccctttgagatgataatgattgctttatctgttcaaagatctcaaataatccatgcatcatacccacaaattaacaatatcctatgccaaatatcagcaagcctctacagacgaagccaagaagcaccctcagcgggagtgcctgcccatgtccatttatatatgacatgtacctacaacagcttcaatccctagctccagttttacgctcctattg

SEQ ID NO: 9290 - DNA, 522 bp, Zea mays
  Clone ID: LIB3137-013-H10-E5P1+A
cccacgcgtccgcccacgcgtccgcccacgcgtccgaccgtggtggcgacgagctccgcctcctgcaccccctccgccttctggccccttccgctgaggcccgcgtcggcgcgttcctgccatagtcggcaaccaataggagcgtaaaactggagctagggattgaagctgttgcaggtacatgtcatatataaatggacatgggcaggcactcccgctgagggtgcttcttggcttcgtctgtagaggcttgctgatatttggcataggatattgttaatttgtgggtatgatgcatggattatttgagatctttgagcagataaagcaatcattatcatctcaaagggagggtattgatttcatggccgtgattccccctctcccagtcaaagccatccaagccgcatttacttcaaggacagggtgttcactggggttagaaggattctgtttttattgcacgacacatgacaacatatccaagtagtccttgattgattagcagcagggagtaagcgt

SEQ ID NO: 9291 - DNA, 124 bp, Zea mays
  unsure (1)..(124): unsure at all n locations; Clone ID: LIB3137-013-H10-E6P1+A
cctngagaacaacaacctttgaagttctcgggtgtttatttttgtatgttctctacaattatgtgtatatatatatatattcatccttttcaagacaatttttataaatataacaacttgattt

SEQ ID NO: 9292 - DNA, 536 bp, Zea mays
  Clone ID: LIB3137-013-H10-E8P1-A
aaatcaagttgttatatttataaaaattgtcttgaaaaggatgaatatatatatatatacacataattgtagagaacatacaaaaataaacacccgagaacttcaaaggttgttgatggtagaaggcaacattcagttttgggaagatttcttgggagttttttctcggatactcatgtgtccttgaacctgagtttccttcaagcgatcacctgtacaaccacttttagcaagacgatcgctaagttcacctgtggagccacttttagcaagacgcttactccctgctgctaaatcaatcaaggactacttggatatgttgtcatgtgtcgtgcaataaaaacataatccttctagccccagggaacaccctgtccctgaagtaattgcggcttggatggctttgactgggagagggggaatcacggccatgaaatcaatacccctcctttgagatgataatgattgctttatctgttcaaagatcttaaataatccatgcattatacccacaaattaacaatatcctatggcaa

SEQ ID NO: 9293 - DNA, 704 bp, Zea mays
  unsure (1)..(704): unsure at all n locations; Clone ID: LIB3137-013-H10-F11P1-A
aacacanggactacttggatatgttgtcatgtgtcgtgcaataaaaacataatccttttagccccagtgaacaccctgtccctgaagtaattgcggcttggatggctttgactgggagagggggaatcacggccatgaaatcaataccctccctttgagatgataatgattgctttatctgttcaaagatctcaaataatccatgcatcatacccacaaattaacaatatcctatgccaaatatcagcaagcctctacagacgaagccaagaagcaccctcagcgggagtgcctgcccatgtccatttatatatgacatgtacctacaacagcttcaatccctagctccagttttacgctcctattggttgccgactatggcaggaacgcgccgacgcgggcctcagcggaaggggcgaggaggcggagggggtgcaggaggcggagctcgtcgccaccacggtaaagatgtcgccaagctggacggcgagggtggacccggcggcccatgaggtggaggcggcagatggggagtcggggctacggggcatgaggccgacgaggtggagcacggagaaagccgatccacgacacgatgcttctaggagcaatggacagcaggccggtgggttcttttcctcaccccgttcgttcgccgtctggaaccatcgaggctattccaggatttgaggagttttttctcg

SEQ ID NO: 9294 - DNA, 137 bp, Zea mays
  Clone ID: LIB3137-013-H10-F12P1-A
aacagttgccgactatggcaggaacgcgccgacgcgggcctcagcggaaggggccattttgcggagggggtgcaggaggcggagctcgtcgccaccacggtcggacgcgtgggcggacgcgtgggcggacgcgtggg

SEQ ID NO: 9295 - DNA, 235 bp, Zea mays
  Clone ID: LIB3137-013-H10-F1P1+A
tcttgctaaaagcggttgtacaggtgatcgcttgaaggaaactcatgctcaaggacacatgagtatccgagaaaaaacttccattaaatcttcccaaaactgaatgttgccttctaccatcaacaacctttgaagttctcgggtgtttatttttgtatgttctctacaattatgtgtatatatatatatatccatccttttcaagacaatttttataaatataacatcttgattt

SEQ ID NO: 9296 - DNA, 610 bp, Zea mays
  unsure (1)..(610): unsure at all n locations; Clone ID: LIB3137-013-H10-F2P1+A
aaatcaagttgttatatttataaaaattgtcttgaaaaggatgaatatatatatatatacacataattgtagagaacatacaaaaataaacacccgagaacttcaaaggttgttgatggtagaaggcaacattcagttttgggaagatttcttgggagttttttctcggatactcatgtgtccttgaacctgagtttccttcaagcgatcacctgtacaaccacttttagcaagacgatcgctaagttcacctgtggagccacttttagcaagacgcttactccctgctgctaaatcaatcaaggactacttggatatgttgtcatgtgtcgtgcaataaaaacataatccttctagccccagtgaacaccctgtccctgaagtaattgcggcttggatggctttgactgggagagggggaatcacggccatgaaatcaataccctccctttgagatgataatgattgctttatctgttcaaagatctcaaataatccatgcatcatacccacaaattaacaatatcctatgccaaatatcagcaagcctctacagacgaagccaagaagcaccctcagcgggagtgcctgcccatgtncatttatatat

SEQ ID NO: 9297 - DNA, 287 bp, Zea mays
  Clone ID: LIB3137-013-H10-F5P1+A
cagggagtaagcgtcttgctaaaagtggctccacaggtgtttttagcgatcgtcttgctaaaagtggttgtacaggtgatcgcttgaaggaaactcaggttcaaggacacatgagtatccgagaaaaaactcccaagaaatcttcccaaaactgaatgttgccttctaccatcaacaacctttgaagttctcgggtgtttatttttgtatgttctctacaattatgtgtatatatatatatattcatccttttcaagacaatttttataaatataacaacttgattt

SEQ ID NO: 9298 - DNA, 675 bp, Zea mays
  unsure (1)..(675): unsure at all n locations; Clone ID: LIB3137-013-H10-F6P1+A
caataggagcgtaaaactggagctagggattgaagctgttgcaggtacatgttttatataaatggacatgggcaggcactcccgctgagggtgcttcttggcttcgtctgtagaggcttgctgatatttggcataggatattgttaatttgtgggtatgatgcatggattatttgagatctttgagcagataaagcaatcattatcatctcaaagggagggtattgatttcatggccgtgattccccctctcccagtcaaagccatccaagccgcaattacttcagggacagggtgttcactggggttagaaggattctgtttttattgcacgacacatgacaacatatccaagtagtccttgattgatttagcagcagggagtaagcgtcttgctaaaagtggctccacaggtgaacttagcgatcgtcttgctaaaagtggttgtacaggtgatcgcttgaaggaaactcaggttcaagaaggacacataagtatccgagaaaaaactcctcaaatcctggaatagcctcgatggttccagacggcgaacgaacggngtgaggaaaagaacccaccggcctgctgtccattgctcctagaagcatcgcgtcgtggatcggctttctccgtgctccacctcgtcggcctcatgccccgtagccccgactcccca

SEQ ID NO: 9299 - DNA, 706 bp, Zea mays
  Clone ID: LIB3137-013-H10-F7P1-A
cggagaacaaagctcacctgtggagccacttttagcaagacgcttactccctgctgctaaatttatcaaggactacttggatatgttgtcatgtgtcgtgcaataaaaacataatccttctagccccagcgaacaccctgtccctgaagtaattgcggcttggatggctttgactgggagagggggaatcacggccatgaaatcaataccctccctttgagatgataatgattgctttatctgttcaaagatctcaaataatccatgcatcatacccacaaattaacaatatcctatgccaaatatcagcaagcctctacagacgaagccaagaagcaccctcagcgggagtgcctgcccatgtccatttatatatgacatgtacctacaacagcttcaatccctagctccagttttacgctcctattggttgccgactatggcaggaacgcgccgacgcgggcctcagcggaaggggcgaggaggcggagggggtgcaggaggcggagctcgtcgccaccacggtaaagatgtcgccaagctggacggcgagggtggacccggcggcccatgaggtggaggcggcagatggggagtcggggctacggtgcatgaggccgacgaggtggagcacggagaaagccgatccacgacacgatgcttctaggagcaatggacagcaggccggtggggtttttttcttacc

SEQ ID NO: 9300 - DNA, 703 bp, Zea mays
  Clone ID: LIB3137-013-H10-G10P1-A
aacagaacgaacggggtgaggaaaagaacccaccggcctgctgtccattgctcctatttgcatcgcgtcgtggatcggctttctccgtgctccacctcgtcggcctcatgccccgtagccccgactccccatctgccgcctccacctcatgggccgccgggtccaccctcgccgtccagcttggcgacatctttaccgtggtggcgacgagctccgcctcctgcaccccctccgcctcctggccccttccgctgaggcccgcgtcggcgcgttcctgccatagtcggcaaccaataggagcgtaaaactggagctagggattgaagctgttgcaggtacatgtcatatataaatggacatgggcaggcactcccgctgagggtgcttcttggcttcgtctgtagaggcttgctgatatttggcataggatattgttaatttgtgggtatgatgcatggattatttgagatctttgagcagataaagcaatcattatcatctcaaagggagggtattgatttcatggccgtgattccccctctcccagtcaaagccatccaagccgcaattacttcagggacagggtgttcactggggctagaaggattctgtttttattgcacgacacatgacaacatatccaagtagtccttgattgatttagcagcagggagtaagcgtcttgctaaaagtggctccacag

SEQ ID NO: 9301 - DNA, 693 bp, Zea mays
  Clone ID: LIB3137-013-H10-G11P1-A
aacactggaaggaaactcaggttcaagaaggacacatgagtatccgagaaaaaacttttcaaatcctggaatagcctcgatggttccagacggcgaacgaacggggtgaggaaaagaacccaccggcctgctgtccattgctcctagaagcatcgtgtcgtggatcggctttctccgtgctccacctcgtcggcctcatgccccgtagccccgactccccatctgccgcctccacctcatgggccgccgggtccaccctcgccgtccagcttggcgacatctttaccgtggtggcgacgagctccgcctcctgcaccccctccgcctcctcgccccttccgctgaggcccgcgtcggcgcgttcctgccatagtcggcaaccaataggagcgtaaaactggagctagggattgaagctgttgtaggtacatgtcatatataaatggacatgggcaggcactcccgctgagggtgcttcttggcttcgtctgtagaggcttgctgatatttggcataggatattgttaatttgtgggtatgatgcatggattatttgagatctttgaacagataaagcaatcattatcatctcaaagggagggtattgatttcatggccgtgattccccctctcccagtcaaagccatccaagccgcaattacttcagggacagggtgttcactggggctagaa

SEQ ID NO: 9302 - DNA, 655 bp, Zea mays
  unsure (1)..(655): unsure at all n locations; Clone ID: LIB3137-013-H10-G4P1+A
acgttcgccgtctggaaccatcgaggctattccaggatttgaggagttttttctcggattcttatgtgtccttcttgaacctgagtttccttcaagcgatcacctgtacaaccacttttagcaagacgatcgctaagttcacctgtggagccacttttagcaagacgcttactccctgctgctaaatcaatcaaggactacttggatatgttgtcatgtgtcgtgcaataaaaacagaatccttctaaccccagtgaacaccctgtccctgaagtaattgcggcttggatggctttgactgggagagggggaatcacggccatgaaatcaataccctccctttgagatgataatgattgctttatctgctcaaagatctcaaataatccatgcatcatacccacaaattaacaatatcctatgccaaatatcagcaagcctctacagacgaagccaagaagcaccctcagcgggagtgcctgcccatgtccatttatatatgacatgtacctgcaacagcttcaatccctagctccagttttacgctcctattggttgccgactatggcaggaacgcgccgacgcgggcctcagcggaaggggccagaaggcggagggggtgcaggaggcngagctcgtcgccaccacggtcgga

SEQ ID NO: 9303 - DNA, 701 bp, Zea mays
  Clone ID: LIB3137-013-H10-G5P1+A
aacactagcaggagaccaaccacttttagcaagacgatcgctgtggagccacttttttttagacgcttactccctgctgctaaatcaatcaaggactacttggatatgttgtcatgtgtcgtgcaataaaaacagaatccttctagccccagtgaacaccctgtccctgaagtaattgcggcttggatggctttgactgggagagggggaatcacggccatgaaatcaataccctccctttgagatgataatgattgctttatctgctcaaagatctcaaataatccatgcatcatacccacaaattaacaatatcctatgccaaatatcagcaagcctctacagacgaagccaagaagcaccctcagcgggagtgcctgcccatgtccatttatatatgacatgtacctgcaacagcttcaatccctagctccagttttacgctcctattggttgccgactatggcaggaacgcgccgacgcgggcctcagcggaaggggccaggaggcggagggggtgcaggaggcggagctcgtcgccaccacggtaaagatgtcgccaagctggacggcgagggtggacccggcggcccatgaggtggaggcggcagatggggagtcggggctacggggcatgaggccgacgaggtggagcacggagaaagccgatccacgacgcgatgcttctaggagcaatggac

SEQ ID NO: 9304 - DNA, 424 bp, Zea mays
  unsure (1)..(424): unsure at all n locations; Clone ID: LIB3137-013-H10-G9P1-A
gcggngaacagtaattgcggcttggatggctttgactgggagagggggaatcacggccatgatttcaataccctccctttgagatgataatgattgctttatctgctcaaagatctcaaataatccatgcatcatacccacaaattaacaatatcctatgccaaatatcagcaagcctctacagacgaagccaagaagcaccctcagcgggagtgcctgcccatgtccatttatatatgacatgtacctgcaacagcttcaatccctagctccagttttacgctcctattggttgccgactatggcaggaacgcgccgacgcgggcctcagcggaaggggccagaaggcggagggggtgcaggaggcggagctcgtcgccaccacggtcggacgcgtgggcggacgcgtgggcggacgcgtggg

SEQ ID NO: 9305 - DNA, 196 bp, Zea mays
  Clone ID: LIB3137-013-H10-H10P1-A
aaatcaagttgttatatttataaaaattggcttgaacaggatgaatatatatatatatacacataattggggagaacatacaaaaattaacacccgagaacttcaaaggttgttgatggtagaaggcaacattcagttttgggaagacttcttgggagttttttttcggatactaatgtgtccctgaacctgagtt

SEQ ID NO: 9306 - DNA, 657 bp, Zea mays
  Clone ID: LIB3137-013-H10-H11P1-A
agcgtaaaactggagctagggattgaagctgttgtaggtacttgtcatatataaatggacatgggcaggcactcccgctgagggtgcttcttggcttcgtctgtagaggcttgctgatatttggcataggatattgttaatttgtgggtatgatgcatggattatttgagatctttgaacagataaagcaatcattatcatctcaaagggagggtattgatttcatggccgtgattccccctctcccagtcaaagccatccaagccgcaattacttcagggacagggtgttcactggggctagaaggattatgtttttattgcacgacacatgacaacatatccaagtagtccttgattgatttagcagcagggagtaagcgtcttgctaaaagtggctccacaggtgaacttagcgatcgtcttgctaaaagtggttgtacaggtgatcgcttgaaggaaactcaggttcaaggacacatgagtatccgagaaaaaactcccaagaaatcttcccaaaactgaatgttgccttctaccatcaacaacctttgaagttctcgggtgtttaattttgtatgttctctacaattatgtgtatatatatatatattcatccttttcaagacaatttttataaatataacaaccttgattt

SEQ ID NO: 9307 - DNA, 184 bp, Zea mays
  Clone ID: LIB3137-013-H10-H2P1+A
aacaaacctggacaagatataaacgctaacaacagatgtacgcttctattgggagttttttatggcaggaacgcgccgacgcgggcctgagcggaaggggccagaaggcggagggggtgcaggaggcggagctcgtcgccaccacggtcggacgcgtgggcggacgcgtgggcggacgcgtggg

SEQ ID NO: 9308 - DNA, 661 bp, Zea mays
  unsure (1)..(661): unsure at all n locations; Clone ID: LIB3137-013-H10-H7P1-A
aacagaatcacggccatgaaatcaataccctccctttgagatgataatgattgctttatctgttcaaagatctcaaataatccatgcatcatacccacaaattaacaatatcctatgccaaatatcagcaagcctctacagacgaagccaagaagcaccctcagcgggagtgcctgcccatgtccatttatatatgacatgtacctacaacagcttcaatccctagctccagttttacgctcctattggttgccgactatggcaggaacgcgccgacgcgggcctcatcggaaggggcgaggaggcggagggggtgcaggaggcggagctcgtcgccaccacggtaaagatgtcgccaagctggacggcgagggtggacccggcggcccatgaggtggaggcggcagatggngagtcggggctacggagcatgaggccgacgaggtggagcacggagaaagccgatccacgacacgatgcttctatgagcaatggacagcaggcccggtgggttcttttactcaccccgttcgttcgccgtctggaaccatcgaggctattccaggatttgaggagttttttctcggatactcatgtgtccttcttgaacctgagtttccttcaagcgatcacctgtacaaccacttttagcaagacgatc

SEQ ID NO: 9309 - DNA, 560 bp, Zea mays
  unsure (1)..(560): unsure at all n locations; Clone ID: 11LIB3137-030-Q1-K1-F10-f3A
tagctaaactaaccaaggttgcttctgggggaactggtaaaactccccagacctgaaaagaaagatataccacaagaaagacttaagaggataatgagcaaacagcttaacaagcaaattaaaaaggacacggctgctgagattgccaagaaacgagaacaggaacgacaaaggcaggaaaaacttgctgaagttggtcgatacaagcgtcgtagccgcagtagaagtcttagccgttccccaccaagcacagaaggcggcgatatagcagaagccgtagtaggagcagaagcccaagaaggtaccgatcccgctcgctctccagttcccggtcgccctctcgctctccaaggtaccgaagcaggtcaagacactgaaaatatccaggcagccactaacaaagtgccttgccatgttgtagttaatttattttatagactttttcattcctgcagcgatgtgtactcatgagaagcctccgtttttgttttcttagtcctattatcgacagtgtgtgttccttgtgtttcaaanaataaaataaaaaataatataataat

SEQ ID NO: 9310 - DNA, 279 bp, Zea mays
  Clone ID: 12LIB3137-027-Q1-K1-D12-R1
ctctcgagtttctcttcacgcgcttcaccatgatctctaccctacatgttgtaacttctggtgacactgattcagctcaatccggactatagaacggtcttccatgtctccgtccctcgctggagcaaatggctgtcgagcctctgctggcagtggtgcgctatactcctaggggagcttgagagctatcgtgctgagtttgcagtgggatcgagatcgaagctatggccaggaggatgaagcgcgtctgctgcaacgaatcactgatcatcggcttta

SEQ ID NO: 9311 - DNA, 463 bp, Zea mays
  unsure (1)..(463): unsure at all n locations; Clone ID: 14LIB3137-001-Q1-K1-B5-R3
cctncaggaaactacaagaaagcgcaacggcaacaacacaggccagtccgctggcaatgtttctaaggtagagtaacatttacagttcttcctaaacctgtacatatattacagacagttgtgtcaagtttgagaaacacactgcttgttctgtttagctcttcatcacatcatggcattgcatccatgtacttcctgcagtggtcctcagatgtctccattgattccaaatatgcggaccttgtgcatgtttggcaattttgccacaactagcacaaaaactgccattgtattgaggaaaaacatcggctgcttgtagtcagtcaagtgcgatgcgatcagatacagcaccacaggtaccacagtcaaaaactttctgttccgagtaagctgctgaccattgtcaatttgctcccaccatgtcaatctgctgtagatgccttggtcatcagcagcaaaaggg

SEQ ID NO: 9312 - DNA, 184 bp, Zea mays
  Clone ID: 16LIB3137-012-Q1-K1-A11-R1
ctccaattgtgcgtcggagacagagaaggagcaggaggaggcgtcggccgccatcgagggactgcgcgtcatgccctgggccacctccatcgcacgcggttagacccttttgagggatccacagcacaacaagggtcttgctttcacagaggaggcaagggatggacacaactttcgtggactg

SEQ ID NO: 9313 - DNA, 631 bp, Zea mays
  unsure (1)..(631): unsure at all n locations; Clone ID: 17LIB3137-030-Q1-K1-F10-r3A
atgagtacacatcgctgcaggaatgaaaaagtctataaaataaattaactacaacnatggcaaggctttttgttagtggctgcctggatattttcagtgtcttgacctgcttcggtaccttggagagcgagagggcgaccgggaactggagagcgagcgggatcggtaccttcttgggcttctgctcctactacggcttctgctatatcgccgccttctgtgcttggtggggaacggctaagacttctactgcggctacgacgcttgtatcgaccaacttcagcaagtttttcctgcctttgtcgttcctgttctcgtttcttggcaatctcagcagccgtgtcctttttaatttgcttgttaagctgtttgctcattatcctcttaagtctttcttgtggtgtttctttcttttcagtctggggagttttaccagttcccccagaagcaaccttgcttagtttagctaatgctgatgatgtactgggggaaggtttcaaaagttttgcagttctttcctgttccacagacaaagaagaggcaggatcactgtgaagtgcctcaagaatttgaccaccagacaaccggttaggtatgtcaattcgtattggagacgaaggcggagagatcc

SEQ ID NO: 9314 - DNA, 413 bp, Zea mays
  Clone ID: 18LIB3137-027-Q1-K1-F1-R1
cccacgcgtccgcgcgagaacgatcagccagcgcccagccgcccacccaccaagagccacaggccagatgcacgccgtccccttcaccccagggttgccgacgcggcgactccgttcacccaccaccgctgcccgctgtcctccctgctgccgcctgtgccggggctagcctgccgcggaccatgtcgcggtccttgagcatgagagggagcatgaggtcgcgccgcgactagcctcctcctgagaagacaattgaaaggcttgagagtatggtggatggaggaaatttctatgaagctcaacaaatgtacaagtcaaccagtgcaaggtatattgctgctcagaagtattcagaagccttggacatccttcagtcaggcgctttggtacaagttgaagcatggacaggttac

SEQ ID NO: 9315 - DNA, 470 bp, Zea mays
  Clone ID: 20LIB3137-001-Q1-K1-B5-R4
tccatgtacttcctgcagtggtcctcagatgtctccattgattccaaatatgcgttacctagtgcatgtttggcaattttgccacaactagctcaaaaactgccattgtattgaggaaaaacatcggctgcttgtagtcagtcaagtgcgatgcgatcagatacagcaccacaggtaccacagtcaaaaactttctgttccgagtaagctgctgaccattgtcaatttgctcccaccatgtcaatctgctgtagatgccttggtcatcagcagcaaaaggggttcctttcttccaatggaagaagtggtaagtgatggcgaagtgcgcgaggtttacgacggtccaggctgctccgggggagcaaccagagacggagaggacgaggagccaagcgaagaagagcaggaggatgtaggtggtccagacgcccgggtacatgaaccactctgtgttcttgttcacgtccacc

SEQ ID NO: 9316 - DNA, 419 bp, Zea mays
  Clone ID: 22LIB3137-013-Q1-K1-D9-R1
ggaattcgaagatgaagaagacaatgatgactcagtacctgataacaaggatgaatcagatgaagaagagcctatgaatgatgatgtatatgaatttactgaaggattaagaggcagaaaagctaataggatggaagaagctggttcaacaggctcttcttctggaagcaggagattaccaccacctgtaccttcctcatcttcaaaaaaaattgcggtctctatctgcattagatgcccgcccaggcactttgtcaaagagaactccggatgacctagaggaaggtgagattgcaatgtctggggactcacatatggacctccagcagtcagggagctggaaccatgaacgtgatgacggtgaggatgaacaagtactacaaccggagataaaacgcaaacgaatgattcggcttcgt

SEQ ID NO: 9317 - DNA, 591 bp, Zea mays
  Clone ID: 23LIB3137-030-Q1-K1-F10-r4A
atcgctcccttctgtgcttcgtggggaacggctaagacttctactgcggctacgacgccttgtatcgaccattttcagcaagtttttcctgcctttgtcgttcctgttctcgtttcttggcaatctcagcagccgtgtcctttttaatttgcttgttaagctgtttgctcattatcctcttaagtctttcttgtggtgtttctttcttttcagtctggggagttttaccagttcccccagaagcaaccttgcttagtttagctaatgctgatgatgtactgggggaaggtttcaaaagttttgcagttctttcctgttccacagacaaagaagaggcaggatcactgtgaagtgcctcaagaatttgaccaccagacaaccggttaggtatgtcaattcgtattggagacgaaggcggagagatccctgaaacttttggttcactggtatcatcggaacctccaaattcagtaatatattcaaccctaggagccttttgcttgctccaataattgctttcagcatgtatcccacggccatgacgcctagaatgggatggtgaacgagatcttgatctcgatcttgatcttc

SEQ ID NO: 9318 - DNA, 509 bp, Zea mays
  Clone ID: 24LIB3137-028-Q1-K1-A4-R1
cccacgcgtccggcgctctggaggcgccaggaggaggaggaggaggaggaggagaagaggccagccaggaccaggagcggcactgcacgcgctcctcgtcgcggccgacaagtacgacgtgccgttcctgaggcgggcatgcgaggcgcggctggcggcgggcgtggcgccccggaacgcgctgcggacgcttgaggtcgccgagctgagctccagcgccgcgctcatggagcgcgccatgggcgccgtcgtggagcacgccgaggaggtcgtgttctcggcggagtacgagcggttcgccgcacggaacgcggggctgtgcgtcgagatcacccgcgcgctgctggccaggatgccgacgccggcgaggagtgatggcccgtgcttagagcttggaagcagctgatgcatgcagttgtattggaaaattgtatcagaataatgatcggaaaggataacctggtttacatttcgagtcacgacaatatgtaaacgcataggttcttctg

SEQ ID NO: 9319 - DNA, 236 bp, Zea mays
  Clone ID: 26LIB3137-001-Q1-K1-B5-R5
cccctctccgccccatccctggacaggcctggtcgtgccgatggcgctggatctcggggttactttccgcggaggagcgttcggtaggtgcacgtgaacgggaggaaggccagggcgcgatggtgtcgtgctgcggagccgggcgtgagagtgacgaaggccggcgccgtggagtgagagaagacaacggttgccgtctggcggtctgggtttggtgaaagggcacctgggcctgc

SEQ ID NO: 9320 - DNA, 344 bp, Zea mays
  Clone ID: 28LIB3137-013-Q1-K1-F4-R1
ggtgttgaacgcgacgtcgtggtcgggcgggcgccgtccccggcgcgaggcgtacgcgacggttctgcactcgtcggacacgtacctgtgcggcgcgatcgtgctgtcgcagacgatccggcgcgcggggtcgagccgcgacctggtcctcctggacgacgacacggtgtgcgggccagcgactgcgcagatagtcggcggccgggtatacgccccggcggatcaagcgcatccgcaacccgcgcgcggcaggggtcacctacaacgagtacaactacagcaagttccggctgtggcagctgaccgactacgaccgcgtggtgttcgtggacgccgacatcctg

SEQ ID NO: 9321 - DNA, 664 bp, Zea mays
  unsure (1)..(664): unsure at all n locations; Clone ID: 2LIB3137-001-Q1-K1-B5-F4
cagcctgnaccgtcgtaaacctcgcgcacttcgccatcactttccatttcttccattggaagaaaggaaccccttttgctgctgatgaccaaggcatctacagcagattgacatggtgggagcaaattgacaatggtcagcagcttactcggaacagaaagtttttgactgtggtacctgtggtgctgtatctgatcgcatcgcacttgactgactacaagcagccgatgtttttcctcaatacaatggcagtttttgtgctagttgtggcaaaattgccaaacatgcacaaggtccgcatatttggaatcaatggagacatctgaggaccactgcaggaagtacatggatgcaatgccatgatgtgatgaagagctaaacagaacaagcagtgtgtttctcaaacttgacacaactgtctgtaatatatgtacaggtttaggaagaactgtaaatgttactctaccctaaaaagcttttgccagcgaactggccttggttgttgcccgtgctgctttcttttgagtttcactggaaggggaaacggtaacttcggtaaacaaccaccagcatgtggataagaaataaggaagtgtgtagcagatgctatttggtatctggttcgattgaaccaagaaatcaattaagttcatatttttgtctt

SEQ ID NO: 9322 - DNA, 355 bp, Zea mays
  unsure (1)..(355): unsure at all n locations; Clone ID: 30LIB3137-028-Q1-K1-A6-R1
aacgagttaacgaaagccttttatccaagctcagggaagggaagctcacagtttcgttggatccaatcttttatccaagctcagcgatggcttctcgtcagcagcatcctactagctaccacgccggcgagaccaaggcccgtgccgaggagaagacgggtcaagtgatgggggcgacgcaggagaaagggagggaggccaagcacaaggcgtccgacgcctccgaccgcgccatgggaatgggncacgacgccatggaggcgaccagggagaaggcgcgcgccgccgggaccgaaccatggggatgggccacgacgccggggaggcggccaaggacagggcgtaccgggccaag

SEQ ID NO: 9323 - DNA, 416 bp, Zea mays
  Clone ID: 34LIB3137-014-Q1-K1-A1-R1
cccttagctcggagtcggacacccacccgccacgaccaccagaccactcgcttccccgaagcttcagctccgcgcttctctgttcgagctagccagcctccagcaagagcgagcgagcgagggcaacgggcatggcggcggctgtgtccttctcccgggtgcgagctctcccgacgtggtccagctccgtgtccggcgacgaccaccaccgctcctactccgcggcgctggccatgtcggtgtcggtgcggccccggtgtcgcgcgcggtcgccggcgcggatgatgggcaacgtgaacgccggcaaggggctgttcgcgccgctcgtggtggtggcgcgcaacatcatcggccgcaagcgcttcaaccagctcagggggaaggcaatcgcgctgcactcgcaggtcatcaacgag

SEQ ID NO: 9324 - DNA, 421 bp, Zea mays
  Clone ID: 36LIB3137-028-Q1-K1-E3-R1
cctagtcgcacactcaatgctagtgagtgtgtggctcgggggtgcgcgttgcaatgtgcaatgcttagtcctacgttccgtgttcgggaatacgaggtgcaggatgcaatccctgcttccataggatttaacactagtgacggcccagtttcaacattgtcaagtgatgcattgttccggagaggcctgcactttcccagtgttaagatcattactctagagaagaatgacagttttagttttgatgcatattatgtggatgctaatgaattgcctcctggtacctcaacagacatcggtagttttcagattggcccattccaagcacataccgaagcttctaaagtcaaagtaaaaattcgcttgaatctacatggtttggtttcagtcgaatctgccgttttgataaatgattatcaaa

SEQ ID NO: 9325 - DNA, 687 bp, Zea mays
  Clone ID: 39LIB3137-001-Q1-K1-B5-R1
gcaagcccaagtgcccaatcaacaaacccagaccgccagacggcaaccgttgtcatctctcactccacggcgccggccatcgtcactcacacgcccagcaccgcagcacgacaccatcgcgccctggccatcctcccgttcacgtgcacctaccgcacgcaccaccgcggaaagtaaccccgagatccagcgccatcggcacgaccaggcctgtccagggatggggcggagaggggagccctactacgtcgaagcggcgccgcggtggacgtgaacaagaacacagagtggttcatgtacccgggcgtctggaccacctacatcctcctgctcttcttcgcttggctcctcgtcctctccgtctctggttgctcccccggagcagcctggaccgtcgtaaacctcgcgcacttcgccatcacttaccaattcttccattggaaaaaaaggaccctttttgctgctgatgacccaggcatctacagcagattgacatggtgggagcaaattgacaatggtcagcagcttactcggaacagaaagtttttgactgtcgtacctgtggtgctgtatctgatcgcatcgcacttgactgactacaagcagccgatgtttttcctcaataaaatggcagtttttgtgctagttgtggcaaaattgcaaacatgcacaaagtccgcatatttt

SEQ ID NO: 9326 - DNA, 680 bp, Zea mays
  Clone ID: 40LIB3137-014-Q1-K1-E7-R1
cctcaatccgcagcagttgacaaagcaactccagttcgcccaaaatctccagccattgataaagcaactccaattgctcccaaatctccaccagttgataaagcctctccagctctgccaaaatcattatcaggtgctaaagatgcgctttttccttctaggtcgctgcagattgataagtttactccagccgccccaaggttatcacaagatgataaggctgctctgccttcttcagaacagtcacatatatctccagctactagttctgaagctcaaggggcaactactaggaaggtcacaaccaccacctcactttcagaggctgctgcagcatggaggccttcaagtgctcctgtgttacccacaccaagatcaaccgggccagctgcttcacatattcaaacttccacattgctttcccgctctatgagtgaagcagcttggaagaaggcaagtaaaggatccttcattttctgccccatcttatactccacagacctaccggaatgcaataattggtaagtctggtctgtctatgacctccgcaagccttgcgtatcagccgtcttctctggatcaagacactgctccttcacggcctctatcagcatatgcatcaagtacagtcatgatgcctcctgcaggaagatctgatcagtcatcagctaggcatggga

SEQ ID NO: 9327 - DNA, 670 bp, Zea mays
  Clone ID: 42LIB3137-028-Q1-K1-E4-R1
atcccttcccctggcttcacggctcggctggctgcacgccggagccccggcgccagatctcgccaagtgccagggccgccgcagccctctttgcctgcgcgaggtctcagaatcccgagagggaaaaagaaaagaaaagatgatgacttcctctgcctgttactacctgtgccgctccctcgtccgggctcctccgctcaagtcggggagtgcagtgcgctgtccaagcgccgccccgccaggagccagcggtgccacctccacctccaagacacaggatccagttgaaaaccagaagctatgtgcctatttggttgagaaggcagtcaacagacttccgccaggagcagagaatatacttgggatctttgatctgcgaggctttcgggttgaaaatggtgatctccagttcctaaagtttttgatggacctttttttaccaattactaccccaagcgggttgggccaagtcctttttggccaatgctccatttggttttcaaccaatgtggcaagttgttaaacctctgttgaaatcatatggctcccggtaagaatttgggatacggagactgtgagggagggatacttcaaagaagaaacttgtgctcctgatttccacgattaggtgacatgattatttcttcagtaattgccaaaatgtgcaggt

SEQ ID NO: 9328 - DNA, 613 bp, Zea mays
  Clone ID: 45LIB3137-027-Q1-K1-A10-f3A
ccaaggtctacgttgggaaccttccctacgacgtcgacagcgagggatttgcgcagatcttcaaccaggccggcgtcggcgaggtttccgaggttatctacaacagagaaactggccagagccgtgggtttggttttgttaccatgagcactgttgaggaagctgacaaagccattgagatgttcagccgctatgatattagcgggaggcttctgaatgtaaacagggcatcttctaggggcactcgcatggaaagacctcagagacaatttgcaccagctttcagagcttatgttggcaacttgccatggcaagttgatgactctaggctggtgcagttgttcagcgagcatggagaagttgttgatgctaaggttgtctacgacagaaaaactgggcgctcacgaggattcggtcttgtatcaatggtgtcaaaggaggaactcaatgatgctatttcggccctagatggacaggaattggacggccgccctcttcgagtgaatgttgcagcagagcgggcacagaggggcttttgatgcggttgtatgagagagatgacaggctgtttgaaatgagcatggagacacagagacacaatgggagagcaatg

SEQ ID NO: 9329 - DNA, 400 bp, Zea mays
  Clone ID: 4LIB3137-011-Q1-K1-C8-R1
caaagcaatacaaggctggactcagcgtcctggaagatgacatattcgaagtggatcagccaaaggacctgttcctctactgctactacggagggatgatttacattgggctcaagaagtttcctaaagctttggagcttcttcacaatgctgttaccgccccaatgtcaacattgaacgcgattgctgtagaagcttacaagaagtatatcctaggttcactcattgtgaatggacaggtcccatcatttcctaagtatacatccatatcagcccaaaggagtatgaaaaaccatgctcagatttattttgagctttctacaagctatagcaacggtcgctacactgatttagagacaattgtgggatccaattcagcagcatttcaatctggcaacaa

SEQ ID NO: 9330 - DNA, 379 bp, Zea mays
  Clone ID: 56LIB3137-050-Q1-K1-G10-R1
caccactccctcctcctctcctctcccgtcctatccatccggcacgcccagcatccatccactcctcccctgctccggctccggctccggctccgccatgggcctttcaacagtttactccccggccggaccgcgcctcgtgccggcccctctcggccgctgccgctctgcccagcctcgccgcccgcgccgagccccgctcgtcaccgtccggtgctccgtcgacgccaccaagcaggcgcaggatggagtgccgacggcggtcctcacggaggcgccggcgtcacggaaggagtgcttcggggtcttctgcagcacctacgacctcaaggcggaggacaagaccaagtcgtggaagaagctagtgaatgttgctgtg

SEQ ID NO: 9331 - DNA, 624 bp, Zea mays
  unsure (1)..(624): unsure at all n locations; Clone ID: 5LIB3137-027-Q1-K1-A10-f4A
agtaccccgcggnngganccgccanaggaggccaagggtctacgttgggaaccttcccttctacgtcgacagcgagggactcgcgcagatcttcgaccaggccggcgtcgtcgaggtcgccgaggttatctacaacagagaaactggccagagccgtgggtttggttttgttaccatgagcactgttgaggaagctgacaaagccattgagatgttcagccgctatgatattagcgggaggcttctgaatgtaaacagggcatcttctaggggcactcgcatggaaagacctcagagacaatttgcaccagctttcagagcttatgttggcaacttgccatggcaagttgatgactctaggctggtgcagttgttcagcgagcatggagaagttgttgatgctaaggttgtctacgacagagaaactgggcgctcacgaggattcggttttgtatcaatggtgtcaaaggaggaactcaatgatgctatttcggccctagatggacaggaattggacggccgccctcttcgagtgaatgttgcagcagagcggccacagaggggcttttgatgcgggtgtatgagagaaatgactggttggttggaatggagcaggagacacag

SEQ ID NO: 9332 - DNA, 387 bp, Zea mays
  Clone ID: 62LIB3137-056-Q1-K1-B11-R1
gccaacttatcagctccaccgtcgacgaccctaacaacggcaaccgcgggaagttggacgcggaggcgagcctggagcagtggctgctgaggccgccgccgcttctgtccagcgagaaccagttccgcgtcaccttcgactgggaggtggagaagcagggcatcccgggcgccatcatcgtcaagaagaaccacgcctccgagttcttcctcaagaccatcaccctcaacgacgtccccggccacggcaccatcgtcttcgtcgccaactcatggatctacgcgtctgatgcttaaggctaaagccggcttatgcttcacgaaaggcacagaactacgcaacaaaatgacggcgggcgctggaagccctagcgaagggtaacttcaa

SEQ ID NO: 9333 - DNA, 381 bp, Zea mays
  Clone ID: 68LIB3137-058-Q1-K1-G10-R1
ctcgccactcccgcagaatccccacccaaattcccgtctccccgatcgccgcccttctcggtgcccgtaaaccctacccccggagtcgcccgtgcgctgtcgtgcccgcgttgccaccgtcggtggtccgcggcgcccgtaaccaaaacctaaccgcagcctgcagatcccgattccgcaggaggcgggagaggtgaaggccgcctcgccgcagatggagcccgcaggcgcgcgcaaggagtggcgcgccgtccccggctcctcgctccgctccaatggcgccgaggatgccgcggagcacgggaaactggggcaatcggaggaccgagctatctacgaggaatggagcggtggactggaggacttctgcgccatcaccat

SEQ ID NO: 9334 - DNA, 432 bp, Zea mays
  Clone ID: 6LIB3137-027-Q1-K1-A10-R1
cacctcaccggctccattcgaccattccatcctttccttatcccctcccgcttcgtctcccttcctggcttcctttcttcgccatggcaaccatgtccctccgctgcctcgccatggccatggccgacaccgcgctcccgcccgcccacaagctcctccccacagtttccctcccgctcctctcctcgtccacccgcgccgcgccgctcctcctcttcgccaggagccgcctgccgctcgcgcccctcgttacctcctccgacgccgttgaggccaagtcggcagacgaggaggaggagaaggccggagagcccgtcgaaatggaagctggggagtttgaggaggtgctagcctcaggcggcgagggtgaggggcagtacgccgcggtggagccgccagaggaggccaaggtctacgttgggaaccttccct

SEQ ID NO: 9335 - DNA, 429 bp, Zea mays
  Clone ID: 74LIB3137-058-Q1-K1-H6-R1
ccaaaccttctggcttctgcactgctctccaccacccctcaacgaagcctctggtgcctcggccaccgcagcagcctggccctgacccggccccgggcgtggtgtcaggtctcaggtgtggtggcgctttctcctctccggcacgtggccgcgtcatcccagctctcccgcgcggcggcggccgtttcctctcctgcgctcctcctgccgcacacagccagaaaattgcagctgaagtttgtttgaggataggcgacactttgcgagtccttcgtgttgaaggagaaattgtagctgaagtgaaaaaacagcagggaacgatggcactatcacgaagtatgagagcatgtttgcacagtggaagacttgcacttcttgccatattggtctctggtggaattgtaatgccaatcttgggcttgtgctctc

SEQ ID NO: 9336 - DNA, 420 bp, Zea mays
  Clone ID: 80LIB3137-059-Q1-K1-H1-R1
cctctcgaacttggggcggcatatataataaataagttactacatccatcctataacttactttcaccacgttttagctctgtcgtggacggctggtaccacatatcagtggctcatcgccatcgacgtgtgggtaaaaaaaaagagagggagatgggggaagggtggaagtcgcatatgcactctgtccacggcggcatgtacaaaactcaggacggacgacggccgccgtcgggctgagattgctggtaggagccctgcgacgccggggacggcacggtggaggcggtccggacggtggcggaggaggcggtggttacggatgacagccgcggcgtggccgtagccgtggggcgcgcctgcctgatcaccacagtgggcaggcccgggcttcgcgcccgacgctgctgctcctttcac

SEQ ID NO: 9337 - DNA, 592 bp, Zea mays
  unsure (1)..(592): unsure at all n locations; Clone ID: 86LIB3137-060-Q1-K1-D9-R1
cataagacagcgccggctccggcacgcccggttccgatggcagccgcggctgtgaccctgccctcctcggggcagcccttcgccgtcgccacaaccgcctcttcctcatcggcccgccgctgcctgctcctgccctccgcggctcccggccgagctctccgcgtcgtggcctccgccgctaccgaggcgccgcccaagcccacgcagccgccgacatcgccctccggcatcgtgctcgtcgacccatccgaagcccagaaggtgcaccggctcaaggccgtctacgaccagaaggtcgtcccgctcatcaccgaggagttcggctacaccaatgtccaccaggttcccaagctcgagaagattgtggtgaactgcggtctgngcgcggaggcaaggtactcgcaggggtctgcatgccgccatctaacgacgtggccattgatcaccgggcaattggcccgtccagacccaagggcaagaaagtcccttggccagcttcaacgatccgtgaagggaaaacacccatcgggtatccgccagtcaccctcccgcgggcagggataaatgtacaaacttccctgggataaggctc

SEQ ID NO: 9338 - DNA, 61 bp, Zea mays
  Clone ID: 8LIB3137-001-Q1-K1-B5-F5
gtatctggctcgatagaacaagaaatagttaagttcatattttgtcttaaaaaattatatt

SEQ ID NO: 9339 - DNA, 565 bp, Zea mays
  Clone ID: 95LIB3137-001-Q1-K1-B5-F3
ctacagcagactgacatggtgggagcaaattgacaatggtcagcagcttactcggaacataagtttttgactgtggtacctgtggtgctgtatctgatcgcatcgcacttgactgactacaagcagccgatgtttttcctcaatacaatggcagtttttgtgctagttgtggcaaaattgccaaacatgcacaaggtccgcatatttggaatcaatggagacatctgaggaccactgcaggaagtacatggatgcaatgccatgatgtgatgaagagctaaacagaacaagcagtgtgtttctcaaacttgacacaactgtctgtaatatatgtacaggtttaggaagaactgtaaatgttactctaccatagaagctttgccagcggactggcctgtgttgttgccgttgctgctttcttttgagtttcactggaaggggaaacggtaactccggtaaacaaccaccagcatgtggataagaaataaagaaagtgtgtagcagatgctattgggtatctggttcgattgaaccaagaaatcagttaagttcatatttttgtctt

SEQ ID NO: 9340 - DNA, 710 bp, Zea mays
  Clone ID: LIB3137-013-Q1-K1-D9-f4a
agcaagacgcggttcatcctatagtgaaacagaagcgcaacatgtcatctaggaaggtttcaccggcttctatgtctgggaaattgagtcacttgtctgggtctggtgaggggtctgctgaactctccaaggaaaattggagcagtaaggccattgattccactgcccctgagttcggtggcacaaagatgtctgacagtatgcaaagaaagtgcaaaaatgtgataagcaagctttggaggaggattgacaaagaaggtcatcaaatgatacctaacatatcttcttggtggcggaggaatgagaattcgtcgttcagaggtccggctggtagcacacttgacctacaaaaaatcgagcagcgagtcgatgggttggagtacggcgctgtaaccgagttcatagcggacatgcagcagatgttgaaaagcgtggtccagcacttcagctataggcatgaggtccggatagaggccgagaccctccacaacttgtttttcaacataatgaagatcgccttcccagactcggacttcatggaagctaagaacgccatgtcgttttcgaatcctggaagcggtgctgccgctgccccatcatcgtcaaagcacgccgcaccatcccttaagcgcagcagagccagtgccagtgccagtgccagtgaagcagagcagcagcatggctcgggacacagcagcaggcacaatcag

SEQ ID NO: 9341 - DNA, 510 bp, Zea mays
  Clone ID: LIB3137-013-Q1-K1-D9-f5a
accggcttctaggtctgggaaattgagtcacttgtctgggtctggtgaggggtctgctgaactctccaaggaaaattggagcagtaaggccattgattccactgcccctgagttcggtggcacaaagatgtctgacagtatgcaaagaaagtgcaaaaatgtgataagcaagctttggaggaggattgacaaagaaggtcatcaaatgatacctaacatatcttcttggtggcggaggaatgagaattcgtcgttcagaggtccggctggtagcacacttgacctaaaaaaaatgaccaccaagtcgatgggttgaatccgggcctttacccaagtcataccgacatccagaaatgtggaaagcgtgggtcaacacttagctataggcatgaggtccggatagaggccgaaaccttccacaactggtttttcaccataatgaaaatcgccttccaaaattcgaccttaatggaacttaaaaccgcatggtggtttccaattcttgaaacc

SEQ ID NO: 9342 - DNA, 796 bp, Zea mays
  Clone ID: LIB3137-013-Q1-K1-D9-r3a
cagacccagcggaatgcatcgactgctgagacgggtgtggcggtggatccctctggaacggcgtcctggcacctctgggtgatggggcagggcccggacgcccagggttggccggcgacagaggtccggcgcctcggcccgagctggaaggggacccgatgccgctcctcgcgcgctcttgcctcttcttcttcacgatgaacatgtcgctagggtgcagcaacccagcggcgccgtcctggaggtgctgatccttgctgccgccatgtttggggtctttttttgacctgaacctgtggaaccggttgggcggaaccgcctcgttaggctgattgtgcctgctgttgtgtcccgagccatgctgttgttctgttacactggcactggcactggcactggctctgttgcgcttaagggatggtgcggcgtgctttgacaatgatgggacagggagaacacctttcacaagattcaaacaccacatggcgttcttagctcatatgaagtccgagtctggaaaggcgatcttcattatgttgaaaaacaagttgtggagggtctgggcctatatccggacctcatgcctatagctgaagtgctggaccacgcttttcaacatctgctgcatgtccgctatgaactcggttacagcgccgtactccaacccatcgactcgctgctcgattttttgtaggtcaagtgtgctaccagccggacctctgaacgacgaattctcattcctccgccaccaagaagatatgttaggtatcaatttgatggaccccccctttttttt

SEQ ID NO: 9343 - DNA, 625 bp, Zea mays
  unsure (1)..(625): unsure at all n locations; Clone ID: LIB3137-013-Q1-K1-F4-f4a
gcgctcaagagaggctgttccgggcggacccgcccgaggtctggtccgtccactacctggggatgaagccatggtcgtgctacagggactacgactgcaactggaacgtggcggaccagagggtgtacgccagcgacgaggcgcacgcgcgctggtggcaggtgtacgaccagatgggggaccacatgcgcgggccctgccgcctctccgagcggaggaaggtggagatcgcatgggacaggcacgtcgccgaggagctcgggtacaccgaccagcactggaagatcaacatcacggacccgcggaaatgggactgatccacgactactccgtccgtcgcctgctgcattttcgtacataataccccacacgtagctggtcgagagccagatcgctaggcgcgcagcattttggttcgtgggtacatttaggccagctcagtttcataagtggagctgttgttccgaggtttttagcttcacgtacgaacagcttttccgatgaagctgaggggttttcgtgatcttatttggcaaatcagctttgcattggacaataaacaaataaaatgaccgtaatgctctctgcttttgtttccttctaannaaaaaaaaanaaaatttaa

SEQ ID NO: 9344 - DNA, 219 bp, Zea mays
  Clone ID: LIB3137-013-Q1-K1-F4-f5a
gagccatatcgctaggcgcgcagcattttggttcgtgggtacatttaggccagctcagtttcataagtggagttgttgttccgaggtttttagcttcacgtacgaacagcttttccgatgaagctgaggggttttcgtgatcttatttggcaaatcagctttgcattggacaataaacaaataaaatgaccgtaatgctctctgcttttgtttccttct

SEQ ID NO: 9345 - DNA, 452 bp, Zea mays
  Clone ID: LIB3137-013-Q1-K1-F4-r5a
ccatagccgcgggtccgtgatgttgatcttccagtgctggtcggtgtacccgagctcctcggcgacgtgttttttccatgcgatctccaccttcctccgctcggagaggcggcagggcccgcgcatgtggtcccccatctggtcgtacacctgccaccagcgcgcgtgcgcctcgtcgctggcgtacaccctctggtccgccacgttccagttgcagtcgtagtccctgtagcacgtccatggcttcatccccaggtagtggacggaccagacctcgggcgggtccgcccggaacagcctctccttgagcgcgcgctcccccgtggtgttggcccagaagttcttgaggtagttgacccggcgcggcaggcggtgccaccacacgaacacctcgttgaggaaccccctgttcgccgccgttgtacgagcggacggtcccggcgcccccgcat

SEQ ID NO: 9346 - DNA, 554 bp, Zea mays
  unsure (1)..(554): unsure at all n locations; Clone ID: LIB3137-014-Q1-K1-A1-f4a
gcgagggcaacgggcatggcggcggctgtgtccttctcccgggtgcgagctctcccgacgtggtccagctccgtgtttggcgacgaccaccaccgctcctactccgcggcgctggccatgtcggtgtcggtgcggccccggtgtcgcgcgcggtcgccggcgcggatgatggccaccgggacccccggcagggggctgttcgcgccgttcgtggtggtggccgcaccatatatatggcgcgagcgctttaaaccgatctcggggggagggatatcgctctactctcaggggataaccgagttttgtgagagcatatgggccgactccaagcggagggaggggctcatactcctcgtccagaagaacggagagaagctcggattccttgtctgagacgaccatgttgtacgcacatatataagtatataatctataagtactacatcatcaagtagtggcggacaatgataattatattgataccttcttccttgctcccnnnaaaaaaaaaaaaaaaaaaaaaaanaaaannaaaaaaaaanaanaannnaana

SEQ ID NO: 9347 - DNA, 686 bp, Zea mays
  Clone ID: LIB3137-014-Q1-K1-E7-r3a
gccgcgatctggtcctcctcaagcaagtcgtttatgatgtcaaggtgtggaaattcttctgccactggcccctgcggttgattccatacatgactggcgggtgtctcggtttggaactgctgcctagcttgcagtcctgcatgcctgctgaacttttctgttcctctgctgcatgcttgctgataagtatcgtccctccgagactgctcatatgcttgactgttggtcatttgttggtaaggagcgtggtccctccagagatgcatatcaacattactgtcacctttccactgctgccagccgtcatgtgcttctaacttaccaggcccagacttgaatccatgcctagctgatgactgatcagatcttcctgcaggaggcatcatgactgtacttgatgcatatgctgatagaggccgtgaaggagcagtgtcttgatccagagaagacggctgatacgcaaggcttgcggaggtcatagacagaccagacttaccaattattgcattccggtaggtctgtggagtataagatggggcagaaaatgaaggatcatttactggccttctcccagctgcttcactcatagagcgggaaagcaatgtggaagtttgaatatgtgaagcagctggcccggttgatcttggtgtgggtaacacaggagcacttgaaggcctccatgctgc

SEQ ID NO: 9348 - DNA, 728 bp, Zea mays
  Clone ID: LIB3137-014-Q1-K1-E7-r4a
ccaaacacgttgtagtcttgacgaaacgactccggtatactgccgttgatctggtcctcctcaagcaagtcgtttattatgtcaaggtgtggaaattcttctgccactggcccctgcggttgatgccatacatgactggcgggtgtctcggtttggaactgctgcctagcttgcagtcctgcatgcctgctgaacttttctgttcctctgctgcatgcttgctgataagtatcgtccctccgagactgctcatatgcttgactgttggtcatttgttggtaaggagcgtggtccctccagagatgcatatcaacattactgtcacctttccactgctgccagccgtcatgtgcttctaacttaccaggcccagacttgaatccatgcctagctgatgactgatcagatcttcctgcaggaggcatcatgactgtacttgatgcatatgctgatagaggccgtgaaggagcagtgtcttgatccagagaagacggctgatacgcaaggcttgcggaggtcatagacagaccagacttaccaattattgcattccggtaggtctgtggagtataagatggggcagaaaatgaaggatcatttactggccttctcccagctgcttcactcatagagcgggaaagcaatgtggaagtttgaatatgtgaagcagctggcccggttgatcttggtgtgggtaacacaggagcacttgaaggcctccatgctgc

SEQ ID NO: 9349 - DNA, 210 bp, Zea mays
  unsure (1)..(210): unsure at all n locations; Clone ID: LIB3137-028-Q1-K1-A6-f4a
accagggggggagcaccgcccagaaagacaaggacgcgangacaaacaccatattattggacggcaaggacaaggacagagcgggagaaacagacagcggggggggcaccaacacccacaaccctggcagcaacaaacagaggacaccgaacgcaaaacccaaagagctaacgggccagaaagcacaagaagcgaggaacaaggaacaaa

SEQ ID NO: 9350 - DNA, 70 bp, Zea mays
  unsure (1)..(70): unsure at all n locations; Clone ID: LIB3137-028-Q1-K1-A6-f5a
agccagagcgacgcaacccacnccagcacccaacggancggcatttgctttaacctccaccaacgacggg

SEQ ID NO: 9351 - DNA, 711 bp, Zea mays
  Clone ID: LIB3137-028-Q1-K1-E3-r4a
gggacccctcccttagccactgctcagctttattgcactcattgtcaacagcatctctttcaggtgtggataatgacttggcagcatttctgtggtcaacaatgcacttcaaaagatctctcatggcttcagctctcacttcgtcatctttacaacgattttcaattggatctacaagctttttcagctcctcaagtttgctactgtaaactgcttctgtctcatcatcaccttcttcgtaaagccaatcttcagtctgttgtaaattaactgagatttgttccctttctgaatcagtagcaaagctccggtacctctcagaaagcttgttacgggtgtcatatacataagattctaatgcattcttcctgtcctttgtccattccacaagtttatcctgataagccaattgctgttcttgctcttgagcttccagcaattcatgcttgctcattgcaccatatatgtactcagtgattggcaactcctgccgctggatagacctttcacttcttgacttgtgaccctgcatgtcatcaccactgctatccacctccatatgatcagtagaacttccattcctttgataatcatttatcaaaacggcagattcgactgaaaccaaaccatgtagattcaagcgaatttttactttgactttagaagcttcggtatgtgcttggaaatggccaatctgaaaactaccgatgt

SEQ ID NO: 9352 - DNA, 755 bp, Zea mays
  Clone ID: LIB3137-028-Q1-K1-E3-r5a
gaagcggtcacccaatggcgggcctagtgttgtacagagtcgattatatgacggtgttagcaggaactcgttcattcatatatatgctacaaaatgattaaggccttgttcgtttctaccggattggtgggtcggaacgattcctagccggattgcttctctaatttatataaactttgattagctggaacgattccgggtgcaatccgacgtaaacgaacaaggtctaagacatgtgtggccgtacagtaaagaaacctcgtgatcgtgaaaatatttaatctctatcaggtgtaggcatgtaatctgaacccctgctgccatctgtccttgctggagagcccttgtgccttgttatgtttcgacagaacgtatccagctcttcttcctttctcttgatttcacaggaccaaagtactgggtccacattcttgggcaaggattcttgaagttgggacccctcccttagccactgctcagctttattgcactcattgtcaacagcatctctttcaggtgtggataatgacttggcagcatttctgtggtcaacaatgcacttcaaaagatctctcatggcttcagctctcacttcgtcatctttacaacgattttcaattggatctacaagctttttcagctcctcaagtttgctactgtaaactgcttctgtctcatcatcaccttcttcgtaaagccaatcttcagtctgttgtaaaataactgagattttgtccctttctgaatcagtagca

SEQ ID NO: 9353 - DNA, 396 bp, Zea mays
  Clone ID: LIB3137-050-Q1-K1-G10-f4a
gagtcgattatatgacggtgttagcaggaactcgttcattcatatatatgctacaaaatgattaaggccttgttcgtttctaccggattggtgggtcggaacgattcctagccggattgcttctctaatttatataaactttgattagctggaacggtatatggtgccattcttattgactctaaaccccaaggtcccgaggagggatcgagctagactacttgatatcaatcgtcacatatttgcttgccagcggaaaaaacttaatgcggtcgccataggtaacgctaaagtctcacttgatcgaaataaattgtacactaatgcccatgagtggtagtacaatgctccaaccatacctatagaaaacattcatgcattgacgaagtgcgatga

SEQ ID NO: 9354 - DNA, 525 bp, Zea mays
  unsure (1)..(525): unsure at all n locations; Clone ID: LIB3137-060-Q1-K1-D9-r4a
aacngcggnctgggcgcggaggcagggaactcgaaggggctggatgccgccatgaaggacctggccatgatttctttgcagtggcccgtcaagaccaaggccaggaagtccgtggccagcttcaagatccgtgagggaaacaccatcggtatcgcagtcaccctccgcggcaggataatgtacaacttcctggataggctcatcaaccttgggctccctaggaccatggacttcctgggtgtcaaccccaacagcttcgacgggcacggcaactacagccttggcctccgtgaccagggcgtgttcccggagatcccgtacgaggtgggcgggaagaagaacgggatggaccttgtccttgtcaccaacgcccaaaacggccaccaaggcttcaaggttgttgttcttcttcggatggcattcttggagaacattaaaaaccacctggtgattccgaagaagaagttggaagcccaaccatttcttgaccaaggccaagggaaaggaaggacaacgttaagaaaa

SEQ ID NO: 9355 - DNA, 592 bp, Zea mays
  Clone ID: LIB3137-061-Q1-K1-A1-R3A
ctcttaccgagctcccctttggcgccagggtaatcatcggccgtcttcttgtacttgtaccagctggctatgacgaggtaggcaaggaagttgaggaggctgagcacggcgagcagccagaagaagtagtcgaggtggccgcggttgaggttctccgggatccacccgatgcggccgtgcctggtggtgatgtgggtgacgatggtcaccaggaccgtgctgaggtagttgccgagcgcgacggtggtgagcgacagcgcggagcacatgctcctcatggcgtcgggcgcctggtcgtagaagaactccagctgccccacgaaggtgaacacctccgcgcatccgatgatgaagtactgcggtatctgccagaagatggagatgggcacgatgtcgttctcgccgtacaggccgtgccgcgcgatggcgcgcagccgcacgatgttcagcacgcccgccgtcaccatggagaagatggagacgacgaggcccatgcccatgcgctgcagctgcgtgaacccgcgcggcctcccggtgtaggaacgcaccaggggcacgatggcgcggtcgtacacggggacccagacgatga

SEQ ID NO: 9356 - DNA, 432 bp, Zea mays
  Clone ID: LIB3137-003-Q1-F1-E1
ctttgttttatttttttttgtttttatttttttttttttttttttttttttctttttttgtcaattttttttttctttttttttttttttttttttttttttttttttttttttttttttttttttttttaaaataaaaacaatccccttcttaaaaaatctccctttttttttcccctattttttttaaaaattttttcaatttaattttcctttttctttctaaatattttttaataaatctattctttccatattttaatctcccctcttctattttcattaaaaacttaaaccccccatataaattctttttttcatttttaaatatctctccctctataaaactcatttttaaacatatcctattttttatccccactttttttttttttaatccttattatattcttatttttatttattatattt

SEQ ID NO: 9357 - DNA, 556 bp, Zea mays
  Clone ID: LIB3137-003-Q1-F2-E1
acaaaaaaaaaacatttcccccaaaaaaaaaacttttttttttttttcccgggttttttaaaaaggggggggggggggggggccccttcccccccccaaaggaaaaaaaacccccccccttttccttattggggggggccccccccagggggggaaaaaaaaaaaaaccccccaaaaaaaaaaggggtttaaaaattgagggctccccccccggggaccccggggggggaaaaaaaaaaaaggggcccccccccccttttttttttaaaacgggggggggcccccggtttttggggggggggccccccgaaagggcccaggcccaattttggggggggaaaaggggggggttcctttctcccccctttttttttgggcccctcctcaaaggggggggggggagaaaaataatatttggggggaaaaaaaaaaaaggggggggggggctggggattttccacgaaacccggggggggaaaaaaaaaaccccggtttttaaaaaggggggaaacccccccccccccccccccctataaaggggggggggttttttggg

SEQ ID NO: 9358 - DNA, 315 bp, Zea mays
  Clone ID: LIB3137-003-Q1-R1-E1
cgcaaactcaggggaggcgcgcgcaacaagaccacgagggagcagcgggcaggcaggcaggcagccatggggaggtctccgtgctgcgagaaggcgcacacgaacaagggcgcctggaccaaggaggaggaccagcgcctgatcgcctacatcagggcgcacggcgaggggagctggcgctcgctgcccaaggccgcgggactcctccgctgcggcaagagctgcaggctccgctggatgaactacctccgcccggacctcaagcgcggcaacttcaccggcgacgacgacgagctcatcatcaagctccacgcc

SEQ ID NO: 9359 - DNA, 450 bp, Zea mays
  Clone ID: LIB3137-003-Q1-R2-E1
cgcaaactcaggggaggcgcgcgcaagcaagaccacgagggagcagcgggcaggcaggcaggcagccatggggaggtctccgtgctgcgagaaggcgcacacgaacaagggcgcctggaccaaggaggaggaccagcgcctgatcgcctacatcagggcgcacggcgaggggagctggcgctcgctgcccaaggccgcgggactcctccgctgcggcaagagctgcaggctccgctggatgaactacctccgcccggacctcaagcgcggcaacttaaccggcgacgacgacaagctcatcatcaagctccacgccctgctcggcaccaagtggtcgctcatcgcggggcagttgcccggccggacggacaacgagatcaagaactactggaacacgcacatcaagcgcaagctgctcagccgcggcatcgacccgcagacgcaccgccc

SEQ ID NO: 9360 - DNA, 275 bp, Zea mays
  Clone ID: LIB3137-013-H10-F2M
ggggaggaggggagtagcctaacattgttgagcaaaaaaatgttattttaaaaacaacttcgacctgccggatttgaaccaacgacctaaggatttcatttggaatccactacagtccttcgctttaccaaatgaggtaaggtggggttttaacaatttcttggccttaaaatatttataaccgggacatacaccttaaacactcatactggaactagggggaaacacccaaaaaaaagttggaaaccttgtccttttattttttttggaacttt

SEQ ID NO: 9361 - DNA, 404 bp, Zea mays
  Clone ID: LIB3137-013-H10-R2M
gagctcactagttggcgggcgcccttttttttttttttttttttaaaatgtatcccctctgtcgaagtcgttatcacagaaacatcaccagtgggcagtgaatacaagaaaccatatttgaaaaaggaacagaactgcaggcaacgacagtgggtgcaccttgccggccggcgaggggagactagacgactgatcgggcagcttgcatgtcgctagttgggtatctccctcccggcaagccgacggcggccggattattgccgctgacgtctgacggtgatacatggccgatcaagaagacaagaacgaaaaccaattcaaatacagttgaatagagaatagatccacatttattcttcgctatatatatagctggccgtcgtcgtcgatcaggcgccactaat

SEQ ID NO: 9362 - DNA, 714 bp, Zea mays
  Clone ID: LIB3137-013-H10-A10.P1+
atcaagactcatcgataccgtcgacctcgagaacacgccgaggccgccgcgcgcgcctacgaccacgccgcgcgccacatccgcgggcccagggccaagctcaacttcccctcctcctcctccgcctccgctgccggggcccccgccagccgcaagcgcgcccgcaccgccgacgccgacgccgtcatcgacctcgaggaacaagagcagcgtccggccgcggcggccctgaagcacgaggccgccgagtgctccggatccgacgcgctcccggacttctcgtggcaaggcgtgtcggcggcgtacgacgaggcctccgcgccgcgcccggccttcgacttcgaggcgcgcccggagagcgccgcggacgaggcgtcgccccgggcctccgactccgagtcggacgcgatgttcgactcgctcctcttcggcgaccagttcgccttcttcgacgccggcgcgtacgagtcgctggacagcctgttcagcgccgacgccgtgcagagcaacgccgccgccgcggcggaccaggacatgccgctgtggagcttcgacgacggctgcctcgtcgaggacaacctctcgttttaagcttcggcgactgttgctgtgtcttgagttttgtaaattacgatctgtttttttttttttttgagtttctgcttatgtatatctgtatcgatggtgagctgaatgaaatcatccttctcagga

SEQ ID NO: 9363 - DNA, 397 bp, Zea mays
  Clone ID: LIB3137-013-H10-A10.P1-
ggccgccaccgcggtgaacacggcggaagggaaggtgccgagccagacgcggacgcccttgacggggtcgcggatctcggcggcccacttgccccacgggcggcgccggacgcccctgtactgctggacgggcgcccggcgccggctccgctgctactgacgcgccctggactgcgataacgcggacgaggcacggacgacaaaggcagacttgctgtacaccacccactacaaagaactactcctactgcagggagagcagaagaaactcccggaacgcggcctcgaagtcgttcgccttccgccgcttgcacttgccggcgggccacgccgcgccgccgcggcgcgccggcgtggtcgggatgagctcggcgaggatcgcaccaccacacatgtt

SEQ ID NO: 9364 - DNA, 721 bp, Zea mays
  unsure (1)..(721): unsure at all n locations; Clone ID: LIB3137-013-H10-A11.P1+
tcaagactcatcgataccgtcgacctcgagaacaagagtacaggttacagacaggcagagagcaaagatgtgtggtggtgcgatcctcgccgagctcatcccgaccacgccggcgcgccgcggcggcgcggcgtggcccgccggcaagtgcaagcggcggaaggcgaacgacttcgaggccgcgttccgggagttcgacgaggactccgaggaggaggaggaggacgacgagggggtggtggagagcaagcccgccttcgtcgtccgcgcctcgtccgcggcgacgcagcccagggcgcgccaggagcagcggagccggcgccgggcgcccgaccagcagtacaggggcgtccggcgccgcccgtggggcaagtgggccgccgagatccgcgaccccgtcaagggcgtccgcgtctggctcggcaccttcccttccgccgaggccgccgcgcgcgcctacgaccacgccgcgcgccacatccgcgggcccagggccaagctcaacttcccctcctcctcctccgcctccgctgccggggcccccgccagccgcaagcgcgcccgcaccgccgacgccgacgccgtcatcgacctcgaggaacaagagcagcgtccggccgcggcggccctgaagcacgaggccgccgagtgctccggatccgacgcgctcccggacttctcgtggcaaggcgtgtncgcggcgtacgacgagggctccgcg

SEQ ID NO: 9365 - DNA, 52 bp, Zea mays
  Clone ID: LIB3137-013-H10-A11.P1-
ggccgccaccgcggtgaacaactctatctccttttcttcgcgtgtgtttggc

SEQ ID NO: 9366 - DNA, 493 bp, Zea mays
  Clone ID: LIB3137-013-H10-A12.P1+
aagcttatcgataccgtcgacctcgagaacaggatccgacgcgctcccggacttctcgtggcaaggcgtgtcggcggcgtacgacgaggcctccgcgccgcgcccggccttcgacttcgaggcgcgcccggagagcgccgcggacgaggcgtcgccccgggcctccgactccgagtcggacgcgatgttcgactcgctcctcttcggcgaccagttcgccttcttcgacgccggcgcgtacgagtcgctggacagcctgttcagcgccgacgccgtgcagagcaacgccgccgccgcggcggaccaggacatgccgctgtggagcttcgacgacggctgcctcgtcgaggacaacctctcgttttaagcttcggcgactgttgctgtgtcttgagttttgtaaattacgatctgtttttttttttttttgagtttctgcttatgtatatctgtatcgatggtgagctgaatgaaatcatccttctcaggaagt

SEQ ID NO: 9367 - DNA, 392 bp, Zea mays
  Clone ID: LIB3137-013-H10-A12.P1-
ctcggagttctcgtgcttagggccgccgcggccggcacactggtcttgttcctcgaggccgatgacggagttggagtcggcggtgcggagcgcgcttgccgatggcgggggccccgcctgcggatgcggaggaggaggaagggaagattagcttgctcctgggccccaggatgtgttcttcgagcggtcgcaggacgagcgcggtggaccatcctgtgaagcaccgagcccaggcagacgaccacccccttgacgggggaccagaacatgccggtccacttgtcccacggacggtgcctcactcaggacaacttctggtcttaagctcggggcactgttgcttggtcctgacgcgcgcagatctcgatctgcgcttactatgctcggacgac

SEQ ID NO: 9368 - DNA, 719 bp, Zea mays
  unsure (1)..(719): unsure at all n locations; Clone ID: LIB3137-013-H10-A7.P1+
ccgtcgacctcgagaacagatacagatatacataagcagaaactcaaaaaaaaaaaaaaacagatcgtaatttacaaaactcaagacacagcaacagtcgccgaagcttaaaacgagaggttgtcctcgacgaggcagccgtcgtcgaagctccacagcggcatgtcctggtccgccgcggcggcggcgttgctctgcacggcgtcggcgctgaacaggctgtccagcgactcgtacgcgccggcgtcgaagaaggcgaactggtcgccgaagaggagcgagtcgaacatcgcgtccgactcggagtcatgaggcccggggcgacgcctcgtccgcggcgctctccgggcgcgcctcgaagtcgaaggccgggcgcggcgcggaggcctcgtcgtacgccgccgacacgccttgccacgagaagtccgggagcgcgtcggatccggagcactcggcggcctcgtgcttcagggccgccgcggccggacgctgctcttgttcctcgaggtcgatgacggcgtcggcgtcggcggtgcgggcgcgcttgcggctggcggnggccccggcagcggaggcggaggaggaggaggggaagttgagcttggccctgggcccgcggatgtggcgcgcggcgtggtcgtaggcgcgcgcggcggcctccgcggaagggaagtgccgagccagacgcggacgcccttgacggngtcgcggatctcggc

SEQ ID NO: 9369 - DNA, 62 bp, Zea mays
  Clone ID: LIB3137-013-H10-A7.P1-
ggccgccaccgcggtgaacagtatcgatggtgagctgaatgaaatcatccttctcaggaagt

SEQ ID NO: 9370 - DNA, 484 bp, Zea mays
  Clone ID: LIB3137-013-H10-A9.P1-
atcgcactagcgtctatttcggccgccaccgcggtcgaacactttctcgtggcaaggcgtgtcggcggcgtacgacgaggcctccgcgccgcgcccggccttcgacttcgaggcgcgcccggagagcgccgcggacgaggcgtcgccccgggcctccgactccgagtcggacgcgatgttcgactcgctcctcttcggcgaccagttcgccttcttcgacgccggcgcgtacgagtcgctggacagcctgttcagcgccgacgccgtgcagagcaacgccgccgccgcggcggaccaggacatgccgctgtggagcttcgacgacggctgcctcgtcgaggacaacctctcgttttaagcttcggcgactgttgctgtgtcttgagttttgtaaattacgatctgtttttttttttttttgagtttctgcttatgtatatctgtatcgatggtgagctgaatgaaatcatccttctcaggaagt

SEQ ID NO: 9371 - DNA, 493 bp, Zea mays
  Clone ID: LIB3137-013-H10-B12.P1+
acctcctgagaaggaggatttcattcagctcaccctcgatcccgatatacctaagccgaaactcaaaaaaaaaaaaaaacagatcggaatttacaaaactcaagacacagcaacaggcgccgaagcttaaaacgagagggtgtcctcaacgaggcaaccgtcgtcaaaactccacaggggcatgtcctggccccccccggggggggggttgctttgcacggggtcggcgctgaacaggctgtccagggacttgtaccccccggggtcaaaaaaggcgaactggtcccccaaaaggagcgagtcaaacatcgcgtcccactcggagtcggaggcccggggcgaccccttgtccgcggggctttccgggcgcccctcgaaatcaaaggccgggcccggcgcggaggcctttttgtacgccgcccacacgccttgccaagaaaagtccgggagcccgtcggatccggagcacttggggggctcgtgctttaaggcc

SEQ ID NO: 9372 - DNA, 137 bp, Zea mays
  Clone ID: LIB3137-013-H10-B7.P1+
gggggaacctcccgagaagggagattttattcagctcaccatcggtcccgatttacctaagccgaaactcaaaaaaaaaaaaaaacagatcgtaatttacaaaacttaagaacagcaacaggcgccgaagcttaaaa

SEQ ID NO: 9373 - DNA, 733 bp, Zea mays
  Clone ID: LIB3137-013-H10-B8.P1+
tatcaagactcatcgataccgtcgacctcgagaacagaggaggaggacgacgagggggtggtggagagcaagcccgccttcgtcgtccgcgcctcgtccgcggcgacgcagcccagggcgcgccaggagcagcggagccggcgccgggcgcccgaccagcagtacaggggcgtccggcgccgcccgtggggcaagtgggccgccgagatccgcgaccccgtcaagggcgtccgcgtctggctcggcaccttcccttccgccgaggccgccgcgcgcgcctacgaccacgccgcgcgccacatccgcgggcccagggccaagctcaacttcccctcctcctcctccgcctccgctgccggggcccccgccagccgcaagcgcgcccgcaccgccgacgccgacgccgtcatcgacctcgaggaacaagagcagcgtccggccgcggcggccctgaagcacgaggccgccgagtgctccggatccgacgcgctcccggacttctcgtggcaaggcgtgtcggcggcgtacgacgaggcctccgcgccgcgcccggccttcgacttcgaggcgcgcccggagagcgccgcggacgaggcgtcgccccgggcctccgactccgagtcggacgcgatgttcgactcgctcctcttcggcgaccagttcgccttcttcgacgccggcgcgtacgagtcgctggacagcctgttcagcgccgacgccgtgcagagcaacg

SEQ ID NO: 9374 - DNA, 391 bp, Zea mays
  Clone ID: LIB3137-013-H10-B8.P1-
ggccgccaccgcggtcaacagatccggagcactcggcggcctcgtgcttagggccgccgcggccggacgctgctcttgttcctcgaggtcgatgacggcgtcggcgtcggcggtgcgggcgcgcttgcggctggcgggggccccggcagcggaggcggaggaggaggaggggaagttgagcttggccctgggcccgcggatgtggcgcgcggcgtggacgtaggcgcgcgcggtggcctcggcggaagggaaggtgccgagccagacgcggacgcccttgacggggtcgcggatctcggcggcccacttgccccacgggcggcgccgaacgcccctgtactgctggacggacgcccggcaccgactccagtgctgctgacacgccctgaac

SEQ ID NO: 9375 - DNA, 763 bp, Zea mays
  unsure (1)..(763): unsure at all n locations; Clone ID: LIB3137-013-H10-B9.P1+
atcaagactcgccgataccgtcgacctcgagaacaagatccgcgaccccgtcaagggcgtccgcgtctggctcggcaccttcccttccgccgaggccgccgcgcgcgcctacgaccacgccgcgcgccacatccgcgggcccagggccaagctcaacttcccctcctcctcctccgcctccgctgccggggcccccgccagccgcaagcgcgcccgcaccgccgacgccgacgccgtcatcgacctcgaggaacaagagcagcgtccggccgcggcggccctgaagcacgaggccgccgagtgctccggatccgacgcgctcccggacttctcgtggcaaggcgtgtcggcggcgtacgacgaggcctccgcgccgcgcccggccttcgacttcgaggcgcgcccggagagcgccgcggacgaggcgtcgccccgggcctccgactccgagtcggacgcgatgttcgactcgctcctcttcggcgaccagttcgccttcttcgacgccggcgcgtacgagtcgctggacagcctgttcagcgccgacgccgtgcagagcaacgccgccgccgcggcggaccaggacatgccgctgtggagcttcgacgacggctgcctcgtcgaggacaacctctcgttntaagcttcggcgactgttgctgtgtcttgagttttgtaaattacgatctgtttttttttttttttgagtttctgctaatgtatatctgnatcgatggtgagctgaatgaaatcatccttctca

SEQ ID NO: 9376 - DNA, 231 bp, Zea mays
  Clone ID: LIB3137-013-H10-C11.P1-
gggttaacttcctgagaaggatgattttatttagctcacccttggttccgattttcataagcagaaactcaaaaaaaaaaaaaaacagatcgtaatttacaaaacttaagacacagcaacagtcgccgaaacttaaaacgagaggttttccttaacaaggcaaccgtcgtcaaaactccacaggggcatgtcctggtcccccccggggggggggttttttttcacggggtt

SEQ ID NO: 9377 - DNA, 119 bp, Zea mays
  Clone ID: LIB3137-013-H10-C7.P1-
cttttttattatctttttcaatttatgtggtacttttttgtgtaaatgtgtgtgggaggaacttccggggaagggggaatttatttaggttaccgttattgccgatttacctaatgcgg

SEQ ID NO: 9378 - DNA, 414 bp, Zea mays
  Clone ID: LIB3137-013-H10-C8.P1+
gccaaacacacgcgaagaaaaggagatagagtacaggttacagacaggcagagagcaaagatgtgtggtggtgcgatcctcgccgagctcatcccgaccacgccggcgcgccgcggcggcgcggcgtggcccgccggcaagtgcaagcggcggaaggcgaacgacttcgaggccgcgttccgggagttcgacgaggactccgaggaggaggaggaggacgacgagggggtggtggagagcaagcccgccttcgtcgtccgcgcctcgtccgcggcgacgcagcccagggcgcgccaggagcagcggagccggcgccgggcgcccgaccagcagtacaggtgcgtccggcgccgcccgtggggcaagtgggccgccgagatccgcgaccccgtcaagggcgttcgcgtttggctc

SEQ ID NO: 9379 - DNA, 370 bp, Zea mays
  unsure (1)..(370): unsure at all n locations; Clone ID: LIB3137-013-H10-D10.P1-
gccaaacacacgcgaagaaaaggagatagagtacaggttacagacaggcagagagcaaagatgtgtggtggtgcgatcctcgccgagctcatcccgaccacgccggcgcgccgcggcggcgcggcgtggcccgccggcaagtgcaagcggcggaaggcgaacgacttcgaggccgcgttccgggagttcgacgaggactccgaggaggaggaggaggacgacgagggggtggtggagagcaagcccgccttcgtcgtccgcgcctcgtccgcggcgacgcagcccagggcgcgccaggagcagcggagccggcgccgggcgcccgaccagcagtacaggggcgtncggcgccgcccgtggggcaagtggg

SEQ ID NO: 9380 - DNA, 460 bp, Zea mays
  Clone ID: LIB3137-013-H10-D12.P1-
gccaaacacacgcgaagaaaaggagatagagtacaggttacagacaggcagagagcaaagatgtgtggtggtgcgatcctcgccgagctcatcccgaccacgccggcgcgccgcggcggcgcggcgtggcccgccggcaagtgcaagcggcggaaggcgaacgacttcgaggccgcgttccgggagttcgacgaggactccgaggaggaggaggaggacgacgagggggtggtggagagcaagcccgccttcgtcgtccgcgcctcgtccgcggcgacgcagcccagggcgcgccaggagcagcggagccggcgccggacgcccgaccagcagtacaggggcgtccggcgccgaccgtggggcaagtggaccgacgagatccgtaaccccgtcaaggacgtacgcaaatgactcgaaaccttaccttacaacaaggacaacacgcacgcctacgaccaca

SEQ ID NO: 9381 - DNA, 726 bp, Zea mays
  Clone ID: LIB3137-013-H10-D7.P1+
atcaagactcgccgataccgtcgacctcgagaacatttttttttttttttttttttttttttgttttacttcctgagaaggatgatttcattcagctcaccatcgatacagatatacataagcagaaactcaaaaaaaaaaaaaaacagatcgtaatttacaaaactcaagacacagcaacagtcgccgaagcttaaaacgagaggttgtcctcgacgaggcagccgtcgtcgaagctccacagcggcatgtcctggtccgccgcggcggcggcgttgctctgcacggcgtcggcgctgaacaggctgtccagcgactcgtacgcgccggcgtcgaagaaggcgaactggtcgccgaagaggagcgagtcgaacatcgcgtccgactcggagtcggaggcccggggcgacgcctcgtccgcggcgctctccgggcgcgcctcgaagtcgaaggccgggcgcggcgcggaggcctcgtcgtacgccgccgacacgccttgccacgagaagtccgggagcgcgtcggatccggagcactcggcggcctcgtgcttcagggccgccgcggccggacgctgctcttgttcctcgaggtcgatgacggcgtcggcgtcggcggtgcgggcgcgcttgcggctggcgggggccccggcagcggaggcggaggaggaggagggggaaagttgagcttgggccctggggcccccgatgtggcgcgcggcgtggt

SEQ ID NO: 9382 - DNA, 486 bp, Zea mays
  Clone ID: LIB3137-013-H10-D8.P1-
gccaaacacacgcgaagaaaaggagatagagtacaggttacagacaggcagagagcaaagatgtgtggtggtgcgatcctcgccgagctcatcccgaccacgccggcgcgccgcggcggcgcggcgtggcccgccggcaagtgcaagcggcggaaggcgaacgacttcgaggccgcgttccgggagttcgacgaggactccgaggaggaggaggaggacgacgagggggtggtggagagcaagcccgccttcgtcgtccgcgcctcgtccgcggcgacgcagcccagggcgcgccaggagcagcggagccggcgccgggcgcccgaccagcagtacaggggcgtccggcgccgcccgtggggcaagtgggccgccgagatccgcgaccccgtcaagggcgtccgcgtatggctcggcaccttcccttccggcgaggccgccgcgcgcgcctacgaccacgccgtgcgccacatacgtggacccagg

SEQ ID NO: 9383 - DNA, 604 bp, Zea mays
  Clone ID: LIB3137-013-H10-E7.P1+
cgtcgacctcgagaacaaggtcgatgacggcgtcggcgtcggcggtgcgggcgcgcttgcggctggcgggggccccggcagcggaggcggaggaggaggaggggaagttgagcttggccctgggcccgcggatgtggcgcgcggcgtggtcgtaggcgcgcgcggcggcctcggcggaagggaaggtgccgagccagacgcggacgcccttgacggggtcgcggatctcggcggcccacttgccccacgggcggcgccggacgcccctgtactgctggtcgggcgcccggcgccggctccgctgctcctggcgcgccctgggctgcgtcgccgcggacgaggcgcggacgacgaaggcgggcttgctctccaccaccccctcgtcgtcctcctcctcctcctcggagtcctcgtcgaactcccggaacgcggcctcgaagtcgttcgccttccgccgcttgcacttgccggcgggccacgccgcgccgccgcggcgcgccggcgtggtcgggatgagctcggcgaggatcgcaccaccacacatctttgctctctgcctgtctgtaacctgtactctatcttcttttcttcgcgtgtgtttggc

SEQ ID NO: 9384 - DNA, 540 bp, Zea mays
  Clone ID: LIB3137-013-H10-E7.P1-
cgccaccgaggacaacagacctcgaggaacaagagcattgtccggccgcggcggtccctgaagcacgaggccgccgagtgctccggatccgacgcgctcccggacttctcgtggcaaggcgtgtcggcggcgtacgacgaggcctccgcgccgcgcccggccttcgacttcgaggcgcgcccggagagcgccgcggacgaggcgtcgtcccgggcctccgactccgagtcggacgcgatgttcgactcgctcctcttcggcgaccagttcgccttcttcgacgccggcgcgtacgagtcgctggacagcctgttcagcgccgacgccgtgcagagcaacgccgccgccgcggcggaccaggacatgccgctgtggagcttcgacgacggctgcctcgtcgaggacaacctctcgttttaagcttcggcgactgttgctgtgtcttgagttttgtaaattacgatctgtttttttttttttttgagtttctgcttatgtatatctgaatcgatggagagctgaatgaaatcatccttctca

SEQ ID NO: 9385 - DNA, 703 bp, Zea mays
  Clone ID: LIB3137-013-H10-F10.P1+
atcaagactcatcgattccgtcgacctcgagaacagcgcgcgcctacgaccacgccgcgcgccacatccgcgggcccagggccaagctcaacttcccctcctcctcctccgcctccgctgccggggcccccgccagccgcaagcgcgcccgcaccgccgacgccgacgccgtcatcgacctcgaggaacaagagcagcgtccggccgcggcggccctgaagcacgaggccgccgagtgctccggatccgacgcgctcccggacttctcgtggcaaggcgtgtcggcggcgtacgacgaggcctccgcgccgcgcccggccttcgacttcgaggcgcgcccggagagcgccgcggacgaggcgtcgccccgggcctccgactccgagtcggacgcgatgttcgactcgctcctcttcggcgaccagttcgccttcttcgacgccggcgcgtacgagtcgctggacagcctgttcagcgccgacgccgtgcagagcaacgccgccgccgcggcggaccaggacatgccgctgtggagcttcgacgacggctgcctcgtcgaggacaacctctcgttttaagcttcggcgactgttgctgtgtcttgagttttgtaaattacgatctgtttttttttttttttgagtttctgcttatgtatatctgtatcgatggtgagctgaatgaaatcatccttctcaggaag

SEQ ID NO: 9386 - DNA, 466 bp, Zea mays
  unsure (1)..(466): unsure at all n locations; Clone ID: LIB3137-013-H10-F10.P1-
gggcgccaccgnggtgaacacgcgcggcggcctcggcggaagggaaggtgccgagccagacgcggacgcccttgacggggtcgcggatctcggcggcccacttgccccacgggcggcgccggacgcccctgtactgctggtcgggcgcccggcgccggctccgctgctcctggcgcgccctgggctgcgtcgccgcggacgaggcgcggacgacgaaggcgggcttgctctccaccaccccctcgtcgtcctcctcctcctcctcggagtcctcgtcgaactcccggaacgcggcctcgaagtcgttcgccttccgccgcttgcacttgccggcgggccacgccgcgccgccgcggcgcgccggcgtggtcgggatgagctcggcgaggatcgcaccaccacacatctttgctctctgcctgtctgtaacctgtactctatctccttttcttcgcgtgtgtttggc

SEQ ID NO: 9387 - DNA, 733 bp, Zea mays
  unsure (1)..(733): unsure at all n locations; Clone ID: LIB3137-013-H10-F7.P1+
atcaagactcattcgatatccgtncgaccttcgaaaacaatacataagcagaaactcaaaaaaaaaaaaaaacagatcgtaatttacaaaactcaagacacagcaacagtcgccgaagcttaaaacgagaggttgtcctcgacgaggcagccgtcgtcgaagctccacagcggcatgtcctggtccgccgcggcggcggcgttgctctgcacggcgtcggcgctgaacaggctgtccagcgactcgtacgcgccggcgtcgaagaaggcgaactggtcgccgaagaggagcgagtcgaacatcgcgtccgactcggagtcggaggcccggggcgacgcctcgtccgcggcgctctccgggcgcgcctcgaagtcgaaggccgggcgcggcgcggaggcctcgtcgtacgccgccgacacgccttgccacgagaagtccgggagcgcgtcggatccggagcactcggcggcctcgtgcttcagggccgccgcggccggacgctgctcttgttcctcgaggtcgatgacggcgtcggcgtcggcggtgcgggcgcgcttgcggctggcgggggccccggcagcggaggcggaggaggaggaggggaagttgagcttggccctgggcccgcggatgtggcgcgcggcgtggtcgtaggcgcgcgccgcggcctcggcggaagggaaggtgccgagccagacgcggacgcccttgacggngtcgcggatctcggcgg

SEQ ID NO: 9388 - DNA, 71 bp, Zea mays
  Clone ID: LIB3137-013-H10-F7.P1-
ggccgccaccgcggtgaacatgtatatctgtatcgatggtgagctgaatgaaatcatccttctcaggaagt

SEQ ID NO: 9389 - DNA, 127 bp, Zea mays
  unsure (1)..(127): unsure at all n locations; Clone ID: LIB3137-013-H10-G12.P1-
gggnnaacttcctgagaaggatgatttcattcagctcaccatcgatacagatatacataagcagaaactcaaaaaaaaaaaaaaccagatcgtattttacaaaacttaagacccagcaacagtggcc

SEQ ID NO: 9390 - DNA, 414 bp, Zea mays
  Clone ID: LIB3137-013-H10-H11.P1+
acttcctgagaaggatgattttatttagcttaccattgattcagattttcattagccgaaacttaaaaaaaaaaaaaaacagatcgtaatttacaaaacttaagacacagcaacagtcgccgaagtttaaaacgagaggttttccttaacgaggcaaccgtcgtcaaaatttcacaggggcattttctggtcccccgcggggggggggttttttttcacggggttggcgcttaacaggttttccagcgacttttaccccccggcgtcaaaaaaggcaaactggtccccgaagaggagcgagtcgaacattgggtcccactcggagtcggaggcccggggcgaccccttttccgcggtgtttttcgggcgccccttaaaatctaaggccgggcgcggcccggaggccttttttta

SEQ ID NO: 9391 - DNA, 204 bp, Zea mays
  Clone ID: LIB3137-013-H10-H11.P1-
gacacaccctgaagcggcacattaaacacggcgaatgtggaggatacacacaacgagaccggtacacttgacagcgccctaacgcccactactttcagctacttcccttccttactcaacacgtacaacgactatccccgaaaaacactaaaacggaggctaccttaagggaagcaataaaatgctaaacgggtcgcttgcccc

SEQ ID NO: 9392 - DNA, 769 bp, Zea mays
  Clone ID: LIB3137-013-H10-H8.P1+
tcaagactcatctattccgtcgacctcgagacagaggccgcgttccgggagttcgacgaggactccgaggaggaggaggaggacgacgagggggtggtggagagcaagcccgccttcgtcgtccgcgcctcgtccgcggcgacgcagcccagggcgcgccaggagcagcggagccggcgccgggcgcccgaccagcagtacaggggcgtccggcgccgcccgtggggcaagtgggccgccgagatccgcgaccccgtcaagggcgtccgcgtctggctcggcaccttcccttccgccgaggccgccgcgcgcgcctacgaccacgccgcgcgccacatccgcgggcccagggccaagctcaacttcccctcctcctcctccgcctccgctgccggggcccccgccagccgcaagcgcgcccgcaccgccgacgccgacgccgtcatcgacctcgaggaacaagagcagcgtccggccgcggcggccctgaagcacgaggccgccgagtgctccggatccgacgcgctcccggacttctcgtggcaaggcgtgtcggcggcgtacgacgaggcctccgcgccgcgcccggccttcgacttcgaggcgcgcccggagagcgccgcggacgaggcgtcgccccgggcctccgactccgagtcggacgcgatgttcgactcgctcctcttcggcgaccagttcgccttcttcgacgccggcgcgtacgagtcgctggacagcctgttcagcgccgacgccgtgcagagcaacg

SEQ ID NO: 9393 - DNA, 190 bp, Zea mays
  Clone ID: LIB3137-013-H10-H8.P1-
cgccaccgcggcgaacagcctcgaagtcgttcgccttccgccgcttgcacttgccggcgggccacgccgcgccgccgcggcgcgccggcgtggtcgggatgagctcggcgaggatcgcaccaccacacatctttgctctctgcctgtctgtaacctgtactctatctccttttcttcgcgtgtgtttggc

SEQ ID NO: 9394 - DNA, 699 bp, Zea mays
  unsure (1)..(699): unsure at all n locations; Clone ID: LIB3137-013-H10-H9.P1+
gccaaacacacgcgaagaaaaggagatagagtacaggttacagacaggcagagagcaaagatgtgtggtggtgcgatcctcgccgagctcatcccgaccacgccggcgcgccgcggcggcgcggcgtggcccgccggcaagtgcaagcggcggaaggcgaacgacttcgaggccgcgttccgggagttcgacgaggactccgaggaggaggaggaggacgacgagggggtggtggagagcaagcccgccttcgtcgtccgcgcctcgtccgcggcgacgcagcccagggcgcgccaggagcagcggagccggcgccgggcgcccgaccagcagtacaggggcgtccggcgccgcccgtggggcaagtgggccgccgagatccgcgaccccgtcaagggcgtccgcgtctggctcggcaccttcccttccgccgaggccgccgcgcgcgcctacgaccacgccgcgcgccacatccgcgggcccagggccaagctcaacttcccctcctcctcctccgcctccgctgccggggcccccgccagccgcaagcgcgcccgcaccgncgacgccgacgccgtcatcgacctcgaggaacaagagcagcgtccggccgcggcggcccttgagcacgaggccgncgagtgcttcggatccgacgcgcttccggacttctcgtggcaaggcgtgtcgggcggcgta

SEQ ID NO: 9395 - DNA, 512 bp, Zea mays
  Clone ID: LIB3137-061-Q1-K1-F6-R2
caaagtgtcggcactgatggcgctgctggatcaggtggaccgcaagtacaggcactaccaccaccagatgcagatggtgatgtcgtccttcgacgcggtggccggcgccggcgcggcgaggccgtacacggcgctggcgctgcagaccatactcccggcacttccggtcgctgcgcgacgctgtcggcgcgcaggtgcagacgctgcggcggagcctgggcgagaaggacgggtccgagcagggaggcggtctgacccggctgcgctacatcgaccagcagctgcggcagcagcgcgccatgcaggagttcggtgtgatgcagtagccgcagtacgcctggcgcccgaagcgcggacttccggagtacggcgtattcgtgctacgagcctggctgtaggagcatttgctgcacccgtgcccggaatattccgagaagctgatgctcgctgggcagacaggcttggctaggggtcaagtctgcaactggttaatgaacgcgcgcgttgtactg

SEQ ID NO: 9396 - DNA, 627 bp, Zea mays
  Clone ID: LIB3137-001-Q1-K1-B9.F24
tgcgggctcccgcacccgacatctagcgccgccccagggcgccggcgccctgcccgagtcctacgacggctccccgctgcgtcgccaggcgttcgagagctacctcaccaagagcatcgtgtcctcgtcgccgaccagcacgctcctgtcgccgcccaagacgcccccgtcagagtcgccgccgctgtcgccggacggtgccgccgccgccttccgccgcgggtcctggccgggcgccgggtcccccgtcaacgacgtcctggcctcgctccgccagctccgcctcggcacggccagctcgtccccgaccggcgggtggggcggctacccggcgtccgcggctgcctacgggtcgcccactgcgggcgggctctacagcctgccctccaccccgagggccacgccgacagccctcgccaccgccaccgcctccggctacatgcccaacctggagccgcttgacgtcagcttcggcggcgacgaggagcccgtggagagggtggagtccgggcgtgccctccgcgccaaggtattttagcggctcagcagggagggcgctgtttcctgctacccagctgccggaaccggtggccccgacgtcgggtggggtttcgaccctatcaactg

SEQ ID NO: 9397 - DNA, 389 bp, Zea mays
  Clone ID: LIB3137-003-Q1-K1-F12.F2B
atctgcaatgcctcaggcctcagcttattagttgtccgtagacgcgaaacgcaaatattacaccaaaaaattctagcacatcgtgagtgacagttggctcggtaaaaaaaatacacaaggcgtactcccttccaaatgggaagctaaacaatatatatccacagtgcacaccaacagaacaccggcccccctcaacgccgccgcgtgccctcgtcacaacccccccgcggattctgcagtccaagggagagatcaagactcctgaggagcttgaaacctggagggagtgtcgatccccatcatgcacatgagtcctggtgtcaggatgatgagaagcactataccaacaaaagttccttgagggagactggtctagacgagggactggg

SEQ ID NO: 9398 - DNA, 750 bp, Zea mays
  unsure (1)..(750): unsure at all n locations; Clone ID: LIB3137-041-Q1-K1-C9.F24
ccgcctccggccgtcgaccgctcggccgccgcacgtcagaagaccaacaacgcgctcagggtaattcactacaccatgacctttctcaggagaacatatttatctccccgaaatactgacacttgcagttagagggaaaaaatatagagagaagtaaaaaaaaaaagattgatgtttgattttaccaatgctgcaacaagaaacagtggatcgaatcgaaatgtgttgttaggcttgcaactatatatgcagattcttagttaagaggaattgaaaaaggctctagagacatgtaaagcgcgggcggcgtggcgtcacggctcacgcacgccgcgatagagacaagcgcggcaaccatggtccatggccggcgcagagccgccgcctgatcttatcgcccgcgcacaaattaccacatgcgcggcgcgcaccggatccgacgtcacgtcgacctcatctccaagcctcttccaaacactccaatgcgtactggatgactgggtgctgtgccggatctacaacaagaagggtgttatcgagcggtacgacacagtggacgacgacgacggcgacggcgccgtggccgaagacgtcaagccggtgccggcgccggcggcgtcgaagaacccgcgtgccagtgcccgcgtaggggcagcagcggcggcgccgatgaaagtggagctccccgagtacggcggcggctactacgactacgacgacctgnagacgccgtcggcggggatgctgtgc

SEQ ID NO: 9399 - DNA, 423 bp, Zea mays
  Clone ID: LIB3137-041-Q1-K1-C9.R24
ggcgcggcgaccctcccggcttgtcggcgccggtggccttccagtaccctgtcccggccgcccggttaggcctggagccattcgggtacttgcggtcgcgcggcgagaagaagaaccactccttctccccaccgaacgccttctctgggagctgccatgggtcgaacttgtagagatccacctcggcgatgaccggcgcggcgagcggcaggccgccgcacttgcggaggagatagtacatcaccagctcgtcatcggtggggtggaagcggaacccacgcgggagctgcagcgcgccaccgcagtccattcgatcgatcacctagctagtggcaacaggcggaggcggccgggcggattggagcttctaaacgatcgaggagctgccgatcgctggaaagctgattgattgctgaggaagtc

SEQ ID NO: 9400 - DNA, 450 bp, Zea mays
  Clone ID: LIB3137-044-Q1-K1-B7.F2B
tttttttttttttgaattggaacaatgcgttattagccacggtgctggagagtatgcctccagaacctctcgtggcgcaaaaacagagaaaattttcggttccaaactacacaccagttttttatgggctgcacccacatcatgaggcccccgatttctaagctggcgtaagaaacttcttgctgggcttcttcgcggcgttgaactgtttgaaccacttggcaaactccttaatgtaacgcgtgcagatattgttgcggtcgacgtggacaatgccataacgttcggtgaagccggggaaccattcaaagttgtgcagcagataccaagcggaagagccttgcacatttgatcccaagctgtatgaacagatccattgattgaagcattagcttgagggaaccatgcatgcgccacatataaaggatggttacataacaaagaagcagt

SEQ ID NO: 9401 - DNA, 365 bp, Zea mays
  Clone ID: LIB3137-045-Q1-K1-F10.F2B
gctgctagcttgatttattcttagtaggtagagaggcaacaaaaacacgtgaaggcttgcagcaaccatataattattgttgtccacgtacgtcctcatcctccgtaaggcttctggtccttgcagggcacgttgtccccgtaccccacccggagcatatcgcaatacctcttgtaataaccgacccggtccttggcgccgtcggtggactggcccttgccgaactctaacccgccgttgatgatgttcgaggtgaggccatatccggggaacctcccggcggcgccgacggtggcggacggagttcaggcgccggtcatcacggcttggcacgacgggttgggcgactggggcgttatccaaaa

SEQ ID NO: 9402 - DNA, 231 bp, Zea mays
  Clone ID: LIB3137-050-Q1-K1-F9.F2B
agagtcgaaacactatcgctcgcattgaacgcatacaagtgtttctacaacttaactgcggcagcatttacagctgctacaactagcaatagaggtaaattaaccactttatgccgaaagtgtagtatacatatagtaaaactacaacgaaactatacagatggtactgctatatatgtacccaattttacccttgtacctatcactagaatgcttgaggataaagccatt

SEQ ID NO: 9403 - DNA, 401 bp, Zea mays
  Clone ID: LIB3137-058-Q1-K1-E12.F2B
acagctgcaaaggtaagcactaggatgctgctcttatttcaggaaaagggctccaaggccactacgattattattcaaggagcaacatcccatccaggaaacaaagggagcaccacgcctgactgcacacacaccaccaccaccaacgttccctctcaaccagcgcaacgcaaactactaacagtccatcagactactaaaaaagcgacacccggatcaatgatggaacaagaccttgacaaggtaggtaaatttaactcttgaagcaaagagcatcaactaacgcccgccgcctatcaaaagcagactctttttttggcctccgggaagggaaaaaaagaaagaaatggcatgggaaaagacacgacactccgagtgctccctctcactcatcgaacgat

SEQ ID NO: 9404 - DNA, 70 bp, Zea mays
  Clone ID: LIB3137-001-Q1-K1-B9.F15
ctgcgggtgctcccgccccgccgaggagttagcgccgtcccaggggcgccggtgccctgtccgagttcta

SEQ ID NO: 9405 - DNA, 293 bp, Zea mays
  Clone ID: LIB3137-011-Q1-K1-D3.F1
gctggaagggaactgagttggttttctcgctaagttaacactcgggattcgcgacgagctccagcagcaacataacatggcagcaaagcgcggtagcctggttaggaggggggttgcggtgggttggagctcaaggttcgtctctcgagggggggggtagtagggacggggagggagagggggcgacggcaaggagggcacggcgcccagtaggggggggggcgggggggggaggcggggcggggggtgcggcgagggggggcgcagggggggggtgtggggggggagggggg

SEQ ID NO: 9406 - DNA, 123 bp, Zea mays
  Clone ID: LIB3137-013-Q1-K1-A5.F1
ttttggtttttggcgggattgcacacaccgtggacgtgcaagtcaggtatggtagtgttaggattcagagtcaggggacaagtcggcatgcaggcatgacggacataaccacaccacagaacc

SEQ ID NO: 9407 - DNA, 132 bp, Zea mays
  Clone ID: LIB3137-024-Q1-K1-D9.F1
gcgtgtattgtcaaggatgttttggggtagcggtgtagtaggcgagggatccgtgggctctcgaaccgctagtggcgagtagtgacccggaaatgggggaggggtagggcaactggccagacgcgggtatcc

SEQ ID NO: 9408 - DNA, 355 bp, Zea mays
  Clone ID: LIB3137-027-Q1-K1-B8.F1
caaggcaaatagctttgcgcataacagaatatcagtccactaggcagcaggcctgtcaaagtcaaatacaccgtagtcagttctaacaacgctgcacccacaagggcaggcaggtcttcttcctggtggccggctcggagcacgaaaaccagcatccggccaccatttatcgacatagaaaccgaaacaaagcatgcggtataacatctagaatgcttaattaaaacagcagcaatggcagcttcatcgcatacaccggcgcgacgacgacaacaacagcaacaacacaaggtatagtagaagataatctatcagaatcggggacggcggttctggggtctgggcactcctcaag

SEQ ID NO: 9409 - DNA, 377 bp, Zea mays
  Clone ID: LIB3137-033-Q1-K1-C6.F1
gtggtttttttggtggggcggtcaacggcggatcggcgggaaggcgcggcggacgcggaggggggcggcaatgtccgcggcgggggtggaacaggggggaggaccgcagagacacgggggagaagagtcgcgggggggggggggaagggaggagggggggggcggggggaaggggggagaggagggggggggcgggtgggggggggcgggtaggggtggcacgggggggtgtgggggggggggggggggggggggggcgggggggggggggggggggggggaggggagggggcgggggtgtgcgacggggggagggagggggtgggggggcgggggggggggggggtggggcggggtgagtgggggggggggggggt

SEQ ID NO: 9410 - DNA, 410 bp, Zea mays
  Clone ID: LIB3137-041-Q1-K1-C9.F15
ctggatatgctcgagtaccgcctcgcggacgtcgaccgctcggccgccgcacgcaagaagacaacaacgcgctcagggtaattcactacaccatgacctttctcaggagaacatatttatctccccgaaatactgacacttgcagttagagggaaaaaatatagagagaagtaaaaaaaaaaagattgatgtttgattgtaccaatgctgcaacaagaaacagtggatcgaatcgaaatgtgttgtaaggcttgcaactatatatgcagattcttagttaagaggaattgaaaaaggctctagagacatgttaagcgcgggcggtgtggttttacggtttacgctcgcttgtattgatacaagcgcggtttctatggtatatggtcgttatatagtctgcgtctgatttt

SEQ ID NO: 9411 - DNA, 444 bp, Zea mays
  Clone ID: LIB3137-041-Q1-K1-C9.R15
cgccttcttgatggcacggggcgcggcgaccctaccggcttgtcggcgccggtggccttccgtaccctgtcccggccgcccggttaggcctggagccattcgggtacttgcgggcgcgcggcgagaagaaaaccactccttcttcccaccgaacgccttctttgggagctgccatgggtcgaacttgtagagatccacctcggcgatgaccggcgcggcgagcggcaggccgccgcacttgcggaggagatagtacatcaccagctcgtcatcggtggggtggaagcggaacccacgcgggagctgcagcgcgccaccgcagtccattcgatcgatcacctagctagtggcaacaggcggaggcggccgggcggattggagcttctaaacgatcgaggagctgccgatcgctggaaagctgattgattgctgaggaagtccgga

SEQ ID NO: 9412 - DNA, 742 bp, Zea mays
  Clone ID: LIB3137-050-Q1-F11-G10
ctggcactaaagttggtgtattttatgacaaagtatcaaacgtgactatttgggggaaccattcgacgactcaggttcctgacttcttgaatgccaaaattgatggaagaccagtgaaagaagtcattaaggataccaagtggttagaggaagagttcaccctcacagttcaaaagcgtggaggtgtgctcatccaaaaatggggcagatcatcagctgcatcgaccgctgtttcgatagtggatgctattagatccctcgtaactcctaccccagaaggtgactggttttctacaggggtttatacgactggaaatccttatggcatagcagaggatatcgtgttcagcatgccatgcagatcgaagggtgatggtgattacgaactagctagtgatgtgttgatggacgattttctctgggaacggattaaaaagagcgaagctgaattgcttgctgagaagaaatgcgttgcccatcttacaggagaggggaatgcattttgtgatcttccggaagataccatgctaccaggagaagtgtagtttagttacagaagcaacagcagcggaatgcatttgccaatacattagctgagacttgaaacatctacttgcgagatgcaacaactacttatatatatgtgtatattcaataattgtgccacacgaatttgactatgatgcaaacctcttacacaggtaaagtcttttttttgcgtaaatacgaaaaagactgtttc

SEQ ID NO: 9413 - DNA, 433 bp, Zea mays
  Clone ID: LIB3137-050-Q1-R7-G10
cgaaggttcccccaaatagtacgtttgatactttgtataaaatacacctgcttttagtgccagctggcactttgctctattttcatccaacctcgtcaatgcatgaaagttttttgccggtatgtttggggcatttttcaaacaaatcagcgcattagtgttacagggatttccaacaactaagactttcgcgttccgcgaggcgaccgcattaagtgctttcccctggtcagcaaagatttggccattgatatccagtagcgcagctcgctccatgccgggacctcggggcttagcgccaataagaagggcccaatctacatcttgaaagactacataaggatctatgccaatgctgacttgcctaaacagaggatacagtgagtgcttcagtttcatagctacacctttatgggcttgaaacgatcttttt

SEQ ID NO: 9414 - DNA, 352 bp, Zea mays
  Clone ID: LIB3137-050-Q1-R8-G10
gcatgaaagttttttgccggtatgtttggggcatttttaaacaatagcgcattagtgttacagggatttccaacaactaagactttcgcgttccgcgaggcgaccgcattaagtgctttcccctggtcagcaaagatttggccattgatatccagtagcgcagctcgctccatgccgggacctcggggcttagcgccaataagaagggcccaatctacatcttgaaagactacgtaaggatctatgccaatgctgacttccctcagcagtggatacagcgagaccttcagtatcatagctacaccttataggactggaaacgatctttatgaaccgagttgttaaaatgcta

SEQ ID NO: 9415 - DNA, 483 bp, Zea mays
  Clone ID: LIB3137-050-Q1-R9-G10
tttcgcgaggcgaccgcattaagtgctttcccctggtcagcaaagatttggccattgatatccagtagcgcagctcgctccatgccgggacctcggggcttagcgccaataagaagggcccaatctacatcttgaaagactacgtaaggatctatgccaatgctgacttccctcagcagtggatacagcgagtcctccagttccatagctacaccttcgagggcttgaaacgatctttctgagccgagtagcttaagtgctatcggttggtcttgtccgaaaacctcaccagaagcgagtttgaacagcaggtgatttgatatcatcccggccgcgcctgacacagcaacattcactagcttcttccacgacttggtcttgtcctccgccttgaggacgtaggtggtgcaaaagaccccgaagcactccttgcgtgacgccggcgcctacgacatgaccgacggcaacacaccatactgcacc

SEQ ID NO: 9416 - DNA, 248 bp, Zea mays
  Clone ID: LIB3137-061-Q1-F4b-F6
cgcgaggcgcgtacacggcgctggcgctgcagaggggtgcgggggcttccgggcgctgcgcgacgctgtcggcgcgcaggggcagtggctgcgggggagcctgggcgagagggacggggccccgcaggggggggggctgcccccggtgcgctacatccaccagcagctgcggcaccagcgcgccatgcaggaggggggggggtgatgcacgcacccgcagcacgcctggcgcccgcaccgcgggctcc

SEQ ID NO: 9417 - DNA, 1581 bp, Zea mays
  Clone ID: LIB3137-001-B9_FLI
ccacgcgtccgcccacgcgtccggaccgagtgccccttcgcgcacccgggggagaaggcgcggcggcgcgacccgcgcaggtaccactactcgggcgccgcctgcccggacttccgcaagggcgggtgcaggcgcggcgacgcctgcgacttcgcgcacggcgtcttcgagtgctggctccacccggcgcgctaccgcacccagccctgcaaggacggcacggcctgccgccgccgcgtctgcttcttcgcgcacaccccggaccagctgcgggtgctcccgcccacgccgcagcagtctagcgccagccccaggggcgccggcgccctgcccgagtcctacgacggctccccgctgcgtcgccaggcgttcgagagctacctcaccaagagcatcgtgtcctcgtcgccgaccagcacgctcctgtcgccgcccaagacgcccccgtcagagtcgccgccgctgtcgccggacggtgccgccgccgccttccgccgcgggtcctggccgggcgccgggtcccccgtcaacgacgtcctggcctcgctccgccagctccgcctcggcacggccagctcgtccccgaccggcgggtggggcggctacccggcgtccgcggctgcctacgggtcgcccactgcgggcgggctctacagcctgccctccaccccgagggccacgccgacagccctcgccaccgccaccgcctccggctacatgcccaacctggagccgcttgacgtcagcttcggcggcgacgaggagcccgtggagagggtggagtccgggcgtgccctccgcgccaaggtgttcgagcggctcagcagggagggcgctgtttcctgctacccagctgccggaaccggtggccccgacgtcgggtgggtctccgacctcatcaactgaggcggcggcggcggcgggtcggtgctgccatagcagtggagaaaaaaggtggtggtaactggtaagccgtaacagagaaggatggcataaaaaaatgttcccctttggttccagataattccgctaattaccctgtacatagatatctatcgccctgtgaatattctcggctggttgggtggagggttgatgctagggggtggatttgttttggggttcttgaggtagcggaaaatttccaaggaaaagaaaatatgtaaggaagtgtagatgtcgtaggcggcggcggcggtggtttgtgccctcttgtgtgctgcgaagcatggcgagggccgacggtgacgacgaagactggccggatttccagctttggtgttcctgtgattccgcagcaagttcagtttgatgttgtttcaagttcttccgtcgtctgtgcactatgcatccggctagttggcgattgcaacctgcttgtggattactacccccattttgttgttgatgttgatgtgatctgtttattgagacccagcattcccctacagcttattttgttgtacttgctatatatctttagtaggtgccgaaatctcagttcacccgctattggaggtgaacttgccgtgtaatctttggatcaagtaaatggtttaatgtctaaaaaaaaaaaaaaag

SEQ ID NO: 9418 - DNA, 224 bp, Zea mays
  Clone ID: LIB3137-002-Q1-K1-F8.F2B
atatatatatatatatatatatatatatatatatatatatatgtatatatatatatatatatatatatatatatgtatatatatatatatatatatatatatatatatatatatatatatatatatatatatatatatatatatatatatatatatatatatatatatatatatatatatatatatatatatatatatatatatatatatatatatatatatat

SEQ ID NO: 9419 - DNA, 337 bp, Zea mays
  Clone ID: LIB3137-002-Q1-K1-F8.R2B
gcgggagcgcacacacacacaaccagatctcccccaaatccacccgtgggcacctccgcttcaagatgcagatctttgtgaaaaccctgactggcaagactatcaccctcgagggggaggcgtctgacaccattgacaacgttaaggcgcaagatcccagggacagggagggcatccccccagaccagcagcggctcatctttgctggcaaacagcttgaggacgggcgcacgcttgctgactacaacatccagagggagagcaccctccaccttgtgctccgtctcaggggaggcatgcagatctttgtgaaaaccctgaccggcaagactatcac

SEQ ID NO: 9420 - DNA, 322 bp, Zea mays
  Clone ID: LIB3137-004-Q1-K1-E5.F2B
cgggaataataaccatattacacaaagtgacaagtgatacaagctacgtacagctcaagcggtgaaatatgctcgtaaagcatctgacgtgagattggaataaaatcgcatcatgggagcaagcccctcagtagatatatacttgggaaacaccatctaatatcagtttgatcacatatcacgtgaacaaaccggcgagtcgtccttggtcgagagattagcgtcctactcgccggtcccgcagcaagctgccagcactggccgtcaagtggccgccgatgtcagatcagatccgggagcggcctcgtgagcacgggagagg

SEQ ID NO: 9421 - DNA, 390 bp, Zea mays
  Clone ID: LIB3137-008-Q1-K1-A2.F2B
agcgaaacagtcgatcaatttaacttgcattgttcctagcctgtatgtgattccccacctgggactggtaaccggggttctatatttgtacattataagcacatggacttccgtcactagaatacatgtttaccccaactaataacactcacagcatgcaaaagtacatacatgcaatgcaacaaaaaagatgcgatacttcatgtccatcacctgcgaaagtgcaagctacatgagctgcaacaccttcaaccgctgctcatgctctggatccatcttcggcggcgtgtaacccccagggaggtcctccaccacatattccttcgtgagctccttcttggtaagtatgtgatagtgccgctgccagatcctctggatggccacagtcgc

SEQ ID NO: 9422 - DNA, 152 bp, Zea mays
  Clone ID: LIB3137-008-Q1-K1-A2.R2B
gcgggtcgagcgggaccgtgttcatcgcgacgccgacggggatctccccgccgccgagaccgccccccttctggcgcacccaccgtcgccgggtgagccttgggctgcgaactttgggtcatcggagataaccgacgaggagatcgacgccg

SEQ ID NO: 9423 - DNA, 251 bp, Zea mays
  Clone ID: LIB3137-009-Q1-K1-D1.R2
ggttgcggggcaagcgaattggcgtcccagctgggttcttcggcttcccagatggatccgtcaggcagatggtgtaccagcagcacctcgacacgctcaggcgacatggagcggtggtgacagaggacctttcgattgcgaacctggatgtgatacagaacgccactgtgagtggggagctggcagctctagcagcagagttcaagatcgccctgaacgcatatctgtcgtccgatctgtcacgctccccc

SEQ ID NO: 9424 - DNA, 444 bp, Zea mays
  Clone ID: LIB3137-010-Q1-K1-A12.F2B
agtgcagaaaaagaattaacaggggtcaataaccatgattagtgggctctcaagtgaaaactgcgcaacaccctggagaaccaagaagcgggcacctaatgcgggcctagtgtgggacagagtcaattatatgacggggttatcaggcgtacagtgaagaaaccttgtgaatatatctaatctctatcaggtgtaggcatgtgatctgaacccctgctgccatctgtccttgctggggagcccttgtgccttgttatgtttcgacagaacatatccagctcttcttcctttcccttgatttcacaggaccaaagtactgggtccacattcttgggcaaggattcttgaagtttggacccctcacttagccactgctcagctttattgcgctcattgtcaacagcatccctttcaggtgcggataatgacctggcagcctttctg

SEQ ID NO: 9425 - DNA, 408 bp, Zea mays
  unsure (1)..(408): unsure at all n locations; Clone ID: LIB3137-010-Q1-K1-A12.R2B
gcgggccccttctccagcgtgaagcgccttctcatgggcgccacggggagggacccggactcctccctactccgcgacctgtcccgcctccccttccccgctgccgtcggggggggcgctgtcctccacgccgaccacatcggccgccgcgatnncgcgctctcgccgacccacctcctctccatgcgtggggcctacctcaagcagctcgcggaggccgacctcggcggcgcccccgtagccgactgcgtgatctccgtgccctgctacttcactcaagcgcagcgccgagcctacctcgacgccgccgccatcggggggctcaggccgctccccctcatgcacgacctcgccgccaccgcgctgggctacggcctntaccggtccgacctcggcgggtccgggggg

SEQ ID NO: 9426 - DNA, 500 bp, Zea mays
  unsure (1)..(500): unsure at all n locations; Clone ID: LIB3137-010-Q1-K1-H6.F2B
gggctcgaaaaactccatccgtgacaaataatattatccttttaatcagaggtactagttatttacagcggattcatggggcggtaacagtacttatacaaacatatagataatctatgaaatcttgctcttggtgatcagaaaagcactgggcagtcccagatcgaggtcctcatgcggtgctcagcttggcgagggtgcgcttcaaggccttgacgctcagtgggctgttcttgctcaccgagcaagttccagctctgacgttgcagacagggtagcccggcgggcagcagctggcgtgatccttgcagcaggtggcgccctcgaccgggcagcagccccagaccaagcagacgttcctgaagccaaacgcgcagcagcaggtgctgcccgcggagcacgagaagttctcgtcgcagacattgtcaggggcagccggcggggttggagacggcctgngagggttcccgcccttcttcgtcgggtaggacgccatcatc

SEQ ID NO: 9427 - DNA, 468 bp, Zea mays
  unsure (1)..(468): unsure at all n locations; Clone ID: LIB3137-010-Q1-K1-H6.R2B
ctcgtctcgtgtcatcacgtgccgccgccatgggtgctctggggcgtgggctgcccctcctcctcctgcgcctcctcctcgccgtagcgggggccgccaacgccgcgggggcgcccggcggcatgtgcatcatcacctacaacgaggggagncaccncgncgcgggggctggagcggacagagcctgaggtgcgggccatgtacaacctctggctcgcggagcacgggcgcgcctacaacgcgctgggcgagggcgagggcgagcgcaaccgcctcttcctcntcttctgggacaacctcccgttcgtcgacgcgcacaacgagcgcgcccgcgcccccggcttccccctcgggatgaaccagttcgccgacctcaccaacgacgagttccgcgccgcatacctcggggcccagatcccccgccgcccgcccggggagccccccggggggggagaagggaccccccac

SEQ ID NO: 9428 - DNA, 660 bp, Zea mays
  unsure (1)..(660): unsure at all n locations; Clone ID: LIB3137-011-Q1-K1-D3.F2
gctggaagggaactgattgattttctcgctaattaacactctggattcgcgacgagctccagcaacaacataacatggcagcaaagcgcttagcctttttatgatgttgttgtcggtttgttggagctcaagcttcttctctctattgattgctactagggactgagactgagagggtgctacggcaattaggacacggcgcccgtgatttggtcgacgggcgggctagccaactcttgtttcttctagtcggtctcaattagaggaggcgacgctgcagctgccactgatcccttcgtcgccgtcatcgtcctggccgatggtcccggaggcgtcggtgacgcacgacgacgtggacgacgcgctctccaccgccgcgtgctcttcttcttcttcttgcgcgtcaccaaggcgggcgcggtgggctggcctggccctcctgaaaatgcgacagaccacccagtcggccgccgccgcgccaccgccatgggagctcacattagtgggcggaggcgcgttggcggcgcanccgtggaggtggaggccgtccgggaaggagaccgtcgntcgtgtcgccgcgctgcaagcgccccgtcggcaccaagcggacgctcgtcttctgcccgcgccgccgtggcggcggcggcgcccgcaccgact

SEQ ID NO: 9429 - DNA, 715 bp, Zea mays
  unsure (1)..(715): unsure at all n locations; Clone ID: LIB3137-011-Q1-K1-D3.R2
ctccccgccggcctccacctccacggcggggaggaggcggtactcgtgcatgacccagtcggtgcgggcgccgccgccgccacggcggcgcgggcagaagacgagcgtccgcttggtgccgacggggcgcttgcagcgcggcgacacgacgacggtctccttcccggacggcctccacctccacgggtgcgccgccaacgcgcctccgcccactaatgtgagctcccatggcggtggcgcggcggcggccgactgggtggtctgtcgcattttcaggagggccaggccagcccaccgcgcccgccttggtgacgcgcaagaagaagaagaagagcacgcggcggtggagagcgcgtcgtccacgtcgtcgtgcgtcaccgacgcctccgggaccatcggccaggacgatgacggcgacgaagggatcagtggcagctgcagcgtcgcctcctctaattgagaccgactagaagaaacaagagttggctagcccgcccgtcgaccaaatcacgggcgccgtgtcctaattgccgtagcaccctctcagtctcagtccctagtagcaatcaatagagagaagaagcttgagctccaacanaccgacaacaacatcataaaaaggctaagcgctttgctgccatgtttatgttgttgctggagctcgtcgcgatnccagagtgttaattagcgagaaaatcatcagttcccttccagc

SEQ ID NO: 9430 - DNA, 643 bp, Zea mays
  unsure (1)..(643): unsure at all n locations; Clone ID: LIB3137-013-Q1-K1-A5.F2
gcggaattgcacacaccgggacgtgcaatgcattatttagtgttaggattcagatcagttgacaattcggcatgcatgcatgcatacataaccacaccacataaccaccgcgcgcgctacggcgagctcattatcacaaacacgaacctgacgaatgctatctacagccgctaaccccgatccgatctcgcgctctggatcctccttgtccagctcgccgcgttcctctcacaccgcaaaaccacagggaaaacacgcgcaacgcaccccccggagatgcacggaaacgagacgcatgcgcgcggcatgccaccacgcgtcgacgcatgcgattacgtagcaacagtgcggcggcggcggcatgcaggcagtcaccgggactcctcctccgactgcctcgcggcgccggagagcacggagagcaggttgaggtggtgtccctgcgccgccaccgacgcgtacgcctgcgccgccgcctcctgcgccggcgagagcccccacgccgncgccacgggccgcgcctgcagggtggcccagaacggcgccggcgccactgccnaccgccaccgcggctcgtgctcctcgcgcgggcgcttcccgaggagcgggagggagacaccggcgcccggcgccggcaccggcg

SEQ ID NO: 9431 - DNA, 663 bp, Zea mays
  unsure (1)..(663): unsure at all n locations; Clone ID: LIB3137-013-Q1-K1-A5.R2
gagacagtgcgtggccatggcctctcgcgacggcgccaccttccaagtgtaccgggccatgcccgcgccgacgccgatgtctctggcgtccgccgctccagccgcagccgccgccgacgccgcggcgccgaagaaggcgggcgcgggcgcgggaaaggaccggcacagcaaggtgaacgggcgcgggcggcgcgtgcggatgccgatcgtgtgcgcggcgcgcgtgttccagctgacccgcgagctggggctcaagtcggacgggcagaccatcgagtggctgctccggcaggccgagccctcgatcctggcggccacggggtccggcaccacccccgccgtcttctcctgctcctccgcaccgtccacctccgcggccagcgccggtgccggcgccggcgccggtgtctccctcccgctcctcgggaagcgcccgcgcgaggagcacgagccggcggtggcggtggcagtggcgccggcgccgttctgggccaccctgcaggcgcggcccgtggcggcggcgtgggggctctcgccggcgcaagaggcggcggcgcaggcgtacgcgtcggtggcggcgcagggacaccacctcaacctgctctncgtgctctccggcgccgagaggcagtcggagggagagtcccggtgactgcctgcatg

SEQ ID NO: 9432 - DNA, 508 bp, Zea mays
  Clone ID: LIB3137-013-Q1-K1-H4.F2B
gtacaatctttgatgcatttggacgtagaatattacgtagccagggcttccaacagacacattgatacaacaaaaatgtttgacggagttctagcacacttcatgactaactggaagctggaagtggttgaagggccttgaggggattcatgattactccatcaataaggccatactcctttgcttctttcgcgctcatgaagtagtcacggtcagtatctacgttgatcttatccaggggctgcccagtgtggtatgcaaggtatccatttaagttcgccttgtggtgcagcatctcattggcctgaatctcaagatcagtctcctgtccttgggcccctccaagagggtgatggatcattatccttgagtttggtaagctgtatcgctttcctttggtcccagcactaagtagaaaagctcccatgcttgcagctagtccaatacaaacagtggatacatcaggccctgataatgcttcatttgtatcaaatattagccattccag

SEQ ID NO: 9433 - DNA, 312 bp, Zea mays
  unsure (1)..(312): unsure at all n locations; Clone ID: LIB3137-013-Q1-K1-H4.R2B
caaaaccccacgcgagcgcccattcccatccatggggaccaccacctcttcctcctcgctgaccactcctctcctccgcccgaaccccaataccaaccctgctcccagatctctccaactcctcaagagcaggaggtgcgctcgtgccgcgtaactaccgccgtagccggaggtgcggtgccttacggggctaatccgcngcgcgggatttgggcaatcagggatgacttggtggggccaanggtcgccctacttcccagtggagtccgcggcggcgcaggagcgtgggccgtcccccatggggagggagcg

SEQ ID NO: 9434 - DNA, 488 bp, Zea mays
  Clone ID: LIB3137-013-Q1-K1-H5.F2B
gggaggaagcaaaacctttactgtgaccatggggcgcacttgtacaattttaatccctcaccggggattcttacaacaaagaggtggtataatacaggcttaagcaacaggcgaacagatgacacccgtcaagtcagtttacagctacacacactgccgttaaaacagagcagtttctaacaggcgcctacgtgaatgtgtcctccctatcgccttcagcggcctcaccatcctcaatgttgctgaactcgaggaagtgtgttggcctgtggtcctcgtgatagaagtcccggggcatgcccagcttcatgttgtacttcatctgtgggtcgtgcttcactcccatgaagttgaagttccaaggagcgttatccggaaccatgtagaatccaaggaagcggtcgctcagaagcatctggaccttctcgtagtgagttggaaggtatccatgtggattgctttcgttgtccttggtgctgcgtccccac

SEQ ID NO: 9435 - DNA, 352 bp, Zea mays
  Clone ID: LIB3137-013-Q1-K1-H5.R2B
ggccacccacgcgtgcgctgaggggggagaataaggagggggctgcgtttgtactcttctgaacccacagaaccgtgcctgtgttcacaaaactatggggagagattcagcaatcaaatcatatggggtgggggtgatacaaatgtgtgtcgaggcactattcacaaaaatcattggtgaggggacttgaccaccaaaccaatcaatggggctattttcattttcaatccaagaacgggtcaactttttcttaaggtgatccacacaagtgtgtgggcagggcaaaaacgtgttgggcaactggccaaggggaaaacagctgaggagggggcggcattagttcgatctcttc

SEQ ID NO: 9436 - DNA, 468 bp, Zea mays
  Clone ID: LIB3137-014-Q1-K1-D2.F2B
aaattaggagacatacaatctttcatttctcaaacctaattccgttacatagaaacataggtgagctcattcaatagatcatacaaatcagctcgtttgctctggactgtgtgataacagcaggaacatttcttaagttttggctttagatcatcagatggacaggtattctgaattaattcctcgtataggggcaggtccagtgaaaactgtggagagtgggccaatgaacgacactaaattgtgtgatactacatgaacaagcacatgtcttttatctaaggagctatgatatcccgcttggtcatgttggaggtgtctccagcgctacccatccaaatttgcctttcctgtagtcagacaatatgcggaaagctgcctggcttgtgtctccattgaacaagtgaacagagagctttgtgacaaacgttttaccggactcactatctacagcaatccttatatcgg

SEQ ID NO: 9437 - DNA, 248 bp, Zea mays
  unsure (1)..(248): unsure at all n locations; Clone ID: LIB3137-014-Q1-K1-D2.R2B
gcggggagagttgaaggagcaattgaggcgcatgggtgtggtgatagagagccgtgatgctaggagtcccttgtgcactacccatcctaagaggggctcatgggtaggcgaccggagaaggggcatagtcttgagtcgcaagggcatgagcctncacactagagagatgagtgcgtgggctacttactttggggatgagggcatcaaaggtggtttctccaatggggaggtgggtgtggggacaatga

SEQ ID NO: 9438 - DNA, 594 bp, Zea mays
  Clone ID: LIB3137-024-Q1-K1-D9.F2
gggcgaggccaaggaggccgggcgcgccgccgccgccgccgccgagggctcgtgggtgcccgaccccgtcacgggccactaccgccccgccaactgggccgccgccgtcgaccccgccgacctccgcgccgcgcacctagcccgcacctacgcccgggcctgagcggacccggctcccttcaccctgctccgtccgcctcggctcgtatgacatacgcgcaccgtaccagggtgagacgaggtgaggggtcggggttcgtgtggcgaacggagtgttgagccacgcgcgcgcgctctgtgacgcccggaacgttcttggagagcgcgagcgaggtcttctctattctcggtgcgggtctggtgactcgctgtgccctgagatgtgatgtgacgctggatcgttttgggtacgaccaacgggagaagagcggactgaggtcgccgtcgagtgtgggctggatgatggcctgctctcttgagctgctcctatatgtcagatgcacttcctacgaggagcagggtttcgctacctatgggtactcgctacagatacagctagtacgtactatactaataaaagccggacgcgtgggt

SEQ ID NO: 9439 - DNA, 580 bp, Zea mays
  Clone ID: LIB3137-024-Q1-K1-D9.R2
gcttttattagtatagtacgtactagctgtagctgtagcgagtacgaaaaggtagcgaaaccctgctcctcggaggaagtacatctgacatataggaggagcacaagagagcaggccatcatccagcccacacacggcggcgaccacaggccgctcttctcccgttggtcggacccaaaacgatccagcgtcacatcacatcacagggcacagcgagtcagcgacccgcaccgagaagagagaagacctcgctcgcgctctccaagaacgttccgggcgtcacagagcgcgcgcgcgtggctcaacacgccgttcgccacacgaaccccgacccctcacctagtctcaccctggtacggtgcgcgtatgtcatacgagacgaggcgggcggaacagggtgaagggagccggggccgctcaggcccgggcgtatgtgcgggcgaggtgcgcggcgcggatgtcggcggagtcgacggcggcggcccaattggcggggcggtagtggcccgtgacggggtcgggcacccacgaaccctccgcggtggcagatgcggctcgcccggcctccttggcctcgccc

SEQ ID NO: 9440 - DNA, 668 bp, Zea mays
  Clone ID: LIB3137-027-Q1-K1-B8.F2
caaggcaaatagctttgcgcataacagaatatcagtccactaggcagcaggcctgtcaaagtcaaatacaccgtaggtcattctaacaacgctgcacccacaagggcaggcaggtcttcttcctggtggccggctcggagcacgaaaaccagcatccggccaccatttatcgacatagaaaccgaaacaaagcatgcggtataacatctagaatgcttaattaaaacagcagcaatggcagcttcatcgcatacaccggcgcgacgacgacaacaacagcaacaacacaaggtatactagaagataatctatcagaatcgaggacggcggttctggttctggtcactcctcaacatcagcagcagcaggtcgtgagactgaatccatcttactgaccctccgcagattctttcggggcagcagcatccttgatctcgtcaccgccatcctcgttggtgtcggaagtccatagggtcaagttgtcgcgcaggagctgcatgatcagagtgctgtccttgtaggactcctctcccaggctgtctagctcagagatcgcctcatcgaaggcctgttttgcaaggttgcaggcgcgacagggggagttcaggatctcgtagtagacactggagaagttgagagcgaggccaagcctgatgggggtgggttgg

SEQ ID NO: 9441 - DNA, 749 bp, Zea mays
  Clone ID: LIB3137-027-Q1-K1-B8.R2
ccgcacaaactcgtcgcttccgctccacaggatcctctgcgccacccacaaccgtgcgaccgtccgtgctgccggcgaccccgatccgccgacccgtcccgtcccaccacaccctaccgccgctcgcagctatgtcgccgtcggagccgacgcgggaggagagcgtgtacatggccaagctggcagagcaggcggagcggtacgaggagatggtcgagttcatggagcgcgtcgcgcgctccgccggcggcgccggcggaggggaggagctctccgtggaggagcgcaacctgctgtccgtcgcctacaagaacgtcatcggcgcccgcagggcctcgtggcggatcatctcctccatcgagcagaaggaggagggccgcgggaacgaggcgcacgccgtctccatccgcacctaccgctccaagatcgagaccgagctcgcccgcatctgcgacggcatcctcgccctgctcgactcccacctcgtcccatccgccggcggcgccgagtccaaggtcttctacctcaagatgaagggtgactaccacaggtaccttgctgagttcaagtctggtgcagagaggaaggatgctgcggagagcaccatgaatgcctacaaagctgctcaggacattgctcttgcagatctggtctccacccaccccatcaggcgttggcctcgctctcaacttctcagtgttctactacgagatcctgaactcccctgatcgcgcctgcaaccttgcaaa

SEQ ID NO: 9442 - DNA, 723 bp, Zea mays
  unsure (1)..(723): unsure at all n locations; Clone ID: LIB3137-033-Q1-K1-C6.F2
gcgtcagcacgcgatcgacggaagacgcgtcgaacgcggaggagcctccaattcctcttggcttttaacaagaagtaatacttacacacacggacacaaaatcgtcttcatatcacaaactcacaatgagattgtgcaccaaacgcataaaataacacattacacacccagaaacggcacaactttttttttttgcgtggctcctgcttcctgaatgtaaagcaagcttcgcaaacgacaacaatcaagaaggccgatgtaatgctgcgacgtgctggtagccgctggtatcatcctaacttcacacgcgtcgcgttctacctcaccgtgctccgggggccagtcgcccgccgccgctggtggtggcggaggctatccacctccgtcgtcctcccaccggagctgaggtggccatcgaggtgacgctgtgcaacccgaactacgcgcaattcaagcacggcaagataatatactgaatatattatccaactcggttacttagcacagtggcacactagcagcaattcactgtcttattgtgagtggtttagcgaaacagtgagatccctagttattatatgatgagttcatgaccaccccgaatttcaactgtcaattcagcacgccatctttcatataccgattntcatgagtcattacctagttataacaaaacaatggctacctagtgcatccgnctaaacttgcagcggcgtcgaaatt

SEQ ID NO: 9443 - DNA, 696 bp, Zea mays
  unsure (1)..(696): unsure at all n locations; Clone ID: LIB3137-033-Q1-K1-C6.R2
ctggtacctttggggaggcgaggaaggacacgaggtcggcgcgttcgtgcgtgcccttctcactgcacgccgatccccctctgcgaaccccgccgcctgccgcagatccgagggtcatcggcagccatgatctcgtccagcaagctcaagtccgtcgacttctacaggaaaatacctagggatttgaccgaggcatcactatctggcgctggattatccattgtagcagcattagcaatggtttttttgtttggaatggagttgagcagttacttagcagtcaatactaccacatctgtgatcgttgataggagttcagatggggagtttttaaggatagatttcaatatgagctttcctgcgctttcatgtgaatttgcatcagttgatgttagtgacgtgctgggaacaaacagattgaacataacgaaaactgttcgaaagtattcaattgatcggaatttagtaccaactggatcagaattccaccctgggcctatccccattctcaataagcatggagatgatgtcgaagaggatcacgtggatggtgcattttcattgtcatctcgcaattgtgatagcttttcacaccaatatcctgttttggttgacaacttctatgctccctggtgttactggagcaatcgactgaaaccttcatgggaggagacagcanaaataatgagggagaga

SEQ ID NO: 9444 - DNA, 164 bp, Zea mays
  Clone ID: LIB3137-040-Q1-K1-F12.F2
gacatgtcgaatctcgaaattgattcatgtgtgctcacaaattggattcataacagacagaaggctcacaaatttggagccacatactcgtacagcataacatatataggcctattcgatttcacaagcaagataagatattacaactccaaacaagatattac

SEQ ID NO: 9445 - DNA, 426 bp, Zea mays
  Clone ID: LIB3137-041-Q1-K1-C9.U1
aattgtacaagatcttggtcagctgccgtatggagatcgatgagtgccgagttagcatggaggacgactggtggtcatggttggtacagagctagctagccgtccgatcgggtatcggattaatctgattgccagttttgtttttttttggtcgcgtcaagtagctgacatcttaagaatgaagcctactggattcagaggcctgttgatggtaatggtatggtgtatgtatatcgtctagtttagtctagcctagctgtacttagaattggttcaggttggtggcaagcagagcgctgtaatttttgttgagtgtttatgcactataattgcaacgtcatgtattagagtcgctctcagcggtcgctttctcgtgatcgaaaattctgcgatgcaaattatcctaataaagttgttgtaagatgt

SEQ ID NO: 9446 - DNA, 576 bp, Zea mays
  Clone ID: LIB3137-041-Q1-K1-C9.U2
gaagaactgatgaacacctgatcgacgaccggtatatacctacgggcgcaggattgtccgtcgatctgccgcccgcggagagtgtgcctgcacggtggtgttggtttcgcagcactacacctagaccggccggctctcgattcgtcctgaaccgagctacacgacgaccagaatgtccatgtcagtggtcagtggcctagaggagcacgcaggcgcggggtggccgcgctcgcgtcgcgtcgcgttgcatcagaacggtttgtgcaggtacgacgcgagcatgtcgccgaagccgaacgcggcggcgtcgacgcgcgcgaacagccccggggacagcggcccgaacagcgagctcccgtcgtcgacgtcgacgtcgaccatgaacccgtcctcggcggcgctgccccagtcgcctccgacaggccaccacccggcggcggcggcggcggcggcggactggctctcggcgtggtcgcggtcgggcaggtccggcgacggcgagagcacgcgctcggagccgctgctggagttgttcgtgtgcgtgtggtgcgttattcacggaacggtatttgattt

SEQ ID NO: 9447 - DNA, 272 bp, Zea mays
  Clone ID: LIB3137-041-Q1-K1-C9.U3
agacgcggtccgcgggcgctgccgccgacggggcggctgaagcacattatcgcccgtccgacggtcgagatcaggccgtggcagtctgtactaggccgccggcgctacccgttatagcatacaccatcagcggggcaccgcggtgctgcccctacgagggcagctggcacgccgtgtgtcttcatagcgcacggcggccgcctgcatgcggggtggacacgcttctgccacgagcccatcgtcaaccaaacagcgcactgagcaacaccgac

SEQ ID NO: 9448 - DNA, 463 bp, Zea mays
  unsure (1)..(463): unsure at all n locations; Clone ID: LIB3137-060-Q1-K1-C2.R2B
cagcttctgtggacggcgtanatgaaaagtgggggcggcaagagccagaaacaccggaaccaagagcatcagccaaattaatctcagacggggctcctaatcaaagcgatgaaaagcaagagaggcccagtccagtatctgtgcttgagtggcatccttcgaagatattggcaggccagactgcgtaaacaagaaagagtgtgagctgcatggtctccaaaggaccctgtgttttccagataatgaaccacacgttaatgtgctttgagaggacaagaatggcangtgggactacataaagcgggggcgagaactctcagaactgtgcgcagaacaaaatctagaggtgtggtacctagaagacgaggtgatcagcccctggttgtgtgaagaactacagagcccaggtgatcacacggatgatcgaatgcttctgtttgactggatctgggaagctctaaca

SEQ ID NO: 9449 - DNA, 399 bp, Zea mays
  Clone ID: LIB3137-061-Q1-K1-D9.F2B
aactcgaaaaaaacaaatcttattcataaacaaaatgggggcacagatatttctccatacgttcatgctcattgggggagacgcagctgaccacctaaagctgcatacttacttattcagactgatccagcatgtggcaacatcggaagttcacatgcttacagacgacaaattttcataacaatagcctgggttggctgcttcacagaataaccaaacgacaaccacgaaattgcgacgatataaaataaacaactcagaagcaaatcgaccccagaagcccgtcttactcatcaagcactcccgccttctcctccatggcatccgcttcctcctcccagcagagaagattagccagcttgtagtccttcttcataggaggaggagcactctccacgt

SEQ ID NO: 9450 - DNA, 245 bp, Zea mays
  Clone ID: LIB3137-061-Q1-K1-D9.R2B
gcgcggacgcgtgggcggacgcgtgggcggacgcgtgggcggacgcgtgggtgagtcaagcttgtttatctatcctctgaagattgtgatcaagacctgtggcgctaccaagctcctgctcaccattccaagaatccttgagcttgctgaagagggctgtgctacgccacttgctgctgtgaagtactcccgtgggacgttcatctttcctggggcacaggcagccccccacaggagcttctctg

SEQ ID NO: 9451 - DNA, 390 bp, Zea mays
  Clone ID: LIB3137-061-Q1-K1-E7.F2B
actcaggcgaatgcgcaaatcttacagaagcaaacggggccggaattcacgggtacaagcagctcaacctgacggggacgactgctgatccaaggaaaagcaaacgatgcgagcggcgccggcgcagcggcggcctgagacagtcgacgatgcatgcacgtgcacgagagaaactaaacggcggcgagcggggagagagagctggatgcgctagctgcgctgcgcacccctagggcgggcgggtagggcttttactagtcggtggaggggagctgctcatgggtgtgggagatgaagagcaactcggaaatgacgccggggaggccggcaccaatgaggggcccgacccactacacccactggtggggccactggcaacgtggcgagggc

SEQ ID NO: 9452 - DNA, 223 bp, Zea mays
  Clone ID: LIB3137-061-Q1-K1-E7.R2B
cccgggtgccacgccacggcgtgcgccacaacccccgagctcagcttatctccactccagctccaatcgcagtcgtgaccagagcgcgagagctatctagaggggcgtgaaaatgccgatcaataggatcgccctggggagccaccaggaggggtaccacccgggcgccctcagagggcggcgcgcgctgagttcatctccaccctcatcttcgtcttcgccg

SEQ ID NO: 9453 - DNA, 508 bp, Zea mays
  Clone ID: LIB3137-61-Q1-F4-F6
ggtcgctgcgcgacgctgtcggcgcgcaggtgcagtcgctgcggcggagcctgggcgagaaggacgggtccgcgcagggaggcgggctgccccggctgcgctacatcgaccagcagctgcggcagcagcgcgccatgcagcagttcggcatgatgcagcagccgcagcacgcctggcgcccgcagcgcggcctcccggagtccgccgtctccgtgctccgcgcctggctcttcgagcatttcctccacccgtacccgaaagattccgagaagctgatgctcgctaggcagacaggcttgtctaggggtcaggtgtccaactggttcatcaacgcgcgcgttcgactgtggaagccgatgatcgaggagatgtacagggaggagttcggggcggagatggactcgcactcgtgcggggagaacgcggtgggcaacaagggcaaggacgaggcgatatgctgggaggaccacgaggagtttcagagcccgttaagcgccgacggggacgg

SEQ ID NO: 9454 - DNA, 364 bp, Zea mays
  Clone ID: LIB3156-001-Q1-K1-H9
cccacgcgtccgcccacgcgtccgcccacgcgtccgcccacgcgtccgggggaaagcgtcggctgagataagagatcctcacaaaggtgtccgagtctggctcggtacatacaacacggctgaagaagcggctcgagcctacgatgaagccgccaagcgcatccgtggggagaaagccaagctcaacttccctcaaactccacacctaactcagcctcctgctaagaaaaggtgtatgatggctcctgagttgactccgccgagttctgaaacaaagagcccaccaaccccacaactttttatgggttttggttacgagaatggcgtttacagaccgagtgaagcaatggaaagcgagatggag

SEQ ID NO: 9455 - DNA, 300 bp, Zea mays
  Clone ID: LIB3156-002-Q1-K1-A1
cggacgcgtgggcggacgcgtggggggaggtccacccacttctgccatgactagcattgccaacccaggacgagctggaatctcgtgacatgcggtgcatcgtccctgcagtgtgcattcggaaagcctaacagtagacgggaacatcgacatggatagttggttcgccggatgatcgacgttttgactgtaatcttagtttatgtttgttgctgatgctttagccttttgttagtctgcatattagtgagtgaattttgttatgttctgctgctgaatggaaattctgagttgaattgt

SEQ ID NO: 9456 - DNA, 414 bp, Zea mays
  Clone ID: LIB3156-002-Q1-K1-A10
cacagattcgcaaggccgcacagctcttcacatggcttctgccaatggtcaccttgctgtggtggaatacttgattcaaaatggagcgaatgttaacgccaccaacatggagaagaacacaccactccactgggcatgccttaatggacgtatagaggtaatcagggctttgatctcagcgggggctagcgtgagtgctctgaacagccacgagaaaacgccaatggacgaagcggtgaccacaggcaagatgcacgtgatcgacgcgatcggtgcggcagtagctcaagccgagctcgacggcgttactgtcttctaaaaggacctgatgagtacctggagctttgaatgacttgcagccttgttcttatctcacagcggttctgtctgaataactcgcgaacctgaatcccc

SEQ ID NO: 9457 - DNA, 353 bp, Zea mays
  Clone ID: LIB3156-002-Q1-K1-A11
cgacgatgcgctcgccggacggcaagaagctggacatgctagcggaggaggacctcggcagcatgccctacctcaaggcgaccatcaaggagacgctgcgcctgcacccgccggcgccgttcctcctcccgcactactccaccgccgactccgagatcgacggctacttcgtccccgccgggacgcgcgtcctcgtcagcgcctgggcgctcgggagggacccgacgacgtgtgagaagccggaggagttcatgccggagcggttcgtgcaggaaccggccgccgtggacgtcaacatgaaggccagggacctaaggtcaatcccgttcggttccggccgaagaacctgcccc

SEQ ID NO: 9458 - DNA, 402 bp, Zea mays
  Clone ID: LIB3156-002-Q1-K1-A12
ccgaaagctgcaagaactcgttccaaatatggacaagcaaaccaacacatctgacatgctggatttggctgtcgactacatcaaggatcttcagaagcaagttaaggtgctaaaggagagccaagatcattgcacctgctcagcaagcaagaaccagcagcacttctgctgaaacacgtaatgctcactgtacatgacctctaaagcatgtccactagggaaagaaaaagatgtaagacagctctcatgcatgttgtttcatgaggttttgaactgcagcagttgagaggctttatctaccaagcactgtatcttctgtatgatccaagagggatggagcaattgcatcaccaagcattcaagtgattgggaaaagggtaaaaaaaattggggagagaattt

SEQ ID NO: 9459 - DNA, 290 bp, Zea mays
  Clone ID: LIB3156-002-Q1-K1-A2
gccacatcctcctggacctcaatttcgataacaagatcaccaatgacctattcgaggaggaggtcatcaccgttcgtaaggaggttggcatgtacatgattgagggagaccttaaacgttacaaccgcgtggagattgagaggctaaaggagattaggtgctacaaggccatacggcacaagcttgaactacaagttcgtggccagaggacaaagaacatctgtcgtacacttaagggaaagagggcttcacttgccaagaaaaagtcacccgcctgctaggatgaataa

SEQ ID NO: 9460 - DNA, 237 bp, Zea mays
  Clone ID: LIB3156-002-Q1-K1-A3
gcaaggaagagagagtacttacgcatgcggcgtgaacggaagaaggcgagagcggagggcgccgctgagcctcacttggtactagctgctggtgatgaaaactctgaggtcagcgcggactgctgataagtttcctgtgtggggtttctctttttcacagcccttggtacactttttcttccttaattgtaagaccacatgatctataaaggtcatatttacatgtgttgcttagat

SEQ ID NO: 9461 - DNA, 389 bp, Zea mays
  unsure (1)..(389): unsure at all n locations; Clone ID: LIB3156-002-Q1-K1-A4
cggacgcgtgggcggacgacccggagacattcgcgcgcaaccgggagctggaggtgatccactcccggtgggcgatgctgggcgcgctgggctgcgtgttcccggagatcctggccaagaacggcgtcaagttcggcgaggcggtgtggttcaaggccggcgcgcagatcttctcggagggcgggctggactacctggggaaccccaacctggtgcacgcacagagcatgctggccatctgggcgtgccacgtggtgctcatgggcttcgtcgagggctaccgcgtcggcggcggtccgctcggagaagggctcgacaaggtgtactccggcggagccttcgacccgctgggcctcgccgacgacccggacaccgncggcgagctcaag

SEQ ID NO: 9462 - DNA, 451 bp, Zea mays
  Clone ID: LIB3156-002-Q1-K1-A5
gagaaaccatttgaagtttcctgaggatgcaaagttgtcaaatgaagcaagagatctcattggccggttattatgtgatgttgaccacaggattggcagtgcaggggcagatcaaataaaggcacatccttggttccaaggagttgcatgggataaactttatgaaatggaagcagcatttaagcctcaagtaaatgatgagctggatacacagaatttcatgaaatttgaggaactggaaaatcctccagccaaaacaggctctgggccttcaagaaagatgatgctgaactccaaagatctgagctttgtggggtatacatacaaaaactttgatgcagtgaaagcaataaaaatttcagatctgcaaaggaattcatctctaacaaggccttccattggttcgatattcggtccatcaggcatggattctcccatggaaccaaacgga

SEQ ID NO: 9463 - DNA, 427 bp, Zea mays
  Clone ID: LIB3156-002-Q1-K1-A6
cttgcagatttttaagcatcatgatggtgtcgttgaagatgttgcttggcgcttgaggcatgagtacttatttgggtcagttggtgacgattatcatcttttgatttgggacctgcggtctcccgcccctactaaacctgttcagtcagtggtggcgcaccagggtgaggtgaactgcctggcttttaacccgttcaacgaatgggttgttgcaactggttctactgacaagactgtcaaattatttgatcttaggaagattgatacttctctgcacacctttgactgtcacaaagaggaagtttttcaagttggatggagtccaaagaatgaaactgtacttgcatcctgttgtctgggcagaaggctcatggtctgggatctaagcaggatcgaccaagaacaaacaccagaggatgctgaagat

SEQ ID NO: 9464 - DNA, 430 bp, Zea mays
  Clone ID: LIB3156-002-Q1-K1-A7
gacattcactacaaaaaataataaaaaaaattaaaaaaaaaaaaaaaaaaaggtaaaaaaatggaaaaaatataaaaaaaaaaaaaaaaaaaaaaataataaaaaaaaaaaaaaaaataaaaaaaaaacgggggtgctgtttttaaggatcaaagttttcttccccttgcttgcaacgtaatattttttttttagtgccacttaaattaaatttattggccgtttttttaaaactcaggaattggaaaaactttgaggttaccaaatttattggttttgaagaaaattctctttttcccagttgggtttttactaaaaaggccttaactaatcaccttttcaaacatttgcaaaccttaaatggtaaatggaaccccccttttatcggtcttttaagcttggaggttgtggtttttccccacattgtgac

SEQ ID NO: 9465 - DNA, 140 bp, Zea mays
  Clone ID: LIB3156-002-Q1-K1-A8
cccacgcgttcttccacactttcgggagaattaacgggagaagacatctaggcagcagcaggagcttttacatctcctcctccatcgacgacttttattccttatgcctaaacatgtcgtcaacaacacacttcttaact

SEQ ID NO: 9466 - DNA, 282 bp, Zea mays
  Clone ID: LIB3156-002-Q1-K1-A9
gtgtcttcgtaccatgcatttcgtcagtcgtgggatgccgatgcgaaaacaatgtctgcgtgaaataaactcgtgacgccgctgctacagtcgggacgaggccatatatctctgatcccgttacgtgtgaagaaccagctccatctttgtaacaaatttgtgttgggagaaacagaaagacggtggtgtttaacttattgtgaaaggtgatttaataataatatataataaacgggatacgttggatgtggtgtacccaatattttattaataatttttatt

SEQ ID NO: 9467 - DNA, 391 bp, Zea mays
  unsure (1)..(391): unsure at all n locations; Clone ID: LIB3156-002-Q1-K1-B1
naaaaaaaaaaaaaaaaaaaaaaaaaaaaaattaaaaaaaaattaaaaaaaaaaaaaaaaaggggaaaaaaagggaaaaaaaaaaaaaaaaaaaaaaaaaaaaaaaaaaaaaaaaaaaaaaaaaaaaaaaaaaaaaaaaggggggggcctttttaaaaaaacaaattttttttccccgtttttccaaaataatatttttttttttgggcaacaaaaataaaattaattgcccgccttttaaaaacggcgaaattgaaaaaaccttgggtttcccaaattaaatccctttaaaaaaaatccctttttaccaatttgggttaatacaaaaaaagcccaaaccaatcccctttccaaaaaattgccaaccttaaatggaaaatggaacccccct

SEQ ID NO: 9468 - DNA, 326 bp, Zea mays
  unsure (1)..(326): unsure at all n locations; Clone ID: LIB3156-002-Q1-K1-B10
cgaggccgccaagaaggagatcaaggacatctttacccgctacgatcgcaccctcctcgtggctgacccccggcgctgcgagccgaagaagttcggcggacgtggtgcccgcgccaggttccagaagtcgtaccgttgagcggctgcctgctccatctcgatttttcagatcgttgtgggtgttcttcgctttatttcctatcaatggatctgcttatctggttctatatctagctgctgctttaccataatgtttagactntaatgcctagcctgaaaccttgtttgcaatgtgaaattaatgtgagagattatgaggcctttnt

SEQ ID NO: 9469 - DNA, 235 bp, Zea mays
  Clone ID: LIB3156-002-Q1-K1-B11
ctgacgcgtgggctggctgctcacaaccgttacggttagcgcggtcttgctcccttcgcgtgtgcttgcgtaacaagatttgggcagacgttcattcttacgatatagctgacgacacgtagtatcggccggggcctggcagatactgataggtggtctggatcgtgacttgatcagtgctcatctcgaggtgtcctgccagggtgactagtacgaggagcgtggtgtggaccca

SEQ ID NO: 9470 - DNA, 228 bp, Zea mays
  Clone ID: LIB3156-002-Q1-K1-B12
gcactgtccgtccgcttctctctccctatctccatctgcaatcctcgcccgcccacgttcggcagccatggcgtcgtcgcgcaccggagccggagccggagccggcggccgtgtggtggtcttcccgttcccgttccagggccacttcaacccggtgattccggttgcccgcgcgcttgacgcccgagggcttgcgattaccgtctttcacagcggcgccctggaccc

SEQ ID NO: 9471 - DNA, 427 bp, Zea mays
  Clone ID: LIB3156-002-Q1-K1-B2
ctcgacgcgccgccgccgtctcgccgctgcccacccagattgacggctccaattggcgcccgtggcggaagaaaccaacataaaaaaggaggaagaggagttcagcaccggtcctctctcggtgctcatgatgagcgtcaagaataatacccaggttcttatcaactgccggaacaacaagaagttgcttggtcgcgtgcgagccttcgatcggcactgcaacatggttcttgagaacgttagggagatgtggaccgaggtaccgaagaccggtaaaggcaagaagaaggctctcccggtgaacaaggacaggttcataagcaagatgttcctccgcggggattcggtcatcatcgtcctcaggaacccgaaatgagtagcctgtacacgtaaaaagtctgtttgctagcaatacgttgtgctattg

SEQ ID NO: 9472 - DNA, 461 bp, Zea mays
  Clone ID: LIB3156-002-Q1-K1-B3
cctgcccccaaactcccaccccgcagcatccccacgccgacgtaccttgtcgcgtcgcgtcgtgaccggcgtgaagatggtcgggccaggcctctacaccgagatcggcaagaagaccagggatctgctgtacaaggactaccagactgaccacaagttcaccctcactacctacacctccaatggcgtcgctgtaactgcttctagcacaaagaaagctgacctgatccttggcgacatccaatcacagataaagaacaagaacatgaccatagatgtgaaagcaaactcggagtcaaatatcattacaacaattactgttgatgagattgcaacaccagggctgaagaccatcttaagctttgctgttcctgatcagagatctggaaaggttgagctccagtatttgcatgattatgctggagttaatgcaagcatcggtctgacagccaatcctgtag

SEQ ID NO: 9473 - DNA, 400 bp, Zea mays
  Clone ID: LIB3156-002-Q1-K1-B4
aggggaagcgcgtcgccgtgaagtactacagcgatggctggcctactctctccgcgaagctggccttcgagaagtcagtcttcgccaaaacccagaaagcgaatgctggaacggatgcagagatttgaatgtatgatggtcaaatagtggtatacaagttcattcaagacctgcacttttttgttactggaggagaagaggagaatgagcttattttagcatcagttcttcagggattctctgatgctgtcgaacgacttctcaagaacatggttgacaaaaggacaggactcgagaatttggacctgatcctattgtgtcttgatgaaattgctgatggagggattgtactcgaaacacaaggaagagagatagctgaaaaggtgtctggtcacggatc

SEQ ID NO: 9474 - DNA, 241 bp, Zea mays
  Clone ID: LIB3156-002-Q1-K1-B5
gtgtcaattactttagtcacacttgccgatttctttgtgctttcgtcctcgttttggccggcgggggataaaaaaggagacgaggtcctgtaaatatgattggggggtacggttggctgagagattggtgggggatctatccatcgcctcctttcgcagtgcattcgtttggttcatggtgttgttggagggagaagcagaaggtgaagaataataatttatggcagggacgcctctcctg

SEQ ID NO: 9475 - DNA, 344 bp, Zea mays
  Clone ID: LIB3156-002-Q1-K1-B6
atgattgataaacgcccaacgcttcaaccctgcttcgtttttctgcacgtggagcgtttggggcatgttttctggtagaggaatgtaccttgatactctctgcccgatcttatcttgtgtactgcctgttggggttgggccgtacgattttaggctattctcaacgggaatgaatttcgtttcactctttttaactctaccacattatcaaaagagctataaaactataaaggagaaaaaaaaaaaataacctaaaaaaaaagaaacttatttgtaaaacttttaaatttaaaaaaaaaaaaaaaattggcgggcgcccttttttttatttattttaaaaacat

SEQ ID NO: 9476 - DNA, 451 bp, Zea mays
  Clone ID: LIB3156-002-Q1-K1-B7
cttgagactgttggaagcatcaaacaccggtatcttgtaagccttcaggggtactccctgtctccatctgggaatctccttttctatgattacatggaaaatggcagcctctgggacattttacatgcagcttcatcgaagaaaaagaaactcgattgggaggctcgcctcaagattgccctcggtgctgctcaaggcctggcttatcttcaccatgagtgcagtccacgaataatccacagggatgtgaagtcaaagaatatcctcctagacaaagactacgaggctcatcttgctgactttggtattgccaagagcttgtgtgtgtcgaagacgcacacatcaacgtacgtgatgggcaccattggctacattgaccctgagtatgcacggacatcccggatcaacgagaaatcggatgtatacagctacggcattgtcttgctggagt

SEQ ID NO: 9477 - DNA, 376 bp, Zea mays
  unsure (1)..(376): unsure at all n locations; Clone ID: LIB3156-002-Q1-K1-B8
tcgggacaacctcgcggcccgtacctgtactccacggcgttcacgttatcacgtcttagaaagcatgagcatgnactgacggtttctacagattgaaaaccaaaacgtcttacatgcgctggaaacctgccgctcactgtttacgttgggagtttttacaagtatctcagttcataacactatgcaacatttggttgggggacaggtagtacagtgacgtcctctcttatctctccaattttgtcccctctcatctctccaattttgagggacaactagggataacactggaatagtgatatcctaactcttgacgttgaattaaacaattatttgagggaaaaaaaaaaaaaagataaaaaaaaaattcataatt

SEQ ID NO: 9478 - DNA, 238 bp, Zea mays
  Clone ID: LIB3156-002-Q1-K1-B9
gcgctggtctcctccctacgtgcgcgcagggcacctggatgccggcgtggagctcgctcggctcgttcttatctccaattacatactcatgtctcctttcatctgctacacgcgtgcgtccctggcgctcacctcctacttctctttcctgccccatctgcctgttgatcgctgtccgctccagctcgcggatgctgcgcgcctaggtgatgctcgtcctccccttcgcacggttggc

SEQ ID NO: 9479 - DNA, 463 bp, Zea mays
  Clone ID: LIB3156-002-Q1-K1-C1
cgccatcatatggtttcaccttcaagtgtgatgagagatctgaaaaaagacgagagttctattcgaagcttgaggagaagattcatgcaagagagttagaaataagcaatttgcaagccaagtcaaaggaaactgaagaagcagaactcaaaatgctgagaaagagtttgaatttcaaggcaacaccaatgccaagcttttataaggaaccaacccctgccaaggttgaattgaaaaagatccccccaaccagagctaaatcaccaaagcttggtcggtctaaaaacaagtccatatcagagactgaagaaaatactactacggaccaacctgcccgtctgagccttgacgaaaaggtttctcaaaacggtgtgaaaaaaccaaccccgtcgagttcagcaaagaagccccagagaaagtcactccccaggctgccatctgaagaaactcgtccgcttgatgc

SEQ ID NO: 9480 - DNA, 372 bp, Zea mays
  Clone ID: LIB3156-002-Q1-K1-C10
gtcgcggtcggacaaggagcaggcggaggatgagctgtgccaagccacaatgggtatctggcgtgactcgatgcacaagcgccgggccaccggtggaaagcagaaggcctggaggaagaagcgaaagtatgagcttggtcgccagccagccaacaccaagttgtcaagcaataagacagtgaggagggtccgtgttcgtggaggtaatgtgaaatggagggctcttcgccttgatactggtaactactcatggggaagtgaagctgttacccgcaagacccgtatcctcgacgtggtctacaatgcatcaaacaatgagcttgtgaggacacaaacccttgtgaagagtgccattgtgcaagttgatgctgc

SEQ ID NO: 9481 - DNA, 214 bp, Zea mays
  Clone ID: LIB3156-002-Q1-K1-C11
aattcggtcgcccacgcgtcgtttctgtcccgggggcagtcgcggtggactggggcggcgggagagcgccatcggcagtcatcgaccgtgcccaacggcctacactgtcgttcgcgtcgcgacgcccggaacggctgcacggctctatgcttgtggaggcgttcgggcaacgtcacgcagaagtgccgtcgattcgcggaaagtggttcaagac

SEQ ID NO: 9482 - DNA, 262 bp, Zea mays
  Clone ID: LIB3156-002-Q1-K1-C12
cacccccctagctgagcttatctccactccagctccaatcacagtcgtgaccagagcgcgagagctagctagagggccgtgaaaatgccgatcaatatgatcgccctggggagccaccaggaggtgtaccacccgggcgccctcaaggcggcgttcgctgagttcatctacaccctcatcttcgtcttcgccggccagggctccggcatggccttcagcaagctgaccggcggcggaccgacgaccccagcgggcctgatcg

SEQ ID NO: 9483 - DNA, 434 bp, Zea mays
  Clone ID: LIB3156-002-Q1-K1-C2
cccacgcgtccgcccacgcgtccggcgcgacacgccccagcgtccacagttcactgcgcgcgcgtcgtgcagacaccacaccatggcacctgccgcccctgctgccacgggcgcggcgagccccgccggcaccaagggcggcggcaaggttgcagcacgctccgacaggctgggcctccccgcgctgccgccgctgcccggcctcagcctcgccgcgcagggccagacccgggccgcgtcgtccttgtgcaagcggctggcgagggacgtggtggccatggccgcgggagagccggcggcgcctcaagctgccaacgaggagctgaccgagttcgtcgacgcgttgaaaaaggagtgggacaagatcgaggacaagtacgcggtgaccacgctcgccgtcgacgacacgcttggcatgtggagcgccggtggag

SEQ ID NO: 9484 - DNA, 305 bp, Zea mays
  Clone ID: LIB3156-002-Q1-K1-C3
gggcacggggtgtggcacttcgatcagatgctgcttgaggaagaggcctaaaaagaagaacggacagatgaatgaaggaaacaagtgtgtaatgttgatcaggcggaggaataataatgggtcaactgacaactctgggtcggtggatttgttgttggtttgggttttttagttgtagaacggtgttgcccccctcctagagagggatgaacacattatgcatgcgatgtgtcagttcggtcggtgctatgctcgttgggatttgattgtcggaaataaactccctaatatatgtcttggtgatg

SEQ ID NO: 9485 - DNA, 384 bp, Zea mays
  Clone ID: LIB3156-002-Q1-K1-C4
ggtgtgcgcgacgggacgggccttgtgctgctggagtggtgcgagggagacaaccagcgctggaagattggtccctggagaacaaggaaatgtgtgaccgatcccgcaccaaggaggagctcctgccgtaataagtgaagtgattggtgctgaagtttctggaaataagaggctcttctgagatgtccgtctgtgtgagtatttgcgcttccattccgtgttcatgataataaaacgcattgcttattaatatatgtgatgagatactacactgacttgcaccggtgatatatatttgtgagaattaataacccattgatgctggactaatcgtgacaagtgatgaactgaagtgtgaacctatccttgatgcatatgctctta

SEQ ID NO: 9486 - DNA, 445 bp, Zea mays
  Clone ID: LIB3156-002-Q1-K1-C5
ctacaccatcgacgacgactgcttcgttgccaaggacccatctggcaaggatatcaatgctcttgagcagcacatcaagaacctcctcagcccatccaccccgttcttcttcaacaccctgtacgacccctaccgtgagggtgctgactttgtgcgtggataccccttcagcctcagggagggtgctcacaccgccgtctcccacggcctgtggctgaacatccctgactatgatgctcccacacagctggtcaagcccaaggagaggaatgagaggtatgttgatgctgtcatgacaatccccaagggaaccttgttccccatgtgtggcatgaaccttgccttcgacagggatctcattggccctgctatgtactttggtctcatgggtgatggccagcccatcggtcgctacgacgacatgtgggcaggatggtgtgtgaag

SEQ ID NO: 9487 - DNA, 449 bp, Zea mays
  unsure (1)..(449): unsure at all n locations; Clone ID: LIB3156-002-Q1-K1-C6
ttttacataaacaactctctctgctattagcagctcggaaaaatacaagtgggctctcagggcatcaaccatacaaaaactcaaggaaagaaaaaaaatgcctcgatcttcccatgtggccatcaccgagtgcctttatcgagtgttctagagcgccttcttctccggcgcctcttcaacgagcgctctcatcatccttgtcattaccctggcctgtggacgacggggagtagcccggtgcagtgggggagtagcttccgctagggctgtaatttggagaggtcgggctctagaactagtccgacgccgacgccgccgccgtgacggaaggaagaggaggagcaaggagcacgacgcgatgggccactccaacgtgtggaactcgcaccctaaaaactacngccctggctcccgcgtctgccgggtctgcgcgaaccctcacggtctga

SEQ ID NO: 9488 - DNA, 450 bp, Zea mays
  Clone ID: LIB3156-002-Q1-K1-C7
gaagcgcagcgcccatggccatggccacgcaagcctccgccgccacgcgccggctgctggcggccgcctgggcgccggcggcgaagccgcggcagctgagctcgcagctcgcgctgccgtcgtcgtcctcccgcgggccggccccgctccgcgcgtccaccgaggaggcggtggaggcgcctaaggggttcgtggccccgcagctggaccccagcacgccgtccccgatcttcggcggcagcacgggcgggctgctccgcaaggcgcaggtggaggagttctacgtcatcacgtggacgtcccccaaggagcaggtgttcgagatgcccaccggcggcgccgccatcatgcgggagggccccaacctcttgaagctggcgcgcaaggagcagtgcctggcgctcggcaccaggttgcgctccaagtacaagatcacctaccaggtctacc

SEQ ID NO: 9489 - DNA, 445 bp, Zea mays
  Clone ID: LIB3156-002-Q1-K1-C8
gattgctgaatggtaactctatggattcagctgatcggaggccacgaacggaaatgaatggaaagcaaattgagaatgaaagccatgttgatagtgaaactgtgaaaacatgatcaactatcatggagggggttttgttagctaagagacgtttcagacgactaaagaagaaatatgggatgccatccgctttggtgcctactagctccttgatgacttcatgaaatatagctacgaaggaaatagttttacatctcgctgttctaggcagcagaagttttgtttgcaaaactgtacatcttcctcagctctctcattgtaaccccttttctttctggtttctttcatttatttaccagcttggaattcagattatttatactagttgtgtatagatagcacacgttctttgcatgtgaacaggaatcatatggacaatataaga

SEQ ID NO: 9490 - DNA, 83 bp, Zea mays
  Clone ID: LIB3156-002-Q1-K1-D1
aatttttttgggttttgtccgtttcaaactgtattctaaattattacctctgttttcgaagatttgtcgccggcttgttcttt

SEQ ID NO: 9491 - DNA, 232 bp, Zea mays
  Clone ID: LIB3156-002-Q1-K1-D10
ctcggcttagaagttagttttacccatgcctgtggtctctcgttcagtggcgtatctgttgttgtgatggttgacgttgatgtttttttttttctcttcttccagtccaaaagtttgttgattcgttttggatagtacctttgttggagggataatcatgctcacatatatattctctaaagcatgcagttctatatgattataccatgtcccttatacataaatgattttc

SEQ ID NO: 9492 - DNA, 404 bp, Zea mays
  Clone ID: LIB3156-002-Q1-K1-D11
ctaaggttgagagcatcaagagagacaaagcagcatctgagaagttgcttcaagaaacaatagaaagaaatcagactgaacttgcagctcaaaaggagttctacaccaatgctcttaatgcggctaaagaggctgaggcattggctgaagcaagagtcaacagcgaaaccaaaattgaactggagaatcttttaggagaagctggtgaaaaagaaaatatgctgattaagacaatcgaggagttgaggcattttctcacccggcaagaaaaggaggctgctttcagggaagaaagactaaaaggggactttgatgaccttaaaaagcggtttaaagccagtgaacttcgttttattgaactggtaacgcaagttcctgagtttaccaaacggtttttaagacaa

SEQ ID NO: 9493 - DNA, 316 bp, Zea mays
  Clone ID: LIB3156-002-Q1-K1-D12
cgcagatctttgctagccccatgtatgaattcctggacacaaaatatggaagtgggcgtggtggcccttttgagatccacaacgtggcgttcagagtagcagtcagaggaggctacctgacggtgaacacgctggtggccgcggtgctcccattcctcggcgacttcatgagcctgacgggcgccctcagcacctttccgctgacgtttgtgctcgcaaatcacatgtacctgatggtgaaggggcctaagctgggtgccatccagaaatcatggcactggctcaatgttcttgggttcactgcgctggctgttgc

SEQ ID NO: 9494 - DNA, 440 bp, Zea mays
  Clone ID: LIB3156-002-Q1-K1-D2
cagtcatccacactaacgaacgaactcttgctccgatcacgagctagctgaggtcgacgatggcggctgtgctgaacagcaggaagacgccgcaggtggtggccgtgctggtggtggtggcgctgctggcttcgtccgcgtcggcggcgatcacctgcgggcaggtggggtcgtcgctggcgccgtgcatcccgtacgcgacggggagggccagcgcgctccccgcgtcgtgctgcagcggcgtcaagagcctcaacagcgcggcgcggaccagcgcggaccgccaggcggcgtgccgctgcctcaagagcctcgccaacagcgtcaagagcgtcaacatgggcaccgtcgccaccatccccggcaagtgcggcgtctccgtcggattccccatcagcatgtccaccgactgcaacaagatcagctaagttacgacgacc

SEQ ID NO: 9495 - DNA, 176 bp, Zea mays
  Clone ID: LIB3156-002-Q1-K1-D3
ggccgccctttgtagcctgttttgttctgttcagtcatagcgagatgctacttccatcaagggcttgttccaagttttttttgggtgctggaaatagagaccagtcaaatattttggtgtcctactgtttgataccttgtatttgtttgcgaactcagctatctaatgggttaatg

SEQ ID NO: 9496 - DNA, 435 bp, Zea mays
  Clone ID: LIB3156-002-Q1-K1-D4
gacagatcctcctggacctcaattttgataacaagatcaccaaggacctctccgaggagggggtcattaccctgcgtaaggaggatgccaagtacatgattgacggagaccttaaacgtttcaaccgtgtggcgattgagaggctgaaggagattatgtgctacaagggcatccggcacaagcttggactcccagttcgtggccagaggacaaagaacaactgccggacacttaagggaaagagggcttcacttgccaagaagaagtcacccgactcccaagatgaataaatcgtattgccatgtattgaacctctctctctctctctatatgcgtgagattgtgagcgtgtgtgtgtttaacgctactactgctgggtgctttgtttcagcttttatgctgccattgacaaatcatggggtagtcatcaactgc

SEQ ID NO: 9497 - DNA, 386 bp, Zea mays
  Clone ID: LIB3156-002-Q1-K1-D5
tgaaggtggacgggaaccagatcatggacatgtacatgaagagcatgcagggattcacggattccctggctaaaatgaagctccctgccttggacttggacatagacaatggtagcagcgggaggagtagtcctgcagcagccacaaccgacgcagaatccactggtgccgactcgatcgcggtgaagaagccagccgccgccgggaagcaggataagccatctcccaaggtgttctatggcagccgggcgttcttctgatctcctgtccgcttgagcactggaagcacagcgctccagccgccgagtaacgaagcaaagagacggcatttgcagtcgcctcagctgaatcttactagcgcagaggaataacaccttctcatgctc

SEQ ID NO: 9498 - DNA, 246 bp, Zea mays
  unsure (1)..(246): unsure at all n locations; Clone ID: LIB3156-002-Q1-K1-D6
aactgtcccagtccttcgtcactgagaaataacaagtggttgggccacaccctcttgcaactgtaatctgtaagcaagaggccctccctgttaggtctatatatattgaataaaaccgggacgcttttgccttgccctgnaaaaaaaaaaaaaaaaaaaaaaaaaaaaaaaaaaaaaaaaaaaaaaaaaaaaaaaaaaaaaaaaataaaaaaaaattatgggaaaaaattctatagcaaaaagggt

SEQ ID NO: 9499 - DNA, 447 bp, Zea mays
  Clone ID: LIB3156-002-Q1-K1-D8
cccccgtcagcaccgtcctcggcgcccctctcgggtccgtggcggagaccgtcaagaaggcggtggaccgcgtggacgacgccttcgcgcggtcggtgctggactacctggagctgcagaatgcaggcggcaagcagctgagcggccaggctcaggcccaggcgcccagggagcagctcgtaccggcgacggacctgtgggcggtgagctggctggggatggccatgtacgacgccgacttcggctcaggcgcgccgcggttcgtcgcgccggcgcagatgttcggcatcggcacggcgtatatgacgccgcgcggtccggacagggacgacggcatcgccgtgctcatctctctggagcccgagtacctgtcgtgctttgagaaggtcttcttctataacgagtgatgtctcacgtctggagttcaaggatgtgaacgtgtgaatt

SEQ ID NO: 9500 - DNA, 381 bp, Zea mays
  Clone ID: LIB3156-002-Q1-K1-D9
atcatgagatgctctcaggttccaagattcaagtacctaccaatcagtgctccagctatatcatcaagatcacacaaaccatcactacagtctctgtctagcgagtccacatctaaaaatccttggaaatcctattcaaatggagatagatctactacaccagagtttgatgataatgcaagtcttgttggtgctgctccattgcttaagtcatttgttactcaaggggtgaccaaattttggggagaacacatcgaggatggggttcaatgctctctgatggccaggtgggtaggctaagtaccatccttccggaacaaccagttgggttttcttttttttcacattttgaggctggtattaatcaatagtaaggcaccg

SEQ ID NO: 9501 - DNA, 454 bp, Zea mays
  unsure (1)..(454): unsure at all n locations; Clone ID: LIB3156-002-Q1-K1-E1
gcttggaaccgcangcctctgtagcgcagtgagacgtgctcctggagggagccacggcttgcggcacgacgatgcggactgggcttgcagttgccgcgcttgatagatgcggcacgcagggctccggtttctgaactgcgatctgtctagcaccagggaagacctcggccacgttgaccttggcaggggcaggggcaggaacaggcggcgagtccggctcacttgacggggtagcaccaggaacagacgccctgctggccagcatcatgagctctttagccttgtcgaccgggacgttgtcgaaaacattcaccgagccgttgtagaatatcgtgagctgcgtcgaggcctcggtccgtgggttcctaacaaggaggaaggtcgatcaaccgtcgatcaacatgtcgacagggagggagggaaggaactgccgatcgatacctcgccccgtaca

SEQ ID NO: 9502 - DNA, 275 bp, Zea mays
  Clone ID: LIB3156-002-Q1-K1-E10
ctcacgcgtgcgcccacgcgtccgagcgaccttttctagatagtatgggtgctaaggcctctggataaaggagcttgcctttgtcaaaagacgccaacttttgtctgctttggatgagtggtaaggtccggggtctgttcgaatcgtggcgaaggatgcgttttaaagttattttgtcatatgctacgtgttcgtattcttgtagagagttggctacgacccgctgctgtgctatgtgggtgctgagacactcctgaagtattttcaccttagct

SEQ ID NO: 9503 - DNA, 316 bp, Zea mays
  Clone ID: LIB3156-002-Q1-K1-E11
cacagtcatccacactaacgaacgaactcttgctccgatcacgagctagctgaggtcgacgatggcggctgtgctgaacagcaggaagacgccgcaggcggtgttggccttccttgtgccggggggctgctggcttcgtccgcttcggcggcgatcacctgcgggcaggtggggtcgtcgctggcgccgtgcatcccgtacgcgacggtgagggccagcgcgctccccgcgtcgtgctgcagcggcgtaaagagcctcaacagcgcggggcggaccagcgcggaccgccaggcggcgtgccgctgccttaagagcc

SEQ ID NO: 9504 - DNA, 180 bp, Zea mays
  Clone ID: LIB3156-002-Q1-K1-E12
gacaaggttgcgtatgccctgtctcagggactaaaggtcattgcatgtgttggtgagacccttgagcagagggaggctgggtctaccatggatgttgttgctgcacaaacaaaagcaattgctgagaagatcaaggactggagcaacgtagttgttgcctatgaacaattttggctattg

SEQ ID NO: 9505 - DNA, 390 bp, Zea mays
  Clone ID: LIB3156-002-Q1-K1-E2
gtcgcatcatcaggaagcggatccatgtccgcgtggagcatgtgcagccctcccgttgcacgagaggagttccgcctgaggaaagccaagaatgaccagctcaaggcggatgccaaggcccgcggtgaggtgatcagcaccaagaggcagcctgtgggacccaaacctggcttcatggatgagggtgctacactcgagacagacactcctattccttatgatgtggtcaacgatctcaagggcggctactagagataattcttgtaccttcagcagttcaaacgagctggcaaacttatctgaatctttttgataattggctagttcttctgttctggtgttatgaactcatgtggctattgctgttggcgtcaaaagattttttttatt

SEQ ID NO: 9506 - DNA, 412 bp, Zea mays
  Clone ID: LIB3156-002-Q1-K1-E3
gcgacgggtgggaatgggaaacacgaccccgacaaccaatctgcgtggatccactgccgccggcgttgttcgagccgtccggacggaacgacgacacctaccgagtcgtcaacaccgcttacacgccgggcgtactggtggacgccatcaacgaagcaatgaagcagatgcacctggcgttggttcaggcgagcaacctccggcgatgcgatggtgccggcatcgatgcgatgatgccacgggcagctggcgcattcgcatgatccagacaccagccgacgatccatcagtcattcacctactgctgctgtcctaccgcttatgttctcgatttccttgtttttgtttctaagaaaataaaggagagcatcagtttgcattggcgtaaatttttattttctttaatcagacg

SEQ ID NO: 9507 - DNA, 392 bp, Zea mays
  Clone ID: LIB3156-002-Q1-K1-E4
gaaaatcgtcagcccctcggaaagccaagccggtgaaacccactcagagcagcgcaaaggtgtcgaagagcaaagcaaaacctgaggggcgaagatcaaagagtgacactctgaacaagctgggaactaagctcagtgtggttggatttagagggcgcacctcacgcaaatcagcacaatcttcataaggctttggaatttttttttattattggtatgctaaaaaggatcttggaggatttgcagcctgtaaatatctgagactaagtttcatcatttctttttctgcttgccggtttataagtgaagaccacaatctgagatatgaacgcagcactgctatgtaatattgtactgcactcagcagaatgttggaagaatacttttcattc

SEQ ID NO: 9508 - DNA, 442 bp, Zea mays
  Clone ID: LIB3156-002-Q1-K1-E5
cggacgcgtggggtttggcgggttcccctgcacagcatggtttgatgttggggacctttctgaggatgctcccgatgacactgaggggatggatgcctcagcagcacatgttgcaaatttgttgtcaactgaacccgctgacatcaagcttggtgttggtggctttagtatgggtgctgctactgctctgtactctgcaacttgctttgctcatggaaaatatgggaacggcaatccataccctgtgaacctaagtcttgccgttggtcttagtggttggcttccatgtgccaggaccttgaagaacagaattgaagcctcaccagaggctgcacaaagggcttcaacaatacctcttttgctctgtcatggaaaagctgatgatgtagttctctacaagcatgggcagagatctactgatgccttgaaggcaaatggcttt

SEQ ID NO: 9509 - DNA, 401 bp, Zea mays
  Clone ID: LIB3156-002-Q1-K1-E6
gctacgggttcagctcggtgttccaggcgtgctgcggctcggggggcggggggtacaactgccagaacagcgcgcggtgcggcatgtcgggcgcgtccgcgtgctccagcccggcgtcgcacctcagctgggacggcatccacctcaccgaggccgcctacaagcagatcaccgacggctggctcaacgggccctactgccgccccgccatcctccacagctaagctaagcgaggggagggcgattaattgttattaattttttattgttgccatgttatttatacctgtgtttacgttgccgggaaaaaagtgtcccggcagccgcatgaatgtgttccctcttgtaatttgttatactggtggtcttcatttacaaatcaaatggtatagatttttcat

SEQ ID NO: 9510 - DNA, 449 bp, Zea mays
  Clone ID: LIB3156-002-Q1-K1-E8
gcgccgcgctcaccgacgaggacacctgcctcgacggcctctcgtcccgcgccgtcgacgccggcacgcgcgccgccatccggggcaaggtcgtcgaggtcgcgcaggtcaccagcaacgcgctcgcgctcgtcaataaggtcgggcctgggtactaacacgggaaggggacccaagatccaggcccaggcccaggcccagcccagataccacacccgctactagtatagtactaggcgcctccacctccacggcgttgggtgtttctcgtccgttaatagctcggtttgctttgcttgtgtttgtgtaagatatacattagttaagggcaataagcttgtactattatgagtggcggccgaggagtacagtacgttctcctctgtccgatcatgccaccatattaatgtgggagatatcttttgtccaatgtggggctacaggcaaag

SEQ ID NO: 9511 - DNA, 302 bp, Zea mays
  Clone ID: LIB3156-002-Q1-K1-F10
atgacagggcagctgacagtgaagtccgatgtgtatagctttggggtcgtcttgctagagttgataactggtcgtagggctatcgacagcaccagaccacatggagaacaaaatcttgtctcatgggcacgtcctcttttcaacgacagaaggaatctccccaagatggccgacccaaggctggaagggcggtaccccatgcgcgggctgtaccaagccctggcggtggcttccatgtgcactcagtcggaggccgcttcgcggtcactgatcgcggacgtcgtgaccgctctgttctacct

SEQ ID NO: 9512 - DNA, 328 bp, Zea mays
  Clone ID: LIB3156-002-Q1-K1-F11
gtcattgcattcagctgtccggaacgaaccctttttatggaagtgcatccatattgactcgcgcttggggaagaagatgtctgatgctgatcttctgtgcctgacacagaagtccccaggttctatgcagtgcctgagtcttatgcactgtaacaacatcacagatcagggattgaaagctgttttaaagagtaatctacagttaacaaagttgggcatttttggtgctttccggattacttatcaaggtcttattgacagtctgaggtcatttaatatggaaacagatattggtataaagaaactcagagttacaaatcacgtcact

SEQ ID NO: 9513 - DNA, 451 bp, Zea mays
  Clone ID: LIB3156-002-Q1-K1-F2
cttgggagtgtgtactggggacaagtctgggatggttctcagattgctgtcaagaggttaagtaacgcaaagaacggcacagaagcggaatttgcttcagaagtcgagatgctgggaaggataagacacaaaaacctcctgagcttccgtggatactgtgcggacggacccgagcgcgttctggtgtatgacttcatggcaaactcaagcctgtatgcacatctccatggaccgcattccgcggagtgtctcctcgactggcggaggcgagcatctatcgccatcggcaccgctcgggctctcttgtaccttcatcgccacgcaacgcctaagataatccacggaagcgtgaaggccaccaacgtgctgctggattcaaactttcgggcgcacgctggcgatttcggtctggcaaggcttattcccgacgacggaacggaccacgaaaaga

SEQ ID NO: 9514 - DNA, 433 bp, Zea mays
  Clone ID: LIB3156-002-Q1-K1-F3
cgagaccgtcaccaacgacgagatcgccggcgacctcaaggagcacgtgatcaagcccgtgggccctgagaagtacctcgacgagaagaccatctttcacctcaacccgtgcgggcgcttcgtcatcggcgggccccacggtgacgccgggcttaccgggcggaagatcatcatcgacacgtacggcgggtggggagcccacagcggaggcgccttgtccggcaaggaccccaccaatgtggaccgcagcggcgcctacgtgggcaggcaggccgtcaagagcatcgtggccagcgggctcgtctcgcgctgtctcgtgcacgtgtcgtacgccatcagcgtgccggagcccctgtccgtgttcgtcaacttcgacggaaacggcacgatgcacgacaaggagatccttaagatcgtgaatgagaacttcgac

SEQ ID NO: 9515 - DNA, 381 bp, Zea mays
  Clone ID: LIB3156-002-Q1-K1-F4
cgggcgcgtgggttcggtgcctgcgcccgttgtcaccttggccgacgttggcgagtctgcgttcgttcagaacacggtcggccatgctgtggcgcctcactgcgacggggaacgctggtgttgatctcgccgagttggagccgtatatggatttactgatggacggaggttcatacgactcgatcagcactctcttgagctgtgatggatcccatgacgtggtcagcaacatggacctttggagctttgacgacatgcccatgtctgctggtttctactgaggctgaggcccagcgactggtgcttgtgtacatagggggggacacagggtaaaagcctgcagcaacagacattggctctttctggtacttgcaatttcta

SEQ ID NO: 9516 - DNA, 392 bp, Zea mays
  Clone ID: LIB3156-002-Q1-K1-F5
ccgggccggaaacccgggcgcccacgcgtccagaagagcccagaaccgtccatcccctactggatccgatgcgcactgggataccatgagtacaacgccaacgcaggcactggcgccgcaccaagctcggcttctgagcgtcgggattggccggctgctgcatcggaaggctagggtctaagagctatcttccttctgttttataaatgtgtgactttttctgtaagctagcacgtgttgctatgacgcttttattaagattctggtgagcggtgatgttaagagaaaattggcactactgcggtgtaccccaagattccttgcaatattactatgctaagaaaagaaccttatatcttattatatatgtagtgctgcattgattgacgttc

SEQ ID NO: 9517 - DNA, 285 bp, Zea mays
  Clone ID: LIB3156-002-Q1-K1-F7
gatattcagcctaagtatttggtcccttgctgatgtacaggcaaccgtgggaacactgggcttatctacagcaactgtgaaactgatagggccagatggagaggagagaatagcatgttcagttggaacaggtccagatgatgcagcttacaaggctgttgaccaaataatgcagattccaaccgtcctccgagaatactgcatgactttagtcacacaatgtattgacgctattgcaacgactcgagtggttgtcaccggagacttggccaacaacttcaaaca

SEQ ID NO: 9518 - DNA, 450 bp, Zea mays
  Clone ID: LIB3156-002-Q1-K1-F8
ctcagcagcgatcgcagcaccgcggcgagataatgagcagcctgtcctccggcatctctgcgtcgccatctgcagcggccagcaccgctcggcgccgccatggcgcagcgccgcagcagctgagggtgaaggcggcggcgcggccacagctgctgcacgccggccgccggcgttcgagtgtcgggaggaggccgggcggcggcgcggtggtggtgagggccgggcctgggccactgtcggagatcgagccggacctggaggaggacgccatcgacgtgtaccgcaccaacggcatcagcccggaggacttcgagtacgggaagtatgacggacaccacacctatttcgaaggccaagacaagaagggcttctgggaggatgtctccgagtggtaccaagaagctgagcctcctcaaggctttcaagcactcatcttctgggcattttctt

SEQ ID NO: 9519 - DNA, 244 bp, Zea mays
  Clone ID: LIB3156-002-Q1-K1-F9
ctcaaacccaacggagaatggatgctagtggacaagtgtgtcgggctgagcttggtgaaccggtttaatcccagggaggttagcaaatgctttgtgcactggggaactggtgatgtgaacatggagctctggtcagaggaaagaccagtgtctaatgacacgccgttgaggatttgccaccagtatgaggtgaagcaaacaacctaaacacctgcccgaagagcagaaataaaaataccaattt

SEQ ID NO: 9520 - DNA, 168 bp, Zea mays
  Clone ID: LIB3156-002-Q1-K1-G1
aaaaaaaaaaaaaaaaaataaaaaaaaaaaaaattaaaaaaaattaaaaaaaaataaaaaaacgtgaaatttaaaaaaaataaataacaaaaacataaaaaaaatataaatgcatactaattaaaaaaaatttttcttttttctttctactccccccacttttaaatt

SEQ ID NO: 9521 - DNA, 273 bp, Zea mays
  unsure (1)..(273): unsure at all n locations; Clone ID: LIB3156-002-Q1-K1-G10
gctcgatgtaccgtacagacgatggtcggttattaatagaatatttcgtttattgtgtaaagtgcactagctggccatttatttacagtagtaacgcatgaacagcgtgtatatatagccgtatactgatggactgcaggatggaagtgtcatcgtcatcggtatatatgctcatgtataccacgtggccacgtgtcgcaacgtgtgtgtgtgtgtggtactatatatacaattgtcagctaactgacgccntctnaaaaaaaattattattt

SEQ ID NO: 9522 - DNA, 269 bp, Zea mays
  Clone ID: LIB3156-002-Q1-K1-G2
ctcgtcgcaagaccgtgaccggcatggatgttgtgtacgcactcaagcgccatggccgaactctgtacgggttcggaggatgagcgcatctttttcctcgtctgcagcggttgtcggtggcgtttcctcagttccctctgccttgcttggcttgatgtacagagttatcaaattaaaatatatgtgatgtgcttcgttattgggtggaatcatgtgtcccatcagtgctgggaaatcgagatcaagatgtatctttctttggagcgatg

SEQ ID NO: 9523 - DNA, 375 bp, Zea mays
  Clone ID: LIB3156-002-Q1-K1-G4
gctgaacgtcgaccggctcgccggcgtctttggggtgtacgccgtcgcgtgcgtgctaacgctcgcgttcgtgttcgtcaaggtgccctgagacgaacggcatgcctctcgaggtcatcaccgacttcttctccgttggggcaaagcaagccaaggaagaggaggaggaggaggccagggaaggttgatcacccggacggtcggacccaattaccggtaccgactgtggggatttttgtggactgcacactttactgtggttgggcctgtgaagatgtatttgtgaaaaaaaaaactttgggtagggggcagagatgatttggctgaacaatgtgaggcttgattctgccaaaagctggtctttataactaggaa

SEQ ID NO: 9524 - DNA, 450 bp, Zea mays
  Clone ID: LIB3156-002-Q1-K1-G5
cggacgcgtgggcggcgagatgggcgccctcgccgccggcgccttcgccgtgtacgagaggcgcgaggcgaagaaggacccggagcacgcgcagcggcacaagatcgaggagggcgtggcggcggtggcggccctgggcaacggcggcttcgcgttccacgagcaccacgacaagaaggaggccaaagacgcggcggaggacgccggggaggaggaggagtccggccgccgcggcgaggggaagaagaagcaccacttcttctgctgatcgggctgctgctcgatcgatctacttgcgtacgtaggctgctccccacgaccagaaggagcatgcatggagggcgaacgaactcaataaaaaaatcatccgggggtttgattgtccgcctatgtatatcatgtgtaggtactgatgatgtgtgtgcatggtacttcgtacgcgtgtttggg

SEQ ID NO: 9525 - DNA, 134 bp, Zea mays
  Clone ID: LIB3156-002-Q1-K1-G6
gggagatgatcgagagacgtgcccaggagcgggtggttttcgaacaacaatggcggctgacaatgcagaggctggagcaggagcggttgttgctggaacactcgtggatggaacgggaggagcgaagaaggatg

SEQ ID NO: 9526 - DNA, 429 bp, Zea mays
  Clone ID: LIB3156-002-Q1-K1-G7
gattcagcagtgtagcaatgaggatgagatagtttctgttatagcacatgggcttggacactggaaactcaatcatactgtctattcctttgtagctgtccagctgcttatgtttcttcaatttggaggatatactctagtaaggagctccaaagatctatttggaagttttggcttcaaggaccagccagtaataattggattgatcattttccagcacaccataatacccatccaacaccttctgagcttttgcctgaaccttgtcagcagagcatttgaatttcaggctgatgcctttgccaagaaccttggatatgcccctcagctccgagcagcccttgttaaactacaggaggagaacttgtctgcgatgaacaccgatccttggtattcggcatatcactactcccacccaccactcgtcga

SEQ ID NO: 9527 - DNA, 448 bp, Zea mays
  Clone ID: LIB3156-002-Q1-K1-G8
gccgccctttttttttttttttttttttttttttttttttttttttacccgtcaacctaggtaaataatccaaaggtaaaaataccacaaagcattttctcggacttgttccatgttaacatgaatcctaaaacgcaactttaaactgacaaggttgcatgcatcccaggcatgcaacacgggttggcagcgtgtcacaaatattttacctggcaccaggttcattctacccgttggaattctcatggacggccggacgggggctttttattaaaaaaaggcaaaaacatgcgtagattttaccagttcaaggaattcttggactggttaaacttttcgctatatgcactttccaaattcttcttgcatgcttttaacaatgggtgcaggaaggaaatcctgaaaaaactgatggattttcccaaggaccttctttaccaattatttt

SEQ ID NO: 9528 - DNA, 65 bp, Zea mays
  Clone ID: LIB3156-002-Q1-K1-G9
gtcaaacgtaagcgccaaggtcttagacggttatcttgtctcagtccaggatcagggacgcgtgg

SEQ ID NO: 9529 - DNA, 404 bp, Zea mays
  Clone ID: LIB3156-002-Q1-K1-H1
gattgctggacatgtgtactactttctggaagatgtatacccacggatgactggccgccgggcgctgaagacaccgtccttcatcaaggcgctatttgctgatgacaatgttgtggtggcacagccacccaatgctgggattggtgctggtgcaaggtttggtgctatgggtctagatccccaggctcaatgatatgaattactttcagtgacctgaggctgtgactgatctgagatgcggcagtctgttcctctgcgcaagttgcggaactgtacaagtcattgttcttgtatttatacaggctagatgagaattcttgtgcataacaaaagattagtagtatccgaggcggccaaaagtttctcacctgttagcagggcccgaaagaaatggtttctgatgt

SEQ ID NO: 9530 - DNA, 388 bp, Zea mays
  Clone ID: LIB3156-002-Q1-K1-H10
cctcaaccaaattcaaagtcacagcggcgattctctcggcgatgtctggccgcggcaagggcgggaagggtctgggcaagggcggcgccaagcgccaccgcaaggtgctgcgtgacaacatccagggcatcaccaagccggcgatccgcaggttggcgaggaggggcggcgtcaagcgcatctccgggctcatctactaggagacccgcggcgtgctcaacatcttcctcgagaacgtcattcgtgacgccgttacctacaccgagcacgcccgccgtaagactgtgaccgccatggacgttgtctacgctcttaagcgccagggccgcaccctttacggtttcggcggttaggtcgcccctctcccggtggcgaattacatggtggc

SEQ ID NO: 9531 - DNA, 336 bp, Zea mays
  Clone ID: LIB3156-002-Q1-K1-H11
ctgtcctttgctcattgttgaggttgaatgttggtgattgtttatgttttttattggtgtggctggtgtatacattgtactgtttggttcagatgagggatcgagggcggcgcatgcggctagctcgtgggcggaacagactggtgagattgaggatggatcaggagcttgagccctagaaagctttgcaggcgcatctagttgaagtttctgtagaaagggtgaaggcatctgaaaccatatagtctctataggaaagtagtgactcatgagtagctgaacaagactgatcgtaatatgctggcgaaaaaatgggggtatgaatggagaaagatc

SEQ ID NO: 9532 - DNA, 381 bp, Zea mays
  Clone ID: LIB3156-002-Q1-K1-H12
ctccgggccacccagcgcgccgtagcgcctttaccgttcgccgtcgttctggacctggacgccgtccttctggcacttcgggtcgtatcgcctcacggtcacgcccgtcgtgcggtgaggcgtttgtgctcgcccgcgcgctttcctgtcgggttccctacgcgccaacgtactccggaaatgattatgactcggcctcgtctgtgttggcctcttgggcttatatactgtcactgtcagattaatttggctaggaaatggcgcttgtgtgacattgtgtgctatgcatgtgtgtgactgtactgtctgtgcacggtgcacctttactgcgcgttgttcatagagagagagagaagaaaacgcacataataaaatcaagtc

SEQ ID NO: 9533 - DNA, 431 bp, Zea mays
  unsure (1)..(431): unsure at all n locations; Clone ID: LIB3156-002-Q1-K1-H2
ctggtgcccagtctgccctcagggcgcttgctcgttccgggatgaaaatcggacgcattgaggacgttaccccggtccccacggacagcactcgcagaaagggcggtaggaggggaaggaggctgtaggcgtctcttctgcgtgccatttgctggctcttgtcgggtggccatcatgaagctagtcctctctgggtggtgttgctgttttctgtgtttgtcaagacgagctttaattttgctctatgtggatgactgtttaccgttagtcgaacctgtatgatgttgcatggataatgttttttggctgaggaattggctcgtcatatttctatatgcattttcactcttttttttgacgaannanacntgnnngnaaaaaaaaaaaaaaaagggcggccgccctttttttttttttttaaagtggatgat

SEQ ID NO: 9534 - DNA, 236 bp, Zea mays
  Clone ID: LIB3156-002-Q1-K1-H3
acgtgacgctagttttaccttaggattcttgttctttacaagatgaaaaacctactcattgtggactttatccgagtacctacagacagcactcgcaaaaagatcagaattatgtgaaagaaacatgtattcatctattctgtttgccattttttagatcttgtcaaatacacatctttaatctattactatatgtataaattccttaatttcttttttttaaattactaatttaa

SEQ ID NO: 9535 - DNA, 301 bp, Zea mays
  unsure (1)..(301): unsure at all n locations; Clone ID: LIB3156-002-Q1-K1-H4
ataaaaaaaaaaatagaaataaaagcacttgttaattaaaaaatgaaaaaaaaaacacattggggacattaaaaaagaaacaaacagacagaactaaaaaaaaagggcggtatttttagaaggggcgatgtntcctactcttctaagtgccatttgctggtcttttgtcgggtgaccattattaatttagtcctctatggttaataaacgtgctgtctgtgaaaaccatgacgatttttaatttttttgtatttcaataattatttattttgagaaaaacctttattatgaaaagtggata

SEQ ID NO: 9536 - DNA, 410 bp, Zea mays
  Clone ID: LIB3156-002-Q1-K1-H5
ggaggagggtgacttcgtttctatttggggaacactgctcgcgtcctgcagagcacaggacaagcaggaattggtgaatttggtgacagagagattgatctgcattgagaagaagtatggccatgctggttacagcgttttgttgtcacatatttttgctgctgagggcaactggagtagtgctgatagcctgaggaaggagatgaggttgagaggattgagcaagatggcaggttctagttggattaaagtccagcatgcagcattgcaaagctaccctaaaaatggccatgaacactcattactgcatgtagttgattacggtagagatgaaatcatctgacatgaatcagtactgcagcagtggaaagcttgctgatctgggtgttgttcatgtcccatgacgtgat

SEQ ID NO: 9537 - DNA, 356 bp, Zea mays
  Clone ID: LIB3156-002-Q1-K1-H6
gcacgcccgccgcaagactgtcaccgccatggacgttgtctacgcgctcaagcgtcagggccggaccctctacggtttcggcggctaggtcgccctctctcccggtggcgaattacgtggtggcgaagggcggcggggtggggtcttgggctaagggtggccggggtggctttattcgcgccggtttctggggtgggtgggctggaatcgtctatagttctatagtaaggcgcgtgaatatctcgttggtgaaaacaatggaatggcctcgtttccaggctcaagatatatcgcgcttttgtatactgcggagaaatgtgcaaaaaaaaaaaaactcccgtgaaaaggggctcccc

SEQ ID NO: 9538 - DNA, 348 bp, Zea mays
  Clone ID: LIB3156-002-Q1-K1-H7
gcttcgtgaggttctccgggtttcggtttcgtgggtgagcggatcgagatggcggcgtcgggtgttgagtaccgctgcttcgtcagcggcctctcctgtgccacggacgaccactccctccacaacgccttcatcacctacggcgaggtcctcgagtccaagattatgctccatcgggagacgcatacgtcccgcggcttcagcttcgtcaccttcttcacggaggaggcgatgcggaacgccatctagggcatgaacagcaaggagcttgacggcccgaacatcaccgtcaacaaggcccagtccctcggcggccgtggaggcggcggcagcggctactgtggtggt

SEQ ID NO: 9539 - DNA, 351 bp, Zea mays
  Clone ID: LIB3156-002-Q1-K1-H8
attcagagcgatcgaaaagctgttggaaggatgtgagagtaaatatgctgggggagatgatgtccaattggcagatgtgttccttgaaccacagatacatgccggcataaatcgcttccaaatcgatatgtcgatgtacccaatcttggagaggctccatgatgcatacatgcaaattcccgcattccaagccgcgcttcctaaaaatcaaccagacgcaccttcatcataaacatcaatattatctcaataatttgcatgtcattttgtaataatttggatagggagccactgcttcctccatcccgttgtggatcaaaagggtgaacgattggcacttctgtttggaat

SEQ ID NO: 9540 - DNA, 299 bp, Zea mays
  Clone ID: LIB3156-002-Q1-K2-A1
cggacgcgtgggcggacgcgtggggggaggtccacccacttctgccatgactagcattgccaacccaggacgagctggaatctcgtgacatgcggtgcatcgtccctgcagtgtgcattcggaaagcctaacagtagacgggaacatcgacatggatagttggttcgccggatgatcgacgttttgactgtaatcttagtttatgttgttgctgatgctttagccttttgttagtctgcatattagtgagtgaattttgttatgttctgctgctgaatggaaattctgagttgaattgt

SEQ ID NO: 9541 - DNA, 449 bp, Zea mays
  Clone ID: LIB3156-002-Q1-K2-A10
cacagattcgcaaggccgcacagctcttcacatggcttctgccaatggtcaccttgctgtggtggaatacttgattcaaaatggagcgaatgttaacgccaccaacatggagaagaacacaccactccactgggcatgccttaatggacgtatagaggtaatcagggctttgatctcagcgggggctagcgtgagtgctctgaacagccacgagaaaacgccaatggacgaagcggtgaccacaggcaagatgcacgtgatcgacgcgatcggtgcggcagtagctcaagccgagctcgacggcgttactgtctcctaaaaggacctgatgagtacctggagctttgaatgacttgcagccttgttcttatctcacagcggttctgtctgtatcactcgcgaacctgaatcccccgacgggccagtatccgggcaatatctatactgac

SEQ ID NO: 9542 - DNA, 434 bp, Zea mays
  Clone ID: LIB3156-002-Q1-K2-A11
cgacgatgcgctcgccggacgggaagaagctggacatgctagcggaggaggacctcggcagcatgccctacctcaaggcgaccatcaaggagacgctgcgcctgcacccgccggcgccgttcctcctcccggactactccaccgccgactccgagatcgacggctacttcgtccccgccgggacgcgcgtcctcgtcagcgcctgggcgctcgggagggacccgacgacgtgggagaagccggaggagttcatgccggagcggttcgtgcaggaaccgggcgccgtggacgtccacatgaagggcaaggacgctaggttcatcccgttcggctccggccggaggatctgccccgggatgaacttcggcttcgcgaccatggagatcatgctggccaatctcatgtaccatttcgattgggaggttccgggctct

SEQ ID NO: 9543 - DNA, 456 bp, Zea mays
  unsure (1)..(456): unsure at all n locations; Clone ID: LIB3156-002-Q1-K2-A12
ccgaaagctgctcgaactccttccaaatatggacaatcataccaacacatgtcacatgctggatttggctgtcgactacatcaatgatcttcacaatcaggctaaggtgctaaaggacagccatgataattgcacctgctcagcatgcatgaaccagcagcacttctgttgaaaccgncatgctgactgtacatgacctctgaagcatgttcacttgggacacaaaaacatgtaagacagctctcatgcatgtcgcttcatgaggttttgaactgcaggagttgcgaggctctatataccaagcactgtggcttttgtatgatcaaagacggatggagccatggcatcaccaagcatatgaatgattggtagaagaggaaaaataagtggggagagatatatatgtaggagaaacaactgtatagtttggctgcagctattctatatatacacaca

SEQ ID NO: 9544 - DNA, 251 bp, Zea mays
  Clone ID: LIB3156-002-Q1-K2-A2
gccagatcctcctggacctcaatttcgataacaagatcaccaaggacctcttcgaggaggaggtcatcaccctccgtaaggaggttggcaagtacatgattgagggagaccttaaacgtttcaaccgtgtggcgattgagaggctgaaggagattatgtgctacaagggcattcagcacaagcttggactcccagttcgtggcagaagacaaagaacaactgccggacacttaagggaaagagggcttcag

SEQ ID NO: 9545 - DNA, 236 bp, Zea mays
  Clone ID: LIB3156-002-Q1-K2-A3
gcaaggaagagagagtacttccgcatgcggcgtgaacggaagaaggcgagagcggagggcgccgctgagcctcagttggtactagctgctggtgatgaaaactctgaggtcagcgcggactgctgataagtttcctgtgggggggttctctttttcacagcccttggtacactttttcttccttaattgtaagaccacatgattataaaggtcatatttacatgtgttggttagat

SEQ ID NO: 9546 - DNA, 333 bp, Zea mays
  Clone ID: LIB3156-002-Q1-K2-A4
cggacgcgtgggcggccgacccggagacattcgcgcgcaaccgggagctggaggtgatccactcccggtgggcgatgctgggcgcgctgggctgcgtgttcccggagatcctggccaagaacggcgtcaagttcggcgaggcggtgtggttcaaggccggcgcgcagatcttctcggagggcgggctggactacctggggaacccaacctggtgcacgcacagagcatcctggccatctgggcgtgccaggtggtgctcatgggcttcgtcgagggctaccgcgtcggcggcggcccgctcggggaagggctcgacaaggtgtaccccggggg

SEQ ID NO: 9547 - DNA, 329 bp, Zea mays
  unsure (1)..(329): unsure at all n locations; Clone ID: LIB3156-002-Q1-K2-A5
gagaaaccatttgaagtttcctgaggatgcaaagttgtcaaatgaagcaagagatctcatttgccggttattatgtgatgttgaccacaggattggcagtgcaggggcagatcaaataaaggcacatccttggttccaaggagttgcatgggataaactttatgaaatggaagcagcatttaagcctcaagtaaatgatagctggatacacagaatttcatgaaatttgaggaactggaaaaatcctccagccaaaacaggctctgtgcctttcaagaaagatgatgctgaactncaaagatctgagctttgtggggtatacatacaaa

SEQ ID NO: 9548 - DNA, 221 bp, Zea mays
  Clone ID: LIB3156-002-Q1-K2-A6
atactcataaaccatctcaagtttcctgtttataccaccaaggaccatctaaccaaaagagcgtcatggaccctttataatgagggggtcaccatcataattgaagtacaccttcaacatatcaaccgtctcatcattgataccctgaagtagattatgatctacaatatcatacgtcacaagcttttactcctaattcatgtcagagcacaaaaaacaac

SEQ ID NO: 9549 - DNA, 301 bp, Zea mays
  Clone ID: LIB3156-002-Q1-K2-A9
gtgtcttcgtaccatgcatttcgtcagtcgtgggatgccgatgcgaaaacaatgtctgcgtgaaataaactcgtgacgccgctgctacagtcgggacgaggccatatatctctgatcccgttacgtgtgaagaaccagctccatctttgtaacaaatttgtgttgggagaaacagaaagaccgtggtgtttaacttattgtgaaaggtgatttaataataatatataataaacgggatacgttggatgtggtgtgcccccacgatctaaaggaaccgatattacatacacaaacaatacgc

SEQ ID NO: 9550 - DNA, 215 bp, Zea mays
  Clone ID: LIB3156-002-Q1-K2-B1
gttaaacataatttgccatcacgtaggagtttcagattatcatgcaccgaaatataagcacggacaggtcaaaaacataagacgagggcagtatatacactacggaggagacataataccagctaccacctctaactgtggctgccctgtttaagattcccaattcctcagtccctacattgcaagttttttatctttttctggggtcggaaaat

SEQ ID NO: 9551 - DNA, 379 bp, Zea mays
  unsure (1)..(379): unsure at all n locations; Clone ID: LIB3156-002-Q1-K2-B10
cgaggccgccaagaaggagatcaaggacatctttacccgctacgatcgcaccctcctcgtcgctgacccccggcgctgcgagccgaagaagttcggcggacgtggtgcccgcgccaggttccagaagtcgtaccgttgagcggctgcctgctccatctcgatttttcagatcgttgtgggtgttcttcgctttatttcctatcaatggatctgcttatctggttctatatctagctgctgctttaccataatgtttagactttaatgcctagcctgaaaccttgtttgcaatgtgaaattaatgtgagagattatgaagactttnctaaaanacagatggaacgactgctcttgggaccgactgttagaacttatgtgc

SEQ ID NO: 9552 - DNA, 333 bp, Zea mays
  unsure (1)..(333): unsure at all n locations; Clone ID: LIB3156-002-Q1-K2-B11
cgaggccgtcaagaaggagatcaaggacanttttacccgctacgatcgcaccctcctcgtggctgacccccggcgctgcgggccgaagaagttcggcggacgtggtgcccgcgccaggttccagaagtcgtaccgttgagcggatgcctgctccatctcgatttttcagatcgttgtggntggagggagaggattgtatttncttgtaantgggtgtggtnnttntgggtgtatatctagctggtgctttaccataatgtttagactttaatgcctagcctgaaaccttgtttgcaatgtgaaattaatgtgagagattatgaagactatatc

SEQ ID NO: 9553 - DNA, 346 bp, Zea mays
  Clone ID: LIB3156-002-Q1-K2-B12
gcactgtccgtccgcttctctctccctatctccatctgcaatcctcgcccgcccacgttcggcagccatggcgtcgtcgcgcaccggagccggagccggagccggcggccgtgtggtggtcttcccgttcccgttccagggccacttcaacccggtgatgcggctggcccgcgcgctgcacgcccgaggcctcgcgattaccgtcttccacagcggcgccctggacccggccgactaccccgccgactaccgcttcgtgcccgtgaccgtggaggcagacccgaagctgctggcgtccgaggacatcgccgccatcgtcaccacgctgaacgccagctgcgacgcc

SEQ ID NO: 9554 - DNA, 264 bp, Zea mays
  Clone ID: LIB3156-002-Q1-K2-B2
ctcgacgcgccgccgccgtctcgccgctgcccacccagattgacggctccaattggcgcccatggcggaagaaaccaacataaaaaaggaggaagaggagttcagcaccggtcctctctcggtgctcatgatgagcgtcaagaataatacccaggttcttatcaactgccggaacaacaagaagttgcttggtcgcgtgcgaccttcgatcggcactgcaacatggttcttgagaacgttagggagatgtggaccgaggtaccg

SEQ ID NO: 9555 - DNA, 356 bp, Zea mays
  Clone ID: LIB3156-002-Q1-K2-B4
aggggaagcgcgtcgccgtgaagtactacagcgatggctggcctactctctccgcgaagctggccttcgagaagtcggtcttcgccaaaacccagaaagcgaatgctggaacggatgcagagattgtaatgtttgatggtcaaattgtggtatacaagttcatccaagacctgcacttttttgttactggaggagaagaggaaatgagcttattttagcatcagttcttcagggattctctgatgctgtcgaacgacttctcaagaacatggttgacaaaaggacaacactcaaaaattggaacctgacctaatggggcttggataaaatggtggtggaaggaatggaccttgaac

SEQ ID NO: 9556 - DNA, 284 bp, Zea mays
  Clone ID: LIB3156-002-Q1-K2-B8
gcgaggggaaacgcgtctccgtgaaatactacatttatggttggcctactctcttctcgaagcgggccttggagaagtctgtcttcgccaaaacccataaagcgaatgctggaacggatgcagagattgtaatgtttgatggtcaaattgtggtatacaagttcatccaagacctgcacttttttgttactggaggagaagaggaaatgagcttattttagcatcagttcttcagggattctttgatgctgtcgacgactttttaagaacatgggtgacaaaag

SEQ ID NO: 9557 - DNA, 454 bp, Zea mays
  unsure (1)..(454): unsure at all n locations; Clone ID: LIB3156-002-Q1-K2-B9
aggggaagcgcgtcgccgtgaagtactacnttgatggctggcctactctctccgcgaagctggccttcgagaagtcggtcttcgccaaaacccagaaagcgaatgctggaacggatgcagagattgtaatgtttgatggtcaaattgtggtatacaagttcatccaagacctgcactttgttgtggtggaggagaagagtggaggagcgtagnnnagcatcagttcttcagggattctctgatgctgtcgaacgacttctcaagaacatggttgacaaaaggacagcactcgagaatttggacctgatcctattgtgtcttgatgaaattgttgatggagggattgtacttgaaacagaaggaagagagatagctgaaaaggtgtctggtcacggatcggagggtgcttcatcggctgagcagactttattgcatgccctaacgcaagcaagag

SEQ ID NO: 9558 - DNA, 390 bp, Zea mays
  Clone ID: LIB3156-002-Q1-K2-C1
cgccatcatatggtttcaccttcaagtgtgatgagagatctgaaaaaagacgagagttctattcgaagcttgaggagaagattcatgcaagatagttagaaataagcaatttgcaagccaagtcaaaggaaactgaagaagcagaactcaaaatgctgagaaagagtttgaatttcaaggcaacaccaatgccaagcttttaaaggaaccaacccctgccaaggttgaattgaaaaagatccccccaaccagagctaaatcaccaaagcttggtcggtctaaaaacaagtccatatcagagactgaagaaaatactactacggaccaaccttgccagctgagccttgaccaaaagggtttttaaaacggtgtgaaaaaaccaaccccggc

SEQ ID NO: 9559 - DNA, 436 bp, Zea mays
  Clone ID: LIB3156-002-Q1-K2-C10
ggcgcgggcggacaaggagcaggcggaggaggagctgtgccaagccacaatgggtatctcgcgtgactcgatgcacaagcgccgggccaccggtggaaagcagaaggcctggaggaagaagcgaaagtatgagcttggtcgccagccagccaacaccaagttgtcaagcaataagacagtgaggagggtccgtgttcgtggaggtaatgtgaaatggagggctcttcgccttgatactggtaactactcatggggaagtgaagctgttacccgcaagacccgtatcctcgacgtggtctacaatgcatcaaacaatgagcttgtgaggacacaaacccttgtgaagagtgccattgtgcaagttgatgcttgcccattcaagcagtggtacctcactcactatggagttgacattggtaggaagaagaaaacccct

SEQ ID NO: 9560 - DNA, 396 bp, Zea mays
  Clone ID: LIB3156-002-Q1-K2-C11
cttctctgtccccgcggggcagtacgcggtggagctggtggccgggcgggagagcgccatcgcgcaggtcatccgcaccgtgcccaaccgcgcctacaacctgtcgttcgccgtcggcgacgcccggaacggctgccacggctctatgcttgtggaggcgttcgcgggcaacgtcacgcagaaggtgccgttcgattccgccgggaaaggtgggttcaagacggcggcgttcaggttcgtggccggcggcgtccgcacccgcctcaccttctacagctcctactaccacaccaaggtcaccgacggcgtctcgctctgcggccccgtgctggaccaggtcaaggttgtgcctgtcaaggcgtagtgaaatgcatcgtgagagcgccgagtgacggt

SEQ ID NO: 9561 - DNA, 321 bp, Zea mays
  Clone ID: LIB3156-002-Q1-K2-C12
caccccccgagctgagcttaactccactccagctccaatcacagtcgtgaccagagcgcgagagctagctagagggccgtgaaaatgccgatcaataggatcgccctggggagccaccaagaggtgtaccacccgggcgccctcaaggcggcgttcgctgagttcatctacaccctcatcttcgtcttcgccggccagggctccggcatggcctttaacaagctgaccggcggcggtccgacgaccccggcgggcctgatcgcggaggcggtggcgcacgcgttcgcgctgttcgtggcggagtcggtgggcgctaacatc

SEQ ID NO: 9562 - DNA, 213 bp, Zea mays
  Clone ID: LIB3156-002-Q1-K2-C2
cgccaacatatggtttcacctttaagtgtgatgagagatctgaaaaacgactagagaactgggccaagcttaaagagaagatgcatcgcaacacagatagaaataagctatttgcaagccaagtcaaaggaaactgaagaagcaaaactcagaatgctagttaaagagattgacttccatggcaacatcaatgccgagcttatataagaacca

SEQ ID NO: 9563 - DNA, 308 bp, Zea mays
  Clone ID: LIB3156-002-Q1-K2-C4
ggtgtgcgcgacgggacggcccttgtgctgtgggagtggtgcgagggagacaaccagcgctggaagattgttccctggtgaacaaggaaatgtgtgaccgagcccgcaccaaggaggagctcctgccgtaataagtgaagtgattggtactgaagtttctggaaataagaggctcttctgagatgcctgtttgtgtgagtattgcgtttccattccgttttcatgataataaaacgcattgattattaatatatgtaatgtgatgctacactgagtggcagcggttgtatatatttgtaagaataaaa

SEQ ID NO: 9564 - DNA, 308 bp, Zea mays
  Clone ID: LIB3156-002-Q1-K2-C7
gaagcgcagcgcccatggccatggccacgcaagcctccgccgccacgcgccacctgctggccgccgcctgggcgccggcggcgaaaccgcggcagctgagctcgcagctcgcgctgccgtcgtcgtcctcccgcgggccggccccgctccgcgcgtccaccgaggaggcggtggaggcgcctaaggggttcgtggcccgcagctggaccccagcacgccgtccccgatctttggcggcagcacgggcgggctgctccgcaaggggcaagttgaggaagtctacgtcatcacctgggcgttccccaaag

SEQ ID NO: 9565 - DNA, 261 bp, Zea mays
  Clone ID: LIB3156-002-Q1-K2-C8
cgcgtgcgcaacggtactggcctcgttctggttgaattttgccaggggcacaacccacactggaagggtgtgccatggggaacagggagccgtgtgaccagtgccccaccaaagacgagctcctgccgtaataggggggtgagtggtactgaagcttctggaaataacaaggtctgatgagaggcctgcctgcgtgagtattgctgcttgcattcctgattacatgataataaaacgcatcgattagtaatatatgtcatg

SEQ ID NO: 9566 - DNA, 445 bp, Zea mays
  unsure (1)..(445): unsure at all n locations; Clone ID: LIB3156-002-Q1-K2-C9
ggtgtgcgcgacgggacggcccttgtgcnttgggagtggtgcgagggagacaaccagcgctggaagattgttccctggtgaacaaggaaatgtgtgaccgatcccgcaccaaggaggagctcctgccgtaataagtgaagtgattggtactgaagtttctggaaataagaggctcttcgagagaaggggtgtttgtgtgagtgtttgggttgtggagnnatggtttcatgataataaaacgcattgattattaatatatgtaatgtgatgctacactgagtggcagcgttggtatatatttgtaagaattaagaacccattgttggtggactaagcgtgacgagtgattgactgatgtatgaacctttgcttgatgcatatgctcttctgctcctaccgtgggcgttgatgaagggattatttatatgatgctctggtttataat

SEQ ID NO: 9567 - DNA, 222 bp, Zea mays
  Clone ID: LIB3156-002-Q1-K2-D1
aatgctcttgggttacgaccgcttcaaactgtattctaaattattacctctgtttacgaatgtttggcgccggcttgttctctgagaacgaaaaatacaccgcgagcaggaacaatgccggggacaacgactaccaaggcggccgagacgaccgagaagactccctcagtatctacacaggggggggcggactcgaggacccaacttgcttaccggatcatg

SEQ ID NO: 9568 - DNA, 175 bp, Zea mays
  Clone ID: LIB3156-002-Q1-K2-D10
ctcggcttagaagttagaagaacccatgctggtggtctctcgttcagtggcgtatctgttggtgtgatggttggcgttgttgtttttttttttctcttcttccagtccaaaagtttgttgattcgttttggatagtacctttgttggagggataatcatgctcacatatatattc

SEQ ID NO: 9569 - DNA, 463 bp, Zea mays
  Clone ID: LIB3156-002-Q1-K2-D11
ctaaggttgagagcatcaagagagacaaagcagcaactgagaagttgcttcaagaaacaatagaaagaaatcagactgaacttgcagctcaaaaggagttctacaccaatgctcttaatgcggctaaagaggctgaggcattggctgaagcaagagtcaacagcgaaaccaaaattgaactggagaatcttttaggagaagctggtgaagaagaaaatatgctgattaagacaatcgaggagttgaggcattttctcacccggcaagaacaggaggctgctttcagggaagaaagactaaaaggggactatgatgatcttcaaaagcggcatcaagccagtgaacttcgttataatgaactggtaacgcaagttcctgagtctaccagaccgcttctaagacaaattgaagccatgcaagagacaactgctcgaagggaagatgcttgggctggtgtggagag

SEQ ID NO: 9570 - DNA, 460 bp, Zea mays
  Clone ID: LIB3156-002-Q1-K2-D12
cgcagatctttgctagccccatgtatgaattcctggacacaaaatatggaagtgggcgtggtggcccttttgagatccacaacgtggcgttcagagtagcagtcagaggaggctacctgacggtgaacacgctggtggccggggtgctcccattcctcggcgacttcatgagcctgacgggcgccctcagcaccttcccgctgacgtttgtgctcgcaaatcacatgtacctgatggtgaaggggcctaagctgggtgccatccagaaatcatggcactggctcaatgttcttgggttcactgcgctggctgttgcagcggcagtctccgcaataaggctcatcatgcgtgatttcagcacctaccacttcttcgctgatctttgagatcgatcgatttcttttctttttgttggaatgctgagccagagctagtattttttcattttcagagaattatt

SEQ ID NO: 9571 - DNA, 242 bp, Zea mays
  Clone ID: LIB3156-002-Q1-K2-D2
cagtcatgcacactaacgaacgaactcttgctccgatcacgagctagctgaggtcgacgatggcgggtgtgctgaacagcacgaagacgccgcatgtggtggccgtgctggtggtggtggcgctgctggcttcattcgcgtcggcggcgatcacctgcgggcaggtggggtcgtcgctggcgccgtgcatcccgtactcgacgggagggccagtgcgctccccgcgtcgtgctgcatcggcg

SEQ ID NO: 9572 - DNA, 58 bp, Zea mays
  Clone ID: LIB3156-002-Q1-K2-D3
cattcacttacactaacaacctaacacattttttctattttaatcacctcatatcaac

SEQ ID NO: 9573 - DNA, 177 bp, Zea mays
  unsure (1)..(177): unsure at all n locations; Clone ID: LIB3156-002-Q1-K2-D9
gcgcttttctgttcccgctgggcagtacgcgntttatctggtggcccggcgggagagcgccagggcgcatgtcattcgcaccagggcccaacctcgcctacaacctgtcgttcggcgtcggcgacgcccggaacggctgccacggctctatgcttgtggaggcgttcgctggcaacg

SEQ ID NO: 9574 - DNA, 310 bp, Zea mays
  Clone ID: LIB3156-002-Q1-K2-E1
gcttggcaccggaggcctctgtagcgcagtgagacgtgctcctggagggagccacggcttgcggcacgacaatgcggactgggcttgcagttgctccgcttgatagatgcggcacgcagggctccggtttctgaactgcgatctgtctagcaccagggaagacctcggccacgttgaccttggcaggggcaggggcaggaaaggcggcgagtccggctcacttgacggggtagcaccaggaacagacgccctgctggccagcatcatgagctctttagccttgtcgaccgagacgttgtcaaaacattca

SEQ ID NO: 9575 - DNA, 350 bp, Zea mays
  Clone ID: LIB3156-002-Q1-K2-E11
cacagtcatccacactaacgaacgaactcttgctccgatcacgagctagctgaggtcgacgatggcggctgtgctgaacagcaggaagacgccgcaggcggtggtggccgtgctggtggcggcggcgctgctggcttcgtccgcttcggcggcgatcacctgcgggcaggtggggtcgtctctggcgccgtgcataccggacgcgacggtgagggccagcgcgctccccgcgtcgtgctgcagcggcgtcaagagcctcaacagcgcggcgcggaccagcgcggaccgccaggcggcgtgccgctgccttaagagcctcgccaacagcgtcaagagcgtcaacatgggca

SEQ ID NO: 9576 - DNA, 189 bp, Zea mays
  Clone ID: LIB3156-002-Q1-K2-E12
gacaaggttgcgtatgccctgtctaacggactaaaggtcattgcatgtgttggtgagacccttgagcacagggaggctgggtctaccatggatgttgttgctggacaaacaaaagcaattgctgagaagatcaaggactggagcaacgtagttgttgcctatgaaccactttgggcttttggaactggg

SEQ ID NO: 9577 - DNA, 65 bp, Zea mays
  Clone ID: LIB3156-002-Q1-K2-E4
tgcaggtaccgtccgaatcccggtcgccacgcgtccgctaaacgtgagcgactgattgccatgcc

SEQ ID NO: 9578 - DNA, 97 bp, Zea mays
  Clone ID: LIB3156-002-Q1-K2-E5
gttaaacgtgagtaaaaagtattttgatggtaatgtatagtaagatgatgttgaggatagtttcgaagttaaaaatggcgttgattactttatatat

SEQ ID NO: 9579 - DNA, 207 bp, Zea mays
  Clone ID: LIB3156-002-Q1-K2-E6
gcgtacggttacgggttcagatcggcgtttttttcgtgctgcggctcggggggcggcaagtgggactaccagaacagcgcgcggggcggcatgtatgtcgcgtccgcgtgctccatcccggcgtcgcacctcagctgggacggcattcacctcaccgaggccgcctacaagcagatcaccgacggctggctcaacgggccctactgc

SEQ ID NO: 9580 - DNA, 236 bp, Zea mays
  Clone ID: LIB3156-002-Q1-K2-E8
gcgccgcgctcaccgacgaggacacctgccttgacggcctctcgtcccgcgccgtcgacgccgggacgcgcgccggcattcggggcaaggtcgtcgaggtcgcgcaagtcaccaagaacgcgcttgcgcttgtaataagtcggcctggtactaacacggagggaccaagatcagccagccagcagcaaaccaccgtttaagctaggctactagggggttgcgaagtgtgtgtgggg

SEQ ID NO: 9581 - DNA, 133 bp, Zea mays
  Clone ID: LIB3156-002-Q1-K2-F1
ctcgaccgtgagcaaccactacatcgccgcctatgtctagtatgccgcgtttaataacgatgtccaggtgaatagacggaacgagcacgggatatacactccgggcaggtataatgcctggtacaacgtctga

SEQ ID NO: 9582 - DNA, 330 bp, Zea mays
  Clone ID: LIB3156-002-Q1-K2-F10
atgacagggcagctgacagtgaagtccgatgtgtatagctttggggtcgtcttgctagagttgataactggtcgtagggctatcgacagcaccagaccacatggagaacaaaatcttgtctcatgggcacgtcctcttttcaacgacagaaggaagctccccaagatggccgacccaaggctggaagggcggtgccccatgcgcgggctgtaccaagccctggcggtggcttccatgtgcactcaagtcgaggccgcttcgcggccactgatcgcggacgtcgtgaccgctctgtcctacctggcgtgccagccgtatgaccccagcaca

SEQ ID NO: 9583 - DNA, 176 bp, Zea mays
  Clone ID: LIB3156-002-Q1-K2-F11
gtcattgcattcagctgtccggaacgaaccctttttatggaagtgcatccatattgactcgcgcttggggaagaagatgtctgatgctgatcttctgtgcctgacacaaaagtccccaggttctatgcagggcctgagtctaatgcactgtaacaacatcccagatcagggattga

SEQ ID NO: 9584 - DNA, 456 bp, Zea mays
  Clone ID: LIB3156-002-Q1-K2-F12
gatctgcgacgtcacggctgtcgccagtgatcgccatttgccaccctctccgttccattccaatccgttcagcggtcagcggaacatgatacggtctacgcccttccaagcaatcacatcttcttccccattataaatcgctcactcgctgtcgtcggctacctgtatcccggcgacacccaacactaccctgcttgccacgcttgcattgaggggagttcggggagcggccggtgcggaaggaatcgacacagagttcagttcacatggctgctgaatcagagaacggcaactgcaaagcctgggcagcgagagatccttctggagttctctcaccacacagttttaaccgcagagcagtgcaaagcggcgatgtttcgctgaagatcatatacttgggagtctgttatgcagacgttgcttggacacggaataagctcaatgattcaaaatatc

SEQ ID NO: 9585 - DNA, 278 bp, Zea mays
  Clone ID: LIB3156-002-Q1-K2-F2
cttgggagtgtgtactggggacaagtctgggatggttctcagattgctgtcaagaggttaaataacgcaaagaacggcacagaagcggaatttgcttcagaagtcgagatgctgggaaggataagacacaaaaacctcctgagcttccgtggatactgtgcggacggacccgagcgcgttctggtgtatgacttcatggcaactcaagcctgtatgcacatctccatggaccgcattccgcggagtgtctcctcgactggcggaggcgagcatctatc

SEQ ID NO: 9586 - DNA, 244 bp, Zea mays
  Clone ID: LIB3156-002-Q1-K2-F4
atacgcagccgcgtaccaggtttttatatggttatcgattgatctgaggaggatggaaggagctgattgcttttgcggaacaataatggcgtaatcagctggggtgaggcgatgtgcgttaccagatacagttttgtcttgttgactctacttatctgattatcatttgtaagcgatttgctcaagatatttgtcgatatgaataacttgctttcctcacaaaaaaaataattaaatataaagt

SEQ ID NO: 9587 - DNA, 222 bp, Zea mays
  Clone ID: LIB3156-002-Q1-K2-F5
agaagacgcgccagaaccgcactatcccgtattggatccgcatgcgcactgacagtaccatgaggtacaacgccaagcgcaggcactggcgccgcaccaagctcggcttatgagcgtcgggattggccgggtgctgcgtgggaaggctagggtctaagagctatcttgcttctgttttatcaatgtgtcagctcttcgtaagctagcaagcgttgctatgac

SEQ ID NO: 9588 - DNA, 286 bp, Zea mays
  unsure (1)..(286): unsure at all n locations; Clone ID: LIB3156-002-Q1-K2-F8
cgaccgacgcacccacgcgtccgaacacagtcacgtaaaaggatgttttatgcttatctcatagcgctaanggggagggatggacgcttttgctggtggggcgcatcaatatcctcgtctgcaggggttgacggaggcgtttcctcagatccctctgccttgcttggcttgatcttaagagatatcaaattaaaatatatgtgatgtgcttcggtgttgggggaaacatgttgcccaaccgtgcctgggaataggcaaacaggatggatccttctttgnncnnatg

SEQ ID NO: 9589 - DNA, 455 bp, Zea mays
  unsure (1)..(455): unsure at all n locations; Clone ID: LIB3156-002-Q1-K2-F9
gtcattgcattcagctgtccggaacgatccctttttatggaagtgcatccatattgactcgggcttggggaagaagatagtctgatgctgatcttctgtgcctgacacaaaagttcccaggttctatgcagtgcctgagtcttatgcactgtgacaacatcacagatcagggattgaantgtgttgtttatagtgttaacttggagaagagcagatnnatgagttttggggctttccggattacttatgaagggcttattgacagtctgaggtcatttaatatggaaacagatattggtataaagaaactcaaaggtacaaatcacgtcactgcatcagaagcgcaatatgaagagttgttgtccttgatgaaaataaacaaaaagatggcatttcacaaacaggagccttggatctttcattctggtccgcttttactagatctttatggtgga

SEQ ID NO: 9590 - DNA, 254 bp, Zea mays
  unsure (1)..(254): unsure at all n locations; Clone ID: LIB3156-002-Q1-K2-G10
gctcgatgtaccgtacagacgatggtcgggaattaatagaatatttcgtttattgtgtaaagtgcactagctggccatttatttacagtagtaacgcatgaacagcgtgtatatatagccgtatactgatggactgcaggatggaagtgtcatcgtcatcggtatatatgctcatgtatacgacgtggccacgtgtcgcancgtgtgtgtgtgtgtggtactatatatacaattgtcagctaactgacgccatc

SEQ ID NO: 9591 - DNA, 250 bp, Zea mays
  unsure (1)..(250): unsure at all n locations; Clone ID: LIB3156-002-Q1-K2-G11
gctcgatgtaccgtacagacgatggtcgtgaattaatagaatatttcgtttattgtgtaaagtgcactagctggccatttatttacagtagtaacgcatgaacagcgtgtatatatagccgtatactgatggactgcaggatggaagtgtcatcgtcatcggtatatatgctcatgtataggaggtggggatgtgtntgagtgtgtgggttnnnatattactatatatacaattgtcagctaactgacgc

SEQ ID NO: 9592 - DNA, 307 bp, Zea mays
  Clone ID: LIB3156-002-Q1-K2-G12
gcccaacatgagcatcgttgttaaggcgctttcgcctctccttcaacaaagacctgcaccaaccaccgaagagccagctccacaacctgggagctgaaaccagtcacatgtgatgggacccctaggcataagccatctccgcaaccattcaatcagcacattctataaatcattgagagtattttgggtatttgttctgtagcgttctcagttgggtatagcatacatgaacttgcccctgctgtttgtggccacctagttcgtggcttgatgttggcgccgcacaatggtatatgcagttggttcg

SEQ ID NO: 9593 - DNA, 281 bp, Zea mays
  Clone ID: LIB3156-002-Q1-K2-G2
ctcgccggaagaccgtcaccgccatggatgttgtgtacgccctcaagcgccagggccgaactctgtacgggttcggaggatgagcgcatctttttcctcgtctgcagcggttgtcgggggcgtttcctcagttccctctgccttgcttggcttgatgtacagagttatcaaattaaaatatatgtgatgtgcttcgctattggtggaatcatgtgtcccatcagtgctgggaaatcgagatcaagatgtatctttctttggactaatgaaatgataaaatc

SEQ ID NO: 9594 - DNA, 58 bp, Zea mays
  Clone ID: LIB3156-002-Q1-K2-G3
cggacacgtgggtcactagtacttcaccgccactgtacagtacgcttcgctttataac

SEQ ID NO: 9595 - DNA, 372 bp, Zea mays
  Clone ID: LIB3156-002-Q1-K2-G4
gctgaacgtcgtcgggctcgccggcgtctttggggtgtacgccgtcgtgtgcgtcctagccctcgcgttcgtgttcgtcaaggtgcccgagacgaagggcatgcctctcgaggtcatcaccgagttcttctccgttggggcaaagcaagccaaggaagaggaggaggaggaggccagggaaggttgatcacccggacggccggcccagttaccggcaccgcctgtggggatttttgtggtctgcacacttcactgtggttggtcctgtgatgatgtatttgtgaaaaaaaaaactttgggtagggggcagagatgatttggctgtacaatgtgaggcttgattctgccaaaggctggccttcagaactagga

SEQ ID NO: 9596 - DNA, 209 bp, Zea mays
  Clone ID: LIB3156-002-Q1-K2-G8
acggctgaacgacattgggctcaccggcctctttggggtgtacgccaacatgtgcctcctaggggtcgcggtcctgttcgtcacggtgcccgaaaccaaaggcatgcctcttgaggtcatcaccgagttcttctccgttggggcaaaacatgccaaggaagaggaggatgaggatgccaaagaaagttgatcacccgtacggtcggccc

SEQ ID NO: 9597 - DNA, 155 bp, Zea mays
  Clone ID: LIB3156-002-Q1-K2-G9
gctgaacgttgtcgggctcgccaacgacttttgtgtgtacgccgtcgtgtgcgtcctagcgctcgcgttcaagaacgacaaggtgcccgatactaatggcatgcctctagaggtcatcaccgatttcttcttcgttggggcaaagcaagccaacg

SEQ ID NO: 9598 - DNA, 105 bp, Zea mays
  Clone ID: LIB3156-002-Q1-K2-H1
gaagccgtcatgggactactttcccgacgatgtataccaagggatgattgaccacagcgtcgctggagacagcagacgtcatgaaggcgctatacaatgaggaca

SEQ ID NO: 9599 - DNA, 416 bp, Zea mays
  unsure (1)..(416): unsure at all n locations; Clone ID: LIB3156-002-Q1-K2-H10
cctcaaccaaattcaaagtcacagcggcnaaactcttggcgatgtctggccgcggcaagggcgggaagggtctgggcaagggcggcgccaagcgccaccgcaaggtgctgcgtgacaacatccagggcatcaccaagccggcgatccgcaggttggcgaggaggggcggcgtcaagcgcatctccgggctcatctaccaggagactcgctgcntgctcaagatcttccttgagaacgtcatacgcgacgccgtcacctacaccgagcacgcccgccgtaagactgtgaccgccatggacgttgtctacgctcttaagcgccagggccgcaccctctacggtttcggcggataggtcgcccctctcccggtggcgaattacgtggtggcggaggcggtcgcgttgcgttcttggtct

SEQ ID NO: 9600 - DNA, 338 bp, Zea mays
  unsure (1)..(338): unsure at all n locations; Clone ID: LIB3156-002-Q1-K2-H11
ctgtcctttgctcattggtgaggttgaatggtggcgattgtttatgttttttattggtgtggctggagtgtacattgaactgggtggctcagatgacggatcgagggcggcgcacaccgagagctcgtgggcggaacagactgctgagattgaggatggatcaggagcttgatctccacaaagctttgcgggggcattgagtagtagagttgtgnagaaagggtggaggcatctggaaccatatagtctctatcggaaagtcgtgacctatgagttggtgaacaagactgacctgaatatgctcgcgaatatatggcggcatgaacggagaaagatca

SEQ ID NO: 9601 - DNA, 367 bp, Zea mays
  Clone ID: LIB3156-002-Q1-K2-H12
cgccgggccacccagcgcgccggagcgccggaaccgctcgccgccgttctggacctggacgccgtacttctggcacttcgggtcgtagcgccgcacggtcacgcccgtcgtgcggagaggcgtgtgtgcgcgcgcgcgcgcttgccggccggctaccgtacgcgccagcgtacgcgggagatgatgatgactaggccgcgtgtgtgtgggcctctggggcttatatactgtcactgtcagattaatttggctaggaaatggcgctggcgtgacattgtgtgctatgcatgtgtgtgactgtgcttgctgtgcacggcgcacctttactgcgcgttgtacatagagagagagagaagacaacgcacat

SEQ ID NO: 9602 - DNA, 355 bp, Zea mays
  Clone ID: LIB3156-002-Q1-K2-H2
ctggtgcccagtctgccctcagggcgcttgctcgttccgggatgaaaatcggacgcattgaggacgttaccccggtccccacggacaggactcgcagaaagggcggtaggaggggaaggaggctgtaggcgtctcttctgcgtgccatttgctggctcttgtcgggtggccatcatgaaactagtcctctctgggtggcgttgcgctttctgtgtttgtcaagacgagctttaattttgctctatgtggatgactgtttaccgttagtcgaacctgtatgatgttgcatggataatgtcttttggctgaggaattggctcgtcatatttctatatgcatttttactctttttttt

SEQ ID NO: 9603 - DNA, 125 bp, Zea mays
  Clone ID: LIB3156-002-Q1-K2-H3
taacacgtgagctacaagtacttccccgtctatgtctaggactctcatgtttatcacagtgttgaagataacagcgacgtcgaggacgcgctatatcatgcgggtattgatatgatgtggatgct

SEQ ID NO: 9604 - DNA, 184 bp, Zea mays
  Clone ID: LIB3156-002-Q1-K2-H4
cgcacacgtgacctccaccttatgactgtctcttccttgtacattgtctacgcgctcaagcgggagaggagcacaatgtacgggtgcaggggctacaccacactctcttctgatgatgaattacatgctgacgatggcggtcgtgtcgtgttcttggactattgtggtctgtgatgcctttatc

SEQ ID NO: 9605 - DNA, 305 bp, Zea mays
  unsure (1)..(305): unsure at all n locations; Clone ID: LIB3156-002-Q1-K2-H5
ggaggagggtgacttcgtttctatttggggaacactgctcgcgtcctgcaaagcacaggacaagcaggaattggtgaatttggtgacagagagattgatctgcattgagaagaagtatggccatgctggttacagcgttttgttgtcacatatttttgctgctgagggcaactggagtagtgctgatagcctgaggaggagatgaggttgagaggattgagcaagatggcaggttctagttggattaaagtccagcatgcagcattgcanagctaccctaaaaatggccatgaaacactcatact

SEQ ID NO: 9606 - DNA, 250 bp, Zea mays
  Clone ID: LIB3156-002-Q1-K2-H6
gcacgcccgccgcaagactgtcaccgccatggacgttgtctacgcgctcaagcgtcagggccgcaccctctacggtttcggcggctaggtcgccctctctcccggtggcgaattacgtggtggcgatggcggtcgtgttgtgttcttggtctagtgttgtctgcgttggctttatcggagctgctttctgcgggggctggctgcatcgttctagattctagctcatgtgctcgaatatctggctgctgga

SEQ ID NO: 9607 - DNA, 230 bp, Zea mays
  Clone ID: LIB3156-002-Q1-K2-H7
gcacgcccgccgcaagactgtcacctacatggacgttgtctacgcgctcaagcgggagggccggaccctctacgggggcggcggctaggtcaccctctctcccggtggcgaattacatggtggtgatggcggccgtgttgtgttcttggactagctgcgtctgcgttgcctatatcggtgctgttttctgtggtggcgggctgcatcgttctagtgtctagctcatgtgc

SEQ ID NO: 9608 - DNA, 165 bp, Zea mays
  Clone ID: LIB3156-002-Q1-K2-H8
gtacgcccgccgcaagactgtcatcgccatggacgttgtctacgcgctcaagcggcaggggcgcaccctctacgggtgcggcggctaggtcgccctctctcccggtggcgaattacgtggtggcgatggcggacgcgtcgtgttcttggactattgtcgtctgtc

SEQ ID NO: 9609 - DNA, 236 bp, Zea mays
  Clone ID: LIB3156-002-Q1-K2-H9
cggaaagctcttcagcaccatcgacgatcttgaccatgccgcgaagatcaagagcacccctgaggccgagaaatacttcggagcaaccaaagatgctctcggcgatgttctcgccaagctaggctagacgcaagggctaataatgccatgtaatttcggactagtgtttgttcatatgcacccggcgaggcaatgtaccaggttatgtgcgtcttggctcagcgaagcacttaact

SEQ ID NO: 9610 - DNA, 186 bp, Zea mays
  Clone ID: LIB3156-001-Q1-K1-H8
ctcgcggccaaatatgatgacgggacttaagagtcgcacacactgttagtagactggtctagggaagtgtaccattctgttcattgattggagcttgctcaccaggcgggtagatagcgcatcgctgttgttcttctttaaaaaaaaggaaagaaagaaggtggtaggtagtagtatattcttttg

SEQ ID NO: 9611 - DNA, 322 bp, Zea mays
  Clone ID: LIB3156-001-Q1-K1-A1
accacgcgcgcgcgcatgactacaaagcgtgtgacttgagagagggtgtgtgaggtgcaaccaagcgtgtgcttatgaagggagacgacctccaactgtttcggggtaagaccatgacgcatgatgcgtgtgacgtacttgcctatgacaatgatggtgccactaatcatgacactactctattgctctcatgggctataagagagacaatgcttggcgtgcggcgaaattagttacccatgttgggtactatctatgtactattattatatccaaaactatagttgtcctggctgaattgaacttaaaaggggtttgtttg

SEQ ID NO: 9612 - DNA, 427 bp, Zea mays
  Clone ID: LIB3156-001-Q1-K1-A10
ctcacaaaatactctacatgttaagaggctgtgccagagtccaagtggtgaaccacggcggcgacgcagtgttcgacgataacgtggagcaaggtcagctcctgacggtgccacagaactttgcgttcatgaaacaagcaggaaacgaaggagccgaatggatttccttcttcaccaatagcgaagccaccaacaccccaatggctggaagtgtctccttcatgcgagcactgccggaggaagtggtggcagcgtcgtatcaggtgtcaagagaagatgcaaggcggattaagttcaacaacaaaaacacctttttcttcactccttcacagtccgagaggagggccgatgcttaaactccagccgatgccaatgcaatcaaaatcagggggatctttgtagggtaacgtaagtaggaagtaataaa

SEQ ID NO: 9613 - DNA, 219 bp, Zea mays
  Clone ID: LIB3156-001-Q1-K1-A11
cggacgcttccttctacacttccgattctaaatgctcgaagatattcgattccctgaggtagggtttataacgaacatggacccttcaatattccatttgtattaaaatcatatgactagcttcacttcattatctaaacttatcttttaatgcattaaataatgtacatttcccttgtaattgtacttgtggactctgatgctttaataaaatacaaa

SEQ ID NO: 9614 - DNA, 310 bp, Zea mays
  Clone ID: LIB3156-001-Q1-K1-A12
gttctttcagtcgctcaacatctccaccaagaataacgaggggactatggcaattatcactctcgacaccgcttatcaagaaggggacgtcgatgctttcctggccgactacttttacgagccagcacagcctgcggccacactcaaggtgctgcatgatgtgaagtccgaagacaagctgaacaccggcagcggcgggagcgcggttgtggacgcagactcgcttctttaccgcaagttcgccgaggtagttgaatacaacgttgaatcgtactttcccggcggggaagaccactaccacgactgctgg

SEQ ID NO: 9615 - DNA, 390 bp, Zea mays
  Clone ID: LIB3156-001-Q1-K1-A2
gggttttgctgctctccgaccccgagctccgaaggccgcagcatcaggcgcggcccgcctcgcgtgtgaccgagatggcgctgccgaatcaggggaccgttgattaccccagcttcaagctcgtcatcgtcggcgatggtggaactggtaaaactacatttgtgaagaggcatctcactggagagtttgagaagaaatatgaaccaaccattggtgtggaagttcatccgttggatttcaccactaactgtggtaagatcaggttctactgctgggataccgcatggcaagagaagtttggtggcctcagggatggatactatatccatggccagtgtgcgatcatcatgtttgatgtaacctcaaagcttacttacaagaatgttccta

SEQ ID NO: 9616 - DNA, 230 bp, Zea mays
  Clone ID: LIB3156-001-Q1-K1-A3
acgcgcgcgttggctcagccttcaggcattcactgctacaacatttaatgaatgcaaccttagggaggatcaagatgcgcatctccaagatctcaacatgcgaactccaacatccagcttgtctgtctattttctaagcatatctgggcagtccatctagcaacattgttgagacaacctgacacctggtcatgaaagcatactacttcctatgcgaacgtgctctctaa

SEQ ID NO: 9617 - DNA, 390 bp, Zea mays
  Clone ID: LIB3156-001-Q1-K1-A4
cggacgcgtgggccgcatcaagggcgccgtcgaacggatggatgacgagctggtgcggtccgcgattgactactacgagatggccgagacgaacaagagacggactgggacaggcatcttaccacggacggacctgaatattaccagctggttgggtaggccacagcacgacgcagattttggctggggaaagccgcaatccatgtcgcgggcggagtctgtccgcggcggctctatgcacttgatgaacgactacggtggtaccggcaacgtccgcgtgctcgtgtgcttggaggctgaaaatataaaggagctaggacggctgctttatgcaaagctctagcaagctgctagtgctatgctttaaaataataatattaataataaggt

SEQ ID NO: 9618 - DNA, 380 bp, Zea mays
  Clone ID: LIB3156-001-Q1-K1-A5
gcgcggagccagacaaagcggatgacttcaaaaagggtgtctagggtgcaaccaagcgtgtgcttatcaagctgaaggacctccaattttttgttggtgagtccatgaagcatgatgcgtctgtcgtcttcgcctattacaaggatggtgccactaatccgacattcctctatttctctcatggtcttaaggagaacaagtgctatgcgtgcggcgaaattagttacccatgttgggtactatctatgtactattattatatccaaaactatagttgtcctggctgaaatgaactcaaaaaggtttgtttgagaaaaaattgtgccaagattggattgcttgttaaaagctcaatattgttattgaaagtgttattgctt

SEQ ID NO: 9619 - DNA, 405 bp, Zea mays
  Clone ID: LIB3156-001-Q1-K1-A6
gcgtcgggcatggcggcgtccccgtccaaggaggcgtaccggaggctgctcgcggagagagctgctcaacaaccggacacggatcctcgctttcaggagcaagccgccggagcccgagaacgtttctttcgccgacacgacttcctccaacctgcaggccaagccggccaaacagcggcgccacattccccagtctgccgagaggaccctagacgcaccagagctagttgacgactactacctcaacttgcttgactggggaagcaacaacgtgttatccattgctttgggagacacggcgtacctgtgggatgcatcgagcggatccacgtccgagcttgtgaccgttggcgaggacagtggtcctgttacaagcgttagctgggctcctgatggtcggcacat

SEQ ID NO: 9620 - DNA, 261 bp, Zea mays
  unsure (1)..(261): unsure at all n locations; Clone ID: LIB3156-001-Q1-K1-A8
cagctgggccgcgcgccgccgcgccgccgccgctcctcctcgccctactcctgctgggggccttcctctgcgccgtgctcgtgctgctcgcgccagcggctcggcagcacggggacgacagcgacgagacggaggagctccccgccgcgtcttcgccgtggggccancgcgacctcccacgcccgccaaccaagtacgccgcggaggcgtggcggccccagcccccccggaaggggaactccccggggcaagggcttccgg

SEQ ID NO: 9621 - DNA, 368 bp, Zea mays
  Clone ID: LIB3156-001-Q1-K1-A9
atttcaaaaagccctgggctcacgatcatgaaccaatcaagaaacttgtcgatgctcgtaatggaatcaaaccaacagtgctgattggaacatcaggagtaggaaggacatttactaaagaagtggttgaggcaatggctgcgttgaatgaaaaacctattatattctccctttctaatccaacttcacaatctgaatgtactgctgaagacgcatatacatggagtcagggccgagccatttttgccagtggaagcccatttgatcctgtagaatacaagggaagggttttcgttcctgggcaggcaaataatgcatacatcattccctggcctttgtgttggggttaatttatgtttggttgcatt

SEQ ID NO: 9622 - DNA, 196 bp, Zea mays
  Clone ID: LIB3156-001-Q1-K1-B1
acgcgtgcggacgcaacaacctgcaagccaacagtcctgctgctgctattgcgtccaacctgtcgggggagcaagacgcgcctctctggctgctcaacagccgtgctccgagctccggagtgtatgtaacttgcgagcatacaggatgtcaacacaaatgtctagtccgaatgctgacacaccgctactacttcta

SEQ ID NO: 9623 - DNA, 360 bp, Zea mays
  Clone ID: LIB3156-001-Q1-K1-B10
cccacgcgtccgaaaactctatcattatagtgaactaaaatggtaacttgcttcgagtgtgggcacatgattcagtttaaataatcttcatatcgcgatcgacttataagctggtgatacaagtcaacgttacttggcagttggcatcgagtcatgcaaagcttaggtatgaactttttgtttaatgctagtgaacgtttttcatgagctttacatctgagattgaacggatgatcgcatttatttcttactctttaacttagaagtacttgagaaatcccgtgtacttagaaataaggataaaaaccgcgtctgaacggctttgtgctgattgtcctctcttttaagtgttgaaaaaca

SEQ ID NO: 9624 - DNA, 260 bp, Zea mays
  Clone ID: LIB3156-001-Q1-K1-B11
agctaattttttctatttcacccactttatagatcacgagcttcttacactccttgaggtggttcttgtaaagatcatggaagctaccccttgctgccacgcgactcatttcaatcagatgaccattagaccgcctgagctcacattttaggtagatagagcctttggactccaccgaggataagcatgctcgactgatgtttactgaggaacgacacacgtattacttggtctttgaaccaattgcaattataaagcct

SEQ ID NO: 9625 - DNA, 204 bp, Zea mays
  Clone ID: LIB3156-001-Q1-K1-B12
accaaaaaactaaaaaaacaatacatcaataatgctatccaaatcgtatgtaccggtagctggattgctgttgtcatccacgtcccataccacctgctcaaggtctttatgaagatccatgtcacactcgtcagggagcttgagaaaaaattcagcggcaaggatgtgagccattgctgctacaaggaggattgtgaggccacc

SEQ ID NO: 9626 - DNA, 346 bp, Zea mays
  Clone ID: LIB3156-001-Q1-K1-B2
aaaattctgaacatcaaggagtttctgtttgcaagtttcactatttaaaagcagttgtgttgcttgtgcggaggtaagtactggaccgaggcagtattatcagtttcatggatatggactgttgtgatagtttcgatagaggtgtcaaacatcaattagggtgaagtggtgagcaacatttcaaggaggtgctgatgcttgctgacaacctatgaaaaggcgtttctgtagctgactacttggtttgtccgtcagacaattctagacgtgaattttgatctgttggctagattagctgccaagtacgtatttcgtatctctagatttatgggattcacattcactc

SEQ ID NO: 9627 - DNA, 272 bp, Zea mays
  Clone ID: LIB3156-001-Q1-K1-B3
acacgcgtgcggtatctttttttttaaaacgcaatcacctgtaacataaaaacgcttaactccatgggacaaagagacggaaaatacaattcctatataagcacgcttaggattgggcttaagccgctatgagctgcgaagtcacgaaaacttcggcaagcgcaaacgaagctccagcgagagataattggatacacaggtgccctgaagaacaacactgatgatacagtgaccacaacacgtttaacacagctgcccacacaatgagtgac

SEQ ID NO: 9628 - DNA, 427 bp, Zea mays
  Clone ID: LIB3156-001-Q1-K1-B5
cggacgcgtgggccccgatccagatcaggagctgagggatggacgcgaacaggcgcgagagtgggatccagcagttgctggctgctgagcaggaggctcagcacattgtgaatgcggctagagctgccaagtcagcgaggcttatgcaagcaaaagatgaggctgagcgggaaatacctgaataccgtgcccagatggagtctgagtttcagaggaaggttgcagagagcagcggcgactccggtgcaaacgtcaagcgtctcgaggaagaaacggcggcgaagattgagcaactcacccagcaggccgcaagcatctccccggatgtcattcacatgcttctgcggcatgtcaccaccgtcaagaactgaggagtgctgttcccgaactatgctcgcagacttgtaccgtcgatctatttattttt

SEQ ID NO: 9629 - DNA, 413 bp, Zea mays
  Clone ID: LIB3156-001-Q1-K1-B6
cttcaatgatctcacatccatttggcgttgctgatatcgcgttcaattccatagattggtcgatcaatgatatccaattcttaaacagaaattcccgggctccaggtcctgttcaacaacgtatgcgaacatacaccaaggtgcacaagcgtggcgctgttggaagatctatcgacatcaacagatattctggttacgatgaactgaagcatgacgttgcccgtatgtttggaattgaggggcagctcagcgaccaaaacagagttggctggaaactggtttacgaagatcacgagaaggatgtcctattagttggtgatgacccatgggaggacttcgtgaactgcgtgcggtgcatcaggattctttcgccgcaggaagagaggcaaatgaggctggccagcgactacgga

SEQ ID NO: 9630 - DNA, 363 bp, Zea mays
  Clone ID: LIB3156-001-Q1-K1-B7
ggcgaggcggctgtgttcacggtggtgaaccagtgcccgttcaccgtgtgggccgcgggcgtgccggtgggcggcgggcggcagctgaaccgcggcgagagctggcggatcacggcccccgcgggcacgacggccgcgcgcatctgggcgcgcacggggtgccagttcgacgcgagcgggcgcgggagctgccgcacggaggactgcggcggcgtgctgcagtgcactgggtacgggcgcgcgcccaacacgctggcggagtacgcgctgaagcagttcaacaacctcgacttcttcgacatctgcctcatcgacggcttcaacgtgcccatgagctttctcccggacggtgggttcgggtgc

SEQ ID NO: 9631 - DNA, 334 bp, Zea mays
  Clone ID: LIB3156-001-Q1-K1-B8
tgaaggacaggctgcccagtgcatcagcggattcacagctatggatatcccaccaccgggtggccctctctggatcttgggtgatgttttcatgggagtctaccacaccgtcttcgactatggcaagctgagggttggcttcgcagagtcggcctagggatatggtttggcagcaacccgtccagaggcaaacgcgtaatttgtgtgtttatgcggccggcgatgtgtgtatatatgctactacatgtttagtgatgctttccgagacctgagacaacgcccgtctgttttaacgtggcgcaagaataattctggttctgcatgtattctccgt

SEQ ID NO: 9632 - DNA, 359 bp, Zea mays
  Clone ID: LIB3156-001-Q1-K1-B9
accaagcttttacctgaacaatggaagcaaaggtagggaaattcttcgattcggtgagtgagtgttcttctccggttcagatcagctttcttggtgcgatgctgatatcattgcaggatgtgaaaaggaggctgctgaggctaatggttctgatgagtcaaaaaacgaatgtctcacgcgtttttcatgggctcttgttcactcacgacgaacagaagatatagaacgtggtatagctatgctcgaagcttctatagccagcactaccgatccactgaaaatgcgagagaagctttatcttctggctgttgagcatttcccaagaggcgattcttcacggagcagttagcttgctgtgc

SEQ ID NO: 9633 - DNA, 328 bp, Zea mays
  Clone ID: LIB3156-001-Q1-K1-C1
aggagattgagaagtctacctccagcatcttaccacttcaaaacgtcttcatccgggggtgaagatactcaacgcccccaagttccatcttgggaagctcatggaggatcacagcgactacaaagaggatgttggcgacaatctctagaggcctgtagagggagatgaggattggcacgaggtcgctgctgccgcatagtacgattgctacttctatatctaggcaagtatagacatgatgttgcttatgacgtgtacttatagagtcgtctagaatatgtgtactcgtgttgccataagattctgacatgaaacaagtctaaaatta

SEQ ID NO: 9634 - DNA, 425 bp, Zea mays
  Clone ID: LIB3156-001-Q1-K1-C10
aacaaatcttgtgtatttcatccacgatgaatcccttcaaaaccttgccaaccctgggtttcctcttcttaacccttttcagcttagcccatgcagccacatttgatataagaaacaactgcccttacaccgtttgggctgccgcatctccgggtggtggcaagagacttgaccaaggtcaagcatggcaaatcactgcagcctctggaaccacacaagcccgaatttgggctcgaaccaaatgcaatttcgatgcctccgggaaaggctcatgcgagacaggcgactgcggtggagtcctcgaatgcaagggatacggtaaagctcccaacacactagccgaatacgcaatcgaccaatttgagcaccaagacttcattgacatctccaacatcgatggctttaatgttcctatggagtttagc

SEQ ID NO: 9635 - DNA, 401 bp, Zea mays
  Clone ID: LIB3156-001-Q1-K1-C11
gcacaacagatgcgttagctcaccgcccccacctgcgtttctccaatttcagtattgggcatctccctgccgattaatttcctttcagaaaaccctaattccacactctctctttttttttacattacatcaaaagcagagaaaagcaaagtggaggaggaaagatgttagcaatagcaaggcaaaggatgttggggcaatcatttaagaagattctgcctgcagtgtcagtcttgagaagttactcatctgctgcaaaacaggttggagaatatcaaggtgcatacaagataaccaagggacttttggagaagtatggacctgaaagggttcttgatactccaattactgaggctggttttactgggattggggttggtgctgcttactatggtctgaag

SEQ ID NO: 9636 - DNA, 294 bp, Zea mays
  Clone ID: LIB3156-001-Q1-K1-C12
caccgcttcggaataactgccggacccacgcagtccgcccacgcaaccgtggtattggctggttttgtgcttgcttgagggatacctaaggggggcgtaaaatatatcgccttgttcacgtcattgtctgaactatgctcgcaacgtttgcctggtcgatttagaactgttattttcgttaaaaccagagtgttatttaagacttatccgaacatctggtgagccatatatggttactagttttgttactaaaaaaaattatattttttaagtgcatacaaaaataaatatttt

SEQ ID NO: 9637 - DNA, 372 bp, Zea mays
  Clone ID: LIB3156-001-Q1-K1-C2
cttcgttctagcggggagcgccgccgctgcagttgccgccgccaccagagcagtccggctcggtctgatatggcgaccgggagtgcaagtgccatcgcgtccttctccgtggcggcggcagcggctgctgctctgcgcgtcaggcggccatgcgctcgcgcttgcgcttgggccccctcgcagcgaccgcagcaaggggcactcgtcagcctcaagccttgcgcctcactggcaccacacgctcctctgtggcgggcggagtcggatgccgcggggggtggtgccggcgccggcgatgtcatgggcctcctcctccgggagcgcatagtcttcctcggcaacgagatcgaggacttcctcgcggacgccgtc

SEQ ID NO: 9638 - DNA, 253 bp, Zea mays
  Clone ID: LIB3156-001-Q1-K1-C3
gcgcagaaactcttcgagcgacgcgcactatcaacaaacgctaacaacaatggctaacaagaggtaattcttcgttgagctgtttgcacggcctgcgagcgctactaatgcgtacattatcccacattgctatacacgctacttactacttaataccacagtatacgccaacagaagaactagtgcattagcaacactaagataagctagcatatgtgttacaacaagctattgcgagaagcgatttacatca

SEQ ID NO: 9639 - DNA, 391 bp, Zea mays
  Clone ID: LIB3156-001-Q1-K1-C4
ggttcgagcagctcaagccgtcgctctgcagctcaccgaaagagtgcaaggagtacgtcagcaagtccctcttcctggtcggagagatcggggggaacgactacaactacgccttcttcaagggcaagaccctggacgacgccaagacctacgtccccacggtcgccgccgcggtcaccgatgccaccgagagactgatcaaggccggcgccacgcacctggtggtgccggggaacctgcccatgggctgctcgtcggcgtacctgaccctgcacccgggccgcaacggcagcgactacgacgccgccggatgcctcaggacgtacaacgacttcgcgcagcaccacaacgccgtgctccagcggaagctgtgggcgctccgggccaagta

SEQ ID NO: 9640 - DNA, 375 bp, Zea mays
  Clone ID: LIB3156-001-Q1-K1-C5
gcgcgcgggctctcttcgtcgtgcggcaactacgcgaccgccgacgcccgacggcaggtgggggaggtcttcctcgaccccttcgcaaggcctcggttccatccttcggcggaggcgaccgcccgccaacaggacttgatctactactcactaacgccgtacaggcgaagagaagaacttgaccatgagcagcataggcacaggttacgatgtgtgtgtcacgaccttctccccagatgcacgagtcttccacgtacagtatgccaccaaggccgttgacaacagcgggactcgtgttgcgatcaagtgcagcgatggcatcgtcctgagtgtcgagaatctgtcacctcaaagatgatgctccaaggatcaaac

SEQ ID NO: 9641 - DNA, 395 bp, Zea mays
  Clone ID: LIB3156-001-Q1-K1-C6
caaaatcttcagggagccgtagaggagcagcaggtgcaccaaaaggatggcagcgccgggctccctgcgacttctccaggccccgtccttcgctgcggccaagtgccagccggtggcgggccgggcatcggcccggcgagcgccacggccactgttcgccgtgcgcgcctcggctgctgacgccgccaacagggatgccgtgctcaaggccttccgcgagaacagggctctcaagataatttccgggcttcagaactttgacaggagcagtgttgcatctgttgtcacagctgcagataagggaggtgcaacccatgttgacatagcatgtgacgaggacttagtaaagcttgccatggatcttaccaatcttccgatctgtgtctcatctgtag

SEQ ID NO: 9642 - DNA, 240 bp, Zea mays
  Clone ID: LIB3156-001-Q1-K1-C7
caccggcggaaaattccgggcgagacacacgcgcgcgttgctgttgaaagatctcccattattagtgcaaacctgagtctcttcgaacgcggaggaccctgacctttcttctgagagcgaacatttgctatactaccattgcgaaccttgtaccacacaccgtaaacggagaatgtgactaagtcactgatgtttatgaccctgagagctactttattacgttcacgccctttgacatgc

SEQ ID NO: 9643 - DNA, 174 bp, Zea mays
  Clone ID: LIB3156-001-Q1-K1-C8
gcacctggtccgggccgtgggcgtcgaagtcgaaccattcgttgatgtgtgttgtagagtgacatatgcacaaaggaaaagatgtaggcgaaagaggaggtgtaggttgaatgaatgctgatggatcgttgctatatatttttgcccccaaacaaggcaggtttaggtgttttt

SEQ ID NO: 9644 - DNA, 416 bp, Zea mays
  Clone ID: LIB3156-001-Q1-K1-C9
agctaaaacgatcaaataccccaactttattcaacagttgcttcacaaacggaaagagggtgatcatgaaaagaagcttaaaaaaaggaggagattgcttgagacccaagccacaacgaaccctatagaagaacctatggacccaattcaagatgaagagtttttggtttccatggatgatagggttgtaccagagatgtcaacaaatgaaagaggtagatgtgaatgattcaaagatttatgttgaattaaagcagttggtgaattggaagccatgtagctagggtgggtttccaagtgagccagtggagcaaactggctgttgaataatatatacatatttgtgtgtgtatgtatatgtatgttatatgaatggatgggcattggttgcatgcatgatgaacccttgaagatga

SEQ ID NO: 9645 - DNA, 269 bp, Zea mays
  Clone ID: LIB3156-001-Q1-K1-D1
ctggctaatcttgactgctcggaggaagttggatgctatcgaggagaaggatcgagggctcgatgagtaagacgggtttctggtgtcgatctgcttctgagtttttttttctttacatatcactgcgaactcgtagttgtcctttggttatcagccaaaccaccctattagctccaataatgccttctctcaacatgtgatgctacaattccacatgctttgtacatctgtatacagctagctctaagtgggcagccgctttataccca

SEQ ID NO: 9646 - DNA, 327 bp, Zea mays
  Clone ID: LIB3156-001-Q1-K1-D10
cacgaggcaatgcttgttcaaccgcactttaaaaatccctaatcctatggattgagtgcttagtccctagaacatagggaaagacaatttatgtgtgcagaaataataatgcctcgtgattgctgcgcagattagaatcgtggtgccaaggataagagatctgagggttaaggggccagtgagaatgcccaccaaggttcttcacatcacaacaaggaagtctccctgtggtgaatgaacaaacacatgggatagatttgtgctccgtgttcacaagcgagctattgatctttttagctgtcctgatgtggacatgttgttcacatc

SEQ ID NO: 9647 - DNA, 351 bp, Zea mays
  Clone ID: LIB3156-001-Q1-K1-D11
cttacctctttttacattatttttccactctaaaattcctatacacacgcctgaaggattctcctttggacatgtccaaaccatcttaaccgatgttaaatcaatttctcctcaattcgcgccaccccgaccctatcctggatatcttcgttttggactctatcccttgtgtgctcacaaaaccaaagtaacatgcgcatctcagttgttgacttgttggacatgttgcctttttgtcggccaacattcatcaccatatagcatcaccggtgcgctagagtgatgaatatatttcttaaatgacttgtattgttatatttcgataataaaccttatttagactaatttcaa

SEQ ID NO: 9648 - DNA, 315 bp, Zea mays
  Clone ID: LIB3156-001-Q1-K1-D12
ttgcattcgaatcttgcttataaaatttcgtcttcaactgataatcggtaataaattgttatgaagccaggtgcgacgttcctcctgggggctatgttcggtgcccttttaactggaggatgcaatcgctgtcgtcatcttaaagaaacaagcagtaccggtagcaggtgagaaaacaggcgctgacctcgtaccaaaccaactcataacatacctgctgatgccaaccgaggcccccaagaggaacagcaatcggaggcatcgcttgtgggctcgtgattgaagacatgctggtgttttgctgatgagatcgta

SEQ ID NO: 9649 - DNA, 414 bp, Zea mays
  Clone ID: LIB3156-001-Q1-K1-D2
ctggtttattgcaaaatacaggagagaatgatccgacaactagaacttttgttaagggttacaagtcaggatcagtggggagatccttggacatcacccggttctctaattatgctgaacttcgagaggaactgggtcagatgttcggcattaagggtcagttggacgaccctgatagatcaggctggcagcttgtatttgtcgacagggagaacgatgtgcttctccttggagacgacccgtgggagtcatttgtgaatagtgtatggtacatcaagatactttcacctgaggatgtgcataagatgggaaagccaggaaacgatccacgctacctatcttagctacctatcttaaatcgatacatggagctctttctggctcccatgacgattctgcggcacactgtagcac

SEQ ID NO: 9650 - DNA, 348 bp, Zea mays
  Clone ID: LIB3156-001-Q1-K1-D5
cccacgcgtccgctgctaacttgtctgcttggagtttttggatgctatccatgagaatgatggtcgtcttgttgagtaagaccggttcctgccctcaatttgcttctgagttcttttttctttttatatcgttgccatctcttcgttgtcgtttggttagcagccaagccaggctattattactaataatgtcgtctataaacatgtgttcctacgttgccacatgctgagtcaatctgtatacatctagctctaggtggtcagctgcgtctaccacaatgagcatacatgtatggataaatcttctgtgaaagcattcgatgaaaaaaaatcaatctattttttttc

SEQ ID NO: 9651 - DNA, 237 bp, Zea mays
  Clone ID: LIB3156-001-Q1-K1-D6
caggatcagtggggacatccttggacatcacccggttctctaattatgctgaacttctagaggaactgggtcagatgttcggcattaagggtcagttggacgaccctgatagatcaggctggcagcttgtatttgtcgacagggagaacgatgtgcttctccttggagacgacccgtgggagtcatttgtgaatagtgtatggtacatcaagatactttcaccttgagatgtgcata

SEQ ID NO: 9652 - DNA, 384 bp, Zea mays
  Clone ID: LIB3156-001-Q1-K1-D9
tattgaatgatttcatgaagaatgataatctaatgcatctgcttaatctctaagattatgttccaacctattaacacaaagatccagattgcattcttgattgtgatcacccttgcgagatgcttattgaatcatgtaaaaagctgcacatcatgaaatgtaccgaagccattgaactatcaccaagagctatggacaaatgcaacattagaatctccagttgatatcttttaataaggtccacaatattactatgttgatagcatagccagcatccgatggttatttagcacgtttactttgttactactttattatcactggtatttaaaatcatatattgtcctttttttattcattttaggaacaaaaaaataaactttt

SEQ ID NO: 9653 - DNA, 298 bp, Zea mays
  Clone ID: LIB3156-001-Q1-K1-E1
cgcgtccgcagcgatctgctcgtctaacattttgttcttctctataccttgatgcttttggaggacgttataatgaaatgcacagaggaaaacctttatatctaagtcaagaaagatacacatccctgacgtatctggtggcatctcatagccttgaccgaacttctgaagttcttctgcaaacaacgattggcttttatggatctgattgagcccatttttcaaggaacaatgtgttcaaaggatcttgcggatgtgcatatttttgggaactgtactgcaacttggtgtttgatct

SEQ ID NO: 9654 - DNA, 361 bp, Zea mays
  Clone ID: LIB3156-001-Q1-K1-E10
aaaaagctaccaataaaattttctcttcaactgataatccgaaaaaactagttgttattccacatgctacgaacctacaattcgctatttttcttaaccatattcacacctaagattgattcgatctcttcttcttaatataacaaacactcaagatagcaagtgtgaaaccaatctctcatcctctacactacaaaagtattatatactctgtgacttcaaacaatgtccccaaatcttacaaaaatcttgccataccattttctgataatcattgcatacaactgttttgtctttgtcgtgtatcttttaaatgtaaataacttttacttttaaaactcacttattcttactgttcatc

SEQ ID NO: 9655 - DNA, 328 bp, Zea mays
  Clone ID: LIB3156-001-Q1-K1-E11
cccacgcgtccgggcaatgcaccttctctgaccggaatacaatccaaagaccacttagaatcatagatcgaaataataatttcttactttaaggaagacgggcatagggactggactgatagcgcgggctggcctactcgaaaaaaaaaaaaaaaaaaaaaaaaaaaaaaaaaaaaaaaaaaaaaaaaaaaaaaaaaaaaaaaaaaaaaaaaaaaaaaaaccaaaaaaaaaaaaaaaaagaaaaacaaaaaaaaaaagaaaaaaaaaaaaaaaaaaaaagaaaaaaaagaaaaaataaaaaaaaataacgggggggggccttttaaag

SEQ ID NO: 9656 - DNA, 258 bp, Zea mays
  Clone ID: LIB3156-001-Q1-K1-E12
gtgagactgtcacaagacaagcgtgggacagaaactgccgctgaatacgcccaagaactctgcgaaggcagcataagggtgaagccgcacccgagtcacgcttgctcttgtcttttgtacgtgtccagaaaagaaggaactgaaagagtttctcgtgttgcggagtttttaagaatgtcgcgtcatgacatgatgtgctgagttgtattttgcgtacgggttccctagtgctgcttttgggaacttaccattactaca

SEQ ID NO: 9657 - DNA, 310 bp, Zea mays
  unsure (1)..(310): unsure at all n locations; Clone ID: LIB3156-001-Q1-K1-E3
aattgntatgctcggccttgagacctaccctggcgtcaagcgcatcaccatcaagggggagactgaccgctgggtgttccccgagaccaacactggcatcattgtccttgctgagggtcgcctgatgaaccttgggtgtgctactggccatcctagctttgtcatgtcctgctcattcactaaccaggtcattgcccaacttgaactgtggaaggagaagagctctggcaagtatgagaagaaggtgtatgtgctccccaagcaccttgatgagaaggttgctgctctccacttgggcaaacttggtgcc

SEQ ID NO: 9658 - DNA, 69 bp, Zea mays
  Clone ID: LIB3156-001-Q1-K1-E4
aaccgggcgaccaccccacggccccaaaccacacacacacgccaaaggccgagaagcggggaggcccag

SEQ ID NO: 9659 - DNA, 420 bp, Zea mays
  Clone ID: LIB3156-001-Q1-K1-E5
cagcgatctgctcgtctaacattttggccgtctctataccttgatgcttttggagaggaggataatgaaatgcacagaggaaaacctttatatctaagtcaagaaagatacacatccctgacgtatctggtggcatctcatagccttgaccgaacttctgaagttcttcggcaaacaacgattggcttttatggatctgattgagcccatttttcaaggaacaatgtgttcaaaggatcttgcggatgtgcatatttttgggaactgtactgcaacttggtgtttgatcttctccggtggtaacgagagcgttacctcaaccaaggtggtgtagattctgcaggctcgccacccgtcgttgctctatggcacactggccctctgctgcctcttgtgcctaatgtacagtctacattcttt

SEQ ID NO: 9660 - DNA, 402 bp, Zea mays
  Clone ID: LIB3156-001-Q1-K1-E6
cagttgttgatttgtactctggggctggtgttattggcctatcagttgctgcttcggggaaatgtacgtctgtgaaatgtatcgagattaacaaacagtcaaagatgtcttttgagacatcagcaagccgacttccagcgaacctgggttgcaccattacttggcacaataccgatgcttcagttgaaccttcgcactggcttgaagggtcaagtgttgttattgtggatccaccaaggaaagggttgcacccatctgttatcagcggtttacagaaagttgctttgtctgagcgcaaggcatacaaggctaaaagttcgcttgcaaaggtcaaggatgagaagagaccatggatcttacgggcaaaggaggctgcagttcatgttgataatacaacaactg

SEQ ID NO: 9661 - DNA, 169 bp, Zea mays
  Clone ID: LIB3156-001-Q1-K1-E8
gtgaacccaccaacctccgctgcattctgagttcccaaaagactagactgcttgggtagaaaattgttgtgagttgtgactctttgcttccgaagaacttctctatggtctctccgacgaacagttgcagttgcttgggtttggaccgactatttatcatgtgattgcg

SEQ ID NO: 9662 - DNA, 248 bp, Zea mays
  Clone ID: LIB3156-001-Q1-K1-E9
cctccggcatatacctcattttccaaataatactcactctacaactaatctacccacacctggagaattttccttttgacatgtccaaaccatctcataccgatgttcaaacactttctcctcaattggacccaccaagcccctatcctggatacccccgcttcgcacctatccctccgactactaccccacctccatcccatttaattaccacttccgcacataccctttctgcccccctacacttc

SEQ ID NO: 9663 - DNA, 242 bp, Zea mays
  Clone ID: LIB3156-001-Q1-K1-F1
ccgggtcgcccacgcgtccggttaaccaaggtaaccagagcgtgctgccttattgctcctcatgggtcgtaatttgcgctgttttactcgttatgaagaccgtatcaattgccatgaggagcttcagtgcacgagtttcagatctgcgctccacgctgatcaacggtctcatacttataacttttacagccatcgcgacaatcctaataacaatccctgccatgaccggtcttgacatcttt

SEQ ID NO: 9664 - DNA, 281 bp, Zea mays
  Clone ID: LIB3156-001-Q1-K1-F11
ggagaagcaagtgatgaggaagaggagtacgaggccaaagaagttgaagttgaggaagtcttggacttctccgaagaagtcctttttgaagagtgagttgattgggacaagatttttcagtatgtaggagtggagtagatgatatttcggctatttttattttagaattttgatcatcgcgttaacactttgcgtgtatttataaatgattgtgtgaggcaatgcaaaaattagtccctgcatattttttcaatacaaaaaacatgtatttttttttgtgg

SEQ ID NO: 9665 - DNA, 379 bp, Zea mays
  Clone ID: LIB3156-001-Q1-K1-F12
cgtccacgcttttctctccacagcagggcgcaccacacgtcgcggccacgcatccagcccatggggctgcttctcgccatctgctctggggacaactcacacagtgacgccatggtccagcatgacccctcctcctgctcgaaagtgcgtgatgtggccctccgtgccatccactggctctgcttctcgacgcccacctacaccgaccagtataatatccgacgggttcctcgaccgcgtcctctccctcctccgcaccgtagacaccacgctacagcactgcgccctgaaggcgatgcacctactgtgcccggcgttggaggagatcatgaaggcgatgggcgacgccgcattcatgcttgagctggtgagcgccctc

SEQ ID NO: 9666 - DNA, 414 bp, Zea mays
  Clone ID: LIB3156-001-Q1-K1-F2
gctcccaccgtgtgatagctgctgctcctggcctgcttcgacctcacggccacctcggtcctgtcccactagactagctgcagctagcgcctcttcccctcgccgccgccacctatccgagagctacgagcatggcgcactccctcgccgcctccttctcgccggccgccgcgcggcgccaggtgacaaatgtgatttcaagccggagctcggtttccttccagagccacaggatgacttctgtatccatccgttcaagaccaagttctcttcggttcaagatttgctgttcggctaagaaggagacagtcgacaaggtctgtagtatagtgaaggagcagctggctcttcctgatgggactgctatcactggcgaatcaaaattcgccgaacttggtgctgattcactggata

SEQ ID NO: 9667 - DNA, 374 bp, Zea mays
  Clone ID: LIB3156-001-Q1-K1-F3
ctacgccctgcagtgcgtcatacacatggtgtgcgtcgcaatcgagtaccggatgcgccatggccagcgcggcggcgccggcgcagcgcccgctgacgaggaaaggggcagcgacggatcgtcgtcgtctagtgatgaggatgacagggagctcgatcgccatggtcgccgcaccgattacgccagtattgcaaaacacttggagtctgctaatacaatgttctccttcatatggtggataatcggattttattggatatctgctgggggtgaagaggttatccgggacgcacctcagctttactggctctgcatagtcttcctggcatttgatgtgttttttggtgtattctgtgttgctctggcttgtatca

SEQ ID NO: 9668 - DNA, 397 bp, Zea mays
  Clone ID: LIB3156-001-Q1-K1-F4
gccggatctggatgtgcatttcagcttcatctactgcgtggaggacctggtggtgaagcggcagtacaaggactgggagtcctgcttcgagaagctgggccttgacgccaagcccgtaacagaatgctacaaaagcgagcatggccacaagctcgagctcaagtacgcgaaccagaccgacgctctcgagccgccgcaccggtacgtgccctgggtggtcgtcgacgggcagcccctgctagaggattacgagaatttcgaggcttacatctgcaaggcttacaagggcactccaccgaaggcctgtgagggcctggaacgtctgcagatggccctcgagacagcggcggaggcgcgcaacggcgtcagctacaactccggtgtcagcaagcttgcg

SEQ ID NO: 9669 - DNA, 404 bp, Zea mays
  Clone ID: LIB3156-001-Q1-K1-F5
ctttttcaacagtacgaagcaagtcatctatcccgctggccttacgtttgttgatgggcataaatccccgtgccttgattattctttctcttttggtattcagaggtgtgctatatgtgggagccagtacatcaccaattgtggtctttgtgttctgtatatgtactctcagactattcttctctctctaccttacaaagtgggttcttgctaaggacgaaggaccaccagaaatgtctgagatatctgatgccataagagatggtgctgaagggttttttaagacacactatggaactatttctaaaatgacatttattctggcctttgtcatccttggcatttatctctttcgcacttactaccccacagcaggaggcttctggctttgggaagggcaacac

SEQ ID NO: 9670 - DNA, 400 bp, Zea mays
  Clone ID: LIB3156-001-Q1-K1-F6
gccgcgctgcgcgggaggctcgccgtggagctgggccccgacgacgtgccgccgtgggtggcggcgcccgagtggtacccggcgttcaccgagtccgcgctgagccagttcgacgggctggagcacgccgacgacgtgctcgtcaactcgttccgtgacctggagccaatggaagcggattacctggagtcgacgtggcgcgcgaagaccgtcggcccgacactgccgtcgttctacctcgacgacggccgcttgccatgcgacaagacatacggcgtggacctcttctcgagcaccgactccgaggcggcgccgtgcatgacgtggcttgacaagcaggagccctgctccgtcgtcctcgcgtcgtacgggaccgtcgccaacctcaacaaggagcagc

SEQ ID NO: 9671 - DNA, 192 bp, Zea mays
  Clone ID: LIB3156-001-Q1-K1-F7
aaataaaaaaaaaataataaaaaaaattttttattatacataaaaataaaaaaaaaaaaaagaaaatttttaataaaaaaaaatacatataaataatttataaatattaaaaaatttatttaatttatcattttcttaattttcctcttttttttttcctcttactttctttttttttttctcttctttttt

SEQ ID NO: 9672 - DNA, 418 bp, Zea mays
  unsure (1)..(418): unsure at all n locations; Clone ID: LIB3156-001-Q1-K1-F8
gatgttctcaagtcggtgggtaagctaacaaacagcgagctgcatcaggtgttctgtgagtggaacaagggtgagctcctcagtttcttgattgagatcacggccgacatctttggtatcaaggatgacaagggtgaaggctacctggtcgacaaggtcctggacaagaccgggatgaagggaactgggaaatggacagtccagcaggctgctgagctttctgtagctgctcctacaatcgaggcgtccttggactccaggttcctcagcggtctgaaggacgagcgcgttgaggcttccaaaatcttccaaggtgactactccactggcctaccggtggacaaggcacagctgatcgaggacgtgaggcaagctctatatgcctncaagatctgcagttacgcgcagggcatgaaca

SEQ ID NO: 9673 - DNA, 439 bp, Zea mays
  Clone ID: LIB3156-001-Q1-K1-F9
cacgcggccgcggacgcgtccgcgaggtgtcagaatttcattacaggaaaaaaacctcagctcgcgagacgcttttcttctgatacgccgaacactaatcttactcatccaaccctttaacactcgacacccggtaccgcgagctaccattccataggtgacaacagcgatatcagggcgcatgctgaaccactgctgaagtgcatgcggcaagttatgccgagctagcaattaaagatgctgctccgcttaataactttcaagacggacgacacgtgtaaggacatagttgtggaccaggtcagggatcgcgctaccagctacgatgacttgacaaacagccttcctgagaatgactgccgatacgcgatctatgatttcgactttgttactgcaaaggatgttcagaagagcaggatcttctatatcctatggtccc

SEQ ID NO: 9674 - DNA, 412 bp, Zea mays
  Clone ID: LIB3156-001-Q1-K1-G1
ccgctgtcggatcgttctcgcttggggcgatcaagctaacgggatttgaggagatgtaggccagccgcgggcagcagccatcagccatgagcgaggtgttcgagggctacgagcggcagtactgcgaggcctccgcctcgctctcccgcaagtgcaccgctgcatccgccctcgatggagagaggaagaagcagaagctctccgagatccagtccggcgttgaggaagctgaatcgctgattcggaagatggacctggaggcaaggagcctacagcctagcattaaggctggtttgcttgcaaagctgagggagtataaatctgacctcaacaacgtcaagagtgagctcaagaggatatctgcgcccaatgccaggcaggctacccgggaggagcttctggagtctggaat

SEQ ID NO: 9675 - DNA, 304 bp, Zea mays
  Clone ID: LIB3156-001-Q1-K1-G10
cgcgtgcgtccacgcgttctgtaaatgtttgcacggagcctgcaatgtcagcaatagcgcgcagggcgtgattatgtcatccatgtaatagttcatgatagcagtaagaaaattgaacgaagcatagaaaactggaatcaatgtgcacattacagtgctgactttgggaaagactacaggctttgtttttgacagtgcatcttaacggagccattaatacaggcctgtagtcatactcgcatcatgtacctcctctgcacgggtgacaccacggacttactctgatccctgaaggatgtacacc

SEQ ID NO: 9676 - DNA, 203 bp, Zea mays
  Clone ID: LIB3156-001-Q1-K1-G12
gcgactacgtcttccaattcacgattttacatgctctgtactgcttcctgtgagcagccagttttattctactctttatttttctaaataaactcgatctgctttgtcccttgttaagaatgagctttgagttttctgtagtgcaattgttgtagctccgcatgccatcatatctggaattactttcctaaaagaaaaataat

SEQ ID NO: 9677 - DNA, 376 bp, Zea mays
  Clone ID: LIB3156-001-Q1-K1-G3
gtcatcagttttacttgatggaagccatgggacgagagactgacatggccaagcggggaggaagctgtagagtgtccagatggaagggctgctctggggcgcatccaagcttgtcccagtcggatatggtatcaagaagctgcaaatcatgatgaccatagtcgagatcttgtctctgtcgacactctcattgaggactatctgtgcgctgagccagtaacgagtacgtccagagctgcgacatcgtgcttaacaagatctggcgtgactttcgatcagccttccctgggtgctgcgatggggtggctggcaatgcaccacctaattttcatactatatgtctgctttgtgtgccagtgatatggcgtgagtattt

SEQ ID NO: 9678 - DNA, 370 bp, Zea mays
  Clone ID: LIB3156-001-Q1-K1-G4
aagaatccccatgaatcaagttactccatcacagggcagcgacgaggcaaagccattggaagctacagtggttgatgcagctcccaccacttcagaaggcactgcagctcccgcagctgcagaaggcacagcagctcccagcagtgaggaagctaaagcagcacctggcagtgagggaggcacatcgcatccaatcaacgaggaagccacagcagttgcagtttcagatgcaccaggcagccctgatgctgcggctgcggctgctcttgctcctgcagctgataccagtagctcggatgcacctgctgttactcccagtgaagtaaccgtctctcccccttcaaccgacgcacccgagttgaccgataag

SEQ ID NO: 9679 - DNA, 391 bp, Zea mays
  Clone ID: LIB3156-001-Q1-K1-G5
gcgggatgaaccggaagccgggttacggtgccaactgttgaaggaggatgttattgggcgagaaggattatgctctgcccaaattctcagataaaatactgaagtttcaagtgaacccagtggctgcactttcactttgaagacttgcagaggaaattcatggtcacttcattttgtgagattaattatagagaaagggtagaaattatatgaagaaacatagtaaaaaatcattgttaggaacaaactccaatagcaggctctacttgtacgtcgcagacataagctgagactgagctgcgattgcaacagattatactcttctatcaggttgactgaagttccctcagtggccaatcttggatctttctgcaggtgttgtgcacatctt

SEQ ID NO: 9680 - DNA, 398 bp, Zea mays
  Clone ID: LIB3156-001-Q1-K1-G6
cggacgcgtgggtgggtttgaggaatcatggcaaagaaataccagggagaatatgcggggctggaatcctagaatgaacatgcttggcagtggaaatgttcgctctgacttccgagatgtgaatcaaatgcctgcacttccagccccagaactataccgtggcacgaattttcagaatggctcttccatgggccgtgcaccccgcacatgagttcctctgtggcatatgctgcatcacagtgctcagtaccggtgacttgcactattttgcagaaaaatgttgaaacccaaactcagcttttgaaaaactactgtaacttgagacagttttaatagtcgagagctttccttagtttcagcagctctatccgagtactccaatcactgtagtttagtgc

SEQ ID NO: 9681 - DNA, 344 bp, Zea mays
  Clone ID: LIB3156-001-Q1-K1-G7
gtggactggatattcctcacagcgagaagaggtttgctggtttcaagaaggatgacaggcagctggatgctgatatccatcgcaagtacatctatggtggccatgttgctgactacatgaggaacctcgctgaagaggagccagagaagtaccagtctcacttcagtgagtacattaagaagggaattgaggctgatgacatggaagctctgtacaagaaggtccatgctgccatccgtgctgatccttctgtggtcaagtcaaccaagcagccaccaaaggagcacaagaggtacaaccccaagaaactgacatacgagcagaggaaggccagtctcattgaa

SEQ ID NO: 9682 - DNA, 419 bp, Zea mays
  Clone ID: LIB3156-001-Q1-K1-G8
gccgccacctctcctccggcatcgacgaggcgaaaccctagcgcccgagtccctcgcgctgctcccacaacccatggcggcggatatggcgtacgcgccgccgatgaaggctggcaaggccgggttcgaggctggcatgatggatccacagcacaggatccgcatcacgctctcctccaagagcgtcaagaacctcgagaaagtctgcggggatctggtgaagggcgccaagggtaaggagctcaaggtcaagggccccgtgcggatgcctaccaaggtgctccacatcaccaccaggaagtctccctgtggagaaggtaccaacacctgggatcgctttgagatgaggattcacaagagggtgatcgatctcgtcagtacaccagacgttgtcaagcagatcacctcaatcaccattg

SEQ ID NO: 9683 - DNA, 435 bp, Zea mays
  Clone ID: LIB3156-001-Q1-K1-G9
gggaaatctcgtaggtttgccagtaattgttgttccaactgggttcaaaaacataccgagtccacctccaactggtactcggagacgaaccacagtcaacacgggcatatatgctcctcctaaccatgatcacatcgcattagccttagcaatggcttaccagtctgcaacaaatcatcataagcagcggccccccatagatgatctgggaccaaacgacacaatacccaatccccctaccgttcccatccctcctagacgcttgcatatgtaacagagtttgtaagaaaccttttagtgcctcacaattgtcaaagcctgctccagactgtaacctgtacctaagaacaatatcatcattcaaaatggcaagatttgatggataccccgttaggtttttttttccttcttgtttctttcgccatatcacgattc

SEQ ID NO: 9684 - DNA, 409 bp, Zea mays
  Clone ID: LIB3156-001-Q1-K1-H1
gtccacctccgcccccctctcttacgcagatcgtccaggtaagatgtcgtccgagggggtgaatgtggcggtgccggagtcggtactccgcaagcggaagcgcgaggagcagtgggccgccgagaagaaggagaagtccctggccgagaggaagaagtccatcgagagccggaagctcatcttcacccgcgccaagcagtacgccgaggagtacgatgcccaggagaaggaactggtacagcttaagcgtgaggcccgtttgaagggtggtttctatgtcagtcctgaggcaaagctgctatttgtggtccgcatccgtggtatcaatgccatgcaccctaagaccaggaagatattgcagcttcttgctttgaggcagatcttcaatggcgtgttcctgaaagtcaac

SEQ ID NO: 9685 - DNA, 342 bp, Zea mays
  Clone ID: LIB3156-001-Q1-K1-H10
gcgctcatagttaatgtcctgcgccggcagaggttgttaagggaccctgaagtcgggacatcctacagagagctctcaaagaaagcacagaaagcaaacaacatctggtggaggctgagcggactgctgggtgaccggaaccggcaggtcatgtacatactgctccaggcgctgttcacagtggcaacaatggccctgacggtccctatattcctgtcctaccggatgcacgtggtgttcctgatactcaaggtgtgcgcctcgacatggaacggtggcagcttcatcttggaggtgatgcctcgacaagtagaacggaagcagcagaagaaactggagatg

SEQ ID NO: 9686 - DNA, 107 bp, Zea mays
  Clone ID: LIB3156-001-Q1-K1-H11
acccacgcgtcctcccacacattcaagcactccttgctacatttctataaagtggacgactccaccaacaggcggatcctactgccataggagtgccccaaaccaaa

SEQ ID NO: 9687 - DNA, 339 bp, Zea mays
  Clone ID: LIB3156-001-Q1-K1-H12
cgttcatatacaaaaatgtctcttcactcttctctcaccatgtcattgctgtctttctcctttttgttgctgcggacttttagtgccaaagctattgttcctccatctgaaacttttaggtttgtcaacgacggagaatttgggccgtatgttgttgaatatggtgcaaattaccgcgtcataagcatagctaatgcccccttccagcttgcgttttataacaccacctgtaatgccttcacccttgcgttacgcatggctacaacgcgttccgagtcgctcttccgatggtattgggaggccaacaggggcaaccccgttcgcgagaatgccacgttc

SEQ ID NO: 9688 - DNA, 253 bp, Zea mays
  Clone ID: LIB3156-001-Q1-K1-H3
cctggtttgtggatggtcatgtaccttcggttggctatttggtgacgatgatttgggggccatgtaccacccagtcgccctcctctgtttgtaccccgtgtttttgttgctagaatgctacgcgatgggtgtttaaacccataatcatggagcatttgcatcacattgcgcgcgataaactagtcagtaaacagaagcaagcaaagcacctagagattcactctttttttaataaaatagtgagtccacatcc

SEQ ID NO: 9689 - DNA, 422 bp, Zea mays
  Clone ID: LIB3156-001-Q1-K1-H4
aaaataagcattatagttgcaacagatgcttgcttgcctcaggcagcgatggcagaggcaccccttatggctcgagtgctgataaactatgagcttcccacaaagaaggaagcttacttaagacgcatgtcaacatgtttggcggcagacggaattgtgattaacatggtcgttggtggtgaggtggttacactcaaggctttagaagagaacagtggtctgcttattgctgagatgccaatacatgtttcagaaatattatgaccgttccagttgtacaacatttcagaagttactgttctgattgcacactaactactcatggtttacttctactttaatttttgaattgcttttcatgtttcagaatgttctcaaattatatctctaaagcattagaataatgctcattgcttcttttt

SEQ ID NO: 9690 - DNA, 266 bp, Zea mays
  Clone ID: LIB3156-001-Q1-K1-H5
gcacttaccactgatgcaaattctgactataagcacgatcaggatctacaggaggcggtgtctgttcacaaggtagacaataacctaaacaataaacctcggaaggaacttaagaaaatttatctgtgctagaaatgcacacaccactcatccaaggaagataaagccttcaccttctactaaacaatcataaaccacactaatcaaacatgtaactgccttaactaacggatactactgtcacacctgcatacattaccttttaa

SEQ ID NO: 9691 - DNA, 394 bp, Zea mays
  Clone ID: LIB3156-001-Q1-K1-H6
gaccattccaaatcttccgcacccatttttctccgcctcgcctgcaccggagactggccctattgcccgcgcgcctgcgaggtatcgaacacccaaagatggcaatggcaaccttcacatcatccccagttctctgcagcttcaggaccatcgaacagaagaaggcccctctgctgaacaacagcacaaaacggccgcttcacttgggcttcccaaggagcgtgccgacgtcgccgagcttgagagagaggctagacctgcgcgtcgccgctgtctacaaagtgaagctcctccgccccgaaaggcaagatagcgtgctctacgtgccagaggacagctacattctggacgccgtcgatgaggcccgtcttgacctgccctacttctgacgcgc

SEQ ID NO: 9692 - DNA, 397 bp, Zea mays
  Clone ID: LIB3156-001-Q1-K1-H7
gctggacggccgcaacatcaccgtcaacgaggcccagtcccgcggcggccgtggaggcggcggcggcggctacggtggtggccgtggaggcggcggctacggcggtggcgggcgccgtgatggcggcggcggctacggcggtggcggcggcggctaccgtggcggcggtggctaccgtggtggtggtggcggctacggcggtggcaaccgtggcggcggctacggcaactccgacgggaactggaggaactgagcggtggggcccgcgcggccaagttatcctgttcgctaccgtgatgtttaccctagtccagagggtttatcttcgttcgtctccgttgttgttgcccatctgtgtttttgattgcaaggtcgctctgtgtcagtttgtagtgct

SEQ ID NO: 9693 - DNA, 419 bp, Zea mays
  Clone ID: LIB3156-001-Q1-K1-G11
cccacgcgtccgcttatctgcagctagtaaggttatttagatcgtccctcaatatagagtcgcatagttatgtaacatggatctcatttgcagattctcagaaaagcacttgcttctaccagaaggccaacatgatcactcaaaatttactttgcaatgagccactcatcgactagcaggtctttgtgaatactaactataattttcacatatacttatgctttatttatcagatactttaaatttgtacattgcttacccagaatgaataaatacatcccccatatattcactgtttctaaaaaaaattttccttaattccaatgcttaaacattattataaatttcttaatttcctttttaacatacacaattaatgttccttttctttacactcatttttcatttttgtttattta

SEQ ID NO: 9694 - DNA, 141 bp, Zea mays
  Clone ID: LIB3156-002-Q1-K1-E7
tatatatatcgagagcgcttttttataatttttattgatacaaaaatcacggtgaaatattggaaacattttgggggaaaaaaaaaaaataacgatttttttaaaaacattacaccaatggtgtactttttgaactcatta

SEQ ID NO: 9695 - DNA, 409 bp, Zea mays
  Clone ID: LIB3156-002-Q1-K1-E9
ctccaagcacaccaccactccacagtgcacttcactctacagcaacgacagaaaagtgagcagcagcatcagctgctgccatggaggcgtggagatctctcctcgcgagcttcgtgctcgccgtgctggccgcgcaggccttggtggccgtggtcgaatacaggaccggccccgtggagcaggcgagccaaggtgacgacgtgaagaagccggactgcgtgccggggatggacccgcgctcgttcccagggaccggcggcggccacggcataacgccggtgacgccatcgaacggaggctccagttcccggacgccgtccaacgggggcgggggcgggtccgtcccaccgccgccgattgggggaacgctgcctttccggtccaacgggggttccggttccggttcttt

SEQ ID NO: 9696 - DNA, 218 bp, Zea mays
  Clone ID: LIB3156-002-Q1-K1-F6
tacgcagtcgcgtagcacgtttccttatggttatcgcttgagctgagggggggggaaggagctgtttgcttttgctgaagaataatggtgtagtcggctggggtgaggcgatgtgcgttgccagatacagttttgtcttgttgactctacttatctgattatcatttgtaagcgatttgctcaagttatttgtcgtttatgaataacttgctttcctc

SEQ ID NO: 9697 - DNA, 370 bp, Zea mays
  Clone ID: LIB3156-002-Q1-K1-G3
ctccaagcacaccaccactccacagtgcacttcactctacagcaacgacagaaaagtgagcagcagcatcagctgctgccatggaggcgtggagatctctcctcgcgagcttcgtgctcgccgtgctggccgcgcaggccttggtggccgtggtcgagtccaggaccggccccgtggagcaggcgagccaaggtgacgacgtgaagaagccggactgcgtgccggggatggacccgcgctcgttcccagggaccggcggcggccacggcatcacgcccgtgacgccatcgcacggaggctccagctccccgacgccgtcccacggcggcggcggcgggtacgttccaacgccgtcgcatggcgggacgct

SEQ ID NO: 9698 - DNA, 444 bp, Zea mays
  unsure (1)..(444): unsure at all n locations; Clone ID: LIB3156-002-Q1-K2-E10
ctccaagcacaccaccactccacagtgcacttcactctacagcagcgacagaaaagtgagcagcagcatcagctgctgccatggaggcgtggagatctctcctcgcgagcttcgtgctcgccgtgctggccgcgcaggccttggtggccgtggtcgagtccaagaccgtgtttgtggtggantgtgtccatggtggcnncgngaagaagccggactgcgtgccggggatggacccgcgctcgttcccagggaccggcggcgggcacggcatcacgcccgtgacgccatcgcacggaggctccagctccccgacgccgtcccacggcggcggcggcgggtacgttccaacgccggcgcatggcgggacgctgcctttcccgtcccacggcggctcctgctccggctcctcttcgacgtctgccttcaccggtggcggctcgtacg

SEQ ID NO: 9699 - DNA, 372 bp, Zea mays
  unsure (1)..(372): unsure at all n locations; Clone ID: LIB3156-002-Q1-K2-E9
ctccaagcacaccaccactccacagtgcacttcactctacagcaacgacagaaaagtgagcagcagcatcagctgctgccatggaggcgtggagatctctcctcgcgagcttcgtgctcgccgtgctggccgcgcaggccttgatggccgtggtcgagtccaggaccggtcccgtggagtatgctatccaaggtgacgacnatgagaagccggactgcgtgccggggatggacccgcgctcgttcccagggaccggcggcggccacggcatcacgcccgtgacgccatcgcacggaggctacagctccccgacgccgtcccacggtggcggcggcgggtacgttccaacgccgtcgcatggcgagacgctgt

SEQ ID NO: 9700 - DNA, 217 bp, Zea mays
  Clone ID: LIB3156-002-Q1-K2-F6
tacgcagtcgcgtagcaggtttccttatggttatcgcttgagctgagggggagggaaggagctgtttgcttttgctgaagaataatggtgtagtcggctggggtgaggcgatgtgcgttgccagatacagttttgtcttgttgactctacttatctgattatcatttgtaagcgatttgctcaagttatttgtcgttatgaataacttgctttcctc

SEQ ID NO: 9701 - DNA, 314 bp, Zea mays
  Clone ID: LIB3156-003-Q1-K1-A12
acgcgtccgatcagaagtcacaacatcaaattggatataattgaagagaattcacacaaaatcaggggggtgaacatattcagaggggggcattatatcctgaattgattggtggtcttagtacagaacctgatgttatacgacatacgtgatgagtggccaacatttgtcacgaaagtgagccaatggacggtgttatttaagtccaagtgttcttgtttaaacatgtggcaattttttttggattacattccatccaaacacctttgtacaatcctcgtatgtaaaatttttcatcgggttttgtattttta

SEQ ID NO: 9702 - DNA, 169 bp, Zea mays
  Clone ID: LIB3156-003-Q1-K1-A2
aaaagttttgctcgtcgctgcaaacaaagacagggttattacagatatgtggctctggtctttgcacaaaacatagtgcacacactacctgccaactcaccattaaactaccatcaatccgggctcttcctatcctgagcaaacagaccagctcagttccgcttcaaac

SEQ ID NO: 9703 - DNA, 330 bp, Zea mays
  Clone ID: LIB3156-003-Q1-K1-A3
gggtggattccacttataaccaccagtcatatccgatcttgggacatggctgtcggtccaggtgtttgtgaataaggcttttcttgccctcctgtggcgaatgcaattctcctggcgcccattccttgccaatgcgacctgtgtgtgtcatgcctctggcgactgggagcctcaggaggagcctgtaggattcagtcagaggtagacaggtcagtgaagaaagaggaggggcgcggagtcacattggcgagtgttttttttttttggcggctaaatgctgagtatgttcagctgcatgtgtcctttttgtgtatgggtacgtgtacgtgt

SEQ ID NO: 9704 - DNA, 207 bp, Zea mays
  Clone ID: LIB3156-003-Q1-K1-A5
ttatacttgcaaggttatgtatgcatgcttacagatgtttggatggtttaatggcgccgcgtaggaaatgacatagatatgcctgtttatattcaaacatccctggattgaagaccaggggataggagaggagaggaaattccttgctattcaaaaaattttcttcaccatggatcctctttaattaatttgtcgcaaaactagctc

SEQ ID NO: 9705 - DNA, 341 bp, Zea mays
  Clone ID: LIB3156-003-Q1-K1-B1
ccgcggccccttgggttcaaaacccacaggtggagggctgcccacatcatcgtcatcgccggggtccagagcaccgccaatggcatactgtacgcgttcggccgcatcctgctcctcgatgcctcgccgccagggaaggagggtgcgttctcggtctggtacgcgtttgttcgcgtcaccggtgccatgatcggcttcgccgcctcctccgctggccctgggcgcgcgggagggtcctttgctgccgcgttcctcgggagcttcctgggcatcatcgtgcttatcttcggcaacgttagcaacatcggggcgctgaaggcggcccggcacctcaaggggat

SEQ ID NO: 9706 - DNA, 292 bp, Zea mays
  unsure (1)..(292): unsure at all n locations; Clone ID: LIB3156-003-Q1-K1-B10
ccggttcggaaaaaccgggcggacgcacgcgaccgangacccnacacacgcagacgcagactgcgccgagaaccggggatcgacagagaagggggggagctacgagagcgcgggggaaagaccgactcaagatgaagctgagaaggccacgccacaaggacaagacgcccaagaaggcaggaggacagcagcccgatggggtcgatcagcacaccgaacgagcacggggccgagacccccgccaccgagaagcaaaaggcaccaaggacgacagggcgtaaagacaagcgga

SEQ ID NO: 9707 - DNA, 270 bp, Zea mays
  Clone ID: LIB3156-003-Q1-K1-B11
cgcaccgccatcgtgagtttcatggtcacgcatcatggactcgcctactactgtggatgggtacgccattatagacttggtgctgcgaaagactgctttggtgatttgtgggtttgttgctgtgtaaaaagatcctcatggcttccagaagaccatgaaggtttggatctatcatgtaattccttgttatctgccaattatgtatggactatggacatgtgttgcgctgttcaactcactacaaataagtaatcgatatattccctaccc

SEQ ID NO: 9708 - DNA, 320 bp, Zea mays
  Clone ID: LIB3156-003-Q1-K1-B2
cttccgaaaaaaacaaaaaatcattaaaaaaaaatttttttaaaaaaaaaaaaaaatttttaagccgaggtttatataaaaaaaaagggaacctcaatataatataaaaacaatttaaaaagtttatgggccccccctttttaaaggtatcaggttttaatatccttcattccaactttttactttttttatagggccaccaaaatcaatattattcccccatttttaaaaacatgtaacctgaaaaaaccttgcattacccaatttaaatcttcttacataaattttcttttttccctctttctttaattccaaaaagc

SEQ ID NO: 9709 - DNA, 325 bp, Zea mays
  Clone ID: LIB3156-003-Q1-K1-B3
cggaaaaaaaaaacccatccacacgaaagcgtttgggatataatatctatatcacacggggggagacttttttggtttattggaagaatttattaggaggagggattccaaattcacatttaccaacacaggctcgacaatcatatcgaagatcgaagatattgcaaagaatttgcggttgaatttgacaaagaaggatggtggtttgttaaagatggaagcttaaaagcccggaaggaaaggggtaatgggtatcgatgccgaaatatttgaggttagccctaactttcatcttgtggagataaagaagacgaatggcgacact

SEQ ID NO: 9710 - DNA, 268 bp, Zea mays
  Clone ID: LIB3156-003-Q1-K1-B5
tccaccaattccacccgctatatcaatcaccgatggcctccttcttctcgacgttagttactccccctccggccgccaactacccgaactgcgccgtggtggccgcgcactccaaggccacctactactagcagtgggcggaccacaatagcagcatctagctgatggtgatcgacttctcggcgttctggtgcgggccctgccgcttcatcgagccggcctttaaggagctggcctcccgctttaccgatgccatcttcatcaaagt

SEQ ID NO: 9711 - DNA, 341 bp, Zea mays
  Clone ID: LIB3156-003-Q1-K1-B6
tttgaaattcttaccaaaaagtttcttaaacccctcaatgttttgctgattaacggcgttttttgagggtcactgaacctgccacattgtgcattcctcatcttgtaacatcccttaaaactggttctgaggcaactcaagaggcagcactagattcactatatcttctcaggcaagcttggtcagcttgcccagctgaagtatttaaagcacaatcagtcgctgcatcggaggctattcctctacttcagtacttgatacattctggcccaccgcggtttcaagaaaaggcagaattgcttttttagtgcttgtctgggacttttacttgttaccataaa

SEQ ID NO: 9712 - DNA, 361 bp, Zea mays
  Clone ID: LIB3156-003-Q1-K1-C1
actccaacatctgttgctggtggtccagcgccgggtgaatcaaataaaaataagcggaaggcttccctcaagggatcaaaaggaagcttaggtagtctggatgttgttgcagtaaaaaataacaagtcaccggcaaagccttcaacttcttcctccaatgaaggttcttcacaaagtgagagtggaagcgggagttcttctgaaggaagcagtacaaattcaaaaagtggttcaagggtgaaggataattctgagcaaggacagggtaatgatgctaggagtaaatgtactcaaagctctgtcgttgagcccacacaaccatcttcagggtctgttgtgcttaaccctatgatgccatttt

SEQ ID NO: 9713 - DNA, 235 bp, Zea mays
  Clone ID: LIB3156-003-Q1-K1-C10
ctgagactgcttcctgcagaaatgatccgaccaccgccttgttttgtaggaataggatggtgttgtcttcgatcggggaggagtcgggtatgctgggaaggagaattagattagtatctgtttttttgaatgggatgtgaacgtggctgtgaatctcaggattgtatgctcgttgagaaagaaatggaaggacttcgtgatgcacgatgttgatgccgcatcatattcagcgtag

SEQ ID NO: 9714 - DNA, 51 bp, Zea mays
  Clone ID: LIB3156-003-Q1-K1-C11
attccccccgcgacccacgcttccgctacacatcttcctttacaacatttt

SEQ ID NO: 9715 - DNA, 332 bp, Zea mays
  Clone ID: LIB3156-003-Q1-K1-C2
ggaaaatgaaccagggttattgaggcaaagacaacccaaagaacaatcgcacacgacggtgatgaacacacaacgacagaggcatcagaaaaagcattcgccaccgcagagtagcatacacacatacatacgtacatgaactgcgcggcgaacaatcgccagcgggaaactatcaaccgccaagaacgtagtctgcatgcactgtctctcccctgagacgacccggccgtgctccgtcagaagggaccagtaaacaagagtcctgcaagcgggggcagaacttccacagttccaaatcacttcctgtttaatcgagttgttgtacgagaaat

SEQ ID NO: 9716 - DNA, 284 bp, Zea mays
  Clone ID: LIB3156-003-Q1-K1-C3
ttccaaccccggtagtggtcccgccccgaatcttttcctcggttgcctccaatgccctcgtggggatcaatcccggggagagcgggatgttctccggcatccctgaggagcatttccgccgtaaggttctaatttattcaccagttaggactgcatcccaacaaggttcatgcaaagtcgggaggtggaaaattaattttttgtcaacccaaaaaagggagaacccgttgatgggatggacattctactgggatccatatgctaatgtccgtgaatcacgactt

SEQ ID NO: 9717 - DNA, 232 bp, Zea mays
  Clone ID: LIB3156-003-Q1-K1-C4
accgggtcgaggcacgcgttcggcaacaccaccggttaacacaatccggtcttgcctggcccttgcttccttacggatccccggggtcctgtaaataagaccggccaagcaattgtgtatattctggtttcctcgctcaactgctggaagtctaaaacctaccttatgagatgtcgtcgatgtaatggacaccgtttaaattaagtaattgactggacctgaatctcggggg

SEQ ID NO: 9718 - DNA, 388 bp, Zea mays
  Clone ID: LIB3156-003-Q1-K1-D1
tcaaaaaaaaaccgtatggctgttggagataatatccatgcgggtgggacagactggtgcttgaaacatgcacagttacaacgtcttcgtcacacctggacttcaaccaaagaaatgtaaagacactggtctctggtgatgcaactggtctctggtgatgcaactggtgcatcacaagttcacaatagaatactagaaagctaagtagataattgtttttttctgtgatgaactgcatgaagctttattatgttgttattgactggtccttcatcccaagcttgctgtgtctgtgtatcacattcttattttaaagagacatgtactgttgaggttaaccaacataatctgggaaaataaagggattacaattaagcatgtgtatcac

SEQ ID NO: 9719 - DNA, 382 bp, Zea mays
  Clone ID: LIB3156-003-Q1-K1-D11
cggaaaacccggcgcgacgcacgcatccgcggactcttggtcggactcttgggcggactcgtgggcggacgcgtgggcgcccgcgccgcggaccttcatgaccagtgtggtacctacgcatgatcactacttgcatgtctactactactactgaataaaaaacctctccgcgcacgtcgtccttgtgtttgtgtgtgtgtgatagagaggagactgttagccggccatgtccttttggctgtttggtttatttttgagttcatgcggactttatttatttccatgtacccactttgaaccatgcatgttccttatgatacactcacctctttttgtttataaagcaatttaattttttttttacttttttttctcatttctt

SEQ ID NO: 9720 - DNA, 424 bp, Zea mays
  Clone ID: LIB3156-003-Q1-K1-D2
cgggccgatgccgttcagccactccagtcagaaccagcaccctcgggcttaccagcaccagcagcacatgccgcctgcctacgcgtccgggggctggtccctctcggtgcaccagcagaacaggcatgattctgacatgaagatgatgtcgaactaacaggcgccccattcgttggtgtttgggctggagaggaaggaaaggaacctgctgatggttaggttggtactgctgctatgaaacggtcctcttgcgcgtcgtctgtgctctggtcagtgacgacgtgtcgatctgctacttaagctaagctagctaggagagttagggttcatggtctcaccccccgctgttgtgcccctgagtaagattaatttaatttgaattagtcgctctcataatgctgcgagttgtgatggttttctgatc

SEQ ID NO: 9721 - DNA, 369 bp, Zea mays
  Clone ID: LIB3156-003-Q1-K1-D3
gagcattgcttttggaaccaaacgcgcaagaaggccggcgggccatttggaacgtccgggggacccccacccaccggggcatatatggggctcctggaccagctgtgggacgacacggtggccgggccgcgcccggactccggcctcggcaagctccgcaagtacgcctccttctccccctcctcctcgtcggcggcagcggcggcggccgtgcagctgccgacgaccgcagaggcggcggcgccgggctccgcgccgccttccggcgccgtgacgcgacggagcgtcaccatgctgcggcggccggcggcgctgtccgtcgtcacgtcgccccgcagcgagtccagcttcccgccgtcggtcccgtcg

SEQ ID NO: 9722 - DNA, 202 bp, Zea mays
  Clone ID: LIB3156-003-Q1-K1-D4
cattgtgcaccttggcaacattcccaataacgggacccgcattaagcggggcatgaaccctgggagccgcggtcatttacaacaaggccaaggcctgggacgaccaagggatctttctgggtgggtccactgaattggcgcccgccatcgcccgccgtctactcaccaagtaccgtgcctgaagggccagccgcccacccaa

SEQ ID NO: 9723 - DNA, 252 bp, Zea mays
  Clone ID: LIB3156-003-Q1-K1-D5
tttgccggctgtacaacaagaaaaacggccgccagaatacacagcagcggcaggagaacaatcagaatcagaagcaaatggagtctgaggcctcgctctcgcactcccactcagacacgcggacgccggagtcggagatcgacgacgacccgttcccggagctggcctcgctgccggcactcgacgacatgatgggcccagcagcagcagcgcctgccggcgccattttgcccaatgaggaggtggaagact

SEQ ID NO: 9724 - DNA, 296 bp, Zea mays
  Clone ID: LIB3156-003-Q1-K1-D7
cccccggcgacccacacaacactcttcatcaatccatattcctacattttctctcccataaatgctcatattatctccccgcggtttttaaaaaatggtcacgctttaactaccattttcaaattgtaaatctctacctttaccacttattactcatttctttcattgcgtctcaataactttatatacataatcataattttcctaccttattacttctctcttcattttattttacaccttaattcctttatatccttatcctcaattctttactcaatttaattattccttta

SEQ ID NO: 9725 - DNA, 54 bp, Zea mays
  Clone ID: LIB3156-003-Q1-K1-E1
aatgcctggggtggaaccggaaagttttggttcgggaataatcagggggtgcac

SEQ ID NO: 9726 - DNA, 322 bp, Zea mays
  unsure (1)..(322): unsure at all n locations; Clone ID: LIB3156-003-Q1-K1-E3
ccgccttaaagttcgccaaggccttttggttaaaggccggttccaaaattttaagcaagggcggccttgactacttcggcaacccgagcctgatccacgcgcagagcattctgcccatctgggcgtgccaggtggtgctcatgggcgccgtcgagggtaccgcatcgccggtggcccgctcgggaggtggtcgacccgctgtacctccgcggcagcttcgacccgctcgggctcgccgacgacctcgaggcgttcgcggagctcaaggtcaaggaaatcaagaacggccgnctcgccatgttctacatgttcggctttttcg

SEQ ID NO: 9727 - DNA, 241 bp, Zea mays
  Clone ID: LIB3156-003-Q1-K1-E6
gtttttgtctaccacatggacccttaccagggcgacaaggcgtcggccctgctcgtggactttttcgacaagtgccaggcggacccgagccactggaacaagatctcccagggcgggcttccacgtatcgaggagaagtacaccttgaagctgtactcggagaggctgatgaccctcaccggcgtgtacgggttctggaagtacgtgtccaacctggagaggctcgagaccccgcggtacc

SEQ ID NO: 9728 - DNA, 389 bp, Zea mays
  Clone ID: LIB3156-003-Q1-K1-E7
gtcgttattttgggctaagcttgtgtaagaagggtcgtttgacattttgtactgtatggatgctgttttgtgtttctttgttcggagcagcattcaatgctccttttgttgtttgagagaatctgatatttgccatcgtaccgaaagtccgaaaccaactattcaaattgggatttcatttctttttttttctactgtttttagagttctctttttcgctgctgtgctcttgtgggtcagtacgtgcatttctctttttttctttttttttctgatgttactcttctgttgaccaaaggagttcagaattattttggccctgtatatcaatagcaaccaacaccatttattgagcccatttttagttttcttgttctgtagagtatgca

SEQ ID NO: 9729 - DNA, 461 bp, Zea mays
  Clone ID: LIB3156-003-Q1-K1-E8
gccgaatgcaagccctctaacaaaaccattggcactcccattcttggtattctgggggggcttggctgctctgctggcttatgcatgattagtgggatcaagaggtttagcaagtttcaagttgatgtcagattccatgaggtgcactgcaacaagtcatttgttcattcaattccatggttgcacagaaaagatgaggcgatgccaagaaaaagtcgatatgtctatgtgtttaagttaaagggccaaaatgtatttcttgtttggtatatagcagccctacaacactttggtgaacttagttactgcagattatgtaaatacagttgcaccttttgtattttatagcaaacccagaatttttcatttggattctacgactggctctttttgtagtaatatgcaaactttccctgatactccctggttaaaagatttgggggattggggtgaaacaaaaa

SEQ ID NO: 9730 - DNA, 398 bp, Zea mays
  unsure (1)..(398): unsure at all n locations; Clone ID: LIB3156-003-Q1-K1-F1
caaaaaaaaaatctgcggtcccggtttcaaggtggtggaaggctctactgtcctgacggccctgcactgatcgatcatcagctgctggcggaggcgatgcgatgatgatgcaaaactttgtacatgcgttggtggatgatggtgtagagtggctttgtataaaggtgctatangttgngtggccacaacccttttggatatcacacatgacangatatttacctttacattntgtatgcatctgatatggttttgatatttatgccagagatgatttacgtgatggtaaaattagttagtgacgactggaaatttgggagtgttctgtgaaagtaaatttgaccctgaatcctgcgaggaatggctgatcatgaagtttattgtataatttggatagt

SEQ ID NO: 9731 - DNA, 375 bp, Zea mays
  Clone ID: LIB3156-003-Q1-K1-F3
gcaaccgcagaaaagcccaccccatgttctgcaaacccggcgtaacggggaccgtcacggccaccaacttctgcccgcccaacctggcgctgcccgagggcggctggtgcaatcagcagcgcccgcacttcgacatggcgcagccggcctgggagaagatcggcgtctacggcggtggcatcattccggtcatgtaccagagggttccttgcgtgaagcgaggtggagtcaggttcaccatcaacgggcacgactacttcaacctcgtgctcgtgaccaacgtcgcggctgctggctccatcagatccatggacgtcaagacctccaactccactggctggacccggatggcacgaaactggggcgcgaactggc

SEQ ID NO: 9732 - DNA, 407 bp, Zea mays
  Clone ID: LIB3156-003-Q1-K1-F7
ggtctcgtcaccagggagcagtatgtcgtgaagagggttaacattcgaaccaagagcgcgaggaagagaaagagaaacttcaaaagctgcaacaagaagaagaagaattgcaaatgcagaaaaggaaaaagaggagagtgaagagtgatccacgcttatctttctgtgatgacattgagaatggaagtgacgaagatgattttgagaatcaagaaaccaagaaaaatggccctgccaaacttgggaaggatccaactgtggagacaagttttctacctgatagagaaagggaagcagaggaacaagcataacgagaacgactgaagaagcagtggtcgcatgagcaggaattgattaaaaatgaacctctttcaattacttacagttactgggatgggactgggcac

SEQ ID NO: 9733 - DNA, 228 bp, Zea mays
  Clone ID: LIB3156-003-Q1-K1-F9
tacacataattattccattttctaaaaacaaggctaaaatcttcccacggccggaatataaaacgggccccacccctttatcacctaaataaccattcaactcacaagtattaatggacttttcaagaccattgtgccctgttgaactcatgtattaccttgttaagtcccttgtgtccttttttctacctgaccctttcaatatctgattgctcgtttctttaatta

SEQ ID NO: 9734 - DNA, 299 bp, Zea mays
  Clone ID: LIB3156-003-Q1-K1-G11
ttaaggatcaactggtagcaagcttttctgcaaaaaggagtatttgatcattgatggagtttaccttgattcccaatcagctagcaaacccttgagagtcttttctttagtcgggtaagtcttgctgagtaattgcgtactcagggttttatcccctgttgtttttgcaggagaagttttattcccttatcttttggttagttacttcatgtggaggccttgaagcttagaatgtttatgtgtatcaattatggaaaggcttcacccttccaattattataaataagttatgcactttt

SEQ ID NO: 9735 - DNA, 300 bp, Zea mays
  Clone ID: LIB3156-003-Q1-K1-G4
agttcgtgctgaaggacaagaggaggccgttcattttttggatggcgcgtctcgaccgcgtgaagaacatgacaggcctggtcgagatgtacggcaagaacgcgcgcctgagggagctggcgaacctcgtgatcgttgccggtgaccacggcaaggagtccaaggacagggaggagcaggcggagttcaagaagatgtacagcctcatcgacgagtacaagttgaagggccatatccggtggatctcggcgcagatgaaccgcgtccgcaacggggagctgtaccgctacatttgcgata

SEQ ID NO: 9736 - DNA, 182 bp, Zea mays
  Clone ID: LIB3156-003-Q1-K1-G8
cggactcgtgggtggccgcgcgccacatttgcacagccgatggatccttccatgttcgtccgtccgtccgacttggtagaggcaggcagccacaccaataagctagctcttgttgttgttttgtatgtttgattgggtgtcccttcccagtcgagatggaataaaataaatcatcaggcgcc

SEQ ID NO: 9737 - DNA, 330 bp, Zea mays
  Clone ID: LIB3156-003-Q1-K1-G9
cgaaagcagcagcaaagtcatcagcaactccacgatcggtcgatcgatcgggtaccgcggggcgaattcgatcgggcgggtacctgctgctagcgatatatagcagcagcagcagccagcagatcgtcgccggcacgatggccagctcgtcgtcgtcgtcgtcagctctggtcgtcctcgtggtggttctagccgcggcggcggcgtgctccgcgacgcgccccgttcccgctcggcagctggctgcggcggctgatgaggacgacctgaggctggccggacactcttgcacgagggcacggggcttgatccctgggatgggggcgccta

SEQ ID NO: 9738 - DNA, 280 bp, Zea mays
  Clone ID: LIB3156-003-Q1-K1-H7
ccgcggcgacccacacatccgggaaatttataacaaataatatgcaaactctcgaatctgtggatccaacaagtgggcgcggctttttacaaaggggtggaggcatccacatttcattgtctgggacaacagtgatcttgttacccatgaggtgatgggtggcctgaagaatgtctatgcaatcggtgctggaatcgcggcagctttaacaaacgagagtgcaacatgcaaatctgtatattttgctcattgcacgtcaaacatgatattcattactcat

SEQ ID NO: 9739 - DNA, 311 bp, Zea mays
  Clone ID: LIB3156-004-Q1-K1-A1
gccggcgtgtccaccaacaactacgccttggacgaggtcttagaggtgaaatgagtggggccggccggctcaagggctccgcgctagctaccgtgtgattgatttgtagtagttgtgaaatgaggctgtgaagctgcatgctgtgctggctagcgtcacaacatcgatcctatgtgtaatagcataatccacataatcatatcatgtaattgcttgctttattcaccgtgtactcaataatctctcttgctctctaaaattgttgtattgttatatgtggttttgtacatgcacataaatcgctctctgcc

SEQ ID NO: 9740 - DNA, 431 bp, Zea mays
  Clone ID: LIB3156-004-Q1-K1-A2
tctgtcctacagggttggggtaacctggcgtgcatgtactgctttaatagcatcagtggagaagttttttttgcaacatcagctggtctgcttctatggctaggatttactctatggagagatgccattgcctatggcaacagctcgcccttgtcttctttgaaggagctattttttgggaagtgatgaacagtcggcaaccttggttctcttgcactttaagcagctaactgttcccgggtaggacgctctcctgcaataaattatggtagcttttaagaacggtggttcagttgctctcatatggtctgaagaaacggtgcttcagtctttagcattttgaggaggaaacgtgaaacttactggtcagctgaaggctataaacatttgccatggccctggactggaagccccaactttcccaagcctgt

SEQ ID NO: 9741 - DNA, 293 bp, Zea mays
  Clone ID: LIB3156-004-Q1-K1-A4
caagacggctcgccgcggcaagttcctcctgaaggccgacgatgccgtctatgacgagggggtcaagctggccgaccagggcaaggacgctgaagccaaggagctccccgtcgatgaggacctcccaggcctgggacagttctactgcctccactgcgatcgctactttgcaagtgaaagcgtgaaggatgatcactaccgttaaaagcgccacaagaaaaagggttaaggtaatgtctggaccggccccgcacacgcagtttgatgcagaactcgctgcagggatggaaaag

SEQ ID NO: 9742 - DNA, 311 bp, Zea mays
  Clone ID: LIB3156-004-Q1-K1-A5
gccggcgtgtccaccaacaactacgccttgtacgaggtcttagaggtgaaatgagtggggcgggtcggctcaagggctccgcgctagctaccgtgtgattgatttgtagtagttgtgaaatgaggctgtgaagctgcatgctgtgctggctagcgtcacaacatcgatcctatgtgtaatagcataatccacataatcatatcatgtaattgcttgctttattcaccgtgtactcaataatctctcttgctctctaaaattgttgtattgttacatgtggttttgtacatgcacataaatcgctctctgcc

SEQ ID NO: 9743 - DNA, 275 bp, Zea mays
  Clone ID: LIB3156-004-Q1-K1-A6
ccgggccgacccacacgtacgattttctttgaaaacattttctctcttacttattgcaactgccttgctttcctagtggcggtcattctaaactccactgcaagtctcctctatctatcaacaattttattatttttacctactaattaacccgaacatcaacccaccaccttttatgcattcctatataaaataattcgactacatcccattctctcaccatctactacacttccaaaccaccatagctaagattgtcactgtcacctcactcc

SEQ ID NO: 9744 - DNA, 359 bp, Zea mays
  Clone ID: LIB3156-004-Q1-K1-A7
cccacgcattcgtaatgtttttaacgttagtaaaccctctcctccttatgctgaataggcaaagaaagggggggaggtacaaaaacagtctttgattgtcctcctttcaaggcttgctgaggcatcagatggtgaaagtgactggcacatatcctggtctaatgaactttgatgctattaatcatcttttagctaacctattatggagccatgccccttggtgacagaactgtttccattatatatacttcattaacgcatgcacaacatataataactgtctgttttacaatttatcgctaatatttattctggatttaagtctctaggctcttttgctttgggatgcttttttttta

SEQ ID NO: 9745 - DNA, 390 bp, Zea mays
  unsure (1)..(390): unsure at all n locations; Clone ID: LIB3156-004-Q1-K1-B1
gaaagtttttagcgttagcaatcctgatccacaggaagtagaaaaggcaaagaaagcggtgaaggagcaagaacagtcgttgattgacgccatagcaaggcttgctgaggcatcagatggtgaaagtgacgggcacaatcgtgggcgaaggaacttgtatgctgctaaccagcatcaagcaagctacgttggtgccatgcccgtcggtgacagagctggtgccatgtaaacactgcatgaacgcatgcacaacataaaataactgcctgttgtacaatctatcgctaatattaatcctggattaagtctctangctcttttgtttgggatgcttttttacaattgaatcagaacctgccatgtaagcttcagatcgtgttctgcttagct

SEQ ID NO: 9746 - DNA, 366 bp, Zea mays
  Clone ID: LIB3156-004-Q1-K1-B11
gaaaaaccgtcccgaccgacgcgtccgggcaaagcttcgctagaggccatcatcacgccataatatgccagagagcatactatgcaggtggacttccgtggcctgcgccttcttctttttctacgcggcggatcctctttgctagggcgggcggcggctgcagctgtaagctctggacgcctgcgcgctctgcttcaagccgttggcccgcaacagctacatcttcatgtacaggggcgacaccccgttctgcagcgaggactgccgcttctagcagatgcaccacgacgctgcggtcacagcctacgctcggcatcaggccatcagtcggcggaggcaacatctgagcatgggctgttttgtgtc

SEQ ID NO: 9747 - DNA, 247 bp, Zea mays
  Clone ID: LIB3156-004-Q1-K1-B12
gagacgggcacgggatgaaaaaaatctaaccctagcatccgcatccctaggcttcggcgaccgactcctgtctggtgccggccccatggcgacaaggccctatagatactctcgactaatcaagaacaagccataccccaagtccaggtactgccgtcatgtccctgacctccctaataagagctacgattttggcatgaaaagaaaggctcctgatgaataacactactgattgcgccttggctct

SEQ ID NO: 9748 - DNA, 439 bp, Zea mays
  Clone ID: LIB3156-004-Q1-K1-B2
ttggagttgaatgttaagcatctgttttcgtacattggcacaaaccctgctaacgatgagaacacgtttatagaagacaactcgttgccatcattgtcaaaggctgttaatcagcgcgacgctgaccttgtctacttctggcagaagtaccggaaattggcagacagctcacctgagaaaaatgaagctcggagggagttgcttgaagtgatggcccacaggtctcatgttgacagcagtgttgagctcattggaagccttctctttggctctgaggacggtccaagggttctgaaagccgtccgtgcagctggtgagcctctggtcgatgattggagctgtctcaagtccacggttcgtacttttgaggcgcaatgtgggtcgttggcgcagtatgggatgaagcacatgcggtccttcgcaaacatctgcaacgctg

SEQ ID NO: 9749 - DNA, 422 bp, Zea mays
  Clone ID: LIB3156-004-Q1-K1-B4
accggatgtaaaaaaaaacacgaagcagagagcattatactgcttgcttctattgagagcgatgcaatatgttgttacaataaatgttcttcatgacgccttctcatcttttggatttgtacaaaacattgctatttttgagaagaatggcttttaagcattgatccaatgtccatacattcaaactgcgtatgcagcaaaagaagcactataagggcacaccatctatgaaggtggctactgctaaccgaacctcacattttcactccatactgaacttaatgtataggttaacaatgagcgatgtagagattattccaatgggaatgccactccaagcagtgatcaacctttctttcttggggcctaaccaataccaagcgttggtgctgctatttcaccaccacatggtagatttcttc

SEQ ID NO: 9750 - DNA, 271 bp, Zea mays
  Clone ID: LIB3156-004-Q1-K1-B6
cccactcgtacggcgcttcatcctctcgctccatccgcttcacagcgcctacactctcctttccaagtgcggcgtgatttcctagcaagaaggttttttatatcgtacgcgtgttccttatgaactactgctaacactacttccttctcgttgttattgtcgataaggacgacctattcatctacttgtggacaccccccatttgtttatgtgccatataactcaaaactgcttttttttacccacattaatattcgaatttaacctctcc

SEQ ID NO: 9751 - DNA, 358 bp, Zea mays
  Clone ID: LIB3156-004-Q1-K1-B8
atcggtatccattgccggacaaatctgctcctctttacataaccggcggttatagagagaggcgctttaaggactcgcttcaaagttttataacccccatccggattactcaacgttcatggaggccagctatagacactcagttttgcagctgaaaaacaagacccatgctatctaccagtggaatataaacaatgatgggaatcctgttccaacagacaccgtgatgttccataaccagcattgtacgagcagcacgcgcctcatgaggctgtaaaagaaccatctccatcttgaggacctttatgatttgatctccctattatataaaaccgtgttctcaggacgcattaacttt

SEQ ID NO: 9752 - DNA, 388 bp, Zea mays
  Clone ID: LIB3156-004-Q1-K1-C1
cggacgcgtgggcggacgcgtgggcggacgcgtgggatcttctggcgcagtccgctgtggtcgtcctgaccgagaagagggtgccgcatcggctgcttgagatcgccggtgtcgccgcgttctgggcttggtacccgttgctggtggcgtgcctgccgaattggtgggagagggtggcgttcgtgcttcttagctttaccatctgcgggatccaacacgtccaattcttcctgaaccacttttcgtccgatgtgtacgtctggccacccaagggcaacgactggttcgagaagcagacggcaggcacgctcgacatcctgtgccctccttggatggattggtttcatggcggcctgcagttccagattgagcaccatcttgttccccg

SEQ ID NO: 9753 - DNA, 363 bp, Zea mays
  Clone ID: LIB3156-004-Q1-K1-C10
ttcagtaacaactataaattattcacgaccaccactcatagacatgcggggaatatataattatagtgcggcgcccatatcctcctttgtaccaatacaagccaacactagtagatgtattattatttatattaatacgctttcacatacatgtacctctgctacctgaaaaaggatgtgattcgagttatcaaattaaaacacctgccacaaaaaactatatatttttcattaaaaaaaataaataaaaaatggccgcctttctatatgatccaaacttactatctcgtgccttctatatcataaattattttatatatctaacctaaaatccaaatttacttatccgatctttttaacaac

SEQ ID NO: 9754 - DNA, 366 bp, Zea mays
  Clone ID: LIB3156-004-Q1-K1-C2
aatcggtatccagtgccggacaaatctgctcccgtttacataacggtcggtgatggaggcaaccaggagggacttgcttcaaggttttataacccccagccggattactcagcgttcagggaggccagctatggtcactcagttttgcagctgaaaaacaggacccatgctatctaccagtggaatagaaacgatgatgggaatcctgttccagcagacaccgtgatgttccataaccagtattggacgagcagcacgcgccgcatgaggctgaagaagaaccatctccatctcgaggaccttgaggatttgatctccctattatagaaaaccgggttcgcaggacgcatgaactgtgtgtggggg

SEQ ID NO: 9755 - DNA, 314 bp, Zea mays
  Clone ID: LIB3156-004-Q1-K1-C3
gatgtggctgcagaaccaatccaagcgcgtggacagggcaaagacaccctggcttatggctggcatgcattcctccatgtacaacatcatcaccgcacatcacatggctggtgagagaatgagggctgctttcgacaaacggtttgggaagtacaaagccgactcggtgcttgcaaggcacgttcatgcttatgagagatcataccgcattcctaatgcccactacaacataacgtccggaaatcggcatgcagcgcccgacaaattaggttccgtatacaataaccgtcagcgatggaagcaaccagaaggga

SEQ ID NO: 9756 - DNA, 434 bp, Zea mays
  Clone ID: LIB3156-004-Q1-K1-C4
gctgaacgttcgggaaacaacttatacaatacatgctgcatctttggttcagatggcaggcggaagggtaaacatagaaagatccatctttttgacattgacattccaggaaagatcactttcaaggaatcgaagactcttactgctgggcagaatcctactgttgtagacacagatgttgggcgaattggtattggtatatgttatgacatccgtttccaggaattagcaatgttgtatgctgcaagaggtgctcatttgttatgctatcctggtgcattcaatatgactactggaccactgcattgggagttgctgcaaagggcaagggctacagacaaccagctgtttgttgcaacatgcggcccagcttgagataccagtgcaagatatgttgcttggggacacttcactcttgtggaccttttggagag

SEQ ID NO: 9757 - DNA, 380 bp, Zea mays
  Clone ID: LIB3156-004-Q1-K1-C9
cgcgtccggggcaagcgcttaaccttaacctgatggtcgatcctgtcctggtggcaatagaccccgggtgtccttcaagacggtcttttgtttcttgattactcctcattctcccaatccgtttttccacgccgtgattaccttctactggaggcccttcttcaccgaccgctccttgttgaggctcctcggattcgttctgaccactaacatcatcaacggcggtctaaagtgcgtctagtacctctccaccttcttctccatatccttcattgaccgtgtcttcttctacaataggtactgctttttgctcaaattgttgtactttgacaactttgtatgcatgatccataatccttttggatgatgattactctatt

SEQ ID NO: 9758 - DNA, 202 bp, Zea mays
  Clone ID: LIB3156-004-Q1-K1-D12
caatctaatctaatcctttttctctccaccccttccctctcatattaccctttcttctaaattgtattttaaaagataacacagtactattattcattccaacatcaactttatatcactattttacatcaccttcctatcccctaattttatccttataatcctatctcctattttacatatattcacatactattactta

SEQ ID NO: 9759 - DNA, 398 bp, Zea mays
  Clone ID: LIB3156-004-Q1-K1-D2
tgacgatgaaagtggtagcatacttttgttgctttcctggtgcctaactatcttttaaagtttcatttagatccaaaaaaaaaaaaaaaaaaaaaaaaaaaaaaaaaaaaaaaaaaaaaaaaaaaaaaaaaaaaaaaaaaaaaaaaaaaaaaaaaaaaaaaaaaaaaaaaaaaaaaaaaaaaaaaaaaaaaaaaaaaaaaaaaaaaaaagggggggccgtttaaaagaaaaaaattttattacccggtgtttgcaaggaaaaatttttttaatggggccacaaaaataaaataaatgggccgggttttaaaaacgtggaaatgggaaaaaccttgggtttaccaaattaaatcccttggaaaaaaatccccttttcccaagtgggttaaaaacaaaaa

SEQ ID NO: 9760 - DNA, 238 bp, Zea mays
  Clone ID: LIB3156-004-Q1-K1-D4
cggctgtttgatcatgtgaaataaagatggacctgtctagcggctggaccttgtgtacgtgtgactgagatagactaatgcacggcctgccgattttgttcgtcctgcttgcgtgctactctgtctctgctcctagtttttggcatcatgtttatgttgagcaaggtgatgcccaagggaagccattcccactcttgtctccattaataaaatcagctgagcttccgatgtttgcttg

SEQ ID NO: 9761 - DNA, 416 bp, Zea mays
  Clone ID: LIB3156-004-Q1-K1-D5
gttggatttcctgtaccccagcgagggcatccaccggcgctgggagagcggctacaggagaacttccacggcagccaccaacgaccaagccgctttcatcctgagcatgccgaaacggaagccgatggacgagacacaggaaacgctgcggacctccgccttccccagctcacacgtcaaggagaaatgggccaagaacctctacatcgcttcgatttgcttcgggcggaccgtgtgctgatcgcgcgcgcctgggaaatggaagtcgaagcgagggccaccgatccggtacggtggcgcctcgcatcaagagatgcgagatggggcgtcaagtcgaaaccagttctaatgataggatcagtgtatctctgaagatacggtatgggttaccctaccgtatttgtaaagtaatgatg

SEQ ID NO: 9762 - DNA, 374 bp, Zea mays
  Clone ID: LIB3156-004-Q1-K1-D6
ctttggggtcctgcagacttgtggcgctccttatctgactggagatacaacaagagggggactgtagctgcacatctactaccccactaactcccaacatcaaccaatggtcatccttcacatgtgcctcactcttctggacactaagaaagctatagtcttcttctagactaacgctgatggcaacacatcatctcccaaggaaatgactatgctcttttgtatctctgaaattatacctgagatagagaactgcgattttgacttccaaccctgccattacttcatgaatgcaatccatggctctcctttctccaccatccatgtgacaccagatgatagtgtcagatacaccagtgatcaggatatggtct

SEQ ID NO: 9763 - DNA, 88 bp, Zea mays
  Clone ID: LIB3156-004-Q1-K1-E1
gttttatttggttattttaaatacatcacttttattattaactatatgtatcccgatatatatatatctacctcattgcaattttgcc

SEQ ID NO: 9764 - DNA, 390 bp, Zea mays
  Clone ID: LIB3156-004-Q1-K1-E3
atgactgcagaggattgtgatatagagtaaagaattttgctgacaaggacagaatattggttgtagagtagaaatttagagttatatgagtgcggacagcctcaaaacggaactgctactgccagggcagtgagctgtttcggtccgttccctctgctcgggtgctggctctgcaactgttcgtcgccaaggatgggcctgtggccaaccgtggatggagtggaccgtcctctcctgtctatccatctggaacggaactctggactctgacccttgttgggtatctggagcagcagattcggcggttccctgttcggtctccagccggcggatgtggatccattcattacggtaaaagctgcttcagtcccttgccgccggtctggtggc

SEQ ID NO: 9765 - DNA, 418 bp, Zea mays
  Clone ID: LIB3156-004-Q1-K1-E4
cattcatatgcttgactgcaaattcgctcgctgagcttcctgctggcagtgttgctggaggtgcttccttgcgtagacaatctcaaattctttacagatatccatcactgaaagtagttaacttcacaggaaatgttcatacaccgttaaggaaactcaagttaggagatttgtctgctacattgttgacgctggctggattaacgcggctaaatatggcacaaaacgcaacaactgtactatcactggaagaaatgcttccagcagttgcccaacgtgctattggaatcgcttgccgaaacaacgatgacaaaatgatggagtctctgtcctcgtcgaaccaccaggataccacgactacctgtaccatgctaaagagaattcttggcactacatgatggcaactgccgaacttcaa

SEQ ID NO: 9766 - DNA, 367 bp, Zea mays
  Clone ID: LIB3156-004-Q1-K1-E7
cacaaatcaactttactgctacctctgctagatgtcatacttccactaccttaacgagggctatctactccttcgccccttaaattacaacatcctgtttaaattaagacatgtaaaggtctcataaataatgcttacacctgcaattcttcattttcaaaggattttaaacacttctatattatctgaagtgcaaaaacatcaatcctttatttttttctcaaccactttatattacttttttttagggaaaaaaaccaaacagttattttatgtattaactctattaaatttttttacgcttggcctattataaatctttttacattttcattattcttttctttttaaaataaatcgtctttat

SEQ ID NO: 9767 - DNA, 390 bp, Zea mays
  Clone ID: LIB3156-004-Q1-K1-F1
ggaagactggtgtggcagtataggctcggtagaagaaatgaaagctaagacattaaaaaggcgggaggctgctgctaagcgggaaagggcgatggcatatgctttaacccatcagtggcaggcaagttcaaggaaacagaaagcagcaagcctccaaggccaaagactcgccggggacgagaaccagtggggacgaaactggctcgagaggtggatggccgcgcgcccgtgggagaacaggttacttgacagcaacgccagggacagtgtcactgccggcgacgacgacgacaaaccagcggaggaaggcaaggcaaaagctccggacctgagcaaaccaaaaggaaaagctcccgttttggcctctcagtctaacgggtcgcggcaaga

SEQ ID NO: 9768 - DNA, 433 bp, Zea mays
  Clone ID: LIB3156-004-Q1-K1-F12
ggctggccgtcgctggctcgctgctacttcggccccttcgccagcgacgataacccacgctggtatccgagggaaaattttctatgtgctggttggaatggcgagtacagcatgctttgtaattgtcagtaagaatgatatcccaatctacgaggcagaagttggatctgcacccaaaaggatttgtcttatcaccatcagtttatcctgcatgctgcgttagatgttgttcaggacgtagcatggaccacaaatgcaatgtccctgaagtcagttgatagattcaatgaccttgtggtgtctgattatgtaactgctggtcatatcctttttaaaaagcgaagattgtctgactgttgttttaaaccacatttgcctatgtctcattatgtttggttttcaaagtttaatcataggatttactatacttttc

SEQ ID NO: 9769 - DNA, 429 bp, Zea mays
  Clone ID: LIB3156-004-Q1-K1-F2
gtgagaaccttggcatagccgccgagcatggctacttcctgaggtgtaagagggacgcggaatggaagacctgtgtcgctgccacagactgcagctggaagcagatcgcggagccggtgatgtgcctgtacagggagacgacggacggctcaaccatcgaggacagggagacggtgctcgtgtggaactacgaggacgcggaccccgacttcgggtcgtgccaggccaaggagctcgtcgaccaccttgagagcgtgctcgcgaacgagcctgtgtcggtgaagaccacgcctcactcagttgaagtgaaaccgcaaggcgtgagcaagggcttggtggctcggcgcatgcttgtgtcgatgaaggagcggggccagtgcccggacttcgtcctgtgcatcggcgacgacaagtccgacgaggacatgt

SEQ ID NO: 9770 - DNA, 435 bp, Zea mays
  Clone ID: LIB3156-004-Q1-K1-F4
ctggctgccatctcctccacgaggtgtcttcttcgtcgccgctccctgcgtgattaccgtgggcagcgccctcgactactcagccatggaggtcgctgccccttcttttcctgatctccctccatcggttcaaagctcggcgtccctgctcctgtccctcccatggacgccgcccctccctcagctcactccctctagccgccatggagctcgcccctgtccaaattcggttgcctctgtttccccctctctctgttggtggctggcatcccatctcccctgcgttggacggctgccgcttcgttctcgtcgctggcgttcgtccctgctccagctagttctcatggccatgcctctgttccctaggtccgagctcgcccaactccctagccatctctgctcgcccctctctgtctctgtgcgagcagcagcacg

SEQ ID NO: 9771 - DNA, 302 bp, Zea mays
  Clone ID: LIB3156-004-Q1-K1-F6
gtacgttgtgtgcatcatcagtctctctatatatatgctggaaataaaatgtgggcaggagaccgcagtgttaatatataatcagctgcatatgcatgcatgggaagcagttggtgttagagaatgtggcaggcagtatgtttattggcgtcctatggatgaccttttacttccaaattctgttttcaatcggttttattttatacactatcggaatcagcttttttggtcgagtgtctgaagcacttgataacaaataaagctcggcgaactgtacatcgacagcggcttctttgccaagt

SEQ ID NO: 9772 - DNA, 208 bp, Zea mays
  unsure (1)..(208): unsure at all n locations; Clone ID: LIB3156-004-Q1-K1-F7
gaanagggggccgcacccacgcgtacaattaattttttacttcatcacactctctatatatatactgatattaaaatttatacagaagaccttatattttatatatcaccttcttcatattcttttatttttattccatttcttctgaaaatatttctttctttttaataatcgacttcctatttattaccttttacttacaaaattt

SEQ ID NO: 9773 - DNA, 376 bp, Zea mays
  Clone ID: LIB3156-004-Q1-K1-F8
cgccttcctcggcttcgccgtgcaggccgccgccaccggcaaggggccgctcaacgacggggccacccacctgagcgacccgctccacaccaccatcttctacacgttcggagggtcctcttaagcccgccattgctccgccccgtccatcgaccggccggaacgtgttcttggattaattaactacgatctctatgagcctggggatggatcaacccgtcgtgcgtggtctcgttttgtgatgagtggaagagagaggatggcaagatcgatcctttgttaatggagatctcgttaattatgagagctaccgctgggacttggtggtttgtaatatatgatccaaccagtgatgaatcaatgcattcacttgtgt

SEQ ID NO: 9774 - DNA, 421 bp, Zea mays
  Clone ID: LIB3156-004-Q1-K1-G1
tacaaaaaacttaaacaaaaaagacaaaaaacataccaaaaaaaaacaacttaaaaaaaggggcgggtgacaatacacaagacagaagtttaaagccaaaccaacagaagcgtacaaaaaacccgtggtacagacccaaccgaatagctgtacctgagcccactgtccagcaaagcctccgaactacctaacagacgagggggcgcggtctactacggctgggacaccgtggcgctgtttgcagacccatagacttttttcaagaacccctaactggaggtgatccactcccgctttaccatgctgggcgcgctaaactgcgtctttccccaacttattgcccttaacggcattaagtttttcgaggccgtgtggtttaaggaaagatcccagatcttcagctatggcaaactggactacc

SEQ ID NO: 9775 - DNA, 332 bp, Zea mays
  Clone ID: LIB3156-004-Q1-K1-G4
gccaaactgtcctctgccaacccacaggaggaaaggcaaggctcactgagggctgctcgttccgcaggaagggagactagagcggatgtggtcttcaagttttgctctatgccagatactagcgtcatgaactgcctttagctaagattttccataagttgttctcgagcagctatgtgttgcatgttggctacttccaaacttatatctggtttggtttggattgtgatgaactaatggctctttgaatttatattatgatgttgacgatatttggtgaaaaaaaaaaaaaaatataaaaaaaatattataaataaaaaaaaaaaaaataa

SEQ ID NO: 9776 - DNA, 435 bp, Zea mays
  Clone ID: LIB3156-004-Q1-K1-G5
acggccttcgccggcaaggccgtgaacgtgccgtcgtcgtccgccttcggcgaggcccgcgtgacgatgcgcaagacggcggcgaaggccaagccagcggcggcgtccgggagcccgtggtacggccccgaccgcgtgctgtacctgggcccactgtccggcgagccaccgagctacctgacgggcgagttcccgggcgactacggctgggacaccgcggggctgtcggcggacccggagacgttcgccaagaaccgggagctggaggtgatccactcccgctgggccatgctgggcgcgctcggctgcgtcttccccgagctgctcgcccgcaacggcgtcaagttcggcgaggccgtgtggttcaaggccggctcccagatcttcagcgagggcgggctggactacctcgggaacccgagcctcatccacgcg

SEQ ID NO: 9777 - DNA, 419 bp, Zea mays
  Clone ID: LIB3156-004-Q1-K1-G6
caccaaggaggggaagctcaccgtggagcgcgagaaggtgaagatcgagacgcaggcgtggtcccccgtggtgcagttcgagcaggaccccgtgcagatcctggacgcgctgctcccgctctacctcaacagccagatcctccgtgccctgcaggagtcgctcgccagcgagctcgccgcccggatgagcgccatgagcagtgccaccgacaacgccatcgagctccgcaagaacctctccatcgtctacaaccgacagcgccaggccaagatcaccggggagatcctcgagatcgtcgccggtgccgacgccctcgctggctgagcctgagtccccttggtggggcggtgctcctgctatatataaaactttttcctcattttcttcactctggcttgtaatttctgataatagcaca

SEQ ID NO: 9778 - DNA, 354 bp, Zea mays
  Clone ID: LIB3156-004-Q1-K1-G8
ctgcccatttcctgtatttcttgaaggccattttacaattctgcggcgcttctcaaatgattggaccagtttactttgaaaaaagtgtggattactggcagcaagataagatgtactgttcaattccctgtgaagtggcacatattgaaggatgttcccaataatcttttcctacatataattcttgaaaacaacgacaataaacctgttacaaacaacataaatacacatgatgtgaatcttgatcaaagaatggatattcttaagatctttaataaccatgatgatgatgcatcaatccttttctacttttaactttcactaggaccctgacaaagctcttcaagaaaataa

SEQ ID NO: 9779 - DNA, 122 bp, Zea mays
  Clone ID: LIB3156-004-Q1-K1-G9
tataaacaatgaggttatacttttggtggcgccatccggtctgattgcgtactagtgtggggcgtatttaaaaaaaagaagaaaaaaaaaataaaataaaaaaaaaatattaaaaataaaaa

SEQ ID NO: 9780 - DNA, 225 bp, Zea mays
  Clone ID: LIB3156-004-Q1-K1-H1
ggcgccgtgacaccgtgagttcaagcatggttcgttgctgtcagcgcttggaaagtggagttactgagttgttgggttctgcttaaaaaaaaaaaaaaaaaaaaaaaaaaaaaaaaaaaaaaaaaaaaaaaaaaaaaaaaaaaaaaaaaaaaaaaaaaaaaaaaaaaaaaaaaaaaaaaaaaaaaaaaaaaaaaaaaaaaaaaaaggggggggccgttttaaaaa

SEQ ID NO: 9781 - DNA, 341 bp, Zea mays
  Clone ID: LIB3156-004-Q1-K1-H10
cggacgcgtgggggaaagcacatgggttcagagcttgtgcagagggcagcaatcaatgggagggctgagagtgtaatgggattcaatacgaattacaaggacactggtctttttggtgtctatgctgttgctaaggctgattgcttggatgatttggcttttgcaattatgcatgagatgagcaaattgtcataccgggttacggaagaagatgttatccgtgcacgtaatcagctgaagtcctctattcaacttcaccttgatggttcaactgctgatgttgaggacattggccgtcagctgctgacctatggactaaaaattcctaccaccgatctttt

SEQ ID NO: 9782 - DNA, 368 bp, Zea mays
  Clone ID: LIB3156-004-Q1-K1-H11
gagcatgatgcggacatggtaagcagcattcgcaggaaccctagcgccgccgcacccgcaggaatgggtatcgacctcgtcgccggtgggaggaataagaagaccaagcgcactgcgcccaagtctgacgatgtctacctcaagctccttgtcaagctctaccgtttcttggtcaggaggaccaagagcaatttcaacgctgtcattctcaagaggtttttcatgagtaaaaccaaccgaccaccaatctccatgcgccgtcttgtcaagtttatggaaggaaaggagaagaacattgctgtcattgttggcacagtcacagatgacatacggattccatgtgttccagcattaaaggttactgtcct

SEQ ID NO: 9783 - DNA, 360 bp, Zea mays
  Clone ID: LIB3156-004-Q1-K1-H12
gaaaccgggtctagaggatattaaagaagttgagttgttcatatggagccggcatctggccagaggtgcatgttgtactatgatcgtgacagtgtggctaagtcactgtggcgagttttctgcagcagtaaatatatgatgtaatgttcattaattatcaatgtgctatgattttctttttgttgtcttattttcgatacatgtaaatgtcgaattactagccgtgagaatagagagttcaagcctatagagcttgatatgtttgaccaaagtaaatgtatcttcttaaaaacatgaaagtcaattgctttcttttttatcctctataaaaaagcacaaagtgaaggtgatggttttttg

SEQ ID NO: 9784 - DNA, 314 bp, Zea mays
  Clone ID: LIB3156-004-Q1-K1-H2
ggaccaccttacgcaagagcccatcaatgagtacgtccagagttgcgacattgtggcggtcaacaagatctagagttcagtttctgagattgggcaacggcagcggctcagctcgtcaagtttgtgctgggatgccagtttatcccttctagtctattacagaaatgttgttcggagctgagtctattataaacatcttggtctgagtttattgttgagtggtgccagtttttttcaatatacatttatcttaaaaacagcggtactgatgtttttttgtctaaagttaatgagtttgcaatggttctgagtct

SEQ ID NO: 9785 - DNA, 268 bp, Zea mays
  unsure (1)..(268): unsure at all n locations; Clone ID: LIB3156-004-Q1-K1-H3
tggtgaatgatcaagttggaagcttttagtctatctttgntnananaaaatnatnnnntggtagcggttttttatttttttttcttaaattaaaaaaaaaaaaaaaattaaacaaaaaaaaaaaaaaggggccgcccttttaaaaaatccaaacttacgacccccgccattcaacataatatcttttttttattgtcacctaaatttaattcacttcccccctttttacaacctttttacttgtaaaaacccttcttttacccaactt

SEQ ID NO: 9786 - DNA, 441 bp, Zea mays
  Clone ID: LIB3156-004-Q1-K1-H4
gcctgctacacccctgccaagatccatctttccggttccgccgcctgatcgaagtgaacaagcaaggaagagccatggcgagcgagcacgcggcggggggcgatgctaagcatcaccagaagcagagcctgatggacaaggcgaaggggttcgtcgcggagaagatcgcgcacatccccaagcccgaggccacgctggacggcgtgacgttcaagggcctgagccgggagtgcatcacgctgcacagcagcgtgaacgtgtccaacccctacgaccaccgcctccccatctgcgaggtgacctacacgctccggtgcgccggcaaggaagtggcgtccggcaccatgccggaccccggctggatcgccgccagcggctccaccgcgctggagatccccgccaaggtgccctacgacttcctcgtctccctcgtcagggacg

SEQ ID NO: 9787 - DNA, 383 bp, Zea mays
  Clone ID: LIB3156-004-Q1-K1-H5
ctccaaccctttccccaaggcggcggcggatgtggaggtggacgaggactacgacggggggcggtacaagctgacgggccccgtctgcgaggaggacttcgacccgtcccgccccacctgctacaacaccagcaagcggtcggagcggtgcgccgccgtgggcgacatccgcgtggacggcaaccactcgcggatctacatcagcccgctgtcccgcgagtggcggaccaagccgtacgcgcggcggcacgacgccgtggccatggacgacgtgcgcgagttcacgctggtccccttcggcggccccaacgacacggccgtgccgccgttctgaacgcgcacccactccgtcccgggctttcttttttccagcgggggtttcg

SEQ ID NO: 9788 - DNA, 401 bp, Zea mays
  Clone ID: LIB3156-004-Q1-K1-H7
ttgtaaaaaggcttcaatcaaaccatcttgcttagaaaggagaagctgaggtgttgtgcagggatgggtatcgatcttccatggggtccaaccggtcgccgctggaccttcatctaatatggatagtgaaagtcaactagtgcaacggaggaggcaataagcaaccaaagaagacatcaaggtttctagctcgttcaagtgacaactcgttagccatgcttggtttaagacagccaagtgcaagccatgaatgtccacaaagggaattacaaggcctagagacgtgactggtgcttggaagaagaatggtgggggacagaaactctttttgatcaattgacgggagagtcattgcaactgcatttagacgtgtccatatacttatgtatttttttaatttt

SEQ ID NO: 9789 - DNA, 338 bp, Zea mays
  Clone ID: LIB3156-004-Q1-K1-H8
gtttaaaaagcttgtatctaccttatttccgttggctctcgcggtacagataggagggcgaggtccaagcatctcgccccaacaagccaatgcaggcatgatacgaaggctgtaccacagctcccacttttgccacatgttacgccactttgcgtgactaaacatgcaaaaaagccactaggatggcactggctttaccactctaccgtaacttggatctgcaagcaagaactacgacaacataggtgccggagctgtcttttcagtacactcactcagtgcataggtccatactaacgccctccttgtactatgataaacacaaggtgaccattgta

SEQ ID NO: 9790 - DNA, 375 bp, Zea mays
  Clone ID: LIB3156-004-Q1-K1-H9
aaaaaaaaaaaaaaaaaaaaaaaaaaaaaataaaaaaaaaaaacaaaaaataaaaaaaaaggaaaaattaaaaaaacatacatacaaacatatttcgatttttattaaataatctaaacccaattaaaaattaatataaatttacaacattccctaatttaaaaaaccaaaaaatttaccatattaaaacaaaattaataaaaaattccttttgcgcccttttttaggattcccatttattccccccccttttctccttttccttttttttttttgtctcaccttaaattttatctctccctgctttttccccatccttttctttgaaaatctcttttccccccaatttaactttttttcttgccatttcccttt

SEQ ID NO: 9791 - DNA, 159 bp, Zea mays
  Clone ID: LIB3156-005-Q1-K1-A1
aagcaatcaccctagcaaagcagcgcggagcgacgatccatcggtatttcatattagacgtacggttctccatcatctgatgcgacacgcagtgcattggctacagtactgatcacgacagagcacagcactccggcctgccatatgctgcaggatctt

SEQ ID NO: 9792 - DNA, 306 bp, Zea mays
  Clone ID: LIB3156-005-Q1-K1-A11
cggacgcgtgggtcttaggctgtaagtgtcatttcaaatatagatttcagactcatacaaatcggacgagcattgaataagaaaagaataattttatatttgcatccacagtagacagtacttgattgccatttgactgatatttatgttgaccttgaaagaactgagcataggagaagaaagtttcacaccctcagatgtcgagagagcactgtggagctcggcaattgcgtccaagtcaccaccaagcggtaacccaaagagggaatcaaagatgcatggcaagaggaaaagatgatttacacc

SEQ ID NO: 9793 - DNA, 170 bp, Zea mays
  unsure (1)..(170): unsure at all n locations; Clone ID: LIB3156-005-Q1-K1-A3
gcctctcctccttcagagctcgtcgccaccggccaccgncaccctcgatcacgccgtncgtcgaggtaaagtcaacatggtgagggtcaatgtgctcaacgatgcgctcaagtccatgtacaacgcttagaaaattggcaagaagcaggtcatgatcaagccgtcattca

SEQ ID NO: 9794 - DNA, 81 bp, Zea mays
  unsure (1)..(81): unsure at all n locations; Clone ID: LIB3156-005-Q1-K1-A4
gcggaaggagtcggagggaaccgaaaactcagggtctcgaatttcctaagagcggangcgatggcttggaaaggaagaaaa

SEQ ID NO: 9795 - DNA, 281 bp, Zea mays
  Clone ID: LIB3156-005-Q1-K1-A6
atggccccgaagaaggacaaggccccgccgccgtcgtcgaagccggccaagtccggtggtggcaagcaaaagaagaagaagtggagcaagggaaagctaaaggagaaggtaaacaacgcggtgctgttcgaccaggctacctacgacaagctgctctcggaggtgcccaagtacaagcaaatcaccccttccatcctctccgagcgtctgagaaccaacggctcccttgctcggagggccatcaaagacttgatggcgcgtgccctcattcggatggtctc

SEQ ID NO: 9796 - DNA, 347 bp, Zea mays
  Clone ID: LIB3156-005-Q1-K1-A7
atcgtcttaaatagtttaatgcgccgggcctagttctacatctataactccctccgtggaggtacggcaagcaagtctagttcgctctgcgctcacaatatctgctcaactgcatgtacaagcagtgggaagatcgacggtagccccaacatgaatcggaccgtactcagggacatcatccaatgtgatcacgaggccgcagatccagtggctacactaggacagggcgggtaggtcgattactcaccgctcatgcacgattatagtcgcactaaactcgagatcttacaagtgaaccgtattcaccactcggtcttatattctcatgaaacacatctagaaatcga

SEQ ID NO: 9797 - DNA, 277 bp, Zea mays
  Clone ID: LIB3156-005-Q1-K1-A8
gtgagattgaaagcgcacggtgccaagtaggccttaaagagctcccaaaggattctgcgctgtgtagatggaggggaagggacgatgtggtcgaaatctacagcagatgttatcagagctaccgtctggggatccaaggcgcacgagctgccaaccacaccactgccgcccgcgttcttgctgcataatccacctccaagacctgcaccagactaaggcttgatcgctgatcggtatccacaccagcacataatcttgattcatgcagggcaccata

SEQ ID NO: 9798 - DNA, 488 bp, Zea mays
  Clone ID: LIB3156-005-Q1-K1-A9
ccctctcaaacctccgcgctcccgcccagctagggtttccccgatctcccctcctcctcaaccggcggcgtctccgagagcgccgccacgatgttggagctgcggcttgtgcaggggagcctcctcaagaaggtcctggaggcgatccgcgagctggtcaacgacgccaacttcgactgctccggcaccgggttctcgctgcaggccatggactcgagccacgtcgccctcgtcgcgctgctcctccgcgccgaggggttcgagcactaccgctgcgaccgcaacctctccatgggcatgaacctcaacaacatggccaagatgctccggtgcgccggtaacgacgacatcatcaccataaaggccgatgacggttctgacaccgtcacctttatgttcgagtcgcccaagcaagataagattgcggatttcgagatgaaactgatggatattgatagcgagcacctcggaatcccggattccgagta

SEQ ID NO: 9799 - DNA, 373 bp, Zea mays
  Clone ID: LIB3156-005-Q1-K1-B1
gaaaaaggaaaggaaaggacgaaggagcggcggcgaggtctatggcgtcgacggcggggtacctggcgcggcgggcggcgcagaaggagcgggtgcgcctgctctaccgcagggcgctcaaggacacgctcaactgggccgtccaccgccacctcttctaccaggacgcgtcggatctccgggacaagttcgaggccaaccgacacgtggataacctggacgtggtcgataggctcatcgacgatgcggaggctcagtacaggaacttccagcaccccgatccctacattgttccatgggcaccaggcggcactaaattcacaagaaacccccctccacctcaagggatcgagatcatctacaattatggcaa

SEQ ID NO: 9800 - DNA, 310 bp, Zea mays
  unsure (1)..(310): unsure at all n locations; Clone ID: LIB3156-005-Q1-K1-B10
gcgcggggtagcgtttacaccttgacacctaaggccagagattggagagagaaagaagcagctgagtggagcaagaaagaagaggtcatggcggcgtagtctatcagctgagtgggaaagagtggagcaatggtggggggctgtgccagcggcgacggcgccgccgaagggacgctcgcgaggtggcggagggcggcggccaagcggatcggcctctcatgcgcctncttcttctcctacgccgcctctccctacccgcctccttccaagaccatctnccactccgcactgaatccgcctgatggagagc

SEQ ID NO: 9801 - DNA, 294 bp, Zea mays
  Clone ID: LIB3156-005-Q1-K1-B2
gaaaaaggataggcaaggaccaacgagcgagtgttacttatatgacgaatatggacgcgcacctggcgcattgaatccatcttattgaacgcttgcacctgctctatcttttgattctcaatgacaccctcatattgaccgaacacgatcttcttttctaccttgatgcgttagtcttccgatgcacgaaagaggacaaccaacacgtggctaactgacatgaggtcgatatgatcagtaactatgctgttgatcaatactgtaactaacagggccacgatcactatatcgttc

SEQ ID NO: 9802 - DNA, 399 bp, Zea mays
  unsure (1)..(399): unsure at all n locations; Clone ID: LIB3156-005-Q1-K1-B3
gaagaagccgagggaccacatgatcccactcaagtcaattattattgatggaaattgcagagtggaggatagagggcttaaaacacatcatggtcaaatgatttatctgctatgcatttacaacaagaaagaaaaggagaaccaaatcacgatgggtggatatgatattgaagatgccctagcctggaagaggaagatagagcttctgattgatcagcaacaggatactacgacagctaaaaaccataaagcttttgcttcgttggactttgatatagatcttggaggaccattttcgttctctgaccatgacagcggacccgaagaggaagaagagnccccgcccaccttgcttcgcaggacaactatagggaatggccctccttgatctgtacttga

SEQ ID NO: 9803 - DNA, 350 bp, Zea mays
  Clone ID: LIB3156-005-Q1-K1-B4
atagagccaagagacccatcaagaggccgcctacaggttaatcaatggcgacggcggctagatgctgtcaccggcggctcatcctcgcgagcgccggcctgctatccgtgctcgcggctgctagcgccagcgccgggacctcctgcgtgccagggtgggccataccggacaacccgctccggagctgccgatggtgcgtgaccagccggacctgcggcatcgggcccagcctaccgtggcctgagctgagcaggagatgctgccggtagctggccgacataccggcgtactgacggtgcacggcagctgagattcctcatggacggggcgatcctgtcgagcccggactc

SEQ ID NO: 9804 - DNA, 283 bp, Zea mays
  Clone ID: LIB3156-005-Q1-K1-B5
gcaaggctcactgagggctgttctttccgcaggaagggagactagagcggatgtggtcttcaagttttgctctatgccagatactagcgtcatgaactgcctttagctaagattttccataagttgttctcgagcagctatgtgttgcatgttggctacttccaaacttatatctggtttggtttggattgtgatgaactaatggctctttgaatttatattatgatgttgacgatatttggcgaagaaaataaaaacaagaactagaaataaaaacaatacg

SEQ ID NO: 9805 - DNA, 325 bp, Zea mays
  Clone ID: LIB3156-005-Q1-K1-B6
cagaaacaagccaatagcccaataggcaatagctagaggtctcttcgttgcgctgctagtacacataaaagcaagagcgagagcgagagagagagagaagaagaagaagatgaggccggggagagatggtggaggtgtttcggcgaagctaacgggcggcgcaggcggggccccgccgagcctatggaagacgccgaccccatacgtcttcctaggcctggccttcatgatgtgcgtcatcgggacggctctgctcgtgctcatctgcacgcgcaagaaggcgtcgtcctcgcggcggcgggatgatggggcggccgacgagagg

SEQ ID NO: 9806 - DNA, 374 bp, Zea mays
  Clone ID: LIB3156-005-Q1-K1-B7
cagaaacaagccaacagcccaataggcaatagctagaggtctgttcgatgcgctgctggtgcagataaaagcccgagcgagagcgagagagagagagaagatcaagaagatgatgccggggagagatggtggaggtgcttatgcgaagctaactggctgcgcatgcggagccccgccagagcctatggaagacgctcgccccatatcgtttttctaggcctggactctatgacgtgcgtcatccagacagctctggttgtgctcatctgcacgcgcgagatggcgtgatccttgtggcggtgggacgatggcgcgggctacgagagggcagatctcgcgccgctggactgtcatcccaaggtagctatatggat

SEQ ID NO: 9807 - DNA, 400 bp, Zea mays
  Clone ID: LIB3156-005-Q1-K1-B8
gaacgatacgacgttcaccgtgatctggatggcatgctgtcgagggaagctggtagcattcttctactcttcagagtcacagcaatggtgtgcactttcaccgcctgaacactatgctttgagcaccagaagagtcatgggcgttcgactaggacagcgcaaccatgctcatgggtgcttctactggatgttagccctcacacataggtggcttgtgttggacacacacaaaatggactttctccatcgtggacatctcacctatcctgacaggccgtgcgatgatgttcagtaatcagattaccactctggagtcaagcaatggctggactaccatcgtggtctctgatgttttccgtcagatagaagatgcattctgtatttttatgcattcttgaat

SEQ ID NO: 9808 - DNA, 155 bp, Zea mays
  Clone ID: LIB3156-005-Q1-K1-C10
cccaacccctacactcccggcggcggcgcaggagcagcagcaccagcacccgaggatggtgaagttgctcaagcccggcaaggccgtgatcctcctgcagggccggttcgccggcaggaaggcggtgatcgtgcgcgtgttcgaggagggcaccc

SEQ ID NO: 9809 - DNA, 115 bp, Zea mays
  Clone ID: LIB3156-005-Q1-K1-C11
ctctcggcactagctaccgcgcgggcacggctacctccgcaggccagccgcaggcgtacccgccgccggcatacggcgcgccgccacccatggccgccggcgggtacccttcccc

SEQ ID NO: 9810 - DNA, 214 bp, Zea mays
  Clone ID: LIB3156-005-Q1-K1-C12
ggcagatgtggtttgggatgcagtggtaaaatgaatcagttccccagcttcatgaataactatgctgttagtgtctgaggtttacattgtgtcagtttggtcacttttggtgtgatgagttttagtagcggtgtggccggtggatatgcagtgaaattgtatcgcttgaacagtgataagatacctctatggaagggtgaaaacccacaaatgc

SEQ ID NO: 9811 - DNA, 101 bp, Zea mays
  Clone ID: LIB3156-005-Q1-K1-C2
ggtaattgatagccaccagcttgtatgcaagcttgccataaattggaagaaagggaaacaagggccatcacaacaatcttgaccttgcaaccaacaacaac

SEQ ID NO: 9812 - DNA, 232 bp, Zea mays
  Clone ID: LIB3156-005-Q1-K1-C3
agaaagcaagccaatagctagaggttccttcgctgtgctgctagtgctagacgacgacatatagaagaaatatatatagagaaagagagaaaagatgaggccggagagagttggatcaggtggtgtttgggtgaagctcatgggcggcgccggcgggcccccgccgagcccatggaggacgccgacaccctacattttcctggcgctcttcttcatgatgggcgtcgtcgcg

SEQ ID NO: 9813 - DNA, 227 bp, Zea mays
  Clone ID: LIB3156-005-Q1-K1-C4
accaatggcagccaaaatatttggcctccttatgctccttggtctttctgcaatgctgttacggcaaccattttcccgcattgctaacaagctcctatagcttccctttttcccccgtacctttaaccagcggggtcttcggtttgggaaaacccaattcttcaaccctttaggatccaacaggcaatcgcaggtgggctttttacctttataacccttgttcctcc

SEQ ID NO: 9814 - DNA, 187 bp, Zea mays
  Clone ID: LIB3156-005-Q1-K1-C5
gtcagctccgcgaggtgctcaaagtctgcgcgggcacgcagagcgacaaccttcttcagggcaagggctacggtgccgtgccgagtgtgccggcccttccgcttgtgccttgtggttggggggttaaacgggattgtaaactggaaccaacctgccaaccaaccaaaggcaaaaactgcccccccgg

SEQ ID NO: 9815 - DNA, 207 bp, Zea mays
  Clone ID: LIB3156-005-Q1-K1-C7
ggcttggtgttttccaggtaagggcagagtttctctccgccgatggcaaagtgatctcaacttcaagtcaaccatgcatgctcaagttcaaaagcgtacacatgcacttcatcgagacttttctgcagagcgtctctcttctgtccggctactcatcggaatctcaagttattaaactggaagatgaagggtatcaaccaaaggtct

SEQ ID NO: 9816 - DNA, 267 bp, Zea mays
  Clone ID: LIB3156-005-Q1-K1-C8
ctaggaggagggaagaaagaatggctcaagcgtcgagctctttctctattgttctgttggtcctcgcactagtacttgtggttgaggtttctgctggaaccgcaaatggagagctttacagacctgctggtgcagaatgctctgtccccatagaacaatgtccaaagaaatgtgactaccggtgctctgctacatcgtaacaagaagccatgccttttcttctgcaactactgcttgaacaagtgcttgtgcgtccccttcggcaca

SEQ ID NO: 9817 - DNA, 150 bp, Zea mays
  Clone ID: LIB3156-005-Q1-K1-D10
caactagcaacatagaaagcacaatagtgtaccaacaatggcagctaaaatattttgcctccttatgctccttggtctttctgcaagtgctgctacggcgaccattttcccacaatgctcacaagctcctatagcttcccttatttcccc

SEQ ID NO: 9818 - DNA, 382 bp, Zea mays
  unsure (1)..(382): unsure at all n locations; Clone ID: LIB3156-005-Q1-K1-D11
caactagcaacatagaaagcacaatagtgtaccaacaatggcagctaaaatattttgcctccttatgctccttggtctttctgcaagtgctgctacggcgaccattttcccacaatgctcacaagctcctatagcttcccttcttcccccgtacctctcaccaacggtgtcttcggtatgtgaaaacccaattcttcaaccctacaggatccaacaggcaatcgcagctggcatcttacctttatcaccctttgtcctncaacaatcatcagccctaatacagcaagtacctttggtgcatttattggcacaaaacatcanggcacaacaactacaacaactngtgctagncaaccttgctgcctactctcagcaacagcag

SEQ ID NO: 9819 - DNA, 95 bp, Zea mays
  Clone ID: LIB3156-005-Q1-K1-D12
cacggctctgccgcattggcgcgcgccggcggccggcactcgccgtcctgacgcgagaaagaagatgctctagaagttgggggcctggctaggga

SEQ ID NO: 9820 - DNA, 365 bp, Zea mays
  Clone ID: LIB3156-005-Q1-K1-D2
gaaaaatattcccaaaccctatcttccgattttgattggcaaaccttggggtttttttcaacatgaccgtcggcggggcaccggggggccggatcgtgatggagctgtccgccaacgaggtgcccaagaccgcggaaaacttccgcccgctgtgcacgggcaaaaagggcgttggcaagtccgggaagccgttccactacaagggctccaccttccaccgcgtaatccccgagttcatgtgccagggcggtgacttaacccgcggcaacggcaccggcggcgagtccatctacggcgagaagttccccgacgagaagttcgtgcgcaagcacaccgccccccgtgtgctctccatggccaacgcc

SEQ ID NO: 9821 - DNA, 239 bp, Zea mays
  Clone ID: LIB3156-005-Q1-K1-D4
ctcgcgcccacagccaaatttttctccactcaatcgcggcataagctgcactgcagccatggccgccagcggagccggtagcaaggcgaagaagggggcggctgggcgcaaggctggcggccccaggaagaagtcggtgtcgcggtccgtccaggccgggctgcagttccccgtcggccggatcgggcgcttcctcaagaaggggcggtacgcgcaacgcgtgggcaccggcgcccccg

SEQ ID NO: 9822 - DNA, 318 bp, Zea mays
  Clone ID: LIB3156-005-Q1-K1-D5
gggagacgcgcggcgcggccgaggcgcagcgcggtcaggttcgggtatgacctgcatagctactcccagaacttcgacgatggcgttgcctagtcagcccggcggccacggctagcttcttcagtacgtgtagctagttaggagtctaggatattcgtgtaactagctacggccaggatattagtgtggctttaattagtgctttttgtcctgaccactgagatttcagtccagtgttaacttccggtgattatctgtgctctctagctggttcatccagttatattgtataaagaaattacttcatcttataattag

SEQ ID NO: 9823 - DNA, 348 bp, Zea mays
  Clone ID: LIB3156-005-Q1-K1-D7
agcggggctgtaccgtgcgagactctactgctcgatcgccatggccgccgcgctcaggtgcccggcatccgtcagggtctcgggccccgccgccgcggggctcgccaaggtgcgtcatgcgtccagagtcgtcgcggtgagcggtgcccggcagagccgcagcggcggcgtcgccgtgcgggcgtcgctgttctcgcccaagcccgctgcggccaaggacgcgcggccgaccaaggtgcaagagctgtacgtgtacgagatcaacgagcgggaccgcgagagccccgcgtacctgcgcctcagcgccaagcagacggagaacgcgctgggcgatcttgtccccttaac

SEQ ID NO: 9824 - DNA, 205 bp, Zea mays
  Clone ID: LIB3156-005-Q1-K1-D8
atcgacacctcgccgagatgggccgtaagttcttcgtcggttgcaactggaaatgcagtggaaccacagatcaggtcgagaagatcgtcaaaaccctgaatgaaggacaggttcccccttcagatgttgtggaggtcgttgtcagccctgcttatgtcttacttcctgtggtcaagagccagctgccccaatagttccatgttgc

SEQ ID NO: 9825 - DNA, 211 bp, Zea mays
  Clone ID: LIB3156-005-Q1-K1-D9
cccgttgcgtctctcgcgcgttaccaagctctcaagttttctcgcgccgacggcaatggatgaggtcaccgaggccgtgaacaacctcaacatctcgggcgtaagggccgcgggcgttgccggggcggaagggcacaagaagaatcgcattcaggtcttcaacactaagaagcccctcttcttctatgtcaacctcgccaagaagtacatg

SEQ ID NO: 9826 - DNA, 186 bp, Zea mays
  Clone ID: LIB3156-005-Q1-K1-E1
ccccgtcatcgatctcgtttcaaatacatccatcctcgtttcctccgtcccgcagcatctcaaccccatggccaagatcaagatcgggatcaatgggttcggcaggatccgaaggctggtggccaaggtggcccttcaaaatgacgatgtcgagctcatcaccatgaacgaccccttcatcaacac

SEQ ID NO: 9827 - DNA, 177 bp, Zea mays
  Clone ID: LIB3156-005-Q1-K1-E5
cacacagcgaaccgagaaaccaacacagcaacaagcaaagcagcgatccgacatccgagagatggacgcggtgatgttcgggctggagactcccctgatggcggcgctgcagcacctgctggacgtgcccgacggcgacgcccggcgcgggcgtacaacaaatacatggcgggcggg

SEQ ID NO: 9828 - DNA, 200 bp, Zea mays
  unsure (1)..(200): unsure at all n locations; Clone ID: LIB3156-005-Q1-K1-E7
cggagacgagaccgccggagatggagccgagatctgcaatctacagatcccgcgccttgcttctnctcgccgccatccttgcggaggtcgtcatccctgcatccgccatcggagacaagtgcgccgcctgcaaagccgttgctgcggagctagagattggaatttcgagtgagaagccgagaaatcacttggacttgcgc

SEQ ID NO: 9829 - DNA, 82 bp, Zea mays
  Clone ID: LIB3156-005-Q1-K1-F1
gcgaaggagaaagcagaccaacctagccacccagggagaaagaggccaaaagggaggggagagtggtcccatggcttccatt

SEQ ID NO: 9830 - DNA, 284 bp, Zea mays
  Clone ID: LIB3156-005-Q1-K1-F2
tgactggcgaggcaaaagcattgcgaccacagacagcgcccgcttcaagggcttttttttttgggataacaaggaggacaggaggaaatggcggtcacaatcacctgggtgaaggcgaggcaaatcttttaacggccggggcaaccccaccgtcaaggtggacgtgggccctaacgacggcagctacgcgaggggggccgtacccagcggcgcatccactggaatatatgaggccttggagctgagggatggaggatctgattatcttggcaagggtgttctta

SEQ ID NO: 9831 - DNA, 53 bp, Zea mays
  Clone ID: LIB3156-005-Q1-K1-F3
cggacctttcaaagcctacctttcgtcccttccgcccgggccgggttggcggc

SEQ ID NO: 9832 - DNA, 218 bp, Zea mays
  Clone ID: LIB3156-005-Q1-K1-F4
tcgccatatctcacgatccactcgagcaccaagccgagggaaggtgaggagctatggctcgcggcgtggtgtcagcgaagggcggcgcggtcgcgggcaagaagaatgggtcggtttccttcacgatcgactgcaccaagccagtggaggacaagatcatggaggtagcctcgctcgagaagttcctgcaggagcgcatcaaggtcgccggcggcaag

SEQ ID NO: 9833 - DNA, 325 bp, Zea mays
  Clone ID: LIB3156-005-Q1-K1-F6
ccaccctccagcgcctacaccctcctcggcgcctcactccctctgaggtcgcagatccgggcggttagacgaagcacgccgcacccatggcctccggtgagctcgcctgcacctacgccgccctcatcctcagcgacgacggcatcgccatcaccgccgagaagatcgccaccatcgtgaaggcggccaacatcaagctcgagtcctactggccggcgcttttcgctaagctcctggagaagcgcagcgttgaggatctaatcctctccgttggatctggtggtggcgctgctccagttgctgcttccgccccaactgggggtgc

SEQ ID NO: 9834 - DNA, 151 bp, Zea mays
  Clone ID: LIB3156-005-Q1-K1-F7
ccgctgttaggttctaccaggagaccttcggcgtccctccggccacgcgagctcgccgaaatggtcgcccacaggttccatcagtaccaggtggtgggtcgcgcgctggcgaccccaaccgatgagcacccaagatctaccgatgaactct

SEQ ID NO: 9835 - DNA, 282 bp, Zea mays
  Clone ID: LIB3156-005-Q1-K1-F8
ggcgggggcgctgctgctgcggctccacaaggggaggtacctcccaggcccctacctctggtgggtgccgaacgctgtcttaaccgacgccgtcaagaccgccggcctgtggctccggcatgaccaccatcccgtatccaaatggctgtcatgcaatgatttaaagaagcttgccttgtttgggtgtcctaatattgagcgagtaacggttgttgcgtcaaaaagattaagagccttattcaacatgcatgaaagaactatatgcggatcctgtaaactgag

SEQ ID NO: 9836 - DNA, 102 bp, Zea mays
  Clone ID: LIB3156-005-Q1-K1-F9
gccacgttgtatacgcggatcacggatcaccgtgctgctcgcccgctcattgcttgccttcagtctgcagagaacgcgatttggtctggtgttcgggaccca

SEQ ID NO: 9837 - DNA, 109 bp, Zea mays
  Clone ID: LIB3156-005-Q1-K1-G11
tgggtatacgagagccgacgatcgcctccacgtgccacgatgaagggaccctgacgcatagccgggttgtcccagacgtatgagcacgcgtctgtttctcttcctgcgt

SEQ ID NO: 9838 - DNA, 349 bp, Zea mays
  Clone ID: LIB3156-005-Q1-K1-G3
attttgagcattcagaaacacaccaagcgaaacgcacttaccaccaacttaccaccatgggttgcgaaaaatttacccttccttgccctcttggcccttttgggaaccgcaccaaatgcgtccattattcaacaatgctaactggctcctagggccataattccaaagttcctccaaccagttacttcaatgggcttggaacacctagctgggcaagccaacatgcaacaacaagcgctggcgggagggggttacaacaaccaattgcccaatggcaacaacaatccttgccacatctaacaatacaagccatcacaacgcaacagcaacaacagttcctaccagcact

SEQ ID NO: 9839 - DNA, 313 bp, Zea mays
  Clone ID: LIB3156-005-Q1-K1-G4
gcggcgccggcctacaaccgttttcgtgctcacacactcaaaccttagtcgcgatcaggccccaaggactcgagatgaagtcgagggcacggtccaccgccggcgactccaggctctcggtgaggaagaccaaggctgagaaggaccctaacaagcccatgaggcctccgagcgcgttcttcgtcttcatggaggagttcaggaaggactacaaggagaagcaccccaatgtgaagcaagtctccctgattggcaaggctggtggtgacaagtggaagtccctgtctgatgccgagaaggctccttacgtgtc

SEQ ID NO: 9840 - DNA, 104 bp, Zea mays
  Clone ID: LIB3156-005-Q1-K1-G5
gccgcatccacaacctgcctctctcgtcccctggcggcgtccgcggcaggatggcggtatctacagcgaggacggtgaaggatgtcaacccgcacgagttcgtc

SEQ ID NO: 9841 - DNA, 162 bp, Zea mays
  Clone ID: LIB3156-005-Q1-K1-G6
gctggcttctcctccccctcttaccaagtcctcttcgggttagggttacttagggttttgtggaggggcgatcgcggcaggtgatgtggagtaccgttgcttcctcggcgggcttgcctgggccaccagcaacgagtcggtggagaatgccttctgcttcta

SEQ ID NO: 9842 - DNA, 265 bp, Zea mays
  Clone ID: LIB3156-005-Q1-K1-G7
cgatctcgtttcaaatccatccatcctcgtttcctccgtcccgcagcatctcaaccccatggccaagatcaagatcgggatcaatgggttcggcaggatcggaaggctggtggccagggtggccctgcagagtgacgatgtcgagctcgtcgccgtgaacgaccccttcatcagcaccgactacatgacctacatgttcaaagtccgacactgtgcacggacagtggaagcaccatgaagtcaaggtgaaggactccaaaaccct

SEQ ID NO: 9843 - DNA, 358 bp, Zea mays
  Clone ID: LIB3156-005-Q1-K1-G8
ctctcgcgcacccgccgccgatagctatatgtgttgcacacccggcgacgctatactctatgggcttgcgcagacagcggagcttctgtcctcgcgcagtcagcagaccctgccttcgcgcgccgtcagcagatacagagacctgcgctgctgaccggaccctgcccctggcgcgctcgtagtagatacctacgccgctgaccgcccgatgacaggcctgcatgatttcatatctagcttgcatcggcatacacaggtgacgctgacaggtgacaagttgccttgttattgatgctgagattgctgccctgtacttacttagtgcacagggaggcaatgggaggagctctgcgacaat

SEQ ID NO: 9844 - DNA, 413 bp, Zea mays
  Clone ID: LIB3156-005-Q1-K1-G9
aagggcaagagcaatgtagcaacttcaaaataccaggatacaagcaggaccaaccactattctgcccaagataatgatgactttatctcttcagaatcagataggcagcttctactcatgaggcagcaggatgaagaacttgacgagctcaatgaaagtgttcaaaggattggtggcgtaagactaaccatacacgaagagctggctggacaggaaaggatcctaaacgacttaagcttggagatggagactacttccaacaagacttgattcgtgcaaaaagagtggcctggtgatgaagaggcggcatcagggtcaacatgctgacggtcccggtgtctgtcatcatctttgtttgggtcctgcataccaaggcccaggcctcgattctcctcctttgtggctcctctaga

SEQ ID NO: 9845 - DNA, 291 bp, Zea mays
  Clone ID: LIB3156-005-Q1-K1-H1
ggagctgcgatgtggatccatattgaccacatacacagcgcacccaatggactaattgttctgtgatcacactgaagatatgctgtaactgtacaaccaataacgcagatcaacgcaaaccataatttacagccacccgttcactctattcctcgggacgtacttgaatcataatctagactatccttcatgaagtgcgcttcccagtttagcaatcatggcatgaccctatgtcttttgccttctggcttggaggagcttctgatcttgtgctgggtgaccataaggctg

SEQ ID NO: 9846 - DNA, 81 bp, Zea mays
  Clone ID: LIB3156-005-Q1-K1-H11
tattccgaggaaacttacgtccacgctgctcttctgccgccgccggtaatcaaatgcctatgacttggtccgtgctgttgt

SEQ ID NO: 9847 - DNA, 319 bp, Zea mays
  Clone ID: LIB3156-005-Q1-K1-H5
aaaccaaccaaacctctcttgacaaaaaacaatcatgtacccttctaccgatcctatggagtggaatttcaataagccaccgtgcccgtatgaaaaagaactcctatctactctaattacaatttacttgcgagctgtgatccaattcatgcccgagctatccctcgtacatactgcctttatccttattaagaatgcacctacttgagctgctcaccctgaatgagaaataacccactccgtatctttcatgaccagccactctctccccggatgaacatatatcactttctctgccagtgacaatacaagcttgatt

SEQ ID NO: 9848 - DNA, 271 bp, Zea mays
  Clone ID: LIB3156-005-Q1-K1-H7
gcggcgcgccaggtgcccagatctccaccatcttagtcgccggcgacgagcatcaccaggttcctgatgaccatggcacagcgcacgatgtgcctgcttcggcggtccattgggtttacagcgccgcaggcacagagagccctgagtaccactgccgctggtgcggagggtgcggctgtggctgaagctacggcgaaggaggcgaagaggaggaggaagaaatttgtttgacgtagtgcagttcctgccagagtggggcattggatacaag

SEQ ID NO: 9849 - DNA, 405 bp, Zea mays
  unsure (1)..(405): unsure at all n locations; Clone ID: LIB3156-005-Q1-K1-H8
cagaaaaccctagccgccgccaccgaagcggcctcccaggtaagcaggatcgtccagcccgccgccgccatgaagcgcaatccccgcgtcacgagctcccgccggaagtgccgcaaggcgcactttacggccccgtcctccgtccgccgcgttctcatgtccgcggngctgtcgacggagctccgccacaagtacaacgtgcgctccatcccgatccgcaaggacgacgaggtgcaggtcgtgcgcggcacctacaagggccgtgaggggaaggtggtgcaagtgtaccgccgccgctgggtcttccacgtcgagcggatcacccgcgagaaggtgaacggctccaccgtgaacgtgggcatccacccttccaaggtgatcgtcaccaagctgaagctcgacaag

SEQ ID NO: 9850 - DNA, 367 bp, Zea mays
  Clone ID: LIB3156-006-Q1-K1-A12
gcaaaacaagagtagaacagcgtaaacatctggatcctccgaaagctgagacacagctgtttttttcttttcttttcttttcggatagtatgctctctgctgttagttgccccctgttgaatagagaaagaaaaagaggacgccggttcttttctgtatacacgaaaagctgttcaagtatagtggcctgtatgtttttggtcttctggatgattacacattgctttggtcaccatttcatttgatggaaagaaagaaagaaagaaagaaaaaaaaaaaaaaaaaaaaataaaaaaaattataaaaaataaaaaataaaataatttatttatatataatatttaatatatttttatttattttataa

SEQ ID NO: 9851 - DNA, 389 bp, Zea mays
  Clone ID: LIB3156-006-Q1-K1-A9
gatgaattcaatattttttcgacacgaatatcaactagcataccatatagaacaagggggggtgcatctgtttcattgggcagttcaaccggaaacctggataaactaggagttaacaaatgcctaaatggtaaccgtgatcaaccaagccctacctcagttcttgatgcaccctctgaagatagcagttgttatgagcctgaaacacttggaacaactacttccaagaatgctatattaagatcttcagcaattgaaactgtggcccgtttcttgtcattaccgaggatctcttatggggagtaatggatgatctgagtgaagaagcgtttctggatttttacagtctgttttagtgttgagatatcttttgtgtcttgtataacttt

SEQ ID NO: 9852 - DNA, 322 bp, Zea mays
  Clone ID: LIB3156-006-Q1-K1-B10
cttcttcccactggtactggtactgaactttttgctcactggacgactactggtgaggaaaggtgtggccgttggctgcgggtggcaagctatggttgcctacattaactttttgatgctactactttatcggcataccccttggcgtgctcctctgattcaagttcggtttctggatcaagggactgtggtgaggcatgattgggggtacccttattcaaacacttgctttgatctggatcacgttaatgactgtctggaacattgaggttcaggaatctctgatatagattggataagtgtgacgacacaaggcattctt

SEQ ID NO: 9853 - DNA, 365 bp, Zea mays
  Clone ID: LIB3156-006-Q1-K1-B11
ctcctcttgtttgtgaaggtgaagcacaagtacaataaggttgtgtgtgccctatcggaggttatgctcaaccaaactacaatacgaatgtacataatgtatggtgccctttctttgtgagctatgtcaataaattattgtgctaaaaaaaaaaaaaaaaaaaaaaaaaaaaaaaaaataaaaaaaaaaaaaaaaaaaaaaaaaaaaataaaaaaaaaataaaaaaaaaaaataaaaaaattaaattataaatatattaatttataaatactataaaaattaataaacaatattaaggggggaatctttaataatcagaatatattttttattttatttatatatattttattttttttattttt

SEQ ID NO: 9854 - DNA, 272 bp, Zea mays
  unsure (1)..(272): unsure at all n locations; Clone ID: LIB3156-006-Q1-K1-B9
ggttatatctattgagtcaacagccatagatcacattagaccctacattgtttgaggcggggtgcacaatatttggggatcctgttgaatcaaaatgcgctggttttactaatttgaaagatgaacatttgtctttgcctggctattcatattccgtgtcaccatgtgccggntccttcatatctgctaataaagagaacaatgattccataagaatgccagcataattttctccttagacagttggaataggagttggttgctaatgtgca

SEQ ID NO: 9855 - DNA, 332 bp, Zea mays
  Clone ID: LIB3156-006-Q1-K1-C9
gcgtacggtacaaagtacatggtgatccaaggtgaacctggagttgtcatccgaggaaagaaggggggtgggggcattactatcaagaaaaccggcatgtccttgattattggtgtctacgacgagccaatgacttcagggcaatgcaacatggtggtggagaggctcggctattactctgatcgagcagggcttttaaaagttcgtcatgttctgatttggtcatttgggcaccaaagtttgcgccttaattgtttctgataccttgagctcgttgcatgtactttgcgtatttgcatgcattgaataatttattttgggtctgtttgttg

SEQ ID NO: 9856 - DNA, 284 bp, Zea mays
  Clone ID: LIB3156-006-Q1-K1-D10
gatcgtcgtcatgatgatatctatcaatctacgcgtgatgatcgatgactacttgtctggtgctatgtactactaaataaaatctctccgtgtgtacacgtacgcttgcatgtgcatggtagcatgtacgtacgacgtcgtccatgtatgtgtgtgtgacgtgtgagacggacagagagagagagacaggatcgatcgagagacggtcatgtccttttggctgtttggtttattcatatcacaacttttgagtgttaaaaaaataattaaaattaataaattat

SEQ ID NO: 9857 - DNA, 434 bp, Zea mays
  unsure (1)..(434): unsure at all n locations; Clone ID: LIB3156-006-Q1-K1-D9
gaannnccgggnggacgcgcacgcgtccgctccggatggttaacgtcagcttcagctgtagcgccgaggcgctgcgctcctacgtcgcntggctttaaccggcggtgccgctttctgtgcctgatgcgcgtctcctactagctgcaacaggccttccaccgctaccttgacgtcatggcttcaccgctgttactgacatctccttcggatcctctacctgtagggagaacgatctgtctaccgttcattgacagagatttcatcctgtcttttctgcgtcgtaagtgtggttggagcttacccatctttttttgtccaaacctgtacatatttctatctgccttcttgtttagttctggaataaatagttcttggtaattgaatggatcattgttgtttagtaaatcacaatgagttagcttcttttctttttt

SEQ ID NO: 9858 - DNA, 144 bp, Zea mays
  Clone ID: LIB3156-006-Q1-K1-E11
cggacacaaagccggactcttactcagcaccgcccacagacgatacatacacaaaggggggagtctctgaccccgaggcctgctctctcaacgagcccacagctcctgagcccacatactgctacattctaggagccccaaaag

SEQ ID NO: 9859 - DNA, 343 bp, Zea mays
  Clone ID: LIB3156-006-Q1-K1-E9
ctgagcaacgccgtacatgtgtactaccatcagatccatccattcgttcgtccgtccggggagtgaacagtgtggtcttctctgtactctacttgttcagatcgtaggcgtgtagtagttgcaccagccggcgtatgctcatgatcgatgtgtgctcatcaatcaatgtcaatggctgcctgctgtaagcggtcgatgtaaactaagcacagacgcatgtatcgtcatcagtggatgaatcaatctatcgatggcctgtgccattcatttttgaatcataaaataaaaaatattaaaataattattttaaaaataaaaaagggcggtcgtcgtaccccttgcc

SEQ ID NO: 9860 - DNA, 327 bp, Zea mays
  Clone ID: LIB3156-006-Q1-K1-F10
agctggagttcacaccacaatccgtttcttacggatcattgttggtgtaagagatggtgtttcctttctagagtactcacccatcatcaaggaaatcacggttttcatgcacatgaaagtgaggagagcaaagttgtactacctgaaagacaagctttcccgctttttaacatataagttgatatcatatatgctgacttaacaactttttctaccatcatctagatttctattatacctttttattaacttccctatcgacatcattcatatttcactgaaatttctaggtattagatatgtaatatatacaactttataatatac

SEQ ID NO: 9861 - DNA, 309 bp, Zea mays
  Clone ID: LIB3156-006-Q1-K1-F11
agttcttcaacatgttgcctggagagatcgttcttgcttcgcttgacggatttgggaggatctgttacgccgtggaggtggccgtaaagaacgttttgtccacgtcgttaactgttacgaccggtctagtatctcacaggtactgagacaaagccgccgccgcaacgaacgaagggctggacgccgccgtgcacgccatctggacggcgtgggccttgttcaagatcctgcaggccttgtaccccaagagcgttctcaaacccactgcgctggccacgtccaccattatgtccaacgttgcctatcttc

SEQ ID NO: 9862 - DNA, 419 bp, Zea mays
  Clone ID: LIB3156-006-Q1-K1-F12
attcccagtaccaggaccctctgtctggatgttacaacccagtggaacaccacttatcggatgttgctagctgccttggattataagcaggctttcactgcactagaaacatgtgatgatagctacaatgaagctccatcatcagaggactggaggaaagttgaggccgcctgtaattacctgaaactgctctacgactccgcacatagcatcatggcagcagcaaacccaactgcaaacatctttttccacgaagcatggaaacttcagctagagctagcaaatggcacatgacatgaagaccccactttcagaagcatcgccaaggatatgcacgagaggtttgacaagtactggatagattgcagcctcgtgttggctcgtgccgttgacatggatccacgtttcaagattaaact

SEQ ID NO: 9863 - DNA, 423 bp, Zea mays
  Clone ID: LIB3156-006-Q1-K1-G10
cttgcacaacctgtggtactctggtggttagctgtacatgctgcgctgtcatgatggggggtttgctgttacatagagccaatgcgtccttgattcctaagtacacgtacgtttgtcgtcgtcgttcctccccccatcccattccaggaatgaaatgtttgtaggtgtcactgaaaaccgtgtaaatccacataaatgctatgagacatagattataccatgtgattcctaaattttagtttgttttttttttgctggtcaagaactcatgacgatgttgttgttattataatgaactttataaaaaatacaatttttatgctttttggatgtttttttctgtcaaaaataaaaaaaaaatatgtcattcgtttcttaaatgatcctaaacttacttttcgcttgtctttctaactttcataa

SEQ ID NO: 9864 - DNA, 426 bp, Zea mays
  Clone ID: LIB3156-006-Q1-K1-G12
gcgagggttttgctgctgctccagccggacccaggacaagaagcggcgcgatggcggggggcgacctggcgttcaaggcgctgacggctgggctgggcgtcgccacgctctacctcgccgccaccttctccgtcaacgtctaccgcggcctctcgtggcactccgagcagtccaagctagaaaaggcgaaaaccgaagattgaaaaagaccagcaagcagttttagagagcagatgaaaggcgggcatttttgttgatgtcttatctttcgtgtcaattgtgtttttgcttgtcccgtagacctttcaggatatctggagtgtatcttcaagtatgtgatatatatatacgattcaagaacctgtctgggatgattattcatcttttcggacacgttctgtttggatcattatataacaacatccc

SEQ ID NO: 9865 - DNA, 385 bp, Zea mays
  Clone ID: LIB3156-006-Q1-K1-G9
gctcaggatcatgaaaggatcagatgcaattgtacttgctccaagggcatctgatgggggcatgaatcgcaactagaatggttgcttcttacagtccacagcaagagggagatatccagtgactgtttggatctttgttggaagccggaaaacgtctaacattttcaagaagaattcttcctttatgtctgtacctcatgtttttgctgttactcaagtaaagaactccacgtttgtttatgttatttttacatcatctactactgtcataataataaatctcctcctatttttttgttgttaatcctttgttctatcttgtaaatggtttgtttcaattgatgtgtctgcgattacttttttattcactcctcttacttatttt

SEQ ID NO: 9866 - DNA, 111 bp, Zea mays
  Clone ID: LIB3156-006-Q1-K1-H9
gtaatatttacctacttcatacagtggtctaactaccactatggctctaaacaaagggggttctttccaaaaaaccttgtatgaagtattatctattatctaatactctac

SEQ ID NO: 9867 - DNA, 84 bp, Zea mays
  Clone ID: LIB3156-007-Q1-K1-A1
aatacattattacatccagttcggagtgtgataaaagtttagtccaagccaacaggggggaaaaaaaaaaaaaaaattacaatt

SEQ ID NO: 9868 - DNA, 258 bp, Zea mays
  unsure (1)..(258): unsure at all n locations; Clone ID: LIB3156-007-Q1-K1-A11
ttggcagtttcttttccagaggcaaacgcgtaatttgtgtntgtatgctttatcaaagatgtgtgtatgtatgctactacatgtttagtgatgctttccgagacctgatacaacgcccgtctgttttaacgtggcgcaagaataattctggttctgcatgtattctccgtacacaaaagcgtgtctgatactctgatgctnaaaaaataaattaaattttattattttattattttaatttataatattttatatctt

SEQ ID NO: 9869 - DNA, 279 bp, Zea mays
  Clone ID: LIB3156-007-Q1-K1-A2
cccttgcagactacaatatccagaaggagagcaccctccacctggtgctccgtcttcgcggtgggtattaagccatcagtcgttgaagctgctgctgtatctgggttatccagtgtctctgccattgcccatggatggtactgtctttcaaagtatttgtatggtttgtgtcgtgagtcgtgactgagctggtttcatggaccagttgtgttctcgttacccaaaactatcgtgcggcagcatatggcttaatcatgaataaatgtggtgtttgaattt

SEQ ID NO: 9870 - DNA, 440 bp, Zea mays
  Clone ID: LIB3156-007-Q1-K1-A3
cgcgtccgggatggtcctgatgagaagtacaccaatgccttctttgtctttgggccagagaacaccaaggggggggttgaattgacatacagctatggcgttgacaagtatgacattggaacgggctttgggcatttcgcaattgctaatgatgatgtgtacaagttagctgagaatatcaaatccaagggtggtaagatcacccgcgaacctggtcctgtcaagggaggatccactgttattgccttcgcacaggatcctgatggctacatgtttgagcttatccagagggctgacacacctgagcctctttgccaggtcatgcttcgtgttggtgaccttgagcgttctatcaaagtttatgagaaggccctagggatgaagctcctaaggaagaaggatgtacctgattacaagtataccattgccatgttgggcta

SEQ ID NO: 9871 - DNA, 417 bp, Zea mays
  unsure (1)..(417): unsure at all n locations; Clone ID: LIB3156-007-Q1-K1-A7
cacgcgaacaggtgcggcagttacgcttgtttttatgccagtttatctccgcaaagctatttgntgtcggaggccctatcttaaacgagcgctacctctcctcagtgctctttcaatccatcaagaaagaaactgagaacatagtgttccaaccctatagcacacaaatctgggcttcttgcaaactatttcctgaaacgttcatcattttcatcacagaaaaataaagctcgggtgccttctgttgatttctacatacatttccctttctattgtgttaaatctagcccactgtttttctctttaaaacactttgttaatagacttgtgatgttttactactagtttgacactcaaagtatttctgtatattccgtcaaattttaaataaaaaacaaacaattttttttcttacat

SEQ ID NO: 9872 - DNA, 124 bp, Zea mays
  unsure (1)..(124): unsure at all n locations; Clone ID: LIB3156-007-Q1-K1-A8
ttaataaaccactttccccccctttatattaccanaccgcaatcatttatccgtttttttataaaaacaacccgccatccacaaaaaaaaaaaaaaaattaaaaaaaacaaaaaataattatat

SEQ ID NO: 9873 - DNA, 389 bp, Zea mays
  Clone ID: LIB3156-007-Q1-K1-A9
cgtacgagccggggcacctgttcctttactagctgggcttgttttacgacgaggccgaggactacgtggtcgtcaagtactccgcgctgttgacgtccacggtcatgagccgcctcctggcgcgccccaacgtgaagctgttcaacgccgtggccgtggaggacctcatcgtcaggggagggcgcgtcggcggcgtcgtcaccaactgggcgctcgtgtccatgaaccacgacacgcagtcctgcatggaccccaacgtcatggaggccaaggtcgtggtcagctcctgcggccacgacggtcccttcagtgccaccgtcgtcaagaggcttcaggacatcgtcatgatcagcgccgtgccggtgattaaagtgctcgacatgaacacc

SEQ ID NO: 9874 - DNA, 292 bp, Zea mays
  Clone ID: LIB3156-007-Q1-K1-B10
gctcccaagagactgacggcatctaccggatcaggaagaacacacacgtgacactatagaacgtttaggttttcacatcactctacctgtgtctgactacacaatggggaaggtcgacgtcgatggcgccaatctgtgatgcgcttcgaagatgtgaagctatattactcactctgaccactagcaccaaggtggcaatgcagcacagcgacaatcgcgtttgtaggcttagataacacatacctcactcaataaaaagaggatttaaaacacacctgtggcgatgtgtggt

SEQ ID NO: 9875 - DNA, 168 bp, Zea mays
  unsure (1)..(168): unsure at all n locations; Clone ID: LIB3156-007-Q1-K1-B11
tccttantacacaaattttcaaatcttatctttccaccaaaactcttactattcatctttaccaaacttttctttattanatctttctcattaatacattctcctttatcataaacctcacttatattttcacacaaatttccttattctaacaacattctatatcta

SEQ ID NO: 9876 - DNA, 409 bp, Zea mays
  unsure (1)..(409): unsure at all n locations; Clone ID: LIB3156-007-Q1-K1-B12
caacggctgtaactacacctctttccatcttttatgtcgcgcccatggtctgctgcccncggcacggggtctatttcaacagcatgaggtacttatactacntttntaaagtggacacggatctcgtgtattaacagctttagagaggccagttcaaggccgccatctacagtctctttttcactaagtaaggttaggagatcaatgataggattaatgaattcaagatcgcttctgccaaaggcatcttcatcttcatctacttttactaaactgcttcttcccttacttatttaaccgatttgtttgatctcataaaatccttcttagctcattacgatctatctatttggtgattcctactcttttcatcttgctctacttttctttctacttactataaattttt

SEQ ID NO: 9877 - DNA, 302 bp, Zea mays
  Clone ID: LIB3156-007-Q1-K1-B5
atttcattgtctgttatgaaagttttttttttgtggctaacaacatttggaagatggtcaaaattctggctgggcaaaagaaatatttttgccacaaaaaaacaatccggccaaatgctaaacagctctatcccttattcatgaagaagggaaatatgtcatgggatgcatttgcctcacaggtgcgaacaatccataaaggatatattggagagcccatggaaatcacaccatgaagaggcgaattttatgcaaaccctgccgcctgtatatgtgaaaagacccacagaaactcagcaata

SEQ ID NO: 9878 - DNA, 355 bp, Zea mays
  Clone ID: LIB3156-007-Q1-K1-C1
gcctcgtcggccaccgccgtcgctccgttccaggggctcaagtccaccgccagcctccccgtcggccgccgctcctccagaagcctcggcaacgtcagcaacggcggaaggatccggtgcatgcaggtgtggccggcctacggcaacaagaagttcgagacgctgtcgtacctgccgccgctgtcgacggacgacctgctgaagcaggtggactacctgctgcgcaacggctggataccctgcctcgagttcagcaaggtcggcttcgtgtaccgcgagaactccacctccccgtgctactacgacggccgctactggaccatgtggaagctgcccatgttcggctgcaacgacg

SEQ ID NO: 9879 - DNA, 431 bp, Zea mays
  unsure (1)..(431): unsure at all n locations; Clone ID: LIB3156-007-Q1-K1-C10
ggtttacccgttaaccacctggctttgtttttatcgattttgatgataataagggcgganagtattcaatacgtgacgtaggtggcaagaatggatggagagttgagttatctcgtaatgccagcggtggtcgtggaggtcgtgaccggcatggtgggtctgagtccaagtgttacgagtgtggtgagactgatcactttgctcgtgagtgccgtttgaagattggttctggaggtctaggcatcggaaggcgccgaatccgtagccgtatccgcagtcgcagtcccagatatcgccggagtccaagttactgtagaaggagttacagtcctgcagcacgctctccaatgcgtcgtaacgtctcaccaactcgtggacccagctatagcaagtcaccacagcacaagggtgcacgtgaaaaaactccctat

SEQ ID NO: 9880 - DNA, 392 bp, Zea mays
  unsure (1)..(392): unsure at all n locations; Clone ID: LIB3156-007-Q1-K1-C11
ccattactattttttcaccccaaccanaaacttttntccatggtgggtttctttaaaaaagcgtgcttgccaaaacaaaaacttttttatcntatnntaaacaacatacaacaattatcaattttttcactatatccacattacagatttcaattcttttttttaaacacattttccataaaacaactacataaatcatcttcttactattttattcttacttttaaatacaattcttccataactaactcattattttttttatacatctaatatctttactaataaactatacactcttatttatacttctgctctagatcatctaattcaatattctcatccaccttcaatactacctatgattacttcttccctcatattacttctca

SEQ ID NO: 9881 - DNA, 470 bp, Zea mays
  Clone ID: LIB3156-007-Q1-K1-C2
atctggtcaccatcgactgtggctccgcatgaccattggtgaatctgtgcaacataccttcgtagaattttctcgttttgaaggcaatgatgaggtgaggagtggctctatggctgttcctttgtatgctactccaaaggcatgttcatttgtgcttcgggtatgtctggtaatggaatgtccatctgcagggatcagcacccaccagggtggacatggaggaccgagtgattgtgtggttcaactctctgatgaactgaatgtttattttgttagtactagccaatggtgatgattaaaataagtgaccatatgctttccatgctcatcatcttacaggcttttgcttgagtggacattcttgatccaggtctcttctgaggaaaagggttcagttgtgctgacatttttgtagctacagcaaaagcttctgaagggttcagttgtgctgaaatttttgtagctatggc

SEQ ID NO: 9882 - DNA, 292 bp, Zea mays
  Clone ID: LIB3156-007-Q1-K1-C3
ccacgcgtccgcttatgtccttttctttctttctttctttctttttttttcctttcattattttactgctattgtatggttttttttcgcatgtctcaacaaaagtgaatcatggtgttgactttagatgtgttgttgccaaaaaaacaacaacaacaaaaaaataaaaacacaataataaattattaatttatataaaaaaaaaaataaaaaaacaataaaactaacctaattatcaaaaatataaaaaaacggggccgccccctttaaagaacccaatttttctccccct

SEQ ID NO: 9883 - DNA, 248 bp, Zea mays
  unsure (1)..(248): unsure at all n locations; Clone ID: LIB3156-007-Q1-K1-C4
cctgcatcntatcgctcttattggactttttttcatcaaaggcgttaccatcaagctggtttccatttacgacgaacgtattctaattgacattcataacttctacaacatcctcattgatgaactcccttccaatgtagctaaccttctcttatcaattttaataaaaaacaaaaccaaaaatgttgtttgtgtaatttcttaaggcctttttttatcaaaatacccctctataaattgttataatt

SEQ ID NO: 9884 - DNA, 401 bp, Zea mays
  unsure (1)..(401): unsure at all n locations; Clone ID: LIB3156-007-Q1-K1-C5
cacgcgtacgctgacgctttgtctcgccccctttctcttcatttttctaaccgcgcaccnatcanaaggtgccttccttctactcgtcggcggacacatcaactnttcccctttcttacgaaataacatcatgaataatactgctcacccacttcaacaagccccaccttgaccgcttctacttccttaagccaatctcgcacaagccaaattgtattgactcccatcctcattgatcaacttcaaggtatccaccttcattcccaacattggttatgtttctgacaagtcgaaacatcactaccttcccaacaattacaaaacacttcttggtccacaacgtatcttacctctaattgctcatacatcacaacaccacctacttccctcaaatttctcac

SEQ ID NO: 9885 - DNA, 478 bp, Zea mays
  unsure (1)..(478): unsure at all n locations; Clone ID: LIB3156-007-Q1-K1-C7
ccggggcgagcgcacgcgtacgtccgagtcccanccntcntctgctgcgtactccgtttccagtttggtctgtttcttgcggagtactcttgcagtagttgcgcgcaactgtcaccatgcanaacgaggagggtaagactgtggacctctatgttcccaggaagtgctcggccacaaacaggatcatcactgccaaggaccatgcctctgtccagatcaacattggccacttggatgcgaatggcctgtatgatggtcacttcacaacatttgctctctctgggtttgtccgtgctcagggcgatgcagacagctccttggacaggctgtggcagaagaagaaggctgatattaagcagtagattttacatctagtttaccaagaattggacactgccttagctatgttttgaattcatgtcactattatcaatggtgggatttccactggtaccttaaatctgaagatttagtatct

SEQ ID NO: 9886 - DNA, 308 bp, Zea mays
  Clone ID: LIB3156-007-Q1-K1-C8
cccacgcgtacaccgacgcgctctcaaatcccaatttcaccgtatattttgaacagggcgaccgaaggcggtggtgggtttcatcatggacttcgcgcacaatctgatcctccgtatgatggaagacccgtacaagcccaacaagtttcgctggaacatttcttccataataaagaacttttccaacccactaaagccgtgttgaaccttcctcttctcccctaccgattttttaactttaaccgcttcaactcgcagctctccttggatccccatatcaaccataccccctgcctttcttaccccta

SEQ ID NO: 9887 - DNA, 287 bp, Zea mays
  Clone ID: LIB3156-007-Q1-K1-C9
aaattacaaaacaattattcatctttctcttatattcacattacataattcaattcatttttttaaaaacattttctctaaaacaactacataaatcatgctcctcctattttcttcttcttttttaaaacaatcttttctaactatttcaatcttacattctatacatcttaactttttctaaataaataatacactttcatttatatcttctttctcatatctctctatttcaataatctaattctatttatacctcaccttttatctctactccccttatcttt

SEQ ID NO: 9888 - DNA, 301 bp, Zea mays
  unsure (1)..(301): unsure at all n locations; Clone ID: LIB3156-007-Q1-K1-D1
cgtccgagacagggaacctgacnttgaatacactgaacagtttttataccgcgactgaatcacctgtcgatgttgtaatttaacctgtgacgacacgtcacccctcccttcaatcatggatggatagcagcaacatcaatactgtcgagatccctgatgggctacctccaactccttctagaagcaagaaggacaagctttctgaagaggaaatgcttgcgaataaggccgaagcttctcataggcgcatgatacaagtggaaaatgccacttaaaaaagtgatgcggaagctataaagaa

SEQ ID NO: 9889 - DNA, 489 bp, Zea mays
  Clone ID: LIB3156-007-Q1-K1-D10
gctcccagcggacaaactaatgcctgcatacattttctttaacgccatcatatacgttgttcagctgtggatattgatatacctgggagtaaatgataatgccgcggttgagctggccagcaaaatattcgttgtagctgtctcctttgttgcgcttcttgggttttcagtatatggtggaaggttgtttgtcttgctgagacgtttccctattgaatctaaggggcggcaaaagaagctgtatgaggttgggaccgtgacagcaatttgtgttacctgctttctgataagatgtgttgtggtcacgctatctgcatttgatgctgatgtatctctcgaggttttggaccatccagtcctagatttcttctattatatgtttgcggagatactcccttctgcgctggttctcttcgtccttcggaagcttcctcccaagcgggtatcggcgcaataccaccctattaactagggagttctttgttttta

SEQ ID NO: 9890 - DNA, 275 bp, Zea mays
  Clone ID: LIB3156-007-Q1-K1-D11
aaaaaaaaaaaggaaaaaaaataaaaaaaaaaaaattaataaaagaggaaaaaaaaaaaaaataaaaaaaaaaaaaaaaataaaaaaaaaagaaaaaaaaaaaaaaaaaaaaaaaaaaaaaaaaaaaaaaaaaaaaaaaaaaaaaaaaaaaaaagaaaggaggaaaaaaaaaaaaaaaaaaaaataaaaaaaaaaaaaaaaaaaaataaaaaaaaaaaaaaaaagaaaaaaaataaaaaaaaaaaaaaaaaaaaataataaaaaaaaaaaaaaaa

SEQ ID NO: 9891 - DNA, 475 bp, Zea mays
  unsure (1)..(475): unsure at all n locations; Clone ID: LIB3156-007-Q1-K1-D5
catcgagtcggagaacaaggacgccaagctcttcaactgcgtgcagagggggcaccagaacgtgtctagagtggatgcccgttttcttcgtcatactgctgctgggcggtctgcagcacccgaccatcgccgccggtctgggcggcatctacatcgtcgcgaggttcttctacttcaagggatacgccaccggcgttccggacaaccgtctcaagattggggggctcaactacttggcgttgcttgggctgatcatttgcacagcatctttcggcatcaacctgctcatcagggagatgctctaaactttgggtttatatgtgagctccaggctgggttaaccgcacaagttactcatggtctgagcatcaaaactttgtgatactagtcgtttggggttttatagtggagttatcgnttctttctttgtctgtgtgttggtagcaaaagaagtgtgcgtctgcgtcttatagct

SEQ ID NO: 9892 - DNA, 469 bp, Zea mays
  unsure (1)..(469): unsure at all n locations; Clone ID: LIB3156-007-Q1-K1-D6
cgggcgcgtgggttcattcccatcggccggcggttacctccacgtggtgccattcgcgnggagcgagcacccgcccaccgggatccaggtttgtgctgcgagagcgcctatccattcaccatgattaatttcgtgctcctgatcagccgccagggcaaggtgaggctcaccaagtggtattctccttacacccagaaagagaggaccaaggtcattcgcgaactcagtggactcattcttacacgagggcccaaactctgcaattttgttgagtggagaggttacaaggtcgtataccggaggtatgctagcctgtatttctgcatgtgcattgatgccgaggacaatgagcttgaagtccttgagatcatccatcatttcgtcgagatactggaccgctattttggcagtgtatgtgagttggatttgatattcaattttcataaggcctactacatactggatgaga

SEQ ID NO: 9893 - DNA, 447 bp, Zea mays
  unsure (1)..(447): unsure at all n locations; Clone ID: LIB3156-007-Q1-K1-E11
aatgactatnaacaaaaactgcagagtgctttcgttcctctaattttgttatttccatcatttggtgagtttgttgaatgctcacggttgctccatgggctgaagttgtggttggcattcaactgccttgagttttggaggcttttggactgccttgccagcatgagcctcctggaagaggcaccctggcatctgcgtgccatttcccatttgttcgtgccgtttggtaggagtatccattggcttatttagcaggtccctggtttgaagaaagaagcggtcagctgcaagatggacggtgccttgcctcttcttcgactacttagctagtaattaggactatgtatgtaatgaatgtatatagtgccattaagacgcccatgccctggtattgaggtcccggcatttgtatgaatcaattgttcggaaattgttacctttagcagc

SEQ ID NO: 9894 - DNA, 443 bp, Zea mays
  unsure (1)..(443): unsure at all n locations; Clone ID: LIB3156-007-Q1-K1-E2
agaggcgacggtttgaggaacaactaaaggaccgttaatctggtgatgacgaagctatggctggggacgaaacattctgtactgcccttgagtatggtttggcaccaacaggtggttggggcttgggaattgatcgcctcacgatgttgctaacagattctcagaacattaaggaagtacttctattcccggctatgaagcctcaagagtagtaatccacagccaaaagccacaaaaggcaaagaacgatgattgcctattaccctgtgctgggcttgaggtggatgagggaacatacaccctacactatggtgatatttcaagatatctgtatgattctagattcactgngcgtgctgtgtccattgttctactttattggaagttctgtttgagatgctgcatcttcagttgtctactgccccggtgctgattatgttgta

SEQ ID NO: 9895 - DNA, 342 bp, Zea mays
  unsure (1)..(342): unsure at all n locations; Clone ID: LIB3156-007-Q1-K1-E3
aaaaagaatatattatgaacattataattacaaaataatattcaagttggtgcttctcaacggcggattttttaaaaattagcacgcgcacaaactcaaacancaatttatcctatatagttaataaaaactcatctacacacttattcatgttaagttgcttatattcctaaaattgtacagctctcaacgaatattttgtctcatgataatcccctaactttttataaaagtcttaatccatcttttcttaatatcaaaccttattctttaatttatcttcctgtatatgaaacttttaaacatttgtctaaaacatatatacttaattactaataacct

SEQ ID NO: 9896 - DNA, 355 bp, Zea mays
  unsure (1)..(355): unsure at all n locations; Clone ID: LIB3156-007-Q1-K1-E4
agaaagtcacaaaantctcacctcctctgagaatttcttataaagaagacaaatcttatcggcggggcaactacgtgaaaaaggataatggtcctgagacaggtcggactgggtataagatacaacaggcaaagcagctgcaacagcagcaaaggccaacatctgcttcagcttcgtcaaggcaatctgaaaaggaaagttcttgtgatgatgtagaaattgatgcaattcttgaggaagaggaggccctcattgcagctcacaggaaggagatcgaaaatactatggagatcgtacgggaagaaatgaacctttttgcagaaattgatcaaccacgtaacctgattgacaacta

SEQ ID NO: 9897 - DNA, 444 bp, Zea mays
  Clone ID: LIB3156-007-Q1-K1-E5
acgcgtacgcgtgctgtccattttaacatgggattttagttttatttatggttttaacatcctcctatgaggaaacaaagcctctagagaggggaggttgccttcccgaagttagtgccaccaaacttgctgcatggaacatgaagaagcaatgtttataacaaaaaaaaaaaaaaaataaaaaaaaaaaaaaaaaaaaaaaaaaaaaaaaaaaaaaaaaaaaaaaaaaaaaaaaaaaaaaaaaaataaaaaaaaaaaaaaaaaaaaaaaaaataaaggggggcccgttttaaagaatcaaagtttacttccccgtccttgcaacgtaatagtttttttatatggtccccaaaattaaattccctgcccgcggtttaacaactcttaaattggaaaaaccctggctgtccccaattaaattcctttgagaaaaatccccttttc

SEQ ID NO: 9898 - DNA, 364 bp, Zea mays
  Clone ID: LIB3156-007-Q1-K1-E6
cgccgcgcttcatggcgcattgtttcttccattgaacaaaaggaggagtcccgtaagaacgaggagcatgtgaatcttatcaaggaatatcgtggcaagatcgaggctgaactgagcaatatctgtgatggcatcttgaagctgcttgactcccacctagtgccttcttctactgctgctgaatcaaaggtcttctacctcaagatgaagggtgactatcacaggtatcttgcggaatttaaaactggtcctgaaaggaaggaatctgttgaaaccacaatggtggccaataaggctgctaaggacattgctctggctgacctggcacctacccatccgataaggctgggactggctctaaatt

SEQ ID NO: 9899 - DNA, 444 bp, Zea mays
  unsure (1)..(444): unsure at all n locations; Clone ID: LIB3156-007-Q1-K1-F1
gcctagcgtgagttggcgagtggttttttaggcgcgttttttcgtcacgacatcnantttcagcggcgttcttaagatccccggattgcgttctctacccctgtgagggagagctgcggcaatggctgggaaaggcgggtcgaccaacttataaaaggagcagatgtttgtgatggcggagaatgagatggagtacagggttgatcttttcaacaggcttacacagacctgttttaacaagtgcattgagaaaaggtataaagaagctgagctcaatatgggcgagaacagttgcattgatcgatgtgtttcaaagtattggcaggtgactaatttagttggtcagatgctttgaaaccggcctcaaatgtgaactgagaaacactccttcctttntgtagcagaattctattgctctgtttcttcttttctggttggttgtaa

SEQ ID NO: 9900 - DNA, 366 bp, Zea mays
  unsure (1)..(366): unsure at all n locations; Clone ID: LIB3156-007-Q1-K1-F2
acccacgcgaacacggacgcgtggnccaggacaagtcttataatgtattcccttcataatattaattattacagatagttacaataccgatgctgaggcccccaaaacnaatgctnaataagatcactcttcaaatcttttcatactgtgttaagctacaaaaacgttgtctcaaaggcacactgattgctcctaccttgcggaagaagactacaacttagatcttgaggatcaaagtgtccaaaaagtgatgtttggatctttatattataaaaaggcttttacgatgtctctaattcttcaccaaaaatctaaaacccatattaataatgtaatttataattaaccactagattttttaataat

SEQ ID NO: 9901 - DNA, 352 bp, Zea mays
  unsure (1)..(352): unsure at all n locations; Clone ID: LIB3156-007-Q1-K1-F3
cccacgcgtccgggctgagaagctttttgacttggctggcatcagctttttatcagagctgatgttcttcgggggctgacttcataatcaggatggttgatcaagtcanattcactcagatgtttccagactgaaaaggaatttttgctctgtgtactattagggaattcttgagagattagcacttaaattctttgaaacatcccttttctcgatgtacctcctatatatatcgtatgcttgattcatctacatgtttgtgttgctttttgaagtatctagacctgcagttatgattcatgatttcaaatagaagctttttatccatctgaaagaaaataattttacttaa

SEQ ID NO: 9902 - DNA, 388 bp, Zea mays
  unsure (1)..(388): unsure at all n locations; Clone ID: LIB3156-007-Q1-K1-F4
cgtacgcgcctgatgaaccttggnnntgctactggccattttatctttgtcatgtcctgctcattcgctggcgcattcattgcccagcgtgaactgtaaaaagagaaaagctctggcaagtatgagaagaaggtgtatgtgctccccaagcaccttgatgagaaagttgctgctctccacttgggcaaacttggtgccaaacttaccaagctcaccaaatcttatgccgactacatcagcgttccgatcgagggtccctacaaacctgcccacttaccgtactaagcaagccacacaacgcttgcaactcactccggccgttgtgtgctattaaattcgctacactggcctgtcagttatcttttgcatgcatattcattatcatata

SEQ ID NO: 9903 - DNA, 369 bp, Zea mays
  unsure (1)..(369): unsure at all n locations; Clone ID: LIB3156-007-Q1-K1-F5
ctgctcttctccatttccgccccctttttcctttccctccgtcnaangcgcgaggtttttctagcatctcccgaacgagccctacccgtttcctggcctcggcctccgtccgggtcacctatcctccccggtggcctctccgcgccgacgacggggagcggtacaaccgcgtgcatgagctgaaggtgcccgattcttggctgacgcctgcaagagcaacgcatgaatctgaatggctgagggagacactgcgcaagtggctcgacgacgagtactgcccggagccggccaacgtggacatcaacagcaccgccgcgcggtcgtaatcccaatccctgatagcgcggcagtcttatctgagagagatct

SEQ ID NO: 9904 - DNA, 307 bp, Zea mays
  unsure (1)..(307): unsure at all n locations; Clone ID: LIB3156-007-Q1-K1-F8
ttacaaacttcatttttttcgcagttattctcacgtctgactaccactttggcgacacttttcataccaacgaccgtcccacataatnatncatcaccttaacttccacttatcatgctgcttaacccatttgattagcttgttgttgacaacaattatttttatctcactccactgatcaactttattgatgctatcaccatccctatagttgacactttttacaagaacccttacaaccacccatacctcatgaaattcttacaaagctcatcccccaaagctatactctttttaaacttcttca

SEQ ID NO: 9905 - DNA, 412 bp, Zea mays
  Clone ID: LIB3156-007-Q1-K1-G10
acccacgcgtacgcactgtgtacccttccccccaagtttctacttttgtagttgagccatacaacagtgtactgtccgccgactccctcctagagcacactgatgtggctatactgctggacaatgaggccatctacgacatctgccgccgatcccttgacattgagcgcccaacctacaccaacctcaacaggcttgtgtcccaggtcatctcatcccttactgcctccctgaggttcgatggtgctctgaacgtggatgttaacgagttccagaccaacctggtaccctacccgaggatccacttcatgctttcttcgtacgctccagtcatctctgctgagaaggcctaccacgagcagctctctgtggctgagatcaccaacagtgcctttcaaccatcttccatgat

SEQ ID NO: 9906 - DNA, 329 bp, Zea mays
  Clone ID: LIB3156-007-Q1-K1-G11
aacacgcgtaaaatatgtttatcacagcatttattttacacacagaaaccaaaaataaacaagccggcgttttttaaaaacgcggtgaggcactccaacataaccaataatattactaccaattaccataccaccaaacacgctcctaataacctaatcacccagcttcacaactcaatatttcttccaagtcagacctaacataaagcaacaaacatcaaatctactatccttcgtcctacacactctatcaattgtaaaacctttcttttacacattttaaaccctactaactatattccatatactcatatctctttcaaagcaaa

SEQ ID NO: 9907 - DNA, 249 bp, Zea mays
  Clone ID: LIB3156-007-Q1-K1-G8
aaaccctaatgatgttattataaaaagctagctccccacaaaatcataaaaaaaaaaaaaaaaccaaaaacaaaaaaaatatacaactatatacaccacatatcatcaaaaaattttattaattaatttataaaacaatattatttattaatccttcactataaaatacttctctccctttaaaaataaacaaatttataaatcccttcattttaaataaaacattttataaatcttcacacaaaataa

SEQ ID NO: 9908 - DNA, 395 bp, Zea mays
  unsure (1)..(395): unsure at all n locations; Clone ID: LIB3156-007-Q1-K1-G9
aaactgcatgtataaccattctttctcctataatcatttccatgagatgagttgttaaacttgcgtcggcttnattaaaataagctgtaagacctcataaatatataaattgcttgtacttgtttgcatccaataaaaaaaaaaaaaaaaaaaaaaataaaaaaaaaaaaaaaaaaattttttttataaattaataaaaaaaaaaaaaaaaaattaaataaaaaataaaaaaaataaaaataaaaaggtcctccctttttaaataaaccaattttacttaccctttctttaaaaataatattttttttatattccccccaaaataaaattaactttcccctctttttaaaatctccaaactttaaaaaccttatactccccaaattaattcttct

SEQ ID NO: 9909 - DNA, 377 bp, Zea mays
  unsure (1)..(377): unsure at all n locations; Clone ID: LIB3156-007-Q1-K1-H1
ccggncgaccacgcgtccgcgagaagtgtattggaagatatacaactctttgtacatcggcgcgcaggatgcacttgttgcgtgggtatcctgccctggaagacgatggggataacatctttagtcgtccagagttggcaatgtttgtctgattaacggtacctcatgttgcagctgctgaagcgttacactggatttaggaccaatcctaaggctgcagcatgccaattaatccatcaagatcctatattgtgaaggacaaatgacaatcctagcgcgctgtcatctttttatgaatattaggcgttgggcatttaccgtgttttaaaactttgtattacacatggatgttgtattatgtggtgtggacaatggaa

SEQ ID NO: 9910 - DNA, 349 bp, Zea mays
  unsure (1)..(349): unsure at all n locations; Clone ID: LIB3156-007-Q1-K1-H10
aaatgcgcaaggctacttcgctggttctcttataaaacagctttgagtccctcacctncttcaccgaacgttatgacattgtctacgtctaccgcaacaataactgcacgcgctacatgaaggagtcttccaatttttttaaacatttcaactccacaaaaaatcccaacaagaatattcttactccaccttataaattcttggccttatgatgtgggtgcaccccataaaaaactggtttttaatttgcaacctaaaattttctctgtttttaccccaccatatgatcttcattcatactctccatcaccgtttttaataactcattgttccaattcaatcttttctt

SEQ ID NO: 9911 - DNA, 318 bp, Zea mays
  Clone ID: LIB3156-007-Q1-K1-H11
gatttgtgtgagagtcacaagacactacctatcttctttcaattgtggtttgtggagatttgtggatcgttgctgttattaggtgtacatgtgtctacatgatgtgtaatttgtacatgagaccatgctccgtccagaagcgtatgccgtcgtctttttgttcattcatgtaggaggggcatgctcatctgtgctttcagagtttcccatatatgatgattaatataacaatcgatgtcattctctggaactttgggtgaaataaaaaaatggtacatgttaagggtttaaaaaaaaaaaataatttaaaattttatt

SEQ ID NO: 9912 - DNA, 213 bp, Zea mays
  unsure (1)..(213): unsure at all n locations; Clone ID: LIB3156-007-Q1-K1-H3
ggacgggtggtcaaattcatggttcctcccacattttactactatgacggcntnaggcgnncganccttttatatactcacgggggcacacataaattattgccataagctatgggtgctggtggatagggatgaccaaagcgttctgctccaaatcttcaccaagccagtgtgggacaggccaacgctgttcttggagaacatccaaaggat

SEQ ID NO: 9913 - DNA, 342 bp, Zea mays
  Clone ID: LIB3156-007-Q1-K1-H5
ggcgtacgataactgatactttcttgagctgttgaatgaggtatctgaggactttaaagctccagcgcacattgtactgttatcagaggctgaatatatgcgctatgtggagctctatgcaaaggatgaagatgcgttcttcaaagattatgctgaatcacacaagaaactctctgagcttggcttcacgcctcgcagcacagcaccatccaaatcagatcttccaaccgtcgtcgtgcttgcacagagtgcctttggggtagcagttgctgcaaccgtaattatcgctggctacttgtacgaagcttacaagaaggtcaagtatagggcgaaattcttctc

SEQ ID NO: 9914 - DNA, 342 bp, Zea mays
  Clone ID: LIB3156-007-Q1-K1-H6
cattgaaatgcgccgcatcatttattcgggtggtgcgttaccctgaagaaatacatgactctgatagtggaaactatggtgcgtcagctcactcggactatggtatgataactcttttagtgacagatggcactcctggcctgcagatatgcagggagaaggataggaatccccaactatgggaagatgttcatcatattgatggggcccttattattaatattggtgatttgctagagaggtggacgaattgtgctttcagatcaacttttcattatgttgttgcaatcggttaaaagcggtattcggtggctttctttcttgatccaaatcctaacacac

SEQ ID NO: 9915 - DNA, 483 bp, Zea mays
  Clone ID: LIB3156-007-Q1-K1-H9
gaaagatagttaaattgtttatcaactcacctggatgctctataacagcagggatgggagtatatgagtggatgaaattttgcagagctgatgtgtcaactgtttgctttggattggcggcttcaatgggtgcatttttacttgctgctgggacaaagggtaagaggtactgcatgccaaatgcgaggattatgatccatcagccatcaggtggcgctggcgggaaagtcacagagatgggactacagataagagagatgatgtacgaaaagattaagatcaataaaataatgtcgagaattactggaaaatctgaggagcagattgatgaagacacgaagtttgattatttcatgagtccttcggaagccaaagattatgggatagttgacaatatcatagatgaggggaaaccagggttggtagctcccttggcaggatctgttccgcctcccaaatcgcgtgtgtggtacttgtggaaag

SEQ ID NO: 9916 - DNA, 476 bp, Zea mays
  Clone ID: LIB3156-008-Q1-K1-A12
ggacgtggagggccaaatggaaggggtagactttctgaacggcgcagagtagacacagggacgtttgttataagttccgaggcacaggcagccctaccgtggtggcggccgaggctaccgtggcggtgggcgttcccgtggttcatattacggtggcagaggctatggaaacacggggaggggtggccctgggaattcttatcctcactggggcaatgggagagattgattatagcagcagcagccatacttgcgggtgttgtagtcttttgccacatgcatgaagcgcatccattactattaaacaaataaatggaaccttaccaccatgtcactcgtcggtgtgccttgtccagacaaggcctgtagcgtttggtcattgatgtggtgcacccctgtcctgtaagaaagttaccagtacatgaacaaatgagatgatgcttgataggtataaacttgttggcccttgatgtgca

SEQ ID NO: 9917 - DNA, 308 bp, Zea mays
  Clone ID: LIB3156-008-Q1-K1-A2
acgacccggcgtccggatggaagctgctggtatccacgagaccacttacaattccatcatgaagtgcgacgtggatattaggaaggatctgtatggcaacatcgtcctctccggtggtaccactatgttccctggcattgctgacaggatgagcaaggaaatcaccgccctggctcctagcagcatgaagatcaaagtggttgctcctccagaaaggaagtacagtgtctggattggaggatccatccttgcatcgctcagcaccttccagcagatgtggattgccaaggctgagtacgacgagtctg

SEQ ID NO: 9918 - DNA, 286 bp, Zea mays
  Clone ID: LIB3156-008-Q1-K1-A3
tcttttttggaccagttagggttttttcttcgatccgatccgccgagtgcacacggcctgtccccactccgatcgaatcgatggccgccgagggcgaaaagaagatgataaccctcaaaagctccgatggcgaggagttcgaggtggaagaggcggtggcgatggagtcgcagaccatccgccacatgatcgaggatgactgcgccgacaacggcatccctcttcctaacgtcaactccaagatcctatccaaggtaatcgagtactgcaacaagcacgtacatgc

SEQ ID NO: 9919 - DNA, 409 bp, Zea mays
  unsure (1)..(409): unsure at all n locations; Clone ID: LIB3156-008-Q1-K1-A4
gacccacgcgtacgcgtcgatgatgttgnggaaggacgcgtggctttcgttaacagaatgggaaggttcatctctgagtcttttgcttcggtgccgaaattgtccccggctgctttcgataagcttttcaatgacaagattcaggataaccttgcgctggtatacctgtcaagcatcacaaggacacaaatcagcatcgccgagaagttgaacactgctgctcaagtgctgtaggtttggcggtgtggcatctggtttggacgtggatggcttgatgctatctgtgatgcttggcgtaagtgtgattggggacagaaatgcatttttgtactcattattattattgctaaatgagagacctgatggaaagggttagccaacgatgagatcccataatgttgccagaatg

SEQ ID NO: 9920 - DNA, 479 bp, Zea mays
  unsure (1)..(479): unsure at all n locations; Clone ID: LIB3156-008-Q1-K1-A5
tgataagttcatctcacgaatacaatttaaagatgatatagtaatctcgtcacctgatgtatctctggtagagcttggaccagacgtggaatttgttctgttggcaactgatggtctttgggattacataaaaagctctgaagctgtagcttttgtcagagaacaactccgtcagcatggtgatgtccagttggcctgcgaggcacttggtcagaaagctctggatcaacggtcccaagacaatattagcatagtcatagctgacttggggaggacaaactggaaggcgttgcccgatgaaagaccgaacttgttcttggaactaagtcaagcagtcgcgactgtaggggttgtctcaataggaatttgggtttcgtcgttccttgggttacagtagaactagctactccgtccggatgtgtatattacctactgagnttacatctttctactagcagtagcagctgcaaaatatatgt

SEQ ID NO: 9921 - DNA, 432 bp, Zea mays
  unsure (1)..(432): unsure at all n locations; Clone ID: LIB3156-008-Q1-K1-A6
gaagaggcgccgcgccaccaagaagccatactccaggtcaattgtgggtgcttccttggaagtaatccagaagaagagagctgagaagccagaggtccgcgatgctgctagagaagctgctcttcgtgagatcaaggagcgcatcaagaagaccaaggatgagaagaaagcgaagaaggcggaggtgagcaagtcccagaagacgcagacaaagggtgcggtccagaagggttccaagggccccaagttgggcggcggtggtgggaagcgctgaaagaacttagtgtcgtttctcgacattgcagtcgttccttagccaaagccactntcgtagaacctgtgttgaatttgcaagacttattcaagcgttgcttgtgcgtgctaaataccatggcaagagaacgggattatatttatgccttgaaaaaatga

SEQ ID NO: 9922 - DNA, 305 bp, Zea mays
  Clone ID: LIB3156-008-Q1-K1-A7
agggacgacccacgcgtgcgaaaaataaatatttaccattccacttttttttattctaaacaacaaaaaaaaaaaacgcgcacggttttatttaaaaaaattgccggcgccttcttattaactttttttttttttttttccttctttttcttggggccccccgttattaaaattccaattttctttccccttctttccaaagatttttttttttttttgaaaccacctaccatttcttgattgtgagattccttcaacctttttttcttaaaaaacccttggttttccatttttaatcttttttc

SEQ ID NO: 9923 - DNA, 425 bp, Zea mays
  Clone ID: LIB3156-008-Q1-K1-A9
ccgcaagcaaatgcaggtaggagcagtaggttggaggcaggtctacaagaatgtgttccatgcgctctactgcataatggagaaggaaggggttggcggcctgtacaaggggctcggaccgagctgcatcaagttgatgcctgcagcaggcatctcgttcatgtgctacgaggcctgtaagaagatcctggtcgaagacaatgaggatagtgagtgaagctgaagcatgtatgcccctgaggaggggtatgactgatgtgccaggctagaagaggtttgggttgggttggggagtataccctagtattatcaactgatgaaaatgtagatccaagatatttgaacgccctttagatcataatttggttcagttttgtgttgaaatccataaacaatacacttacttgatggtgcatgttgcgggg

SEQ ID NO: 9924 - DNA, 253 bp, Zea mays
  Clone ID: LIB3156-008-Q1-K1-B1
aatcaatgttctaataagggcagtgtggaaaataaatgggctcgggctttcaatgcatgaaagtaacaacaaagaagatcatgatcagatcatcatattgttccaagacatgcttgaagtggttacaatggacataatggttgactagctcaacgagtacggaacctagaaaccattctacacatttgatgagtagcctttaatcatcattttttttctcgaacgcgcaggataactgcacaccattgtatta

SEQ ID NO: 9925 - DNA, 439 bp, Zea mays
  Clone ID: LIB3156-008-Q1-K1-B10
cttggaactgagatgtgcaagaaaattcttctactggcatcaagactttgcacctttgcacacgtaaacatggacaagtctgctatacgaattttgatgaatcttggattaattgaggagtccaaggtttcaaggccattaccttggaggccagcaactaatgttttccgtgttaaagaggatgttcgacctatattctgcgccaacagaccaaagagctatcttaaaaggacattacgttgggatcagtatccccatggacggtggggtgattctcggaacccatcatatggagcacttactgaccaccagttcacaagaccacgaggccgcggtaagacgctccaagaggaatgggctgttccactgaaatcttgggaggacattagtgagcgcttcacaaacttttgtcaagggaactcacaagcagcccatggtc

SEQ ID NO: 9926 - DNA, 438 bp, Zea mays
  unsure (1)..(438): unsure at all n locations; Clone ID: LIB3156-008-Q1-K1-B11
gctgaggacggtacagcggcacagaggtgcgacgtacgacgacgacgacgcaggcgcgacacatggcatcccagctctccgccgccgtgccccggttccacggcctccggggctacgccgcgcccaggtccgcggtggcagcgctgccgtccgtgagggtgggcaggaagaggtcgtcgtcgcagggcatccgctgcgactacatcggctccgccaccaacctgatcatggtgacgacgacgacgctgatgctgttcgcggggcggttcgggctggcgccgtccgcgaaccgcaaggcgacggcggngctgaagctggaggcgcgcgactccggcctgcagacgggtgaccccgccgggttcaccctcgccgacacgctggcctgcggcgccgtcggccacatcctcggcgtcggcatcgtgctcgggctcaagaaca

SEQ ID NO: 9927 - DNA, 401 bp, Zea mays
  unsure (1)..(401): unsure at all n locations; Clone ID: LIB3156-008-Q1-K1-B12
ggctggactacctggggaaccccaacctggtgcacgcacagagcatcctggccatctgggcgtgccaggtggtgctcatgggcttcgtcnagggctaccgcgtcggcggcggcccgctcggggaagggctcgacaaggtgtaccccggcggcgccttcgacccgctgggcctcgccgacgacccggacaccgccgccgagctcaaggtgaaggagctcaagaacggccgccttgccatgttctccatgttcggcttcttcgtgcaggccatcgtcaccggcaagggccccatcgagaacctcttcgaccacgtcgccgaccccgtcgccaacaacgcctgggcatacgccacgaacttcgtccccggcaactaactgactgagcaacgccgtacatgtgta

SEQ ID NO: 9928 - DNA, 430 bp, Zea mays
  unsure (1)..(430): unsure at all n locations; Clone ID: LIB3156-008-Q1-K1-B2
cctccttttttgcctgaccagctaggatcagcggatgcagcaatggtgatggcgtcntcaagcgggctgaggagctgcagcgccgtgggcgtgcccagcctgctggctccgtcgtcccggtccggccgcctggcgccgttctgcgccaacgccaccacctctggccgcgtcaccatgtccgcggagtggatgcccggccagccacgccctgcccacctcgacggctcctctcccggggacttcggcttcgatccgctgggcctcgcgaccgtgccggagaacttcgagcggttcaaggagtcagaggtgtaccactgccgctgggccatgcttgccgtccccgggatcctggtgccggaagctctgggcctgggcaactgggtgaaggcgcangagtgggcggccgtccccggcgggcaggccacgtacc

SEQ ID NO: 9929 - DNA, 485 bp, Zea mays
  unsure (1)..(485): unsure at all n locations; Clone ID: LIB3156-008-Q1-K1-B3
gaccccgcgtccgcgcgcttaacgtgcctgacaaataataccattgccagaaggggacggatctacctcccgcaggacgagctgaaaatggcggggctctccgaccccgacgtcctgaacggccgcgtaaccgacgagtggaggggcttcatgaggggccagatcgcgagggccagagccttcttcatgcangcggangaaggcgccaccgagctcaaccaggagagccgatggccggtgtggtcttctctgctcctgtaccggcagatcctcgacgagatcgaggccaacgactacgacaacttcacccggagggcctacgttcccaagacgaagaagctgatggcgctgcccaaagcgtacctgagatcactggtggtgccctcctcctcttctcangctgagagccggagacgctattccaccctaacataagaccgtctctctctcactgtcggtacataagaacaacagcagtgaatgat

SEQ ID NO: 9930 - DNA, 390 bp, Zea mays
  Clone ID: LIB3156-008-Q1-K1-B4
gacgaatcacgagggcgtccattccaaaaggtcaagattgagataatcttgggaaagagtgacagattctatgagttgatggctgctgctgccgaaaagaggggtgaagttgaagaaggcgaagagcaggcttgaaaggaaaaaaaaaacagtaccgacgacaagcggctgttgtggtggtctgttagttttgcttaatttaatgccatgcgcatgagagctggcatgcgttctagcttatctacattgccatggcagtgtctgcaaactcatggattgatggatgaatgctggtttcttccaattttgacagcttcatttgtttttttggctacgcatgttttgccagtctgacgttctccttacgaaatatggcgtgctttgttgact

SEQ ID NO: 9931 - DNA, 468 bp, Zea mays
  unsure (1)..(468): unsure at all n locations; Clone ID: LIB3156-008-Q1-K1-B5
caagaaagatctcataaaacccggagaaattttaaagaaacttgagtggtaccaaaaatttacgaatgttgatgatgttataccaataagtgctaaatttggtcatggagtggatgatatcaaggagtggatattgtcaaagctccctctgggtcctgcttactaccccaaggatatagctagcgaacaccctgagagattttttgttggtgaaatagtgagggaaaagatttttgttcagtacaggcaggaaattccttattcatgccaggttaatgttgtcagttacaaaagtcggcctgctgccaaggacttcattcaagttgagatacttgtggagaaagaatcacanagaggcattatactagggaaggatggcaaaagcataaagatgctggcaaccgcatcgaggcttgacatcgaggactttctacagaagaaagtctaccttgaggtggaggtcaaagt

SEQ ID NO: 9932 - DNA, 481 bp, Zea mays
  Clone ID: LIB3156-008-Q1-K1-B6
gccgatggctgcaacaccaacacccactgctttcgtttggctcgcgcgcccgctcatcgcacggtcgagtgctttcacctcccgtcatcgggcgcgagtgccgagcggtccctcctccatctcggtgccgccactgaggagtcgatggtgccagtggcgcggcccgctccgatcgctgccccccgaaggatctccggccgagctgatggaagaggactccaagtttgtgccgttgaacgcggacgatcccatgtacggcccaccggcgctactgctcatcggatttgagaaaggcgaaactgtcacgattcaggccttcctgaaagagcttgaaggtgaattcctcaaggtgatccattgtacagaggagatgacaaagcaaaccttatgggatgccatgcacactgagcagcctgatttggaagctgtcaagaatgcaggaccactgccaaggatatgcatattttctggtctaactggg

SEQ ID NO: 9933 - DNA, 366 bp, Zea mays
  Clone ID: LIB3156-008-Q1-K1-B7
gcaccacctgaccgatgaggagtgcgtcaagctcctggctcaatgccggaaggcgattccttcacggaaggatggcgggaaagttataatcggtgatattatgattgaccactctgggcctatgctggaaactcacctcctgatggacatcggcatgatgaccatgacaaaaggacggcagagagatgaaaaagaatggagcgagctcttcaccaaagcagggttcagcgaatacaagatcctgaaggaatttggagctcgtgttgccttcgaagtctatccgtgagattgcacctggactatacatatatatttacatacatatatgtatgtgtgtgggtgccttgcgtggctggcgtgatgatg

SEQ ID NO: 9934 - DNA, 417 bp, Zea mays
  unsure (1)..(417): unsure at all n locations; Clone ID: LIB3156-008-Q1-K1-B8
gcagccgctcactccagccattacccgcagctagcaaacaaatggccaccgtcctgagcagcgcccgcgcgccggccttctccttctccctccgcgccgcgccagcgcccactaccgtggccatgacccgtggcggtggcgccagcagcaggctgcgcgcgcaggccacctacaacgtgaagctcatcacgccggagggggaggtggagatgcaggtgcccgacgacgtctacatcctggactacgccgaggaggaaggcatcgacctgccttactcctgccgcgcggngtcctgctcctcctgcgccggcaaggtcgtctccggctccctcgaccagtccgaccagagcttnctcgacgacagccaggtcgccgacggctgggtgctcacctgcgttgcgtaccccacctccgacg

SEQ ID NO: 9935 - DNA, 276 bp, Zea mays
  unsure (1)..(276): unsure at all n locations; Clone ID: LIB3156-008-Q1-K1-B9
cggacgcgtgggcgctccctcgcttttatccaccggcggcggctgaagtgctgagcggcgaggcatcnagcgccactgcgacctgcntnctgctgtgctcctgcgcggctgcgcgccggcggacgaccgggccgtcggcgtggttccggctctccgcgcctgcgcggctgcgtcgcgacgagcagtgcatcggcacagtggcggtgcgccccccgcggcgaggcggctccacggaccgcgcttaccgagcgccgtcgcgccgaacgggcgcgggcg

SEQ ID NO: 9936 - DNA, 304 bp, Zea mays
  Clone ID: LIB3156-008-Q1-K1-C1
gcaagttactgaaagatctcggaccgttgtttgacagtttgagtaggtaaataatctatggcgcgccgacagtggagcagcggcggcctcgcggtcgcggtgctcgccgtgctgtcgtccgtgctcatctgctcatcgggccacccggtgccgggcgggcacggcggcgggctccccctgaagctgcacttctacgggcacgcgtgcccgcagatggaggccatcgtggggtccctcgtggcgaaggcgcacgcggaggacccgcgcatggcggcgtccctgctgcggatgcacttccacgact

SEQ ID NO: 9937 - DNA, 418 bp, Zea mays
  Clone ID: LIB3156-008-Q1-K1-C10
gcatattactgctgttggtacgtgacatgtgtaggaaacaaaaaaaaaaaaaaaaaaaggaaggataaaaaaaaaaaaaaaaaaaaaaaaaaaaaaaaaaaaaaaaaaaaaaaaaaaaaaaaaaaaaaaaaaaaaaaaaaaaaaaaaaaaaaaaaaaaaaaaaagggggcggcctttttaaaaaatcaaattttacttccccgtccttgcaaagtaaaactttttttatagggcaaccaaaataaaattaactgcccgccttttaaaaacgtggaaattgaaaaaaccttggctttaccaaattaaattcctttgaaaaaaatccccttttcccaacttgggaaaaaaccaaaaagccccgaaccaatcccctttccaaaaaattcccaaacttaaatggaaaatggaaccccccttt

SEQ ID NO: 9938 - DNA, 382 bp, Zea mays
  unsure (1)..(382): unsure at all n locations; Clone ID: LIB3156-008-Q1-K1-C2
gccggcgccatcgccgccggcgccttcgaactttacgagaagcacgaggcgaagaaggacccggagcacgcgcaccgccacaagatcgaggaggaggtcgcggcggcggcggccgtcggctccggcggcttcgccttccacgagcaccacgagaagaagaaggaccacaaggaggccgaggaggccggcggcgagaagagcaccacttcttcggctgattgatccctcccgtatcgtcgtccctccccgtgtgctacgcgtgcgtgtgtgagagtgatatcgagcgcccgccgtgttgtgcgcgcgtacgtatgtatgcgctcgtgtgatgcacgaataagcgtggctacgtaatctatcgtatgtatacgtgtgtgtnnaa

SEQ ID NO: 9939 - DNA, 424 bp, Zea mays
  unsure (1)..(424): unsure at all n locations; Clone ID: LIB3156-008-Q1-K1-C3
gccgaccacgcgtccgcccacgcgtccgcccacgcgtccgggccaagttgcggttcctcttcgaggtggcgcccctgggcttcttgatggagaaggccggcgggtacagcancgacggcaagcagtcggtgctggacagggtgatcaacgagctcgacgagcggacccaggtggcctacgggtccaagaacgagatcatccggttcgaggagaccctctacggctcgtccaggctcgccgccagcgccaccgncactcgccgcgcccttatctgaattactagaatccgggctcgtagatgctggagtacacagtacagggaaattgcccacttttttcatcaacttaagtttttagattaaacttttttgaaacaatcagacaggagatctgtcttatatattgatgaggaagaaggatgccc

SEQ ID NO: 9940 - DNA, 80 bp, Zea mays
  unsure (1)..(80): unsure at all n locations; Clone ID: LIB3156-008-Q1-K1-C4
gcgtncgaaattgaaaaatatcactatatttagggttgaaacagaaccgaaaagtcctgtcctggtccgaatactgtttt

SEQ ID NO: 9941 - DNA, 457 bp, Zea mays
  unsure (1)..(457): unsure at all n locations; Clone ID: LIB3156-008-Q1-K1-C5
gctcaggatcatgaaaggatcagatgcatttggcctggctccagggccagctgataagtccaggaatcgcacctagaatggtggcttcttacagtccagagcaagagggagatatccagtgactgtagggatctttgtggaagccggaaaacgtctaacagtttcaagaagaattctgccttatggtctgtaccacatgtttttgctgctacgcaagtaaagaactccacgtctgtcaatgttagttttacaacatcgtctacggacaaaaaaaaaaccccccgctatttgattgttgctaagccttcgtacgacgtgtaaatggtttggtacaatgagtgctgcgactacgattgagcacccctctacctagtttgcanaaaaacagtgtcccatggactgtctgttgtccctctatataaatgtccaatgaagcttgctaatgtgtggtcataaa

SEQ ID NO: 9942 - DNA, 241 bp, Zea mays
  Clone ID: LIB3156-008-Q1-K1-C6
ggtggttgaacaataataagcgaggccgagcttgctgccatacataggtattgtgtggtgtgtgtgtgaaaagagagagaaacagagttcttcagtttgctatctctctctgcatgtttggcgtcagtctttgtgctcatgtacgtgtgtctacatgcatgttggttgatccgattgcgtctgctgtaaccatatattaattggtccacgatgatatgatttgatactatatatatatact

SEQ ID NO: 9943 - DNA, 200 bp, Zea mays
  Clone ID: LIB3156-008-Q1-K1-C7
ccgggccgacccacgcgtacggttttagtgttgcaacaccgcatgttttgcttttgggccatgtatcgtgttggagcagatgagggatgcaaccaaagggcatgcacgcccctaatctctattttatcagcaaccaccaccatattagtgtttgggttttgcttagatcatatttgtcatctaagaatttgtcgttcatc

SEQ ID NO: 9944 - DNA, 434 bp, Zea mays
  unsure (1)..(434): unsure at all n locations; Clone ID: LIB3156-008-Q1-K1-C8
cgggccgacccacgcgtacggcttaactgacggtttcgaccttggtgttgattatgctgntgggaggagacaaggaagaggggggctgttcaagcaagtcgcatggcaagagcggaaaccgaaagaagcacctgaagagcagcaagaagaggaagaggcattagccctggacccacactgctgtagcacttcaacatactgatacagcctagagacggttcaagcaatccacacggaaagttgaagctggagaaaataccaagaaaccaagtagagaaaaaaagctttggtacctgtaggaaagttgaagctggagaaaatacaagaaaccaagtagagaaaaaaagctttggttcctgtaggcgtattatttctgaaacagaaaacttgatctgagcgactgatcctgagccaatggaacagtatgaattata

SEQ ID NO: 9945 - DNA, 236 bp, Zea mays
  Clone ID: LIB3156-008-Q1-K1-D1
gtccaaacaaaaaaagcaccttctttcctaccttttgtccctgaccaagatcgcttgcaatcgggtgcggtaggaactcgccgagtggcaactcaacccccctgctggattcaagcacaggggctccgataacataacacaagtggttaattgcggtcactggagcggcaatcactctttacgccggcgagacctaccaattgcagggcgacttttctgaacattatcctatggaa

SEQ ID NO: 9946 - DNA, 448 bp, Zea mays
  unsure (1)..(448): unsure at all n locations; Clone ID: LIB3156-008-Q1-K1-D10
gcgtacgatgaggganagcttgactttaaaacttttggtanttnctccggacgacccgaaagcatgtctggtgaactacgagggggaggtggacaaatattttccggggacactgactgccatcagagactggttcagagactacaagatacctgatggaaagcctgctaacatatttggtctgggcaacaagcccgcaagcaaggaatacgccctgaaggtcattcaagagaccaacgaatcatgggagaaattggtaaagaggaatatttccgctggagagctctcgttggcctgattttggcccatgggacgacaccacattcttttgaactgctttcgtgagcatgtcgttttgaatgctgtgaccatgcttcttcgtttgcattccaaacctttttacgaactggttaacacaaaatgatcttgtcggatgaataatgattct

SEQ ID NO: 9947 - DNA, 457 bp, Zea mays
  unsure (1)..(457): unsure at all n locations; Clone ID: LIB3156-008-Q1-K1-D11
aaaccgggccgacccacgcgtacgcaagaccgcgccgggacgcggaggctttattatagacaccgngatctcagatgtccgggggggagatgtcgacgtcgccgtcgcattcaccggtgactggccaagccacccagatgaccagttcgacccggccgccctcccggtggtcagccacatcaccctgaagaacatgactggaacaagaatctcggtcgctggcgttttgtcaggaatcgccggcgacccgttcaccgacatctgcctctccaacatcaacttctcactggccgattcggccagtcccacctcccactggtcttgctccaatgtctccggatactccgagctggtcttccctgagccttgcctggatctgcagacccaatcctcagacgccttcgtctgctccaccatccctagctttcaccccggcggcattgcagcagcgtaaatg

SEQ ID NO: 9948 - DNA, 255 bp, Zea mays
  Clone ID: LIB3156-008-Q1-K1-D3
gaaggaacgaatggctatgctggatatgcgtaggcggcattgctgatgtgttgattggtgtacctccttatccaggcttgctgcctaccactcactccctgtgtgacgttttgccgaaattggtttgtattgtgcacgataatatctggaaatagactctagacagtccttagttatctttttattataaaaaaagtcagtgccttctcgtcagggttgagatggttgcagtattgatgcttttgtagtgttttt

SEQ ID NO: 9949 - DNA, 474 bp, Zea mays
  unsure (1)..(474): unsure at all n locations; Clone ID: LIB3156-008-Q1-K1-D4
aaggtatgcaactctgggtgcaccaacgctgtttgtccatcctggatcagcttatggaagagggtgttatggaccctttcaagcagggggcaagaagatatttgttggtagacttccacaagaagcaaacacagatgatctaaggcagtactttggcagatttggtcgaatcgtagatgcatatattccaaaggaccccaaaagaagcggccaccgaggttttgggtttgtcaccttcgctgatgatggtgtggcagaacgagtagctcgtagaagccatgaaattctaggccatgaggttgcaatagacacagcggcaccacttgagaatgattcagctgctggtgggtacattgatccaatggatctttacggagcttatggttcaatgagatctttcggcaggttctgtggcgggctagattacaanttatgctatggccccagcagcggaagcagccgatcaagatcgga

SEQ ID NO: 9950 - DNA, 393 bp, Zea mays
  Clone ID: LIB3156-008-Q1-K1-D5
catggagggtgcacaatcaccctttttactatcattgcccacgaggggaagctgtactgcaggcacgaccacatccagctgatcaaggagaaggggaacttcagccagcttgagaatgaccacgagaagacatcacaggctgggtcactggaggaggatgaacaagagtattgatcactgagcacaaccacagatgaataatgaatcctcttgcatttgcctagagcactatgtatttctgcggcgtggttcgatttcagttttaccaatggaggtcatgtgtgttcagagaacaatgatattgttgtcttgtatctgcatgtaaacgttgttatctttgagtcagatactctacctggtttcaccattttcattggtcagaagatgcctctg

SEQ ID NO: 9951 - DNA, 256 bp, Zea mays
  unsure (1)..(256): unsure at all n locations; Clone ID: LIB3156-008-Q1-K1-D6
acgaggcaaaggaaggcagcggttaaaacgatggctacaaaccttcaaaatcgatgagcaacgtacgaacacacatcaaaagagatgacaaatgacaagtctaggctcgtgattctaataggagtcatcattaaaaaaaggcttaaattgtagaatcgttgaaattagggaacaatgtacactgtctctggaaatttgttgcaactcttccacttgcctatagattggtaatggatatataaatgtttattcnnaa

SEQ ID NO: 9952 - DNA, 319 bp, Zea mays
  unsure (1)..(319): unsure at all n locations; Clone ID: LIB3156-008-Q1-K1-D7
ggaaaaaccgggccgacccacgcgtacggtttttttgggcgtgtgaccgtgtcctatgtttaactgagtacataaagagagatgggcgacgttcgttgtacatacgggttgtctatgtatatgtcgatacatatgaaacgtgaggcaagccttgtgtagttgtgtacctgcctgcatacatagggtattagggatggtagctgtgggtatggatactagcgagtttcgtatctggtggatatgaataatggtnnaaaaaaaaaaaaataaaaaaaaaattaaaacatacctttttaccaaaataaaaaaaaaatgggcg

SEQ ID NO: 9953 - DNA, 347 bp, Zea mays
  Clone ID: LIB3156-008-Q1-K1-D8
cggacgcgtgggctgccacactctccttcgttgctgccccttccctccccaagcacgggtccgttaccagagctcagcagcaggcgcctccttccatcatctcggcatcaactaagactgccttccatggggtgtcgctggtggtggacaggaggtgggcggccggccaccggagaggcagcggccggcggaggctgctgcaggtgaacgcgaggaccgccgccaagaacatcgaggtggaggtcgagaagccgcttggcttagccttgggccagaagcccggtggtggcgtcgtcatcacttctgtggagtctggagggaatgcagccagagccggtctgaaaacc

SEQ ID NO: 9954 - DNA, 399 bp, Zea mays
  Clone ID: LIB3156-008-Q1-K1-D9
accgggccgacccacgcgtacgattctcccaaattcccacacaacacgtatccctatgaggagggggtcctcccctcccggggtcgagcttctctcttgggtgcctctgcagttgcaattctgcagagcgcagaataatactacggtaatgggttccaagaagatgtatgtttgctccctgcctttgatgccacacgtcgtcttcggattcgtcagctccctactggcgtcagctcccaactggcagtcctataaagtggatgatccgaatgcgccgagaatgattcttctcgttattttctacgcgaacgtcatcttgctggctgaaattaagaacgtcaggatctacatcgagacggcaactgccgtggtgatatcttacgtgtcactacttaaaaa

SEQ ID NO: 9955 - DNA, 428 bp, Zea mays
  unsure (1)..(428): unsure at all n locations; Clone ID: LIB3156-008-Q1-K1-E10
atttcggtgcattggaattttgctttgaggaagcagccaaggaccctctggatcgttcttcgggtagcaaccttggaaagacaggccaagcacccgcggcagcctccaagcctagcgcanagaaagacaattttcaggtcaagtccggcatatgggcagactcgctgagccggggattgattgatctgaacataactgcaccgaagaaggtgaacctagctgatattggcatcgtcggtggccttggcgatgggtccgatgagaagaccctgccctcttggaccatgggcgccggatccggcctaggaatgtctggtattccaccgtcaacacaacaagctggtggcatcgagagcttggccaactacaacaagcatcatttcggcttcaaataagcctcgatctttcatactggaaaatacccgtca

SEQ ID NO: 9956 - DNA, 257 bp, Zea mays
  unsure (1)..(257): unsure at all n locations; Clone ID: LIB3156-008-Q1-K1-E11
gtgaaagcttgtaaggggctcaagtttaacatgtggtgaaagacatgtcaatatactaaagctgatgtccatctggctaaaccatatgtacatatttttactatggaaacaacgatccatatgtatatatggaataaagggccccnnannaaaaaaaaaaaaaaaaaaaaaaaaaaaaaaaaaaaaaaaaaaaaaaaaaaaaaaaaaaaaaaaaaaaanngggggcggccgatatggggggtccttttttacgttcc

SEQ ID NO: 9957 - DNA, 287 bp, Zea mays
  Clone ID: LIB3156-008-Q1-K1-E12
gaagaatgcgccattgccgcctgcggtacaaactctgataggcatgggcctggctataagaaacacaaactcagctgggaccgatcgccttgacacatacgacgacaccctacgcgcctcggacgacgacaccccattcgcccgccagcagcggagccggacaaccgagccttgggtctcccttctataggatccaacgctccttacccttccatccgagcccttatctcttctatagagggacataacttcaattgagcgcccctgtggttacaacgtctgacccg

SEQ ID NO: 9958 - DNA, 439 bp, Zea mays
  unsure (1)..(439): unsure at all n locations; Clone ID: LIB3156-008-Q1-K1-E2
ctccttcctagtatagtggcagcaagcgtattttgcttcctttcggggctgctagcaggcgtgaacctaccaatcaaagcgtaagatagaaatgccggcttcgattcactaacaaggaggaggcagggaaaaaagacctaaaagatcctctccacttgaagttgtaccaaatggtatatgatatcgcctttccctttccgatcttttgttcaaaggtgctttaattgcaaggatatggtaagcaataacctgctcatgctcctccatctttcaatgccccctatgagtgtgagtgatggagagagggagctgctaaaagagtctggcatgctctcataatgtttctttccggtctgtagtgcactagccatacactttgtggtgggggggctgttttttctgtagtgggtgtatatggactaatcaaangggactgatg

SEQ ID NO: 9959 - DNA, 412 bp, Zea mays
  unsure (1)..(412): unsure at all n locations; Clone ID: LIB3156-008-Q1-K1-E3
cggacgcgtggccgcacgcgtggccagtcttatggtgtcataccagggctcatcaagctgagcggctaaggcatggacatacacactttcttgtaactggagatgtttaccgtagggattccattgattcaactcactatcctgtcttccatcagatggaagggttccgtgtcttctctcctgatgaatggtcagggtctcgcatgggtgggacagcatatgcagctgcagaactcaagaaaacactggaaggcttggcaagacatctatttggtgctgtagagatgcgatgggttgacacttacttcccatttaccaacccatcctttgagctcgaaatatactttcaggatgattgggtggaggtttntgggtgtggagtcaccgagcaggaaattttgaaaagaaatgc

SEQ ID NO: 9960 - DNA, 275 bp, Zea mays
  Clone ID: LIB3156-008-Q1-K1-E4
gaaagacaggccaagcacccgcggcagcctccaagcctagcgcaaagaaagacaattttcaggtcaagtccggcatatgggcagactcgctgagccggggattgattgatctgaacataactgcaccgaagaaggtgaacctagctgatattggcatcgtcggtggccttggcgatgggtccgatgagaagaccctgccctcttggaccatgggcgccggatccggcctaggaatgtctggtattccaccgtcaacacaacaagctggtggcatc

SEQ ID NO: 9961 - DNA, 374 bp, Zea mays
  Clone ID: LIB3156-008-Q1-K1-E5
gcgtacagtaccctctagaagcctccgggtttttttttgtgggttgctaactactcgcagcggccagaggccagatccagccgccaaccccccaaacaaaaccctaggccaccattctgaccaccaggcacaagcagagcagaagcagacatggccaccattccgaccaccgattctggcctcgtcctcagttcctccgctctcctccggaggactaggagggccgcctcatccgtcaccgccaggctgccagccgtcgcccgccgtcgcccgcagctcctcgtgcgtgcctccgccaaggagatcgcctttgaccagggctcaagagccgcccttcaagccggcgtcgagaagctcgccgccgcggtcggcgt

SEQ ID NO: 9962 - DNA, 379 bp, Zea mays
  unsure (1)..(379): unsure at all n locations; Clone ID: LIB3156-008-Q1-K1-E6
gcaagaactgcgtccccgtctccacggacattggcgccaccaagtacagatgccgcgactggctcgccgaaaactgcggctgcaagatccactagactcatccacagcggcacagccgatggatccttccatgctcctccgtccgtccgccttgctacaagcaggcagccaccaataagctagctcttgctgttgttttgcatggttgattgggtgtccctttccagtcgagatggaataatgtcaggcgcacgtacagacgtattattacccatattctcccctacaaataaaactcgaactgtggggtaacactgtcccctagtttacanataaaaaaaaggatgtattacgcatgttaagaaacatctgatttcct

SEQ ID NO: 9963 - DNA, 355 bp, Zea mays
  Clone ID: LIB3156-008-Q1-K1-E7
ggcgcatcgtgcggaaatcacaggaaatgttatgaagaaaatggaatactggggaagtcaaccgtgccatgtcaggctacgagattttgctttcaacctcaaaatgctcatctgacatcttgtgtattttccatttagcgtctgttcattggtgcaccagaaatgcattgggacgtggtgtatcgtgtggcctgggctctactaatgtttgacaatcctgaagtgccaccagtggtgaacctggtataagcaggcgccattcatgtcagctaatcgttgagaaaacatatcagtgaaatcgtgcaactgttagtgtaatgaggcagttcctgcttacatattattactcgtgcta

SEQ ID NO: 9964 - DNA, 458 bp, Zea mays
  Clone ID: LIB3156-008-Q1-K1-E8
aagcaggcggccaccatggtgaagggacgcacgggacagcgcgtcaggctctacgtgcggggcaccatcctcggatacaagaggtccaagtcgaaccagtacgagaccacgtcgctcgttcagatcgagggggtgaacaccaaggaggacgtcgcgtggtacgctggcaagcgcatggcgtacatctacaaggctaagaccaagagcagcgagacccgctacaggtgcatctggggcaaggtcacccgcccgcacggcaactcgggcgtcgtccgcgccaagttcaagtccaacctcccgcctgagtccatggggcgcaaggtcagagtgttcatgtacccgagcagcatctaaggttaggtttttgttgaagtaaaggtggactccaaatggccatgcttatttctttctctgagcttaaaatgccatgtgttggcaacttagaatgttcatgtact

SEQ ID NO: 9965 - DNA, 301 bp, Zea mays
  Clone ID: LIB3156-008-Q1-K1-F1
ccagcataagctccacaggcggggacgatggcgccaagaagtcttggccggaagtggttgggctcagcctggaagaagccaagagggtgatcctttgcgacaaacccgacgccgacatcgtcgtgctgcccgtcggcacgccggtgaccatggatttccgccccaaccgcgtccgcatcttcgtcgacaccgtcgcggaggcaccccacatcggctgaggtttaaatctacaaaatgaatagctcgatcggacatgccatgcgtacctgtatccgtcgccgaataatggatgtgtgtgtgc

SEQ ID NO: 9966 - DNA, 404 bp, Zea mays
  Clone ID: LIB3156-008-Q1-K1-F10
caagtacgcaggcagcgcagcctcgatccgttgccatggcgagcaagcacctcgtcggcgcggcatgcctcctcctgctgctgctcctgcccatcgcctcggtcgccaccgacgtcgactactgcagtaagaaggactacccggtgaaggtgagcggggtgcagatcgtgcccgatccggtcgaacccggcaagcccgccactttcaagatctccgcttctactgataaaaccatcgagaaggggaagctggtcatcgacgtaaagtatttcttcttctacgtgcactcggagacccgcgacatctgcggagagacttcctgcccagcgaccggcgacttcgtgctgtcccaccagcagacgctgccaggcttcactccgccgggcttctacacgatctacatg

SEQ ID NO: 9967 - DNA, 383 bp, Zea mays
  Clone ID: LIB3156-008-Q1-K1-F11
tgcagcgccgcctggatcgagcagcctagctactaagcgaagactcccttttccccgagcacaagagaaccatggcggcggcggcagtttacggcggcttcaaagggaagcttggcgtcgaggatgcccccgagctgcagctcaaccgcatccgcatcacactctcatccaagaacgtcaagaacttggagaaagtttgtgcggatttggtaaagggagccaaggacaagcatttgagggttaagggacctgtccggatccctactaaggttctccacatcaccactcgcaagtccccttgcggtgaaggaacaaacacatgggatcggtttgagttccgcattcacaagagggtgattgacctaatcagcttccctgatgtg

SEQ ID NO: 9968 - DNA, 467 bp, Zea mays
  Clone ID: LIB3156-008-Q1-K1-F12
ccgggccggacccacgcgtccgcggacgcgtgggtctgcgagcggaccttctttttttttcttttactcgactggttccagcacgggaaattcgcaaatatgcgatttgggcaacatcaaggaatccacatttcaacacacaatggcactagatctactacaccactggtcaatagacacacgacccaccactacagatcgtaaacgatctactcgaacacagggcattcaacattcacaggcggttaagagcgcccactgtatgcctgtctagggggacgttggacgctcgtcttgggcgactgtggcctggcttggcacgtcgccttctccgcagtctttttgggcaggagcacctggttagatgttggggaggacgcctccgtgtacgcggtcagaactgtttggaggagatatgacatcacgacttagatgtctgttcattccaaaaatgcaagctcctatta

SEQ ID NO: 9969 - DNA, 439 bp, Zea mays
  unsure (1)..(439): unsure at all n locations; Clone ID: LIB3156-008-Q1-K1-F2
agcagacgccgtcgtacctgaccggcgagtttcccggcgactacgggtgggacaccgcgggcgtctcggccgacccggagacattcgcgcgcaaccgggagctggaggtgatccactcccggtgggcgatgctgggcgcgctgggctgcgtgttcccggagatcctggccaagaacggcgtcaagttcggcgaggcggtgtggttcaaggccggcgcgcagatcttctcggagggcgggctggactacctggggaaccccaacctggtgcacgcacagagcatcctggccatctgggcgtgccaggtggtgctcatgggcttcgtcgagggctaccgcgtcggcggcggcccgctcggggaagggctcgacaaggtgtaccccggcggcgccttcgacccgctgggcctcgccgacgacccggacaccgncgncgagct

SEQ ID NO: 9970 - DNA, 134 bp, Zea mays
  Clone ID: LIB3156-008-Q1-K1-F3
tagatactggtgacgaggtgatacataaggattacgatggttgtggtattacatgtactacagtgtgcgatcgaacctgaatttggtcccttttggatgcacagtcatggaaggatggaattgcatggtgaacc

SEQ ID NO: 9971 - DNA, 436 bp, Zea mays
  unsure (1)..(436): unsure at all n locations; Clone ID: LIB3156-008-Q1-K1-F4
gtcgtcgacggcgttcagtcaactgttcctttccgtcgctgcggnatcacccgtccctcgctgcgtgtccctgcagctcttctgcgccagcggtggagttgtccctggatggaggagaagatgccgccgcatggccatggtgcgcgcggccaccgcggatgctgcggcgcccgcctacacctccgattccctcatcctctacttcaaggcggagggcaccatggaggagagggccattcccaagatcacagaatctcttgagggtatggagggagtcaaggacctggaggtgctcattgaagaaggcatcggaagtgttgtgttaacaaaagagacaactgtgcaagctactggagtagcctcgaacctggtggaagctatccaaggagctgggttcaagctgcaaactctaagcttgagctttgatgatttcgac

SEQ ID NO: 9972 - DNA, 480 bp, Zea mays
  Clone ID: LIB3156-008-Q1-K1-F5
gcttggtgaagaactggtcgagaaatatttgtccaaacagctaggttccaacaatgttaggtgggtgaacaacagaattgaaaccggactgccttatgatattgttataacacacccagagggtttcacagagtatgtggaggttaaaacaactgtatcttcaagaaaagattggtttgacgtctcagcaagggaatggcagtttgccttggagaaaggggattcatttagcattgctcgtgtcatcttaggtacaaagaaagcaagtatagaaatgttgaaaaacccacacaagctttgtaagcagaaagcattgcggcttgctctcctgatatccagatcggcagcaacctagactaaaatgtcggttttgttgaggctagcaccgataatccttctgcagattgttatgattactctgactaataatcaacatgaactggagtgagcatctgcatcttgataggtatttgctgatcc

SEQ ID NO: 9973 - DNA, 456 bp, Zea mays
  unsure (1)..(456): unsure at all n locations; Clone ID: LIB3156-008-Q1-K1-F6
ggatgaaactaagtccgtgaatttgggacgcttgtatcaaaggtggagcaagtgcgcggtacgattagctttgggataccaactaagcagtgagcatgcaggaacacattggtgatctttcgtctttaaccccccatgtacatggcttttttgaggtgggataggaatggcggttgtgtttcccatggccattctttgcacgttatgaagctcagctgcaggatgctcttatatagagagaaatgttagtcacatcacatcgcgtgtccatactgtatagcgaaacttaacatgttgtaatatcggtcggacaatgtgtgcggtgtggatggtatctttcttagatagatgcgcaagcttaaccgntggcatttatggattaaggattggaagaatattcacggtggataataaataaatgattttttttggggtaaaaaaaaaaaaaaagggcgg

SEQ ID NO: 9974 - DNA, 327 bp, Zea mays
  Clone ID: LIB3156-008-Q1-K1-F7
ggacctgatccgttatggtgtgcttgaatcgtggctgtggagatgtgtggaactcattggtgaaagtgtgctttattaataatggtgatgctgaaaaaaaaaaaaaaaaaaaaaaaaaaaaaaaaaaaaaaaaaaaaaaaaaaaaaaaaaaaaaaaaaaaaaaaaaaaaaaaaaaagaaaaaaaaaaaaaaggggcgatcgtttaaaaagatccaaatttacgtacgagctaatgaaaagtgatactttttttaaaaggaaaccaaaattaatttacctggccggaattgaaaaaaccttggactgggaaaactttgtcgtatccaa

SEQ ID NO: 9975 - DNA, 315 bp, Zea mays
  Clone ID: LIB3156-008-Q1-K1-F9
ggaggtattgtattggcttctcgagatggaaagattgtgtttgagagtacacttgacgcaagactagaagttgttttccgcaagaaattgccagagatccggaagcttctttttggccagactgcagcctaatcgactcatctgccgatggtacggctgcttctatgtaatggttgccggctgcacgcctgcactgcagccataaggaactccgcctgtttttgtcaaattgattgtttaaggtattcatcccccctatgtacaaactacctattggttcattattgtcgccgagagcaccgactgttttgtact

SEQ ID NO: 9976 - DNA, 276 bp, Zea mays
  Clone ID: LIB3156-008-Q1-K1-G11
cttatctcccgctcccggctccccttctccctcgcgccgcgatgaacacagccatgggcaccacctccttatccctccaaggccgcccatcccacgctcacaccaggaagctctcctccccgttcctcggcgcccccgcatccttcctccggccgctggctcccacgcccgccgccggcccctcctcgcggcggacgcttgccgtcagggccatggcgcctcccaagccgggaggcaagcccaagaaagtggtgggccttataaagctggcgctcg

SEQ ID NO: 9977 - DNA, 467 bp, Zea mays
  Clone ID: LIB3156-008-Q1-K1-G12
ccgggcgaccacgcgaacgcggacgcgtgtctgactcttggctttactgtcatgctgatatttgggatgggtgtctgggttctattggtcagcggcgctgcctccattgttcctcctgaatccgaccgtgccctcagcggctcgtcgctgtttgggatgttcgctttgaaggaacgcccgaattggatgaacatcacctcgcttgacgagctcaagacaaaagtggggcacgtcatcgtgatgattctacttgtgaagatgttcgagaagagcaagatggtcacgatagccacggggctggacctcctcagctactcgatctgcattttcttgtcgtcagcttctctctatatcctgcacaatcttcacaagggcgaccattaagagtgacaacaatgcaatgcccaatttgtaccccattttaaaaaaaattgatggtgttgtccaataaccaatactgggatttt

SEQ ID NO: 9978 - DNA, 415 bp, Zea mays
  Clone ID: LIB3156-008-Q1-K1-G3
gttctggtgagcaaaaggatattgatagggttatgtctacaaggttagctaatgagaatgacgctagcaggcgtctgaaatctgaatttcttatccagtttgatggggtgtcctcaaacccagatgatctagtaattgttataggggctactaataaacctcaagaattggatgatgctgttcttcgaaggctggtaaaaagaatatatgtgccactacctgatccaaatgtacgaaggttacttctgaaaaatcagctcaaaggacaatcattcaaactgtcgaaccatgattttgaaagacttgctgtggagaccgaagggtattctggaagtgacctgagagccttgtgtgaagaagcttgcatgatgccaataagagagctcggtccacaaaatattcttactatcaaagc

SEQ ID NO: 9979 - DNA, 447 bp, Zea mays
  Clone ID: LIB3156-008-Q1-K1-G5
ccgccactgatctgctctgttgctggtgactaggagcagtagcgagagggattctggatggccaagtcgaagaaccacacggcgcataaccaatcgttcaaggcgcacaagaacggcatcaagaagcccaagcgccaccgccagacctccaccaaggggatggacccgaagtttctgaggaacttgaggtactcaaggaagggcaacaagaagagtggcgaggctgagtccgaggagtaagatgatggtgattgagtttgtggcgacaaatgcatctttttgtatcgctaagagtcttagctgtgaacttagttctcacttctgtgtgactgtgatcaaaggactggtgtatgatcaaaggagatccatcagttggtaccgaagtgtatttaatgtctggtgggttacctggaatttaattaaaaccatcactggtttcctttggag

SEQ ID NO: 9980 - DNA, 286 bp, Zea mays
  unsure (1)..(286): unsure at all n locations; Clone ID: LIB3156-008-Q1-K1-G6
atgagattggttggaactatgatgcangaatgaccggngttgtatttgtgcccatcatattgtcatggttgccttcacttggcagccgtggtttggagtcgcaccctcatattgggtgcagccttggaagcaaggcaaacatgccccccgtccgcctttgcaatatatgttttggcatgcttcattggatttaccgtgttccttagttttcttttatatatatagctgcggctcatatgttgaacaagtttacagcttttatctgagcactttatttgtgcactaa

SEQ ID NO: 9981 - DNA, 389 bp, Zea mays
  Clone ID: LIB3156-008-Q1-K1-G7
gaagaagatcatgagcagcgccaccgcgtcgagcgccaggccgcccagcagcagcgcgtacgtgatgccgacgtcgacgggcaggatctggtgggcgggcttgtcgaggaagaagaagatgaggagcgcggcgacgaggcagcaggagcagatgcagcggaggacccagccgcaggtggtgtaggcgacgggcgccttggtgtacaccatgtcgtagatgaagttgagctccacctcgatgacctcgaacgcctcccggatggaggttgtcgttgtcgtctcctctgtgtctgtgtctctgacgaagaaggcctggctgagccgcctctccttgaagctgaggatgacgttgacgaagaggcggcgggaagatgagggaagaagtcgta

SEQ ID NO: 9982 - DNA, 459 bp, Zea mays
  unsure (1)..(459): unsure at all n locations; Clone ID: LIB3156-008-Q1-K1-G8
tgagtggggaaagatctccctgattggcacctcagggatctcaggttcctatgttgagctaagggcatgatgggacgtctgcaggtaaccatggaaatcatcgatgagctgaggaagtctgtagatcagaatatgccagtactgcattttcctttcccctttctagctagcatggcaataacaatgagatcatcaaacagcggcgcggtttaaggaacttcagatactcccggcccttgtgtctgtgtctttgtctgtaataagaacgtgtatatgcgtgaaacctatcagttctgttattttttggcatgcgcctgacttcttgttcaactggtgtgagttgtatgncttgttcatgaagcactgatcaatgatcatatgccttcgcccgcaacagaacttncttcagcactgcaaaaatacagtgacctgccattttttatgaaagggttaacaatc

SEQ ID NO: 9983 - DNA, 222 bp, Zea mays
  Clone ID: LIB3156-008-Q1-K1-H1
ttttgaatagcagggtgttttttcccccatagatctactccatttatctgatcatcaaatcagcccttaaaaccattttttgtcgattctttcacccatcgcccgctcacccatattgtatatttttaagcgttgaccctgtattatatcaagcgagttgacactcccaagaaggaaaagaactgtgcaccaccctacatggaacattggctcaataaatat

SEQ ID NO: 9984 - DNA, 377 bp, Zea mays
  Clone ID: LIB3156-008-Q1-K1-H10
ggggcgaccaagcgtacggccgccggcaccgtcggcctggccttttacttttgcgacatggacgagcacatcccggcgggtgttgcactgatggtggggtggatcctgcacaactgggatgaggacaagtgcattaagataatggagcgctgcaaggaagcgatcggtggcaaggaagcaggggggaaggtgattataatagacacggcgctcggatctcgggcagacgacgacgacgacgacaagacgtgcacggagacgtatgtgttggatctccacatactgagcttcatgaacggggcggaacgggaggagcacgagtggaggatgatctttctggcggcttggttccctgactacaagatcacgcacacccg

SEQ ID NO: 9985 - DNA, 408 bp, Zea mays
  Clone ID: LIB3156-008-Q1-K1-H11
cttgctgttgccgctcgctcgccgtgccgcattggctacggccgtcgcctcccatgcgttgcgctcctccgccttcgctccgcgccactaccaccgccgcctgacccggaccgcgtccgtggggccgtgccgggccgccccggtgggactggccgtgcggtgcgagaagagcgacaagcagaagaggcagccgctcgccgcgctcgtgccccgcgagcagcgcttcatgttcgagggagacgagctctgcggccccgacatatggaatacaacctggtatcctaaggctgcagatcatgtaactaccgagaagacatggtatgttgttgatgcaacagacaagatcctaggcaggctagcatccaccattgcagtacatatcaggggaaagaatgaacccacttacac

SEQ ID NO: 9986 - DNA, 483 bp, Zea mays
  Clone ID: LIB3156-008-Q1-K1-H12
acggggcgacgacgcgtacgggacgcgtgggccgcgctcgacgtttacgtatacggagggctgtcccgcgccgagggccggtgcacactcgagtcctgtcgcctcctcgacggcggcggcttcgggtccgtccagccggcgccgctccccgccgaggtcgccgcgctctacgacgccgtcttcgagcagttcgacgccgaccacagcggcgccgtcgaccgcgccgagttccacgacgagatgcgccgcatcatgctcgccgtcgccgacgggctcggctcccagccgctccaggtcgccgtggacgacgagggcgggagcttcctgctcgaggcagccgagcacgagggcgctgggatcgccgccaagatcgaagccaaccgcaaggccgaagcggaggcggtcaagtgacgacgtgtccctcgtgcgggccctgcgcttgattttctgggtgattgctactacggactagtactacttacg

SEQ ID NO: 9987 - DNA, 283 bp, Zea mays
  Clone ID: LIB3156-008-Q1-K1-H3
gttcgagtggcgggaccttgttggcacaaaattgcctgggtctccatttgggaggaatccggggaaaaccctgacttgatgatgaccccggaaatcagagctcagaatgccacaatttaatatgttgcttttaaggtattagtagatagtaactatttggtattgatctatcgaggctgcagcttgtctgtaaacacaactttccagcttgtataatggatcaacggatcacctgacatgtgacggtggccgaagtactacgaactctaatgacgttggaacg

SEQ ID NO: 9988 - DNA, 205 bp, Zea mays
  Clone ID: LIB3156-008-Q1-K1-H4
gtcacacacacacacacacacacacacacactcacacacacacacacacacacacacagacgagtggttttcaaagccaagtgtgtgtactagcaaccagctagctcgggcggcagcaggcagccatcatgtcggaggagaagcaccaccacttcttcaaccaccacaagaaggacgaggagcagcccgccggcgagtaccggta

SEQ ID NO: 9989 - DNA, 489 bp, Zea mays
  unsure (1)..(489): unsure at all n locations; Clone ID: LIB3156-008-Q1-K1-H7
accgggccgacccacgcgtacgctccagtctttgggcaccaaatttccttcggttatggcggcggctgtggcgaggtcagggtggcggcgcatgtgctgcgtgtctgccttcgcgccgncgaaggcgcccgccgcgcgccccaaggccgacccatcccccaacctcttcgtctccggcttaagcaagcgtaccacaagtgaaggacttagagaagcctttgcggagtttggtgaagttttgcatgctcgagttgtgaccgatcgtgtcagtgggttttctaagggatttggctttgtaaggtatgctacgaccgaagaggcagccaagggaatagaaggaaaggatggaaagttccttgatggatgggttatttttgcggaatacgctaaacccagaccaccgccgggagaaacagggatgaatttccaaccccagcaatcatggggagctccatcaagttcctggggtgcacagtagatgaagtgata

SEQ ID NO: 9990 - DNA, 449 bp, Zea mays
  Clone ID: LIB3156-008-Q1-K1-H9
ccgggccgacctacgcgttcggtggcatttaaggtatgtttgattggttattttttatggcaagacttgcttgaccggggtaagttttagtccctccattggatgttattttagtccttaaatttttaaatatgaaaactaaaactttattttaattttcgtatttgataatttaaagactaaaatggaataaaattgatggactaaaaattagtccctacaaaccaaataccccttattttacagtgtaattggtagatgagataagctacagtagtgggtgttagacaccatacctgggcaggtatacaactgctccctagcttgtatacgtatgtatgcaatgtgcaatgcatagaacagcttaacagctctcaattcctggtgtgttcaaagctttattgcattattgccaacactgtttacacttgatctcaatgtaaacaaac

SEQ ID NO: 9991 - DNA, 363 bp, Zea mays
  Clone ID: LIB3156-009-Q1-K1-A10
gcccctcgggccgccggcgccgatggagaaggtgaagaacatgctcaagccgcggccgaggccgcagcagcagctgcgcgagtggcagcgccgcctccgcaacgagtgccgcgtcctcgaccgtcagatccgagatgtgcagagggaggagaagaacgtggagaaagccatcagggaggctgccaagcgcaatgacatgggatctgcaaaggctcttgctaaggaacttgtaagatcaagacgtgctgttaatcgtctttatgagaacaaggctcaactaaattcagtatcaatgcaccttggagaaattgtcgcaactgcaagaacagtgggtcatctgtccaaaacactgaagtgatgaaa

SEQ ID NO: 9992 - DNA, 335 bp, Zea mays
  Clone ID: LIB3156-009-Q1-K1-A2
ggcctccaacccggacgcagcgaggtgttcttagagccacagacggaggagattcgacggttccagctgagggagttcggcagccgggactgtagcgacgagctgagccaagcgagctggagaagccgaagagatttgtgaacagattcggtacaagatcattaacattcttttttttttgctcattctttacatgtaattatctcttttacatgattctttttttttggttttactcctccctgaggcaattcttgttccccggtggaataaattttgcgtgagataagtaaattgaaccctctttttgcagtgaagagagttcggttcctggc

SEQ ID NO: 9993 - DNA, 279 bp, Zea mays
  Clone ID: LIB3156-009-Q1-K1-A3
gcttgctgttggaaacattgtgagacgtgttttacatataataaaggaggaggatatagcttgcacagcagttggaattgaaggtctttctgttactgttgacagtgatgatgaatatgacagtgaacatgatgatcgccctgcattatctgctgctgttcttgctgcacatgctagaaatgcccttcgtgcaccttcattgcagactctgctagaagacattcctgtgagtcctgcaatttcccgcattgaatcatcaaccggtgactcaaacggaaa

SEQ ID NO: 9994 - DNA, 395 bp, Zea mays
  Clone ID: LIB3156-009-Q1-K1-A8
acatgccatcctttaatatgtatcttgagtacgtgcaatccatctctgacaggctggaggaactatagcagcaagttctccaaatgcgtgaaattttgtttgatccacaatcaacagaattcatcgttgagacaattccaacgatgatggcagttactgagtcatcaacgtttcactagtcattaaagaaggatggtgcacacacaacaaggctccttataaatcacgtgttgccaccctctgcgtagcactgcatattctgtgctgcaaaacggacgcaagaaacacgtgccttccgtgcgatactttaagaccgataactttgttgcctgaagcttatccacgctccgctcctttatatggaacttaaacgcgttcctgcacttcgatttctc

SEQ ID NO: 9995 - DNA, 413 bp, Zea mays
  Clone ID: LIB3156-009-Q1-K1-B1
gccggggactggaccacgctgacgcgctggggctcatcgccatcggcaaccggctccggtgcatcaccaactggctggtggtggccctgcagaagctgcggcacccgcacgccgacaacgggcaccaactggtgaagctgtacggcccgcgcgtcaaattcgaccggggcccgtcgctggcgttcaacgtgttcgactggaagggtgagcgggtgtcgccaatgctggtgcagaagctcgccgaccgtcacaacatctccctcacctgcggcttcctgtgcaacatctggttctcagacaagtacgaggccgagagaggcaccgtcctggagcacaggatcgccggcaattccgttgctgtgggcgccagagggaagaagagaaaggacgccggcggcgacgtggggattctc

SEQ ID NO: 9996 - DNA, 351 bp, Zea mays
  unsure (1)..(351): unsure at all n locations; Clone ID: LIB3156-009-Q1-K1-B10
tttttcaacaactgcgaacagctgcatcctagctaatgggggctttttttgtgctgtgagcagcctactgttcaagatgatgttttcccttcttctgagaacaccactagatgggtggttcattaaaaataataaaatcacacgactatttttactatagagtactcctacgccgcaaaaaaaaaaaaaaaaaaaaaaaaaataataattaaaaaaaattatataataaaaaatatataattttttttattgtttataatataattttattattttaaatatanggggggggcggctttttaagatcaaaaatttttttcccctcgttgagaggaaaaaattttttttttt

SEQ ID NO: 9997 - DNA, 303 bp, Zea mays
  Clone ID: LIB3156-009-Q1-K1-B11
gcgtctacaagcggttgcgccccactgccgagttcctcaagtcggaagtcgggttacaggggccagatctccagagggtggtcatgaccttccccgatatactgtcgcgagacgtggataagatcctgcggcccaatctggcgttcctacagagccgcggattcagcagggatcaggtcacggcactggtagctggttaccctcctgttctcatcaagagcatcaaacattgcctggagccaaggatcaagttcctggtcgaagagatggggcgggacattggcgaggtggtagattaccccc

SEQ ID NO: 9998 - DNA, 267 bp, Zea mays
  Clone ID: LIB3156-009-Q1-K1-B12
aaccgggccgacccacacgtacctcattcccttcttaataaactccaccgctttttttttaccttcttatccacaccatcaacgtgctttatttaaccagtcacccacatctcttatttattcacttatgaccccataattaaatacatattcttccaatcctttgctccacacataaaacacatacccacatctattattcatgatcattttcttttcttataaaacttttcatcatacttaaatttacttctttttcttttaaac

SEQ ID NO: 9999 - DNA, 412 bp, Zea mays
  Clone ID: LIB3156-009-Q1-K1-B2
ctcactacgcgaccgctagctactccgatcggatcctgaccacgcccgcctaccaggcgagcaccaccaccaccaccaccacccacaaatccccaatggcgaggcgcatcgccgtggcggcagcgttcctggcgctggccgtggtggctcccgccgcgctggcgcaggctcccggccccgcggcgacgcctagcgggccgccgaacgtgacggcgatcctggagaagggcgggcagtacaccatgttcatgcggctgatgaaggagacgcagcaggacacgcagctgaacagccagctgaacagctcgtacgccagcagcggcggcgggtacacggtgttcgcgcccaccgacaacgccttcaacaacctcaagcccggcacgctcaactcgctgacgcagcagcagcaggt

SEQ ID NO: 10000 - DNA, 388 bp, Zea mays
  Clone ID: LIB3156-009-Q1-K1-B3
atcagcaccaacgttaactgcaacacgattaattaagtgatgaggcgtcctgtgcgcgtgccgggcgaggaatgcatgcatggcgctggcggagagtaataaaataatgctactggtattttaagctatatcgaggtgtgcctgtctctagtcatttattatggtgtttaggaatggtctacacagttcgtaacggtgtatcgtggatgcatgttgccgcgagcagagtacgtaggcatgaaccgatgtgtgcgcttctgtctgtttactctctctatgtagtaatgtgtgggtgctttgatccagatgtattcgctcgtgagtcgtggaagtagatcgtttcagtttcaaaaaaaataaaacaacctcaaagccgaaaaaaataaaa

SEQ ID NO: 10001 - DNA, 414 bp, Zea mays
  Clone ID: LIB3156-009-Q1-K1-B4
cacgacttccgtccgagtctgagctcatctccacgcgccgccgccgccgctcgacgcccaccgcgcagccatggcggaacagactgagaaggctttcctcaagcagcctaaggtgttcctcagctcaaagaaatctggcaagggtaagaagccaggcaagggtggcaatcgattttggaagagcattggccttggtttcaagactcccagggaagcaattgaagggacctacattgacaagaaatgtccattcactggaaccgtttctatcagaggcagaattattgctggaacatgccacagtgctaagatgaacagaaccatcattgttcgcaggaactatctccactttgttaagaaataccagaggtatgaaaagaggcactccaacattccagctcacatctccccatg

SEQ ID NO: 10002 - DNA, 422 bp, Zea mays
  Clone ID: LIB3156-009-Q1-K1-B5
gcaaggggaacttatagagagctttttgcctgttctcgacaactttgaaagagcgggggtgcaaataaaggtggaaacagagggtgaggagaaaataaataatagctaccagagcatttataagcaattcatcgagattttgaattcattgggcgttgaagatgttgaaacggtcggcaaaccatttgatcctatgcttcatgaggctattatgagagaagaatcatcatagtttgaagaggggattattctccaggaattccgaaaaggtttcaaactcggggaaagactgcttcgcccagcaatggtcaaagtgtctgcaagaccaggccctgaaaagtttggagatgatgacccaacagctgtcgaaggtagtgtggcacctcaaaaggttgacgaagtctaagacgacggttttggtg

SEQ ID NO: 10003 - DNA, 390 bp, Zea mays
  unsure (1)..(390): unsure at all n locations; Clone ID: LIB3156-009-Q1-K1-B6
agaaanggggggaccgacgcctcctcccgacttccgacctaatattaactcattttcatgctccgcccacctctctagtagccgacgagccattcatggtggaacaaactgataaggctattctcaatcatcctaacctgttcctcaactcacaaaaaactggcatgggtaataaaccacgcattgatgacgatcaatctttcaagaacatcttccatcgtttcatgactcccgctgttgcaattgaagaatcctacattgtcaacaaatgtccattctctgcaacaatttctatcagatgcaaacatattgctaagacatcctacaccactaatattaacagaaccatcattgttcgcacgaactatcttcactttttttaaaaatacc

SEQ ID NO: 10004 - DNA, 395 bp, Zea mays
  Clone ID: LIB3156-009-Q1-K1-B7
gttccaccaggcaatagcggcagttcccacctcaagtgtgaaataccctctaccgggggacaaaagcaacattgcccttgctagcttaccacagccaggctctttgctctcaagctacgttgggggctttggaactgcaagcaacatgcctggaaatttccatgtgaatcaaagcacagcagcatcaacaacaactcttgggtttgatgggacggtccctgcacatttcaaagatggaaatcaatttatttctcttcagcagaatgagaaccctgcaatgtggatgcatggtgctagttcacgagggatgcccccacttgcaggcagaaccatgtatggctatcaagggcagaatcatcaggccggccttcgtcagggccaactacctacacaat

SEQ ID NO: 10005 - DNA, 383 bp, Zea mays
  unsure (1)..(383): unsure at all n locations; Clone ID: LIB3156-009-Q1-K1-B8
gaagaacnggggcgaccgcacgcgtcctctcgacttctactctactattagcccctattatcaccccgccatcctccctataacccgagggctctttcatggtgtatcctactccccaggccatccttaaaaatccccacgtgatcctcatctcaaataaatctggcacgggtaagtaatgccaggcatattgggctttcaataatgcaagagcattttccttactttcaatacatcccactgattcacttgaagggacctacattgacaagaaatgttcattcactggaacacgttctatcagaggcagaattattgctcgtacatgctccagcgctaatatgaacagaaccatcattgttcgcaagaactaatttcacttt

SEQ ID NO: 10006 - DNA, 416 bp, Zea mays
  Clone ID: LIB3156-009-Q1-K1-C1
ctgaggatgaaaggaattgtttcgtagatgcttataacaaaaggttaacttcctctgatcctattgttcaggttgaagctgctaagcgctggacgatgtgggagatgatgactgcgcaacttatccaaaacaatgataacattaaacgaggagaagatgatgaattttcactggcatttgcaaggattgaaaaccactactttgtgaataagggatttttaccctcggactcattcctattggacaatgttgataagatccgacatattaaaggttttattgtacagggacgttatgatgtttgttgccctatgatgtctgcttgggatcttcataaggcttggcctgaagcagaattcaaggtggtagcagatgcagggcactcggccaatgaagttggcatcgctgccgaactg

SEQ ID NO: 10007 - DNA, 161 bp, Zea mays
  Clone ID: LIB3156-009-Q1-K1-C11
ctcacactttcttcaacacgttcgatatatttagccatatatatgctatacttttttgtgtgcaagaattgcagggaggctgctttgctattgaatgtgccggatacatctttgctagaagtgggtataatctatcatgtgtaactgtaactacatttatc

SEQ ID NO: 10008 - DNA, 347 bp, Zea mays
  Clone ID: LIB3156-009-Q1-K1-C2
ctgggctagtactgatccaatcgacactaatatgagctgaagatactacataaaacatgaacaatatggagttttatatacttgaccccagtccaggttttaaatccacccctgcaaggggtgagtttatgtttgtgtttgggagtgtatatttctatattgcagtttgaaaaaaaactatgtatgtaataaaataagaatacatcaattcattcacatgacccttgaactaattaatattggacaatgttgaataagatccgacatattaaaggttttattgtacagggacgctatgatgtttgttgccctatgatgtatgcttgggatcttcataaagattgtcc

SEQ ID NO: 10009 - DNA, 401 bp, Zea mays
  Clone ID: LIB3156-009-Q1-K1-C4
tattaattggtccacgatgatatgatttgatactatatatatatactaaaaccggacttattataatacttgtagtaaaaaaaaaaaaaaaaaaaaaaaaaaaaaaaaaaaaaaaaaaaaaaaaaaaaaaaaaaaaaaaaaaaaaaaaaaaaaaaaaaaaaaaaaaaaaaaaaaaaaaaaaaaaaaaaaaaaaaaaaaaaaaaaaaaaaaaagggggggctctttaaaagaataaaaattaactaccggtggatggaaaaaaaaaatttttttaaaagggcaacaaaaataaaatcacgggcccgggtttaaaaaacttgagaatggaaaaaaccttggttaaacaaaattaaatggtttggaaaaaaatccctttttggaaagtgggttaaaaagaaaaa

SEQ ID NO: 10010 - DNA, 381 bp, Zea mays
  Clone ID: LIB3156-009-Q1-K1-C5
cgagactgctctcctgaccttcggcttcagcctggatgaccccaacaccttccggggcgggatccaccgcatgctcaaactcggactgagcatcgatgaggacgagcctgttgaggcagaggctgagatgcctcagcttgaggacgacgctggtgaaagcaagatggaggaggtcgactaagtgtcgcatcgcatgcttgccgattatcttatccctagctaagctacctgtgatagcttaattttcactattgttcgaggtttttggcacgttatcggttgtcctgctggccaggctataagtctggtttatctgttatgtttaccctctttaacagtttgtcgttattattcgtaatggtgaaaatgtagcacatgttt

SEQ ID NO: 10011 - DNA, 393 bp, Zea mays
  unsure (1)..(393): unsure at all n locations; Clone ID: LIB3156-009-Q1-K1-C6
gttggtgtatgcaatttaatatggggtatcaaagctagaggtcatgaggttgaatcctggttagcgtaattaaaataaaataattgttgctcgctcatattccacatctgagacccaagagatgctcgacgtgagggagagttttgggaataatataagtgaattgcccatctctttcaatcagcttaaacttttaggttgaattagttggtgtatgcaacttaatagttatcattttcacttcccattagactttttctcttctttcaatacacatttttcctttttccaacatttgtctctatttctctagatctctcttggtttctgtgcaccacaccttttttacttctaaattatcgtgtcaaacttaanacatcaattattttggga

SEQ ID NO: 10012 - DNA, 282 bp, Zea mays
  Clone ID: LIB3156-009-Q1-K1-C7
atcctaatatacccttcaatttccatttttaacgctccacctcatctccctcaatgggggttataaccaatgccttaccacacttctgcctcacaaatataacacatctaaagccacctaccctctataccataagaacactctcaccactaatataagtaaacggtccatatcattaaataccttacacttttaatatgtatcccatggtttatcctactcagtagctatcatttatacttaatcttcgactctttgtactattttaacacaaatatttcc

SEQ ID NO: 10013 - DNA, 409 bp, Zea mays
  Clone ID: LIB3156-009-Q1-K1-C8
cagacgcgtggctcgtagctgcgcctatcctgtgccgagagcctgaagaaactccgggtgggtatggtggagtctcgcctgctggatttctcgctcgcttcgctggaaatcatccgacgagggcactggaacttctacaggctggagaatgaacacttgaacaacgctggaaagttcacagcagtgaagactgtcccgttaccattccgtgagcttgaaactgactgatgaagactgagctccatgttgaacagcatgaatttagggggaagaattccaggaatggatacactgtcccctgcaagaactggtgtttaagtggtaataaaacgaatcggagagcgtaactgcacaagaccgacacgctgcagattatatgatggatggaataagctctggcgggtgcgcc

SEQ ID NO: 10014 - DNA, 414 bp, Zea mays
  Clone ID: LIB3156-009-Q1-K1-D1
ctgaacccatggcatgtgtcgttctcctatgcccgggctctgcagaactcggtgctgaagacatggcaagggcgccctgagaacgtggaggcagcgcagaaggccctgctggtgcgcgcaaaggccaactcgctggcccagctcggtcgctacactggtgagggcgagagcgatgatgccaagaaaggcatgttccagaagggctacacctactaatgtgccagcgagatgtttccatgacataataataattgtagcgttttggtgttattattattattattttggtacgctctggtgaataataaccaaattgttggtgccaacgacatctagcagcaaattggtctttagaactcatgtagaaccttgagaacgaacatgtaatctggtgaattctattcctatatttga

SEQ ID NO: 10015 - DNA, 398 bp, Zea mays
  Clone ID: LIB3156-009-Q1-K1-D3
ggatttcagatgggattcagacaagcaggcatttgaaacgacatatctatggaatttggaggcagatgagtgactctatacatatcagcatgcatgccgcggaacgtaactaataagcaacaataataataataatatgcacttatatgccatgtgctgaataattaataataacctactctatgtgtagagtattacatactgtactgaaccttgtttgtgtagttatgtattgtctacaagaactttgctatatgtagagggagataccacaaatagccattcctatggaatttgggatatatctcaaataactgtgtactgtcgaatagtatatagtatgtaattatgcatttaatagctccctacattaaataattgatatatgtatgattatt

SEQ ID NO: 10016 - DNA, 420 bp, Zea mays
  Clone ID: LIB3156-009-Q1-K1-D4
aaaaataaccttggttttaaaacaaaacctatatcttgatacgacaaaaagaaagtaacctggggggtactaaaaaaaatactatacctgtcctcttgcttgcctatctccaatgtcataattcctgcacgcattatgttaccttccacttatgtccctgaagctatatttttctaaccaccctactctatagtcaaattttgtcaaaatctcctgatcctacattgtgtccctttgcataaatctacaatatacttcattctgtattagtaaaaccaccggaagtattatatctattgttaggcatccagagctacctttgatagcatcttgcggactggatagctacttacgtatctgggacacaaacacaagacagttgctatctgctgtctttctgaagcagcaccttacaacggt

SEQ ID NO: 10017 - DNA, 413 bp, Zea mays
  Clone ID: LIB3156-009-Q1-K1-D5
aagatacgacattctaatctcaccagctgtgccatcagcagcctacaagataggtgaaaagataaatgacccgttagccatgtatgcaggagatatcatgacggtgaatgttaatttggccgggcttcctgcattggttgtgccttgtggatttgttgaaggtggagctgcagggctcccagtgggactccagatgatgggatctccattctgtgaggggaatttgctgagagtaggccacatctttgagcagactctccagaatctcagctttgttccaccgttgttggcagagggccagttgtaacagataatccactcgctgctcaacaagcaattacctgagttacgggttttggggtggctttctgtcattcgcatgcggaggaaattggtagcacgcatgacgcatt

SEQ ID NO: 10018 - DNA, 409 bp, Zea mays
  Clone ID: LIB3156-009-Q1-K1-D6
ctcgaccttggttcactgctggaaccttcttgtgcaagaatgatcatcgtaaaatgggggcctgcacaaataatcatcaggtccgcttatatgatactgcattgcaaagaagacctgccgtctctgttgattttagggagtcaccaatcaaggcagttgctgctgatccaaatgggcatgatgtctatattggcacaggaacaggggaccttgcttctttcgacatgagaacagggaaattgctgggatgctatattggcaaatgcagtggaagtattagatctattgttaggcatccagagctacctttgatagcatcttgcggactggatagctacttacgtatctgggacacaaacacaagacagttgctatctgctgtctttctgaagcagcaccttacaacggt

SEQ ID NO: 10019 - DNA, 156 bp, Zea mays
  Clone ID: LIB3156-009-Q1-K1-D8
ccgactcgtaggtcttgatttaacgattgttgaacaaaagcactagtgtatgcgtcggaagttaaatcataggtcagaattgttagctgataccgtagtgccacatattgtctgtgtatacaatgtacgtggatcctttgttctttgctgatcctg

SEQ ID NO: 10020 - DNA, 248 bp, Zea mays
  Clone ID: LIB3156-009-Q1-K1-D9
gagaggtgacaggttcatgacacacacaaacacacgtacactagtctgaccactggcatgtgggcttgctgtgattaatattttcagcccatcatttgctcggagcatactttattcttgttattattgcatagccatagattgtccaccccaccctctgtgcacatatatacagtgacctgatctgaccatctcacatgatcgatagaacactgaaaaaagcccatgacaatgccaaaaaatctaaa

SEQ ID NO: 10021 - DNA, 266 bp, Zea mays
  Clone ID: LIB3156-009-Q1-K1-E1
gttctagatcgacaatttggtagggccttctggtgggattttacatgaagcatgcctcgtggtctttcatacatatctaccttgcttttgtgtggtaaaagtcttgttaatggtaaaggccacactttacaccaaatcaacgcaccgtgatgcatgaagatgaataccatatatcaattcaccttccatttatttgtctgggctgcacaaaatatattaccatttcatgctgtataaaatacactatctgctaaattcttctttat

SEQ ID NO: 10022 - DNA, 369 bp, Zea mays
  unsure (1)..(369): unsure at all n locations; Clone ID: LIB3156-009-Q1-K1-E10
aaaaggcggtgaatgtggtagagttcagcgcgagagcactgaagatactgacggggaagctcaccatcgaggcttcgtacagagttaccagccaaacaagagtggatatcaagctcgagagctcaaccatcacccctgagcagctgatgaacatatttcagaagaactacgacatgctcctggacatattcaatccagagggctggctggagataacatatgttgatgaatcgctacggattggacgagacgacaaagaaaacatattcgtgctggagagagcagacctgccagacgtctgatgacgcgcagttcatgcgcacagaggcgatccgtaattntgtgacgaggagcgagtgtatgtaacac

SEQ ID NO: 10023 - DNA, 331 bp, Zea mays
  Clone ID: LIB3156-009-Q1-K1-E11
gcaaccaagagcacctgtcatggtgattctctttcccgcaacgagccactaacccctgggggcaactgccagaacggttctcctgtcgctagtccaaaccatgaaagggcagccaagaggcagcgaggcagtggtactgaattcttagattctgaggctgagttttcccttccgcgccacatcttcgagtcgagttcaggctcagagttccaacaatactcaatgtcctactcaggacagtagcttctgatgttcacatcatctctgcaccgttgctagcttgttcagcacgatgcgcatggtccgtaggtcttggtaggttgatgtctca

SEQ ID NO: 10024 - DNA, 412 bp, Zea mays
  Clone ID: LIB3156-009-Q1-K1-E3
gaaagaagcgcagattctgttgcccgcactaccgtgagccctccaaggtcagaggatgctgacatggatgatgtgaaacccacaagcttaagctctcggagctacctgaagagtgcaagcataagcgcttccaagtgcgtcgttgtcagaaataaacacccagagccagaggatgatggaatacctgaggagatggaaggcaccgtcgatggattgtctgaaaaggtctccaggatgcactcctaaggcaggactgtccatggcgacagcaatctcgacacaagatttctgtctggtgcactgtaatgccgacgacacactgtttggatcttgtgtacacccacagctagttcaactaagatgtagcactagttcgtccatggaggaagcagaatggacgatgaagtgtggt

SEQ ID NO: 10025 - DNA, 407 bp, Zea mays
  Clone ID: LIB3156-009-Q1-K1-E4
cctgtttgctgccaccgcgcatggctgcgaacccaactgttccggcccagtcgtcccaacgccgccagtcgtgccgactccgtcgtcgcacagccacgggcgctgcccgatcgacgcgctcaagctcaaggtgtgcgccaacgtgctaggcctcgtcaaggtcggcctaccccagtacgagcaatgctgcccgttgctggagggtctggtggacctcgacgccgcattgtgcctctgcaccgccatcaaggccaacgtcctcggcatccacctcaacgtgccccttagcctcaacctcatcctcaacaactgcggcaggatttgcccagaggacttcacttgccccaactaagcttgggatcccttgtgtgcttcatctcgcgattctatttacgagcatgtcagcc

SEQ ID NO: 10026 - DNA, 381 bp, Zea mays
  Clone ID: LIB3156-009-Q1-K1-E5
gcggcgacccggcggcgtgcacgggtacggacataaagcgtaccaaggaggagctgaggggcttcttgagagacatacacacatccattgccgagtgctcgcctgaagcttccaagaggacgaggtaacagccggctcatccgtgctaagacgtccgcaggagggacgagcagtcacacagcggaggagatagcggctccaacgactggtgaaacggaccgaggaatgtgaacagtctagaggacatgaacgcgactggattgagagagacgtcaacggccacattgatgaggggctactcctagccaactacgggcgggctcattgatcggacgacagttgctactactaaataaactatcatgatgctgctcaatttcg

SEQ ID NO: 10027 - DNA, 410 bp, Zea mays
  Clone ID: LIB3156-009-Q1-K1-E6
atcctgagctacaacctggggggcatgggctgcagcgcgggcgtcatcgccatcgacggggcccgcgacatgctccaggccagcggcgcgggcctggccgtggtggtcagcacggaggccgtctccttcacgtggtaccccgggaagcggcgctccatgctcatcccgaacgccttcttccgggccggctgcgcggcggtgctgctgtccaaccggcgccgcgacttccaccgcgccaagtaccagctggagcacgtggtgcgcacgcacaagggcgccgacgaccgcgccttccgctccgtgtaccaggaggaggacgagcagcggatcaagggcctgtccatcagccgcgacctgctggaggtgggcggccacgcgctcaagaccaacatcaccacgctggggcccct

SEQ ID NO: 10028 - DNA, 410 bp, Zea mays
  Clone ID: LIB3156-009-Q1-K1-E8
gcgtacccggacgcctttcaccgcgtcatcggcttcgacaacgtcaggcagacgcagggcgtcagcttcatcgcctacaagccccccggcagcgagtcgagaccgtggctagatcgacccatggccatgcctctgcctgttgatcggatcaccttcttgcatcggttcctctctctatctccctccttttttgttgcctttatctcatcatttcttttctcctgcatgcaatggctccttatgcttgcaacaattctcctgctgatgtatacagcatggcataatccatctacaattacgtacatagtgcaacgactgtcgattcgatcggtgaggaacatatatgagaatgcaagctccggctagcatacatgtgctatgtgtaatagatatatatacaaaactgccga

SEQ ID NO: 10029 - DNA, 386 bp, Zea mays
  unsure (1)..(386): unsure at all n locations; Clone ID: LIB3156-009-Q1-K1-E9
gaagaacnggggggacgcacgcgtccgcaaagacggcgggctatttaagaagatactgactggaggagagaagtgggagaatcccaagtggcctgatgaagtgtgagttcactatgaagctcagcttgaggatggaacagtggttgcaaaagctgatggcaaggagttcactgttatggagggtcatttctgtcctgctttggctaacgctgttaagacaatgaagaaaggggagaaagtactttttacagtgaagccgctatatggctttggtgagaaggggaagccagcagcttgtgctgaaggtgcagtgcctgcaaatgccacactccagaacacctttgtagatgtttcatggaaaactgtgtctgaggtcacagattaca

SEQ ID NO: 10030 - DNA, 407 bp, Zea mays
  Clone ID: LIB3156-009-Q1-K1-F1
cagctaagaacaggtcttcgtctcaataatggaaggcaaaacagggcagctcacgtgcggtttcgtcgccatcgtgctcgtcctgggtcttgtccttgagcagtcccagcaggctgaagctagaggcaaatggtgctgcgaaaccgccaccggaaaataccattttaatcgctgcgttgactcgggttgggtcgacaatattgggttctgtgcgagtaatgccggttgcatcattatggaggacagatgtggaggtcgttggccagtgcctgctcgtgatgcgctttctctggatgtcatttgattaattataagcaagtacgtgaagttaagaaacgagggccagacgactgtcgtccagcgattggttatttgtgaacttgtcgtttgtcttcttatttcaactt

SEQ ID NO: 10031 - DNA, 347 bp, Zea mays
  Clone ID: LIB3156-009-Q1-K1-F10
ccgggggacccacgcgtccgccactcttcctgaatcagagcgtgctattttttttcttcctttaggcgacccccgctgaattaccaaccggtcggggcgccaaaagctagggttccgctgggcgccggtgccggctctactttcgtagcctctccgacggctcgcgggaaccggatgctgctaaactctgggtttctctcctcctgggtgcgcctattcttcacctgcactggtggttgttttggttgtgcccagactactccgataatatcttttgatgagcccacacaatgtttaagaattcaagggcgctcacctaaaatacacaatttatttgactacttttt

SEQ ID NO: 10032 - DNA, 354 bp, Zea mays
  Clone ID: LIB3156-009-Q1-K1-F12
cccacgcgtccgggaagcgagagcgtgcgatttcttttttcttcctttccggtgacgccaggtgaatcaccagccggccggtgcgccaaaggctagggttccgcggggcgcgggtgcgggctcgactttcgtagcctcgccgccggcgcgcgggaaccggatgctgctaagctgcgggtcgctctcctcctgggtgcgccgcttcgtcgcctgcgttggtggttgttttggttgtgcccagcctactccgataatagctgttgatgagcccacaaaaggtttaagaattcaagggcgctcagtaaaaagacacaatttatctgacgacttttggagttcaagcccgcacgaaat

SEQ ID NO: 10033 - DNA, 415 bp, Zea mays
  Clone ID: LIB3156-009-Q1-K1-F2
ggtgaagccgccgccgctgcagtgtccatagccaccgcaggagactgagatgggggggtgtgtcaagacccacaagagcaatgcatacttcaagcgtttccaggtgaagttcaagagaaggcgcgctggcaagacagactacagggccaggataaggctgattaaccaagacaaaaacaagtacaatacacccaaatacagatttgttgtgcgatttaccaacaaggacatcacagcacaaatcatctctgctagtatagcaggtgatatggttcttgcttctgcttactcgcatgagttgccacgatatggtcttgaagttggtctgaccaactatgcagctgcctactgcactggccttctgttggctcgccgtgtgctcaagacccgtggtttagataaggaatatgagggc

SEQ ID NO: 10034 - DNA, 407 bp, Zea mays
  Clone ID: LIB3156-009-Q1-K1-F3
gtcactggaaaggttgagttgcttggtgagacgaagatggttttgcccggtgacaatgtaaccgcgaatttcgagttgatatcgcctgttcctcttgaaactgggcaaagatttgcgatgagggaaggagggaggacagttggtgccggggttgtctccaaagttattagctgatgagtttccactttcttgcccgtagcaatttagtaaagaaatgaatgctgacatgtttcttggaatgcatgggcaaaaaggcagagctggctggtctggccgccattcattctggacagtaccttgtgctttcttgttgaggtggctcatcataaagcatattttgtagccacttttccgagttgatattagtgggttcttaccaaatttaccgcgaaaattgctggtcatgt

SEQ ID NO: 10035 - DNA, 415 bp, Zea mays
  Clone ID: LIB3156-009-Q1-K1-F4
gtttctggggggcctgaactacaaaccctttggtctatgacaactctcacttccagggactcctgagtggtgataaggagggccttcttcagctcccaagcgacacagccctgctgagtgaccctgtcttgcgccctcttgtcgagaaatatgctgcggatgagaaggctctctttgatgactacaaagaggcccacctcaagctctccgaactggggtttgctgatgcttaaatagaccctatcctggagtgatacattctgctgcatgtggtcttttgcatctggagtcaatgtgaacaagcagattgtcgtattgtctttctcgtaataaatttgtcaatgttgagcccttaggcttgaattgtgggaccctatgatcgttatcctagactctgatgctgtatgcaactgaa

SEQ ID NO: 10036 - DNA, 399 bp, Zea mays
  Clone ID: LIB3156-009-Q1-K1-F5
gtcagtacgaaccatctgccttcagctcatacttgctttaaccaactagacttgcgtgagtacacatccaaagagcagctccaggagcggttactattggcaatccacgaatcaaatgaaggtttcggatttggctaatcagttatactcgtttgtccgagccctgaaaactgcaataggcgaacagcacgtgtgtggctgatcacattctgaactccacgtgtgtgatgagagatggccggatagaacatgtccaggatatacgaatgcccgtcggagaggtactactgctaagagagagagcgactattttgtgtttataatctttgaccgtttgtagcttttgccttacattggtcgttgctccgaagttcttccccttcttttcgttcatagact

SEQ ID NO: 10037 - DNA, 410 bp, Zea mays
  Clone ID: LIB3156-009-Q1-K1-F6
gcgtggtttgcgtgccctctccagggcccagattgactctgttctggatcttgcacggggcacaattgtgtctgagctctccaacaaggatttcgactcatatgtcctttctgagtcaagcttgtttatctatcctctgaagattgtcatcaagacctgtggcactaccaagctcctgctcaccattccaagaatccttgagcttgctgaagagctgtctatgccacttgctgctgtgaagtactcccgtgggacgttcatctttcctggcgcacagccagccccccacaggagcttctctgaggaagttgctgcacttaaccgctactttggcggcctgaaatctggtggtaatgcttatgtgattggagatccagcaagacctggacagaagtggcacgtcttctacg

SEQ ID NO: 10038 - DNA, 393 bp, Zea mays
  Clone ID: LIB3156-009-Q1-K1-F7
gtagcaactagcccaacaagcgggcgtcccgatgccgacatatgggatgccgcctgcggactttgcattgccaatgccaatgttggcgcctccaccaccgcctccgcctccgtcacaattccctatgggatttcagacaccacccgcttcagttgccgcacctggagatgggtctggtcaggacgacacaacacattcgtgggtgaacaatcttttcagcacgcatagtccagccggaggaggtggcgatggatatgagtgatactgatgtaaaacacttgttgaaacctttcatgtgaaagcctacccgtcgaataatgtttattttggagtttggacaactatgtttatgtaaacacttattgcaaccatttggaactatgttgttatgtt

SEQ ID NO: 10039 - DNA, 394 bp, Zea mays
  Clone ID: LIB3156-009-Q1-K1-F8
gtagcaactagcccaatacgcgggcgtttttatgccgacatatgggatgccgcctgcggactttgcattgccaatgccaatgttggcgcctccaccaccgcctacgcctgcggcacaattcctgtatgggatttcagacaccacccgcttcagttgccgcacctggagatgggtctggacaagacgacacaacacattcgtgggtgaacaatgttttcagcacgcatagtccatcccgaggaggtggcgatggatatgattgatactgatgtaaaacacttgttgaaaccttgcatgcgaaagcatacccgtcgaatcatgtttattatggagtttggacagctatgcccatgtgaacactaattgcgaccactttgaactatgtcgtaatgtt

SEQ ID NO: 10040 - DNA, 299 bp, Zea mays
  Clone ID: LIB3156-009-Q1-K1-F9
aatctattaaaactcttttatgactattttttttttcggaaatgaataaaatatagctggggggtttattaccactagaaaaacctataattaaaatacaacataaacaataaaactccatactttgtcaaactcttctcgtctgctagtagctcatcacactttgttgggattagcaaaattactctatcataaccagctgtatacccgaattaatcaacaacattttataatgactgtctcttcttataaagagaacatcacactggtagatgctatttggatctaattttacactt

SEQ ID NO: 10041 - DNA, 381 bp, Zea mays
  Clone ID: LIB3156-009-Q1-K1-G1
aaacaaaaagggcgcactacacgaattagagaaagatctccaaaaggaagttagggggtgtaaaccagagacttaatattgctatcgaaaaggttaaagaaccttatagacaacctaatattcttgcggaatatatagctttccaattaaaaaatagagtttcattccgaaaagcaatgaaaaaagctattgaattaactaaaaaagcggatataaagggaataaaaatccaaattgcgggtcgtctagcaagaaaagaaattgcacgtgccgaatgcatcaaaaagggtagactacccctccaaacaattcgcgctaaaattgattattgctgctatccaattcgaactatctatggagtattaggtgtcaaaatttgga

SEQ ID NO: 10042 - DNA, 358 bp, Zea mays
  Clone ID: LIB3156-009-Q1-K1-G10
acacaaaaggtggggtatagatataagattattatagatggatggtgacacaacacagcagggcacatggctagcctgctaccgtgctgcacccacacaacacaacacaacacactgctcgccgccagaagcgcccgagggggcaggggaggactacaggacacgacgccgccatcaggcatcatcatcatctcagactcagagcatgccatggcacgcaactaactgactgactgactcgaaacacacacagcgacgccgctatactttatttagcttataataattagctagcttcctccggccggcctgcaaggtggagcacctagctcacttgccgcaattgcaagggtcgcac

SEQ ID NO: 10043 - DNA, 259 bp, Zea mays
  Clone ID: LIB3156-009-Q1-K1-G11
aggatgagatggttgaaagggacttgcattttattagaagttgagcctggtgaaagagaggggggcgtttggttttgaatcgcaactgtatcggctgaaccgacggtcttttttcatttatggtgtttgttggccttcctgtaactcaattttgtacaaggaaggataagcatatgtatgataaaatgggatagtttatgccacctgaataaaatatgttctataacttctattcattataagaatgattaacttaaaa

SEQ ID NO: 10044 - DNA, 321 bp, Zea mays
  Clone ID: LIB3156-009-Q1-K1-G12
gtgaagagtttccagggtgttttggatgggaagtatgatgacctccctgagcagtcattgtacatggttggtggcattgaggaagtcattgctaaggctgagaaaatcgccaaggagtctgcttcataaggcggcttcttgcttgttgaatcctgtacaatcaagttccatttttggatttaagcgattgtttatgcttttcgcagttaggcagcacgagttggaggtccatctcctgctgagatgcttgtttttctctttgttgttcaaacactttacacccaaataagcaactgcagtgacattaattttggctgcacc

SEQ ID NO: 10045 - DNA, 245 bp, Zea mays
  Clone ID: LIB3156-009-Q1-K1-G3
ggcggagtcgcagaccaagattgacctcttcgttggcatcaactcgggtcatgtcttcaggaagctcgagctgacttcagggccgttcctccttaggggggaatcaactacgagggtgtatatagtgaggcgcctgaacagagaggctgctcggtgtgttgcttatgagaagcgtattagttagcttgtgaaggttggctagggacaagcgtgctctgaatgtcgctaagataaagcttggaact

SEQ ID NO: 10046 - DNA, 263 bp, Zea mays
  Clone ID: LIB3156-009-Q1-K1-G4
ggaagaagtggggaggtggcatcatgggctccaagtcgcaggccaagaccaaggccagggaaaagttgctggccaaggaggccgcccagcggatgacgtagattatccactgttgagtttgcccctgtagtttgacgtggaagaaccgatgagcattgtgcactcgtattgtgtttttttgaatctactttcatatgtttctgtccatcagaccgtgtttagaaactttggaagacagttctacagtgtttgtgcaatgtctt

SEQ ID NO: 10047 - DNA, 323 bp, Zea mays
  Clone ID: LIB3156-009-Q1-K1-G5
gtaagaagtggggaggtggcatcattggctccaagtctcaagccaagaccaaggcgggggaaaagttgctggccaaggaggccgcccaccggatgacgtaaattatccactgttgagtttgcccctgtagcttgacatggaagaacctatgagcattgtgcactcctattgtgtttttttgaatctactttcatatgtttctgtccatcaaaccgtgtttagaaactttggaagacagttctacaatgtttgtgcaatgtcttttacaaaaaaaaaggttctcaaagacacgaatattacttcaagaaaggcaccccttttgg

SEQ ID NO: 10048 - DNA, 362 bp, Zea mays
  unsure (1)..(362): unsure at all n locations; Clone ID: LIB3156-009-Q1-K1-G6
ggctgagagaagagctcagcttgttgagctagacgactagaaagtattgaactctcgagctgttcatgtaccagagttttcattgttgatggtgtttgtggatccggacggggctcatctatgctctgccccttaggaggacagcagttctggtcctgagcttaattctggacaaaactattttccgtttccccctttttgtatgtatagccttttttttgcttaccattttaaatgcgttgcttgtttagtgtgatgccggtagtcctgttgtgaaccttagcctgagctctgtacatccatctgttacagaattcaaatcgaaacaggtaaacattggctnataaaaaacacaatgcaaa

SEQ ID NO: 10049 - DNA, 385 bp, Zea mays
  Clone ID: LIB3156-009-Q1-K1-G8
ggcctccgccgcgtccaagtaatcatgctacagtggtggatcggtggagaatctgggaggactattggaagcataggacatctcaccgatggcttttagaagtataacagtgtattattctgatccatgtacttaccaaacaatgcacatcagaagaactgatgtgaggagtatttgctgaatctgcagagtttattttggcgtccgatgccaaagatttttccctatgaacttcattgcgatgatttttgtgacttcatcatatttgtgattctagaagggcagactggtacagtaatgactaatgagaggtgtatcactgaatcaccacgtcttgggtttgaagcagtctctccgcatttgcgtgaaagatttgtctcggttt

SEQ ID NO: 10050 - DNA, 199 bp, Zea mays
  Clone ID: LIB3156-009-Q1-K1-G9
gcgtctcgtacgttttatttgcccaccattttttcagaatttccccagaactttactgcgggtgcaaatgtactctttatgggaatccacaatcctttttacctagttagtcataattacatgtacacttgagtaaatcgtgaacactacaaggtttctcgttgtttaaaaagactttttatcttattcggtctaatta

SEQ ID NO: 10051 - DNA, 324 bp, Zea mays
  Clone ID: LIB3156-009-Q1-K1-H1
cctcaagagtcctgtataatcgcatcacgcgtattactcgacataccagcgttaaggatacgggggggtgcattataccgcaacagcgcctaagaatgtacttagagttcaatgctagcggaatgagtgtttttcgcacctgaggcacactttacatggttgctgatgttaatatatgcactgactacatgggcctgccgcaatgttacatagagaacataactgaacacttgtattttcatgagcccttattgatttgatacaacgcgccatcatgaatcttgtaaccaaattatcaaagctgcattctcgatatttaatcaa

SEQ ID NO: 10052 - DNA, 238 bp, Zea mays
  Clone ID: LIB3156-009-Q1-K1-H11
cctggagcggcatcccgtggttcgaggcctgcgccgacccgggcgccatcgcgcccttgggcgtctgctcgctgctgggcacgcagctgctgctcatggggtgggtggagtctaagcggtgggtggacttcttcaaccccgactcgcagtccgatgagtgggccacgccatggtcccgcactgccgacaactttgcccacttcatctgcgaaccaagcttccccggcggcaaggtttt

SEQ ID NO: 10053 - DNA, 307 bp, Zea mays
  Clone ID: LIB3156-009-Q1-K1-H2
ctccttcagtgttaagagaaggtgggacgacgacgtggtattcaagaatcaagcacgaggagagaccaagacaccgaaacggttcatcaacgacaccatcaggagtgatttccaccgtaaatttcttcagaggtacatgaagtgacgcttccgtcgttcacaattcagcctggagcccctcatcgttatcacgtttgtgtatgagcgaaagatcattattgtgttgttgtatgaaacaagagtgtaaacatatgtctactactaaacaaagttatgctgagcaatgcatatcctagttgaatgtgac

SEQ ID NO: 10054 - DNA, 385 bp, Zea mays
  Clone ID: LIB3156-009-Q1-K1-H3
agcagccgcccggtgctccctctctgcagatctcccttcgcagccgccgaggaaccccttcacagcgcggaagatggctgaacaggaggccccagtcgtggttgaggcaccaaccccagttcttggggagcctatggacttgatgactgctctgcagctcgtgatgaagaagtcaagtgctcatgacggacttgtgaagggtctccgtgaggctgccaaggccatcgagaagcacgccgctcagctttgcgtgcttgctgaggactgtgaccagccagattacgtcaagctggtgaaggcactctgcgctgagcacaatgttcacctggtcactgttcctgccgcgaagactcttggcgagtgggccgggctttgcaagattgac

SEQ ID NO: 10055 - DNA, 422 bp, Zea mays
  Clone ID: LIB3156-009-Q1-K1-H4
ttctagtttcttcacctgtgatctctccctcatcccctgcgcataggaagtcagcttcttcacgtcgcctcctccctaggcgccgatcctacagagcctcgctggtcatccctgctctctcgacgtctctccccttcctgccatggccgcccctccctgctgcagctcgacgctcctccctggagctcgcccctgccctctgtccagcgccctccctgctgcccatggtatggacgccagccccctctcttgttgccatggatagcccctcttccatctccttccccaagcacaagtcccatggtcgtccaacctagctcgcccagccacctctgctgctcccatggtgatctctaaattccttagttgttctactagttcttgttaataccctgctgatgtgatgttttatgtgtgttgat

SEQ ID NO: 10056 - DNA, 391 bp, Zea mays
  Clone ID: LIB3156-009-Q1-K1-H5
ggggccttagataaggctacatagattttaaacacgacaccaaattcttacatgcttcagcagttcgataaccctgccaaccctaaggtacattatgagactactggtccagagatctgggaggattcaaaggggaaggtggatatattcattggtggaattgaaacaggggggacaatatctggtgccggccgtttttttaaggagaaaaatcctggaattaaagttattggactcgagccttctgaaagtaacatactcttcggtggaaaaccatgtccacataaaatccaaggaatcagcgcaggattagctacatggaacttggatagcgatattcttgatgaagtaatttagatatcaagtgatgaaactgatgagacatcaaaac

SEQ ID NO: 10057 - DNA, 420 bp, Zea mays
  unsure (1)..(420): unsure at all n locations; Clone ID: LIB3156-009-Q1-K1-H6
ggttatacgaggtcaaggatgaacaccatgcggaagcatttttgaacagcgtctctttatcaaacgaggatgctgttccccttgaggataggatagctgccctggaaaggaaacagaactccaaagcacttgatgcggtcaagtacgggcctggtggctcacgagagatttcgtttttctctaaaagccggagaaggcacaaggaagagtcgtctagcgacgatgaacccaagggtgtcaaaaagagagctgtgcagccgctgggcttgaagcagggaaaagccgagttctatatgtttggcggaaatcgtggcataggtagaggcggtggtggcagaggtggaggcggtcgaggaagaggtggaggacgaggcatgggcaggggcagaggatgaatggngcccgtcacattgaccccgt

SEQ ID NO: 10058 - DNA, 398 bp, Zea mays
  unsure (1)..(398): unsure at all n locations; Clone ID: LIB3156-009-Q1-K1-H7
cttcgttttcgtgacctcctcttgccctgccctgcccatcggcatggcacggaggaggaggcaaggctcctgcagcttatgaaaaaggaacaattggatctataccattaaaagatccaaactttagatatataccatggacctcacatgtcattgactcatgtggacccacatgtaagtgagataataatggtatggatccaaagtggtaatcttttaatggtatggatccaaatttccctatgaaaaatgtttgttgactgaaatcttaaacactccgggagttcggcttggagatgccangtaataaaaacaaaaaaaaacgcgcatgtcgtataaataaaaagaaagaaaaataagaagccgaggtagaagactgaagaattgccaacacaagc

SEQ ID NO: 10059 - DNA, 260 bp, Zea mays
  Clone ID: LIB3156-009-Q1-K1-H8
atttattttcatgaccttctcttgctcttccctgcccatctgcaaggcacggaggatggggcaacgatcctgcaggctccgaaacagcaacaactggatctatatcattgaacgatccaaactttacatatataccacgtagctgacatgtcattgactcatgtgaacctacatcctagagacactaacatggcatggatccaaagcggtcatctttgacaggtataggtccaacagccccctatgtaaaatgcatggag

SEQ ID NO: 10060 - DNA, 466 bp, Zea mays
  unsure (1)..(466): unsure at all n locations; Clone ID: LIB3156-010-Q1-K1-A1
accgggncggaaataccggggcggaccaacccgtccggcctgccaggtcgtgctcatgggcgccatcgaggggtaccgcgtcgccggcggcccgctcggagaggtcgtcgacccgctctaccccggcggcagcttcgacccgctcggcctcgccgacgaccccgaggccttcgcggagctcaaggtgaaggagctcaagaacggccgcctcgccatgttctccatgttcgggttcttcgtccaggccatcgtcaccggcaagggcccgctcgagaacctcgccgaccacctcgccgaccccgtcaacaacaacgcatgggcctacgccaccaacttcgtgcccggcaagtgagggggtcggaggcgccaccgaccaccgtcaccggncaccgntgccgatatctaagtgttcggatgcacgtgagcgcgcactgggtccagtttgtaccatgatgtaaaaatacta

SEQ ID NO: 10061 - DNA, 406 bp, Zea mays
  Clone ID: LIB3156-010-Q1-K1-A10
caagatcgacaggcggtctggcaaggagcttgagaaggagcccaagttcctgaagaacggtgatgctggtatggtgaagatgattcccaccaagcccatggtggtggagacattctcgcagtatcctccccttggtaggtttgctgtccgcgacatgaggcagacagttgctgttggagtcatcaagagtgtggagaagaaggacccgaccggcgccaaggttaccaaggcagctgccaaaaagaaatgatgcaacctgtcgttaatcctgtatctgcttttgcaatacctgacttgtcactccatcccgaaagtttgtatgcggttgttactgttattgtgtactgataagctctgctgcggcgtgccctgttgtttgggtagcgtcaacgtcgagcgccacttg

SEQ ID NO: 10062 - DNA, 279 bp, Zea mays
  Clone ID: LIB3156-010-Q1-K1-A11
ctaagacagttcgttccgtgtcacttctgtttaaaattaagttttgccgagacaagctgtatgtaccggatgaaagtgtggttccttattgtatgctctggaattttatttttggtatgtttattttttgccttagttcaacatgcctcctgcttggacaaagtcaaattaaaaaacatgcttggacaatataataaaaaaagaaaatataaacgataaagatattaatgtagacactaaaaaaaaaaacttgaaaactgttaattaaaaaagggcggc

SEQ ID NO: 10063 - DNA, 445 bp, Zea mays
  Clone ID: LIB3156-010-Q1-K1-A12
gcgctgctggcttcgtccgcgtcggcggcgatcacctgcgggcaggtggggtcgtcgctggcgccgtgcatcccgtacgcgacggggagggccagcgcgctccccgcgtcgtgctgcagcggcgtcaagagcctcaacagcgcggcgcggaccagcgcggaccgccaggcggcgtgccgctgcctcaagagcctcgccaacagcgtcaagagcgtcaacatgggcaccgtcgccaccatccccggcaagtgcggcgtctccgtcggattccccatcagcatgtccaccgactgcaacaagatcagctaagttacgacgaccaagctaataagcctaccgaacgtacacgtacgccccgcgcgctgcacgagtgatgaagccaggggagaaataaaataaaagctagctgtattgccaggagcagcatgcatttattatcgatcta

SEQ ID NO: 10064 - DNA, 327 bp, Zea mays
  unsure (1)..(327): unsure at all n locations; Clone ID: LIB3156-010-Q1-K1-A8
acaccactagcaaggtgacccgcctccgcaaggagtgccccaactcagagtgcggcgcgggcgtcttcatggccaaccacttcgaccgccactactgcggcaagtgcggcctcacatatgtctacaaccagaaggcgtaattgcttgccccgatttgctttatccgcctaccctatcgaacatccagctgttggttactcgaattgtatctcatgtagatctgtctgaggttgaaacttaaatggagcagtagtatctgtcatattgatacccctgttactgaattgatgtgatgctgagtttaattntgttttcatatctatccaa

SEQ ID NO: 10065 - DNA, 171 bp, Zea mays
  Clone ID: LIB3156-010-Q1-K1-B1
ccggtgaaaaaccgggtcgaaccacagccttccgcaaaatttaactgaagtttaaaaccttacataagtgaacttttttttggcgatgtaacatggatattatgcattttttcatgtttaattgtactaatgttgtctcatgatatgttcatatgaggtcagttgtgtgtt

SEQ ID NO: 10066 - DNA, 448 bp, Zea mays
  unsure (1)..(448): unsure at all n locations; Clone ID: LIB3156-010-Q1-K1-B12
atcaaccaccatccgctgcctttctcacccaagtgcacacgtgcgcgcactcagcatgtctgtcctccgcgacatcctgagcaacggatccgtgaaccccaacaagacaatccaaggggaacagcagcggaacggcatccagagcccgtcctaccggtgcctggccgcaagcatcatcaactggcaagcggacgtcgagaggtgcatagagtgggaagcccacagccgccgcgccactgggctgacgctcgccttcctcagtgccgcagcgaaggagctcggctgccctctcccgtcatgacaaggccattcctggatctgacatcggcttccaattgacggtcagtgctggcacagctgctgcanggtccgcgagtaggacggctctaatctctccatcacgtgttattatctggtgtttccataatgcgatttgatttcaatttgg

SEQ ID NO: 10067 - DNA, 429 bp, Zea mays
  unsure (1)..(429): unsure at all n locations; Clone ID: LIB3156-010-Q1-K1-B6
gcccggaggggggaaggttcgtctcttcgcttggaaagtggcggcaagaaggccgaagccggtgtgttggcgctgctgcttctccagctgatggtagcaccgacgacggcgacgtcccgcttgctgcagcaggcggatacctcccccttgtttggcctggacatcatcgcgagggagtttggccatccagatggaaccatcgtctgtagtgaatcctgtgtcttcctaccatgcgtttcgtcagtctttggttgccgatgcgaaaacaaagtctgcgtgcacgactgaagaaaccttcttcaatctctgatctttctctctcgtcatttgcgtgtgaagaaccagctccatctttgtaacgaatntgtgttgggagaaacagaaagacggtggtgttcaacttatngtgtatggtgatttaataataat

SEQ ID NO: 10068 - DNA, 245 bp, Zea mays
  unsure (1)..(245): unsure at all n locations; Clone ID: LIB3156-010-Q1-K1-B7
ggaaaacccggctggacgccacgcgtccgctcaatcatangatagcgaagcttgctgtcggtgttgctgtcattcaagtgggagctgtaacattatactgaactaaaagagaaaaacttgagagttgaggatgccctaaatgcaactaaggctgccgttgaggaaggtattgttgttggtggagggtgcactcttttgcggtttgcacataaagaagacgccattaaggcttcactggagaacca

SEQ ID NO: 10069 - DNA, 435 bp, Zea mays
  Clone ID: LIB3156-010-Q1-K1-B8
ctgatttcggcaggttgcgcagcgaccattcatctctcgtcaaggatgtcatcctgccctactcacatcgaatcaactccttcaagggtgaggtcggggtggatggtcgcccctctttgctgttcttcatgggcaataggtaccgcaaggagggagggaaggttcgtgatgcactttttcagattcttgaaaacgaggatgatgtaaccataaaacatggaacacaatcgagggagagtcggcgtgcagctacacaaggaatgcactcatctaaattttgcctgcatcctgccggagatactccctcagcatgcagattatttgatgcacttgtcagtctgtgtgttcctgttatagccagtgattacattgaacttccattcgaagatattatagactacaataaaatatcaatatttgttgggacaagcaaag

SEQ ID NO: 10070 - DNA, 399 bp, Zea mays
  Clone ID: LIB3156-010-Q1-K1-B9
aagcgtgctctcacctttggtatagttatcatatcctcgcaaccatcaatccttagggggttgaaggaggcagctgcaagttgcttgatcagtcctaatcaaatctcaaagggtttttctagactagctgagggtgttgatgacttgagtcttgatattccttctgctaaagctctttttgacaagctggtttcaacagctatatctgaaggatggcttgatgcttcttttggtaaatcagctgcccctgacgaagagatacaaagtacaagcgttgtaaaggtgaagcgttttaaagaagaatgtggccacataattcatgagtattttctctcagatgatgtcccagaacttattcgaagccttgaagagctttctgctccagaattcaatcccatt

SEQ ID NO: 10071 - DNA, 405 bp, Zea mays
  Clone ID: LIB3156-010-Q1-K1-C1
cgtccgcaatcgtccgggcatattctaccaaaaggacagggccaagtgggatgcctggaaggctgttgaaggcaaatcgaaggatgaggcgatgaatgactacatcaccaaggtgaagcagctccaggaggaggctgccgcctcttaaaagtctcttaatagtgttgccaaacagctatttgtcagatgagctttgtgccatttcctcattagaagtatatcattcgatccattggggatctgtgaaccatgtacctgtttatgtaacttttttttttttcgaaagagcgcaggaggactgcgcacccatatattaaagtagagggaaaataaagggccataatgatgatatccatctatctatctatgtaactggtttatgtaccatgtacctgtttatgtaac

SEQ ID NO: 10072 - DNA, 440 bp, Zea mays
  unsure (1)..(440): unsure at all n locations; Clone ID: LIB3156-010-Q1-K1-C11
gaactcatgagttgtatggctcgagtttttgtaataggggggataatagggggcaccgatctaacaagcgagaccgggtagatgccaatggcggtggtgatgcactttttgatctcaatgtgccagccgaattggtggacaagatctgaagcttcattatctgatgggtgatggcacatccctttgaactgtacagctgacttaagcttcctcaccaacataaaggcaaaaaatactgttcttcttagcccccttgccaccatagagtatacctccatgtcaaaaaaaatttaccctggtgttaggatcccaagatatagagtagcttttaagttctatatgtcgcatntcatgacgtgatttgaagccaatgttcataattctgataaaactagttctactcctcaagcaagatggtgatattttggaatgtaacttga

SEQ ID NO: 10073 - DNA, 192 bp, Zea mays
  Clone ID: LIB3156-010-Q1-K1-C12
attgtgaccatttttttcactcaacttttgttagaagcggggataaatgggcggagggcggaactatgggaaagctactacgtgccaagggcggaacccatgcactttctgagaacaataggcggctggaaacggatggcaatatcgcgaacatgataacatgatatgtgatcactcatgtgtgctacaaat

SEQ ID NO: 10074 - DNA, 315 bp, Zea mays
  Clone ID: LIB3156-010-Q1-K1-C3
cgcacaccctaccgtgagtgaagccctcaaggaggcttgcttgcaaaccttcgataaagcaatccacatataatttctcattttttgtgtccaaactccaaagtttgtggtaattttgggtctgttggaaaaaaggcccctgattgtccttttgtttttgtcggcaatactgtgaattgaccctttgagttgtccatcttagcggggttttgtgcttccttggcttggtttatccatccaaataataacctgatactatgttttacattttatgcccatgaaccattgatggatatacatttctaaggttccagt

SEQ ID NO: 10075 - DNA, 423 bp, Zea mays
  Clone ID: LIB3156-010-Q1-K1-C6
cttggtccttttacccgtttggtccagccacagcttcaatttttcctccgacggcggtgcggttagctcaaccatggcggactccaaggccacctcggcggtcaccctccgcactcgcaagttcatgaccaaccgcctgctggcccgcaaacaatttgtgcttgaggttatccaccccggccgcgccaacgtctccaaggcggagttgaaggagaggcttgccaagatgtacgaggtgaaggaccccaacaccatcttcgtcttcaagttccgcacccacttcggtggaggcaagtccactggcttcggcctcatctacgataacctcgagtctgccaagaagttcgagcccaaataccgcctcatcaggaatggtcttgctactaaggttgagaagtcccgcaagcaaatgaaagagcggaa

SEQ ID NO: 10076 - DNA, 339 bp, Zea mays
  Clone ID: LIB3156-010-Q1-K1-C7
ccggctctcccacggttcttcagcctgttttctgcgactccgccagtacgccaccaggggcgagcctggactaccgacgccgcccttcgccgatatcttcagcggcgaacagcgcccaccagatcccgtccctgcgatggagtccgtggtgaacccgaaagcatacccgctggctgatgcgcaactgacgatgggtattctcgatattatccagcaggccgccaactacaaacagcttaaaaagggagcgaatgaaacgacgaataccctgaataggggcatatcggagtttgagtgatggcggcggacacagaaccttttgagatcctgtttcacctt

SEQ ID NO: 10077 - DNA, 340 bp, Zea mays
  Clone ID: LIB3156-010-Q1-K1-C8
gaaaaaagggtgcgacccacgcgtacggttgaatccaaaatatccaccgacctgtattatgggaagacaacaaacctacaattgggggattcttatgaacaagaacgcttaacgaccattatatgcagatactaccgaggagctcatggcattattaatgtgtaagatataacagaccaggatagctgtcacaaagacaatcaatggacaaatgaaaacgaattgaatgcctgcgaaaatgacaacaacattattgtgatgaacacatatgaccaggatcagaacatattaatttcttacaaagcttgaaacgtcattgctgatgacatcggaatactat

SEQ ID NO: 10078 - DNA, 176 bp, Zea mays
  Clone ID: LIB3156-010-Q1-K1-C9
gtctgtgcagaggtggtaggagatgtaaatctacatggccatcgtcgtggctgccatggcgatgctgtaattataccgttgtacatgtatttccaattagcttaactcgattgctgttgtatttcagaaagttgacgatgctaatccttttaaagtcaaaagttactttttgttgt

SEQ ID NO: 10079 - DNA, 309 bp, Zea mays
  Clone ID: LIB3156-010-Q1-K1-D6
ttcttgtccgaccagggcttttaaaagttcgtcatgttctgttttggtcatttgggcaccaaagtttgcgcctcatttggttctgtaatccgtgagctcgtgcatgtacttggcgtattgcatgcagtgaataatttagcttgggtttgtttgttgggggcagtgttggggacggatttggattggggtttatgcttggcatcgcgtcgtatcgaaactcagctgctgtttcgctgagtaatgtacatttccctggtaatggtacttgtggactctgatgcttttatgggaacgagtgcattttactgc

SEQ ID NO: 10080 - DNA, 319 bp, Zea mays
  Clone ID: LIB3156-010-Q1-K1-D8
gatcctcacgatgtaccaggatgacgtttatcgtgtctaattacgcctgagtttagatgtacttggctagttacaatatatttatgtggtgtctgaaatgttctaaaacctataaatctattactaagagcaacgatattgacgatttttaaaccttagtactacggatgttatgagctaataaatatatttcactaatgtgatgcacttaaaaaatagtctgctattgctgcggttaaaaaagcaaaaaactgtccgtaggtctggacttgcttacccttgaaaaaactatacgatgggtcgctcctttaaaagatcc

SEQ ID NO: 10081 - DNA, 290 bp, Zea mays
  Clone ID: LIB3156-010-Q1-K1-D9
gaaaacccggcgcgacccacgcgtacggctgtagacaagaatttgggcagccggtttgattattacaccaaggagcacatcggcgtggcctttaacgatggatccaagcagctccaagacatacgccggggccacaggggcaactcgttggtgctcatgggcaagaacacgctcatcaggcgctgcatcaacgacaacgcctggaagaccggcgaccacaccttagacccgctcatggacctgatagtcggcaacgtcggcctcatctataccaacggagacctcaagga

SEQ ID NO: 10082 - DNA, 441 bp, Zea mays
  Clone ID: LIB3156-010-Q1-K1-E10
gggaaagcaactgcccatttgtagcttgttttacacatgctctacagcaaccagctggaagaaagcttgatggtggaggtgttgcaagcggtgggctacgagaactaataccgtgcattgcaaggacttctgttgctgttggtgttgatggtattttcatggaggtacatgatgaccccttgaatgcaccatgcgatggcccaactcaatggccgttgcgcaatctggaagagctgttggaggaattaattgcaattgctcgagttaccaagggaaagaagccattcaagatcgacctcactccgttccacgagtgatctgctttggttgatagaaagcacaatgccaccatccatggaattccacagggtggatttcaatatgaattgagtacttgctattgttgggagtatacctgcagtggatgacttaaactatctc

SEQ ID NO: 10083 - DNA, 438 bp, Zea mays
  unsure (1)..(438): unsure at all n locations; Clone ID: LIB3156-010-Q1-K1-E3
tccggacaggtccgacactccgcaagcccacaaaagttgctagccttcgttgctacctaggaatgctgagaagatgtgctgactcttgctcggaaatgcgctaacttgcgctagttggccgcaacttgcctaccgcaatgcacctgtcgaggaccggggtaggttcattcggtcttcgtcgccccgggttttcaaggtannaagtcaggtcagggccaactttctgtcgaagaagcgaacaaatcgaagaaagtgaagtggagggtgggcgnnngcaatggagtgaatgcngaatntngcggcggaccgggaaagaagcgttgctgcannngggcggtaccgaagcttggggcgggtgcttggggcaaacggcaacttcggggcggggtgcaacgccggcgcgggaacctgcgcaacgggctcgcaagcgtcgcggtc

SEQ ID NO: 10084 - DNA, 417 bp, Zea mays
  unsure (1)..(417): unsure at all n locations; Clone ID: LIB3156-010-Q1-K1-E6
gaaaaaccgggncgaaccaagcgttcggaagaatcaacccggaacaaccgaacgttttttcctttttttacaccggccaccgtaacaggaataatccagctcgtgattgaagaatccgatgacgacgccatgcctgggcgccgcggccttaagcgccagctggacggcgcgctccctgacgggggcgtttctcgatctgacgctcgcctgggcctgcctctgcctcgccgcgctcgccgccgccgccgcgcgcctcctcgcgctcctcggcctcccgctcccctgcacctgtgcgcgcccgcacctgccctgcctcctcgccttcctggtgcgctaccctccccgcgccgtcggatcccttcaacgccgcctccgcgcccgctttcccttcgccggccccaccgacgacgaggcacg

SEQ ID NO: 10085 - DNA, 235 bp, Zea mays
  Clone ID: LIB3156-010-Q1-K1-E7
cgagttgggacgaatctggatgtggtttttcctcttaaatagaattcaacagctaggggcattaaagcaactgactccttcgacaggcatatactgtagaaattaagccatgaagctttggcttatatagtgcagaggaatcccaggttgactacattggagaagcagctcttcagaaggggaggaggctttcaagttctgcgcaacctcatgcaaaatatctggtattattact

SEQ ID NO: 10086 - DNA, 254 bp, Zea mays
  unsure (1)..(254): unsure at all n locations; Clone ID: LIB3156-010-Q1-K1-E8
cgggatgaccaacaaagcttcttatatacaanttctaactgcagcacaatcgatggagaggctgccatttattaccgatcatctgcctcctttccttcatcatcccccaattctgaagagacatcactaaagactgaggtagctgatgatggcaaaatcattggcactgaagatgaaatggaaacatcgtatcttggaaatgattgtgttgacgaagtaaaaaaattatcataatgaactgaccacccaaattg

SEQ ID NO: 10087 - DNA, 410 bp, Zea mays
  Clone ID: LIB3156-010-Q1-K1-E9
gtccaaatccatgaagaagcaaggatttttgcataccagactggtgtcagagttgtgggtgcatatggtggcgcaccaataactaaccagctgagggagttagagagaggtgtggaaatcctggtggcaactcctggtcgcttgatggatctgttggagagggctagagtctcacttcaaatgataaagtatttagctcttgatgaagctgatcggatgcttgatatgggttttgagccacagatacgtaaaattgttgagggcatggacatgcctcaacgtggtgagaggcagacaatgttgttcagtgcaacattcccaaaagagatacagaagatggccgcagatttccttgctgattacatctatcttgctgatgggagaagtcggtcaagcaccgatttgattgt

SEQ ID NO: 10088 - DNA, 428 bp, Zea mays
  Clone ID: LIB3156-010-Q1-K1-F10
gtcgtccttccggaggtcgtttccaatcaatcatttcttcgtttactagttgacagcgctgcaagtatgccctgtcctattaagtgttctgcggctcggtgtgccccatcattgactgaacacaacgattctaggaataatggcatccatgcatctagtgtatatggacatgatctcatgaagtccatgtctgatctccaggaagttgtattttcctcctttagcaaagcatgtcttctcagtagttgtatcatatatggtctaccacccagttgtatagcagaaccatgtgagcaagaatactttctccctaacatgcctttgctgttcgcaatagccatggttggtgctactgatggaaggctccttgcgagacagaggagatgggagcttgcacgtctaaatgatcaattgcgtcagataaatgc

SEQ ID NO: 10089 - DNA, 424 bp, Zea mays
  Clone ID: LIB3156-010-Q1-K1-F11
atggactcgcgcgtcgtggacggcgcaggtgggggtgccgacgcctccttgccggccgatccgccgagccccgtgcccgatccggccgcgggcgggatggatgcgcgcctcccatcggacctgcttcgtgcagtgctgcaaaggctgccgccgatcgacctcgcgcggtccgcctgcgtctgccgagcgtggcgcgcggttgcctccgaccgcgccgtggtcgaggccgccttctgtgcgccctggggagtgcggcgcgtcgtcggagagccggcgacgggggccttctggcgggccgcctcccttgggagatttgcgctgtcgcatgcgatccgccgcggggataccgtccccggtgtcgctctcaagtactccgtgcaggtgaccgatatcaaacgattcaacaacatgatgagtgaccatg

SEQ ID NO: 10090 - DNA, 432 bp, Zea mays
  Clone ID: LIB3156-010-Q1-K1-F12
gggcgattaactgatagcaaggggcgcacagttgacttcaaaaacacactattgatcatgacatctaatgtgggaagcagtgtcattgagaaaggaggccgcaagatcgggtttgaccttgactatgatgagaaagacaccagctataacaggatcaagagcctggtgaccgaggagttgaagcagtatttccggccagagttcttgaacagattggatgagatgattgtattccggcagctgactaaattggaggtgaaggagattgctgacattatgctgaaagaagtgtttgacaggctgaaagccaaggagattaatctccaagtcacggagaagttccgagatagagttgttgacgaacgttataacccgagctatggtgccagacctttgcggcgtgctatcatgaagcttctggaggatagtctg

SEQ ID NO: 10091 - DNA, 446 bp, Zea mays
  unsure (1)..(446): unsure at all n locations; Clone ID: LIB3156-010-Q1-K1-F3
cacatttccctttggcggatcgaaggaaggaaggaggagatgggtggcggcatggaggtgcacaaaaaccggtggatcgaagagtggaacgccggccgcgagaacctcgagttcaatttccgctggacccgccgcagcctcgccgtcgtcggcctcttcggcctcgctgtccccatcctcgtctacaagggcatcgtccgcgaattccatatgcaggacgaggatgcaggccggccatacaggaagttcctgtaagcggcgtccagggctgcaggagacgtcgatccctcgaccggngctgcgaggaggggagtttccattcagtttgtgtcggtattgttttagtctgaatctgatggaacaagtttgaaatgctgaactattgtgcctgatccaaatgaataaggtgtaatgactcgtcttttcaattactgaaactgaacatg

SEQ ID NO: 10092 - DNA, 434 bp, Zea mays
  unsure (1)..(434): unsure at all n locations; Clone ID: LIB3156-010-Q1-K1-F6
cctttacatcatttctgtgaagggaatcaaggggcgccttaacaggcttccttctgcctgtgttggtgacatggttatggcaactgtgaagaagggaaagcctgaccttaggaagaaggtgatgccagctgtcattgtgaggcagcgcaagccatggcgccgaaaggatggtgtctacatgtactttgaagacaatgctggagtgattgtgaacccaaagggagagatgaaaggctctgccatcactggacccatcggaaaggagtgtgctgatctgtggcctangattgccagcgcggcaaatgcgattgtctagtggaatcagttgatcgaaatttacttcaaataacatttgtttgtgttgcgaattgngaagagagtttttagttagacgagcttttgatggccctaaagatgtttcccggatgatgttt

SEQ ID NO: 10093 - DNA, 432 bp, Zea mays
  unsure (1)..(432): unsure at all n locations; Clone ID: LIB3156-010-Q1-K1-F7
tgataacctgtctcgcaagaacagctccaccgctcctgatcaagctggggaagttgaacagaaggatgataatatgtctgacggactgatgggcagtgccatgtcccttggtgacatcatcaactcagaggattacactcgtgttgtctcccgtggccctaatcctaggactacccacttttttggagatcgtgtttttgagcttcaagctgagcagctgatgcctgttgagatgagaagctcaaagaagccgaagacatctacatctatcagggtgacaaatccttttgcagcgtggagtgcagggaaaatttcatggtagattatgagatggaagaagcatatcatcctgcgtctcctangagcccaccctctgacggtggtcggattttccaactgatccgttgagtcagcatcagtaacaactcgata

SEQ ID NO: 10094 - DNA, 341 bp, Zea mays
  Clone ID: LIB3156-010-Q1-K1-F8
atccaattcatgtgtattggaaataaccgaacaaggccttaataaaacatctagcttgcaaaaaaaaaaaaaaaaaaaaaaaaaaaaaaaaaaaaaaaaaaaaaaaaaaaaaaaaaaaaaaaaaaaaaaaaaaaaaaaaaaaaaaaaaaaaaaaaaaaaaaaaaaaaaaaaaaaaaggggggggccgttttaaaggaccaaagttaacgtccgcgtgcttgcaaagaaaaagtttttttttggggccaccaaaattaaattcacgggccgcggtttaaaaacgggggaacgggaaaaaccctggggttaccaaactaaatcgcctggaaaaaaatcccctt

SEQ ID NO: 10095 - DNA, 132 bp, Zea mays
  Clone ID: LIB3156-010-Q1-K1-F9
atccaattcatgtgtattgaaaatatccttacaaggccttaataaaacatatatcttgcagattataaaaaaaatttcaataccacaaaataaaaaaaaaaaaaaaaaataataaaaataaataattaaaaa

SEQ ID NO: 10096 - DNA, 358 bp, Zea mays
  Clone ID: LIB3156-010-Q1-K1-G10
ctcgatggcacgctgcccggcgactatggcttcgacccgctgggcctctcggacccggagggcaccgggggcttcatcgagcccaagtggctggcctacggcgaggtgatcaacggccgctacgccatgctgggcgcggtgggcgccatcgccccggagatcttcggcaagatgggcatcatcccgccggagaccgcgctgccgtggttcaagacgggcgtcatcccgcccgcgggcacctacaactactgggccgactcctacacgctcttcgtcttcaacatggcgctcatgggcttcgccgagcaccgccgcctccaggactggtacaacccgggctccatgggcaagcagtact

SEQ ID NO: 10097 - DNA, 383 bp, Zea mays
  Clone ID: LIB3156-010-Q1-K1-G11
cctagccacaggtatcacggacatcgagatccacttcctgcagatcaagtacaacgccatcggagtctacctccacaacgccggcggcggcgacagcaccacgctgctgggccacctcggggcctggaagggcaagacggcggaggagctcctagcggacaccgccttctgggccgcgctggtcgcggcccccgtcgagaagctgtttcgcgtcgtggtcatcaaggagatcaagggctcgcagtacggcgtgcagcttgagagctccgtccgcgaccgcctcgccgccgccgacctctacgaggacgaggaagaagaggcgctcgagaaagtcgccgacttcttccagtccaagtacttcaagccgggctccgtcgtcacct

SEQ ID NO: 10098 - DNA, 171 bp, Zea mays
  Clone ID: LIB3156-010-Q1-K1-G12
cccgacccacgcgtgcggattaacacacatttcacggcgcacatttgtcttcaccgacacaccaatgatcatgggaggttattttagaagcaatctcattcacaaaggtcgccgcacgatcggctttcaccgctgactatcatgaaaaagacaccagttatatcattatca

SEQ ID NO: 10099 - DNA, 424 bp, Zea mays
  Clone ID: LIB3156-010-Q1-K1-G4
ttcaatggctctgacaccatggttagctgctggagggcagtttctggcatcaaaatttgagcagcatgatgtgaggagtttattgcctgtggaaagtgagactgacgatttgcacgaccatattattatattaggctttggacgtgttgggcagatcgttgcgcaactcctgtcagagcggttaattccttttgttgcccttgatgttagaagtgatcgggttgcagttgggcgtgcacttgaccttccggtatattttggggatgctggaagcagagaggtactgcacaaagttggagctgaaagagcttgtgctgctgcaattactttggatacccctggtgcaaactatagagctgtctgggcattgaacaaatatttcccaaatgtgaagacatttgttagagcacatgatgttgatcat

SEQ ID NO: 10100 - DNA, 459 bp, Zea mays
  Clone ID: LIB3156-010-Q1-K1-G6
cggtcgaccacgcgtccgaaccttcgactggggagcttttcaaaaggatacttatactgttttcagagatgtatgtgtcagaagatttcagttcagggcgaatgcttggatatgtggcagcaggtgttgttctgggcatgctgagttcgatgttcattacggccttattcagaggtttgtatgggttgttgctcgctgccgccaggtgggctgtgaggaagcatggcaccagagtgtttgccagccggttgaagcgtgcctgccttcttgtcgcctatgtatccgctgttggctggatcaccttgcagtacagcaaatttatcgggttgaaagaactcctgtcggattctgaaatcatggagaggttcttttaggctgtagatgtattcgccggtgtatattgtacttgtaaataccattcgttatttaggaaggtttcttcttcttttttttgatgtg

SEQ ID NO: 10101 - DNA, 406 bp, Zea mays
  Clone ID: LIB3156-010-Q1-K1-G7
cgccctcgctcctccgccgccgccgccttcgtatcaagcccccgccccgccgtcgcctgttgaagggtatctcatcgacggcgcttccctacaagaggacgcctcctacctggctcaagaccgctgcctccgacgtggaggagatgatcacaaaggcagcgaagaagggacagatgccgtcgcagatcggcgttctgctccgtgaccagcacggtatcccccttgtcaagagcgtcaccggcagcaagatcctccgcatcctcaatgcccattggccttgcaccagaaattcccgaggacctgtacttcctcattaaaaaggcggtggcgataaagaagcaccttgagaggaacatgaaggacaaacactctaaattcacgctcattcttgtggagagcatgatcc

SEQ ID NO: 10102 - DNA, 442 bp, Zea mays
  unsure (1)..(442): unsure at all n locations; Clone ID: LIB3156-010-Q1-K1-G9
gatgattatggttgtgaagcggaaggattgtaaatttggtggctaccctgttgagggcgttgtaggctcacagcagattcagtaacatcaaaggctactgaaaagttttactgtgcagatctgattcaatatttgtcagttatcttgttgggcaaacatttttgctttgctggaaaattggggagggaggttggtgggggcgccctgcagtttcaaggcaacaacctcagcagtcatcaacggtcgactccatttgtgttctgattgatccttanggggatatctgttattcaattgtgcgcaaattttggggctgaactgttaatgtttggctgctatttctttgttaaatcttggaaacgcaggctaccaaattccattacacaactaagatcatggcatgtaactttcaggttcttgtttctcatcagcatggtgttct

SEQ ID NO: 10103 - DNA, 227 bp, Zea mays
  Clone ID: LIB3156-010-Q1-K1-H11
tgcttttcgactataatttggagattgttccaatgtccgtgcaatcatctgaacatgtgactacttattgtgaaaaaaaaaaaaaaaaaaaaaaaaaaaaaaaaaaaaaaaaaaaaaaaaaaaaaaaaaaaaaaaaaaaaaaaaaaaaaaaaaaaaaaaaattgtgggcgggaaagaaaaaaaaaaaaaaaataaaataaaccggggcggccctttaaaagatttaa

SEQ ID NO: 10104 - DNA, 398 bp, Zea mays
  Clone ID: LIB3156-010-Q1-K1-H3
cttgctgtgaattttgacacacctggtggagctggtgagttgcaggatggtcggagtgtggatgacagtggtgcgctagacaatgccggcagtgatgttttgcccgaggatttggatgatcggataggaccagacctttcgagtggaagcagtggcaggccatcaagatggaaagcactgatgggtgctttgatgttgaggagcttttctgtttccatatttcaaagacaaccgcgtggagcctgctctacaagtcacgagtcatgaaaattggatgacatggttattccttgagccctttaaattcttttatatttggattgttcaattaaattggtgctgttttatttacgtcttctggtgatcaaataaaggggaaatacatgttggatgtgtgc

SEQ ID NO: 10105 - DNA, 244 bp, Zea mays
  unsure (1)..(244): unsure at all n locations; Clone ID: LIB3156-010-Q1-K1-H5
cggaatcgggcgggaacgccaccacgcgtgcgaacgtcgtgggcgcaactacctgtggcattattcagtgaccccttccgacgaagatacccaatggcgtgtcgttagtagaaaaacgccctgcttgggatttctaccagtnntggagtnncatcaaaccagctananccatttgcacctttgaattgtttggggtgaaatgcccttgggagaaaagaggggtcaccaaagaattggggagtca

SEQ ID NO: 10106 - DNA, 410 bp, Zea mays
  Clone ID: LIB3156-010-Q1-K1-H7
ctccctttgtgtccaggatgtcaagtgccagggctgtttcagcataaccactgtgttcagccactcccagactgtggttgtgtgcccaggctgccaaactgttctgtgccaacctaccggtgggaaggccaggctcaccgaggggtgctccttccgtcgcaagggcgattaggtcctgcttctcttaacgtgagaagagataaatttggtgttttgcaactttctcaggatatgtactcggtgaggattttgttaattattatggctgttagcgtggcctgacaatgcttgtgtaaacctgcactttgtttgagcgtagtgacagctaatatggtgcttgttggcttttgctgagggagtggcaatgcaaatgaaatcaactggtggcgttaaaaaaaaaaaaagggcgg

SEQ ID NO: 10107 - DNA, 287 bp, Zea mays
  Clone ID: LIB3156-010-Q1-K1-H8
ccagggttgcattcatagatcgttaggatcgtgtacagttcaggagcagcgggcactagatccttagaactgggtcggacggactgcagcgaggatggcatgcatgttcgttttggccttttgtcgtgctatggtcgaagccatggccggagcgtgatgtggcaccatgcattgttgtattcgtaccataatatgtgcgttgttgtatcctaagttctttttgaaggaaacatgattgatttgtttgtattgtaacgttgtgtcattgcaaaagaataacctggtgt

SEQ ID NO: 10108 - DNA, 359 bp, Zea mays
  unsure (1)..(359): unsure at all n locations; Clone ID: LIB3156-010-Q1-K1-H9
cgcgctggtcaagatcgagggcaaggtggtgggcgagaaccgcgacccgcagctgaggaacaggaacggccccgccgagttcccctacatgctgctctaccccaacacctctgaccacagtggcgccgccgcagggctcactgccaagggcatccccaacagcatctccatctgagcgactggtaccactaccaccccaggagtgctacgtacgagctggtacatgaataagctaatataagcaatcgtgtaaacgggaagaagagcggccggcacgaaacggaccatgtattntgcgtaaacgtgtgggcttgtgaatcgaatactaccacgtaataagtgaagtgctngttgcaatc

SEQ ID NO: 10109 - DNA, 347 bp, Zea mays
  Clone ID: LIB3156-011-Q1-K1-A1
ggttagtggacagttggatgatcatctccagagttgggatgccttgagagctgccttgcgcgttggaacagtcagtggtgcaccaaaggtgaaggccatggagttgattgataagttggaagttacgaggcgaggaccatatagtggtggtctaggaggaatatcgtttgatggtgacatgcaaattgcactttctctccgcaccatcgtattctcaacagcgccgagccacaacacgatgtactcatacaaagacgcagataggcgtcgggagtgggtcgctcatcttcaggctggtgcaggcattgttgccgacagtagcccagatgacgaacaacgtgaatgcg

SEQ ID NO: 10110 - DNA, 152 bp, Zea mays
  Clone ID: LIB3156-011-Q1-K1-A10
catggtttttttcatcgcctttctcaacgacatcacgggggggaccatatatcaagacagagtgcatccctttcccttgcccgtctgctggaacctgacagaaatcatttcaaaccgtatcgttcttgtaagctacctcgctctgatgactg

SEQ ID NO: 10111 - DNA, 327 bp, Zea mays
  Clone ID: LIB3156-011-Q1-K1-A11
ggggttctctttagatctcaagaaggagttttttttcaagtcaccggacaaccacaaaggtgaggttgatattactaggagtggcaaatgcctaacctacttacacaggattgtgtagcatctgcaccttaaacgtgagtccagtgatgctacggatgatgactaagaattaactgaagaaccgaccttctgtttgtatctcgccaaacaaacatttccatacctgctctttagcgcctacaaacacttatggagactcttgacttaaaccagacaatcacaatgtttgttccatacttaacttttgaatgtttgcttgccgttttt

SEQ ID NO: 10112 - DNA, 391 bp, Zea mays
  unsure (1)..(391): unsure at all n locations; Clone ID: LIB3156-011-Q1-K1-A3
gagagacagacgcgtatacccaggcggcggttgttgaggaggagaagaagaagaagaaggtgggtttctccgcgtacgcctcatggtccaagcggtggatccgtcccgaggtgtacccgctgttcgtgccgatggccgtggccctgggtatctgctcgtaccagcttgtgcgcaacatcacgggcaaccccgaggtgcgggtgaccaaggagaagagggcggccggcgtcctggacaaccacgacgagggcgagaggtacgccatgcacggcctcaagaagttcgtccgcgggaagaagcccgagatcatggcttccatcaactccttntttgtcgaccctcccaaagacgattaagctagattccgtcatggatggatgagtatgtttta

SEQ ID NO: 10113 - DNA, 132 bp, Zea mays
  Clone ID: LIB3156-011-Q1-K1-A4
aaaaaagaccgaccacgcgtacctcaaaaccactaaacagcccgactttttttttttttctgccataaacacaataccggtgcttctatataaaatacccaaaccctctcacactcgtaccgacaccatact

SEQ ID NO: 10114 - DNA, 289 bp, Zea mays
  Clone ID: LIB3156-011-Q1-K1-A5
accggacgcgacccacgcgtaagcacagatctattaaagctgcaatggtttttttcagcttcactgtaaaaatagtcgggggggtacatacctatatacctatttacaaggtgacatacacaaggaacaagggtaaagtcactgacaggatttgggcaaagcttttgtcgttcaccaaccaaccaagtttcctgaaacaaaaggatatccacgaaacgtgtgacgccgatagacttgcaaacacgccaccattgacaacgggtaccaactctagcgtggagaaatcttt

SEQ ID NO: 10115 - DNA, 224 bp, Zea mays
  Clone ID: LIB3156-011-Q1-K1-B10
ccgggggggagtctgtcagactcaggtctctatctaccgatgtacatataccttacgaggaggaaagacattctctatctatcgatgtacatacatacatacataacttaatttcaaaaaaaaaatgttaaaaccaaaaaaaggaaaaaaaaggtgtttcttctatcaagggggtttttccccccgggaaaaaaaaactagtttatggttaatatttggggggg

SEQ ID NO: 10116 - DNA, 220 bp, Zea mays
  unsure (1)..(220): unsure at all n locations; Clone ID: LIB3156-011-Q1-K1-B12
cccggnntggganacccgggcgcgacccacagcgtacgcttgctccctctacatcgaccccgcttgtttcgtcttttagcgcatcaatctccggcagggggggctagccataatagagcccgtcatcaaatacagctgggtcgctctggagcgatggctgccctagcatcttttccgtacgcatcccatcgtcctccagaggtgcgtacgagacatctac

SEQ ID NO: 10117 - DNA, 294 bp, Zea mays
  Clone ID: LIB3156-011-Q1-K1-B2
gcagacgccgtcacaggacagccactggtctaatgctttggggcgatagtgcggtcctgcggaggcctgaagcgtcttgccatgtccggctttctcacggacagcgtgttcctgtacatcggcatgtacgcggagaagctggagatgctctcggcaacgtgcgcgggggacaccgacgacggcatggtctatgtgctcaatggctgcaggaacctcaagaagctggtaatcaaggagagccccttcggtgacgccgatcttctcgcgggcgcgcacaggtacgagtcaatgcgc

SEQ ID NO: 10118 - DNA, 417 bp, Zea mays
  Clone ID: LIB3156-011-Q1-K1-B3
ccgaatagccggtgcgacccacgcgtaacgagattatataatctggacaaattatatttttatttaaacaggctatgattggacttactgatacccatttgagtagaactgatcttgacaggtatccgagaaaacgatgaccttaattgaaaattttgctgatacgctgatgcagcacttaaggtctactattgatattggtgtagccaagggatagcaaatgggaaaaatggtgtaaaaacgctgcatatttttttttgcctaagctacagctgtgctacagcaaattttgattaaaaaaaaaagcgttttcaaaaaaaatttaaaataagggtatatttttttgggaatcccttaagaaaaaaattttttaaaaaagggggttaaaaaaagccaaatattccccttttaaaaagg

SEQ ID NO: 10119 - DNA, 368 bp, Zea mays
  Clone ID: LIB3156-011-Q1-K1-B7
cccggacgcgacgccacgcgtaacgctcgcgatcctcaaaaagcgcgacgccgcttttttttgaggttctgaacgataacaactttgcgggggtgacatgggtactaccacgaggcaactcactgtgaacatggactcattacacatgtaaccaaaaacctttacatcatttatacgaaaggaatcaaagcgcgccttaacacgctaacttctgcctgtactaaaaacattgttatcgatactgaacacaaacggaaagctctgacgcttaagatgaacgtgaactcatctcacattacaaagcaattcaagccactgtgaataatagatcacatatacatacactcctaagacaatgctgcagtgat

SEQ ID NO: 10120 - DNA, 279 bp, Zea mays
  Clone ID: LIB3156-011-Q1-K1-B8
ccggacccgacgccacacgtacgaccgtatacaagaaaacaaccgatctttttttattcattgcagtctatataaaaccgggggctttttcttgaattaccatattcaaattattaaaaaaacctaactcctggagtgagaataacgccattcattttatcaaattaaaaaaaaataaccttttacctattaaaaacaaaaaaaaacttaccacccattgaataaaaattaaaaaacactgacctctttcttaataaaaaaaccttacgttcgctattt

SEQ ID NO: 10121 - DNA, 273 bp, Zea mays
  Clone ID: LIB3156-011-Q1-K1-C10
gggcgacccacgcgtacgctcacgcgttcttgacttgacgaccgaatttcttggtggtttatgcatttatctctacggggagtcactgtcacactgagcttgtggtgatttgccagattaggtgtcctgacctttgttgttccgagagtcactgttgcttgctctatggcgcaatggaattcctcaggtgtttaatgacaggactgaatttatattttgaggtaattacaaggttgcggtttctattatatcaataccaacaacttgggagtt

SEQ ID NO: 10122 - DNA, 259 bp, Zea mays
  Clone ID: LIB3156-011-Q1-K1-C2
acggggcgacccacgcgtacggccgagagagtcagagccggcgcccctgtttatctcgctgccgtgctcgagtaaatagctgatggggttcttgagctggacaacaatgccgtacgtgacaacaagaagacccgcatagatccgcgcctcatacaaatagccgaccgaatcgacaaacagatgttccgattgctgggcacggtgaccatcactagcggcggtgtaatgcccaacattcataacctttcgctcccttaga

SEQ ID NO: 10123 - DNA, 205 bp, Zea mays
  Clone ID: LIB3156-011-Q1-K1-C6
gacccacgcgtaacgctcagatccaacgaaaaacgaacgccattttttttatatgtcatcacaggtgacaacctctcagggtgtcctattataaaaagcatgatgcacacactctaagttctattatgtagaaaagcgggaacaatatcctacatcatgttatccctccataatactttcctataggtcaacaaccaacatcttt

SEQ ID NO: 10124 - DNA, 331 bp, Zea mays
  Clone ID: LIB3156-011-Q1-K1-C7
acgacccacgcgtacgcaccaaacctctaaacaaaccaaccaattttttttattgcattgtacaattacactacgggagggtgtttattatgcacacagacattctcatcaccatatacatttttatacatgctcatcaccataccaatcacgctaatctactacatacaactcggcctttgacctacccgcgcgtgcacgcactactgtaactgtaaaaaccactgctgacactaaccgttcacttgacgcaagtgaagacactgtctaataccacatttgctttccgcctgataaaaaaatggtttgtatttataacaatctctctcta

SEQ ID NO: 10125 - DNA, 81 bp, Zea mays
  Clone ID: LIB3156-011-Q1-K1-D10
ctcttcggcggggtgggttgccacaagaacgagtctcttgataatgccttctccttctacggcgagagcctcgaatccaag

SEQ ID NO: 10126 - DNA, 316 bp, Zea mays
  Clone ID: LIB3156-011-Q1-K1-D2
gaccggaaaaaacggagcgacccacgcgtacgccggtatgcaggaaagcgaaataccacttttttttttcagcatgaattctcatagttcgtgacggaacttatgtttgatctatatcacgaattccaacaattaacgaaagaaatctgctaccaaaaatgatgctatttacaaacaacatccattttcgtaacagatacccttctttgattgttgaaaaaccagacattgtaaaaaaccaactacgatctatccttttataatgcaaaaaaaaacaacaaaaaaggacttccgttttatacgaaccaaacttacc

SEQ ID NO: 10127 - DNA, 317 bp, Zea mays
  Clone ID: LIB3156-011-Q1-K1-E11
cccgggcgcgacgcgagcgtacgctcggatcgcctagaccggacggcctctttttgcgcggcggcggcagcggctaccatcggcaggcgttacgctctaccatgaccttccacctgaacacacagagctacccgaccatgccggagtcgtcgtcctaggactcgacgaccgaacaagacctcgtgccgagcccttcttccgtggacttggttgtcatggctctgatcccgacactcgtgctgaatgacatcagggacctctgcgactgaccccaaatcttgctaggtacgtcccggaccgggagctccatcaggggg

SEQ ID NO: 10128 - DNA, 250 bp, Zea mays
  Clone ID: LIB3156-011-Q1-K1-E2
gaaaaaaggggcgaccacgcgtacggaaacgtcaggtcatgatcacgccgtcatttattgtgatcatcaagttcctgacggacgggcgggcgctatggctacatcggggagtacgagtacgtggatgaacacaaagctgggaagatcgcggtggaactgaacggaaaactgtataaatgtggtgttaacagctcacgtgttgataaaagcgcataggaaatcgaaggatggacggcgatgctacttacat

SEQ ID NO: 10129 - DNA, 262 bp, Zea mays
  Clone ID: LIB3156-011-Q1-K1-E6
gacgcatacgtaacggtcggatacacaaaaaccacccgctttttttctttaccattactcccacctctgggtcggtcccatttgaaccaaaacccagaccaaaacaccacaattaccaccaccttcaccactcatacagcgggagaaagagagccgagaggcgagccgtattgtcaaaccgggcgagacgcattgctgcaaccgcccaccgcgcacacgcattggatgcacacgatcgtcaccatacgagcgagcccagcag

SEQ ID NO: 10130 - DNA, 198 bp, Zea mays
  unsure (1)..(198): unsure at all n locations; Clone ID: LIB3156-011-Q1-K1-E7
ggaaaaaggaaggacccanagcgaagaacggatctacaccaatttccacaaggggtgtttttttatcaaaaatcaatacgccgtgggggggtgtgatgttctgagcaaaacaccaagggttcccgcaaaagacacgaagcactagtacaagtgattcgaggcatgtttctaaattcggaatactaacacttggtttga

SEQ ID NO: 10131 - DNA, 327 bp, Zea mays
  Clone ID: LIB3156-011-Q1-K1-F1
cagcaactcagcagaagcacaccactacggccggttcgtcgtccctagataagctggtgcgtctcgcggcgtggtggatcggaggagaggtgggacaggcaggcacccatggcggggctacagaggtcggcgaccacgttcagaaggtccgggtcctcgggcctggtctgggacgagcggttcctgaccgaggccgaggccgaagcgaaggcgaatgccggcggtggcgccggcgacgtcgaggacccccagccggagcttcggcactccaggagcgtcgggagcatcggcatgctgctccgtggtggagacagcgacgacggcaat

SEQ ID NO: 10132 - DNA, 226 bp, Zea mays
  Clone ID: LIB3156-011-Q1-K1-F2
gcgacccacgcgtaacgcgggacgcgtgggattagcatgcaccaaactttctgtttcgcgcccgatgtgggggagggtgcatgatgcgctgcaagccaggacagagacggactgttcccccgcactcatccactctgcttcccacacggacatgcggcatcatactcacctgggacggcggcaggctggtggcttgcgtgggcgggacggaacgtgcggtcgaatg

SEQ ID NO: 10133 - DNA, 346 bp, Zea mays
  Clone ID: LIB3156-011-Q1-K1-F4
gacgccacgcgtaacggtgcaatggctcttcacgaggcacgaggtatgactattgtgaccagggaagacgaggatgagaagaacgagttggatgacgacatgtagatggcagaggccactctcccatctttgaaaatggatggccgatgtgagcgaatagttagaaatgttacttgctttaagctagagggaagacgaagagctaccagtactgaatattctccgttgtcgcagctacatgaatgaactatactatgacgcaggtctgtctgctatcatcttcatacaacacatgtactcaatgcctttttcttttttggcatttctatattacatccattgctcc

SEQ ID NO: 10134 - DNA, 225 bp, Zea mays
  Clone ID: LIB3156-011-Q1-K1-G1
gcgacccacgcgtacgctatattttgctcttttattagtttatagttatttttgtatgcatattttcctttttactgtgtggtggtaaccatcaacagaaactgatggttgagctacgacttatgtaagaagtaagatgttttgtgtaaccctttatgtttagtaatttcgtctcaacaaaaaaaaaaaaaaaaaaaaaaaaaaataaaaacaaattaaaaataa

SEQ ID NO: 10135 - DNA, 406 bp, Zea mays
  Clone ID: LIB3156-011-Q1-K1-G3
tggaataaaggggcgacccacgcgtacgcggggatccatacacaatggcctttttttttcttagcatgcttgcagagcaaaggggtgatgctgatgcaaatgctgatgtaagggtttctctggaagagattgcatctaaacaaggtcatggcgatgtctctaagctgatgccgactgatatcgcaattgactcacttcataagatcgagagtttcgtcattgagcacgctgctgataatccaactagcgactcgcaagctgagtcacagatgcaaaggatacagaccttgtaatatctgaatccttctgttttgtaccgaagcgtaccccctagagcatagatggtttatttgttcaatgaactgtcacgagggagagaaaaaaaaaaccctgaagtctttcttgt

SEQ ID NO: 10136 - DNA, 286 bp, Zea mays
  Clone ID: LIB3156-011-Q1-K1-G5
aaagtagagaatggaactagggaagggagatttgtagcaaagtcttgaaatgatgctcgctgacaacatatcaatggactgaaattatacgctcaatgaacttggatcgatagcattggaagatgatcaacatttgtgaataagatctctaactttggcaaaattacttcgtacaaggtgatgcgtgaacaaaatggtcttagcaaaagctctggatttgttgctttctcaactcgtgaggaagcatctcatgctttaactgaaatgaatggcaaaatgatatctg

SEQ ID NO: 10137 - DNA, 306 bp, Zea mays
  Clone ID: LIB3156-011-Q1-K1-G6
accggagcgcgacccacacgtacggatgaatcctatctatcagacgacgttttttttttattttacaatgcaatgattgggctgtgtgtcattaccctgatcacatcactactatcaaagtttgttgtgagcacaattgaagcaacattgaaatcttggtagctatttcacaagaccattagcgcaatctagactccaattatccgttatgcagcagaacatactcgtgcaacactatttgcttttaaaaacaacatcaacatcaccctcggagtatctttggtgtccgctacacaaaacttcatg

SEQ ID NO: 10138 - DNA, 416 bp, Zea mays
  unsure (1)..(416): unsure at all n locations; Clone ID: LIB3156-011-Q1-K1-H1
aaggggcgacccacgcgtacgtggataagctccggctggtcgccctccccaacctgatcagtgtgcggccggagtgatacgaccggcagcgctcccacagcgacctgtaactgtggagcaagtggcgcctggctagagcaggccgccttgtacatacttttgcaagaacgaggtgtctgtacatatggttcgtcgtgtcgtgtcgtgtcagtgtgcctgatggcaacgggctaatacgttcgtgccaacgtgtgcatggtatcccacggaccctgtgatggtaaagagcaggtgtaaatatgccgtgctttctctgcatgtggggtgctgctgtataaatagattggtgcattgctaaatacctctgttgggggccccctntctaaacataacatccgcccaacatttttttatat

SEQ ID NO: 10139 - DNA, 432 bp, Zea mays
  Clone ID: LIB3156-011-Q1-K1-H10
ctagttctctttatatcactggacctgcttttttttctgatgattcgagcaagaagagaaaagcgtctgcatctagtgtagagctcaaagatttttctggacggtcgatgttatgtgtgtgtatagtccatttctgcttctaaggaaaaaatggcggctgcatactatggttgcatcggtgttctggacacgttcaaatcatgtggtgtggtctagttagtgttaactgtgtcaaatcacatggcctactttcaagtgtgctctttaagtttccattccagcttgcttcattctgaacagagaaacatatctatcttgcatcatctgctcaacttattccattgtaaactgtgtcggttgtcctcacctaacttaagattgtgctcccttttgatttgtgagcccacaaaaaaaaaagcacttttttttttt

SEQ ID NO: 10140 - DNA, 325 bp, Zea mays
  Clone ID: LIB3156-011-Q1-K1-H11
gtcctgcaatccgatctcattcagctcaagcccaagctacctacatggaaggttagggcgatgtaccaattcgacatggccgtgtacaccaagatcttcctcaagttccccaggaagttctggcctgaagggaaaggaagggagttcttcctctacgccagcagcaggagaggttactacggagtgtggcaggagttcgagaagcagtaccctgacgccaatgtcctcctggtcaccgtgaccgacgaggagtcaaagcgcatcgagcatctgtcggacgagcagaccaatgcggagatcatgcacgtgctgcggaagatgttcc

SEQ ID NO: 10141 - DNA, 125 bp, Zea mays
  Clone ID: LIB3156-011-Q1-K1-H12
ggccgacccacagcgtacggttgtttcctctatatcaatccaccttttttttttttttcctacatcaacagttatctggaagaaccatttctacataggcgcatccacccatattctccttaact

SEQ ID NO: 10142 - DNA, 412 bp, Zea mays
  Clone ID: LIB3156-011-Q1-K1-H4
aaagaatcagagcagcatcttcgagaggaaacgttcttcgctatgtctgtgagattgaaagcgcagggtgccaagtaggccttaaagagctcccaaaggattctgcgctgggtagattgaggggaagtgacaatgtggtcgagatatacagcagatgttatcagagctcccctctggtgatccagggcgcaggagctggcaacgacaccactgccgccggcgtccttgctgacataatcgacctccaagacctgttccagacgatggcttgatcgttgatcggcatccacaccagtacaccatcttgatttttgcaaggcaccagagcgtttgatactttgatcggtgccagtggaatccctcactgcccactggttggcttcgcttcttgtcatgtgtgcatttttgtcac

SEQ ID NO: 10143 - DNA, 129 bp, Zea mays
  Clone ID: LIB3156-011-Q1-K1-H6
tattaggttgctgtcttattaagttatcaggtcgcagctgggttgaagcggagcacctgtcttgatttatctcttctcttttctagagagcttctgtcattcgtgtgcccttttatatcattttgctct

SEQ ID NO: 10144 - DNA, 392 bp, Zea mays
  Clone ID: LIB3156-012-Q1-K1-A1
cccacgcgtccggcaagctccgtcagcggtatgatgaactgaaagagcgctatggggtttctgatattactgtttcagtacaaaatgtggcttctcagcgggggtacagtagcattgacttggtgacgcttgaggacatggtccttgaaatcgtgaggcaaatcgagaagctgatccgtgcaaaggagatgatggaagctgcagggaagccattctaaacaagatacacatacacaatagttctgctccggcatacctattttctggccagttaccagacctccgatgcttcgctgttcaagaaaccgattgcagttgcctacggctcaaagcacaagcgcgtgaaatctaaggaactgaatctggttgttccactcgaatatgcttatatt

SEQ ID NO: 10145 - DNA, 385 bp, Zea mays
  Clone ID: LIB3156-012-Q1-K1-A10
attttaaaacatctaatatactactggatgcggagtataatgcaaaactctccgattttgggcttgcaaaagacggacctgtaggtgataaaactcatgtctctactcgagtaatgggaacctatggatatgcagcaccagaatatgtcatgactggtcatctgacatcaaagagcgatgtctacagcttcggggtcgtgcttcttgagatgatgtcggggcgcaggtcaatggacaagaatcggcccaacggggagcacaacctggtggaatgggcacggcccctcctaggggagaggcagcggttctacaagctggtcgaccctcggctggagggcaacttctctgtgaaaggcgcgcagaaggcggcgcagctagcgcgcgc

SEQ ID NO: 10146 - DNA, 378 bp, Zea mays
  unsure (1)..(378): unsure at all n locations; Clone ID: LIB3156-012-Q1-K1-A11
gcggcggcggcggatgcggccagcaactgatggcaccgcgtcgtcgagtcgaaccacgtctgtgcgccgcgtgcaacgttcgttcgggtcgagtctgcgtgcaacgttctgcttcctttactagttgttgtctttccgccttcttgccgttctgttctgggctttgagatgagacgatggatggtcagtttttaatgtcagactgaataactacgtatagtactgtagtattactcanaaaaaaaaaaaaaaaaaaaaaaaaaaaaaaaaaaaaaaaaaaaaaaaaaaaaaaaaaaaaaaaaaaaaaaaaaaaaaaaaaaaaaaaaaaaaaaaaaaaaaaaaaaaaaaaaaaaaaaaangggggggggcccttttaaa

SEQ ID NO: 10147 - DNA, 487 bp, Zea mays
  unsure (1)..(487): unsure at all n locations; Clone ID: LIB3156-012-Q1-K1-A2
cggaannnnccgggncggacccacgcgtnccgcntggtggtaccgcctatcanntgcagcaacctgctccaaggggnaaaaggcnagacaaagcgccacgcaatnnagagagtcggcttgagggggatgagcgtggtatatcatagcgctcgacacgtgatgcggtccccggtgaaaaaatcccgacgatccctgtttatgaaattcgtttggtgaaatccaactatnngcatggcgccttccctttccagaatattccnntgctccccctgttctaatgcnnctgtgcctggtcngccggtccgcttggaaccgtttattctccnngcaccgccggaagttgccatgcattatgttgaagggatcnnagggcgcgccacctttcttttgaagcccagtggaaggtccacaatcctangaaaagcaaggaaggggcaagcggcgggcgggcggtccctccaaatgcgtggtcccgtcccccagtctt

SEQ ID NO: 10148 - DNA, 431 bp, Zea mays
  Clone ID: LIB3156-012-Q1-K1-A4
cagaattaggagaaaagctgggttccctgccagtccatccatccaccaccaagatgctcctgtttgctatattaatgaactgcctggatccagcattgacattggcatgtgcagctgattatagagatccatttgtccttccagtagcgcctgatgagaggaaaagggcagctgcagcgaaagttgagcttgcttcgttgtatggtgggttcagcgaccaacttgctgttgtcgcggcatttgactgctggaggcatgccaaagatagaggccaagattctcaattttgtgcgaagtactttgtctcttcaaacatcatgaatatgctatcaagcatgaggaaacaacttcagaatgaactgtctcaaagagggtttgtccctgcagatgcatctgcctgcagcttaaactctaaagatccaggtattatg

SEQ ID NO: 10149 - DNA, 186 bp, Zea mays
  Clone ID: LIB3156-012-Q1-K1-A5
gcacatggcaaggctcaacatccgacgcggagagatccgctggtggatgctgcaggccatgagcttcgtctgcctcctcatctccgtcgcagccagcatcggatccgtgcacgacatcgtgcacaacctcaaggccgccgcgccattcaacactgcaaactgattaataaacatgcatttactagt

SEQ ID NO: 10150 - DNA, 384 bp, Zea mays
  Clone ID: LIB3156-012-Q1-K1-A6
cactcctcgccatcacataaaaccagtgcaagcagaagcagcgcaatggcgagcagcaccatggccctctcctccacagccttcgccggcaaggcagtgaacgtgccgtcgtctctcttcggcgaggcccgcgtgacgatgcgcaagacggcggcgaaggcaaagccggcggcgagctccggcagcccgtggtacggccccgaccgcgtgctctacctgggcccgctgtccggcgcgcccccgagctacctgacgggcgagttcccgggcgactacggctgggacaccgcggggctgtcggcggacccggagacgttcgccaagaaccgggagctggaggtcatccactcccgctgggccatgctgggcgcgttgggctgcgtg

SEQ ID NO: 10151 - DNA, 420 bp, Zea mays
  Clone ID: LIB3156-012-Q1-K1-A8
gaacgattcttctctccgtttactcttttccctgttcgtagctttgagttttaatttttgttttttggtggacggattgttccggggaggtcgaggttgggatctaaatttattttcaatcggtggagatccatctatctatcagcagcagcagcaggagcaaccatgttttctctccaacaatacattggaattgaattcctaacgggcagattggatccttagaattgaattttattctaataatattaatttagacaaaggtcttttaaactaacatggttttatctataatatatttaggtactattattattggagatatttatgtgatacatttttactgtagagaaataggcttagggcatgtttgtttaccccaatggattatataatctggattatttttggaaggatata

SEQ ID NO: 10152 - DNA, 258 bp, Zea mays
  unsure (1)..(258): unsure at all n locations; Clone ID: LIB3156-012-Q1-K1-A9
gtgcccccacataccctcttgataccccattgaaacaggtttctgaaactgttctgaaatgtacaacgagtagttctgctatcttggtcagattacaaaaattcttcttggttggttggtggtagtgggggaaccatagcttttgttaagttggacacatgactgaaccagctggggatttttaattttttccaaaanaaaaaaaaaaaaaaaaaaaaaaaaaaaataaaaaaaaaataaatttaaaaattaatatat

SEQ ID NO: 10153 - DNA, 360 bp, Zea mays
  Clone ID: LIB3156-012-Q1-K1-B1
tacaagatggtgactgatggaactgagaaccaccttgttctctgggatctccgcccccttggcttgactggaaacaaggtcgaaaagctatgtgatctttgccacatcacattgaacaagaatgctgtcttcggtgacagcagtgcattgtctccgggtggtgtccgcgttggcgcgccagcaatgacctcgaggggtctactggagaaggatttcgagcagattggggagttcctccaccaggcagtgaccatctgcctgaacatccagaaggagtacggcaagctcctcaaggacttcaacaagggcctggtgaacaacaaggacatcgagaacctcaaggtccaggtggagaagttt

SEQ ID NO: 10154 - DNA, 393 bp, Zea mays
  Clone ID: LIB3156-012-Q1-K1-B10
aaaaaaaaaaaaaaaaaaaaaattataaatttaaaaaaaaaaaaaaaaaaaaaaaaaaaaaaaaaaaaaaaaaaaaaaaaaaaaaaaaaaaaaaaaaaaaaaaaaaaaaaaaaaaaaaaaaaaaaaaaaaaaaaaaaaaggggggggccgtttttgagaatcaatttttttttccccttttttgcaagtttttttttttttttttgggtacctaaatttaatttaatgggccggttttttaaaacttggtaattggaaaaaccttggtttaacaaaattaattgtttttaaaaaaatttcctttttctcaagttgggtaatatttaaaaaggcccatattttatttttttccaaaaatttgtccaccttaaatggcaattggaaccccctttt

SEQ ID NO: 10155 - DNA, 467 bp, Zea mays
  Clone ID: LIB3156-012-Q1-K1-B11
aaaaaaaaatataaaaaaaaaaattaaaatttaaaaaaaaaaaaaaataataagggataggggtgaatattaataaataaataataataaaaaatataataatatagggtacatagtttttaattgtctgtttgttttactttctttttttttttttaaacatctgtttgttattctcctatatttatttgcttgcttaggttctgtttttccagctattcttgtttttttaattaactctttttttgtttgttttttcttgtagttatttcatcctttttgtttttctgttattcttatttgtttttcttctttttttattgttgttttcattattatgttttttttttccgtctctttttgcttgtttatttagttgaactcttaattgttcttatttttttttgtttttttctatttttattttggttttttttgttttttttttttaatatgattgttttttt

SEQ ID NO: 10156 - DNA, 238 bp, Zea mays
  Clone ID: LIB3156-012-Q1-K1-B2
cacgcacgcatacacagcacagagtgaggtaagcatccgaaaaaagctgtgatctgatcgacatggccgccgccaccatggctctcacctcccgcgcgctcgtcggcaagccggcgaccagtaccagggacgtcttcggcgaggggcgcatcaccatgcgcaagactgctggcaagcccaagccagcggcgtccggcagcccctggtacggggccgaccgcgtcctgtacctgggccc

SEQ ID NO: 10157 - DNA, 359 bp, Zea mays
  Clone ID: LIB3156-012-Q1-K1-B4
gcgtggcctcatccggttggtctcggttcactcaagccagcagatctacaccagggcaacaaatacctaaggatgggattcccttgtttgccctctctgtaggagctcgtcttctttagaacagttgccatctctgtcaagagtttgctaatgctatgttagatgagtttctcacgtggctgaaacgtttcagagagtttgcgttagtttggcttgcctattataccttatctggcctcaatagcttttttctatggaaatctgccttgaaacgtctgatccgtgattatgcgactctatctaaactactgttatgctgcaattctgtcaacttgtctgaccagcaagtctgatgaatg

SEQ ID NO: 10158 - DNA, 394 bp, Zea mays
  Clone ID: LIB3156-012-Q1-K1-B5
attctatatgagatgctggaaggtgattcacccttctccaactacgaaccttatgaggctgctaagtacgtggcagatgggcatcgtccggttttccgtaaaaatcataccactgagttgaaggatttggttgagctatgttggtctggggatatcagtctgagaccatctttcttggagatcctcaagaggcttgagaagctcaaggagcattattcacacgagaaccactggcatttgttccagtagcagtgcgcatataatcatacagtattttttttactatgactgttgtcatgattgggctttctcgggagatctgacattgatgaatgtacaaaattgggtgcccctagaaaggtccactgagactgaaaaatcttcttgctgtttt

SEQ ID NO: 10159 - DNA, 372 bp, Zea mays
  Clone ID: LIB3156-012-Q1-K1-B6
ctcatctgctctcttcccccgtcttcttcccaagctgccacgttgcctccctccgctccagcggcccatggcctccatggcgttcgccctggcgggggccttcaagggcctctccctggcgcccaccaccaccacctcttccttcccgcgcggcgaccgcgcctcgctctccgtcggcggcgcagcgggcgtgccggtgccggtgccggcgcggcggctcaccatccagatggcgcacaagaagggggccgggagcaccaagaacggccgcgactccaagggccagcgcctcggggtcaagatataccgcgaccagctcgccaagcccggggccattattattcgccagcgcggcaccagggtctattctgg

SEQ ID NO: 10160 - DNA, 292 bp, Zea mays
  Clone ID: LIB3156-012-Q1-K1-B7
gttcaccacttcaccagtttcacactcaggagcgtgaatacaattgttactgcggttgtttttgaggtttgtaaacagttttgggtcttgcagcactggactcggtctgcgattgttgttttttgttgcccttgcttcagtccgcggtgtgtatgtcctacatgcacgtggttcctttcagttggtgtttttgtgtgccaacaaaccaccaaacttggtttgtatgcctttagctgatcattctttgacactgaatctcattatatttgtattgatttggacgtttgctttt

SEQ ID NO: 10161 - DNA, 428 bp, Zea mays
  unsure (1)..(428): unsure at all n locations; Clone ID: LIB3156-012-Q1-K1-B9
gtcgagcctaacctttatgtttacttgattctgtagtgcgtgcgtgtgtctctaataaatcctaaacttcgcgtgaaattcgactccgcctgatggaatattgggtactcagcagctatcgtatcgcgttctctatctcatttatatttgaaactttataaatctactactttatatatgacctgctacgaacagttttacaatcatccgcggaccaaattcaaccgtggtagtcacatctctcatgagtcatatcctccaactattcctccttactccttatgtatattttctaatatattttactctatctactaaaagattcttctctacatacgcactacactataactcagttaattaatatttattattatttttcttgaaattttcaaaaatataccaatgttggngtatcataatacaca

SEQ ID NO: 10162 - DNA, 394 bp, Zea mays
  Clone ID: LIB3156-012-Q1-K1-C1
ggaagacccacgcgtgcgctttgccagtttcgctctgggttttctgatcactaatggtgctggtcttgcatcttacggcatcgggaccgttcgcagaaggatgatgatgacatctggtgaggctgtcaagtacaagagctccttggacgcgttccagcagattcttaagaaggaagggcccaagtccctgttcaagggtgctggtgctaacattcttcgtgccattgctggtgctggtgtgctttctggctatgaccagctccagatcctctttttcggaaagaagtacggcttcggcggtgcttaaatggagaaatatgatgacgaacaagagcagtgtgtgttcccggtccttttcaatcaagatctggtgaagtttttgcctttcatatcg

SEQ ID NO: 10163 - DNA, 377 bp, Zea mays
  Clone ID: LIB3156-012-Q1-K1-C10
ctttgggaagctattctttgcattttgggtgattgtccatctttatccctttctcaaaggtttggttggaaggcaaaacaggacaccaacgattgtcatcgtctggtccattctgctggcttcaatcttctcgctcctttgggttcggattgatcctttccttgcgaaggatgatggtccgcttcttgaggagtgtggtttggattgcaactaggatgtcagtgcatcagctcccccaatctgcatatgcttgaagtatattttctggtgtttgtccccatattcagtgtctgtagataagagacatgaaatgtcccaagtttcttttgatccatggtgaacctacttaatatctgagagatatactgggggaaaat

SEQ ID NO: 10164 - DNA, 432 bp, Zea mays
  Clone ID: LIB3156-012-Q1-K1-C11
ctgaagaagcactacaaggatttaatggatcactcattggaaagcaggcagttcgcctggcatgggtccgcagcccatcgcataagcagtctaggggtgactccgtcaacaggaggaacaacatgtactatggcacaccattctacggcggatatggctatgcctccccggtgccacacccaaacatgtacgctgcagcgtatggcacgtacccgctatatggcaaccagcagctagtgagctagagagctcccctccgacgtgtcccctctgacgggaaacaaaggttttggtccggtgagcatagtagcgtcaggtgagaaggtgcctttataaggctgtcctaagaagtgggcgagatatgttgctgcatcgttatcgttatggtgcctgtaactgttgtgtgtgccgtgtgcgttccgaagaaatgga

SEQ ID NO: 10165 - DNA, 410 bp, Zea mays
  unsure (1)..(410): unsure at all n locations; Clone ID: LIB3156-012-Q1-K1-C12
cgagaaagatcttgagcacgttttccgcgacgccgtcacctacaccgagcacgcgcgccgcaagaccgtgaccgccatggacgtcgtctacgcgctcaagcgccagggccgcaccctctacggcttcggaggctaggctaggcgcctcttcgtagtcggggactggttaggggacatgtctctgtgtgatgctttctgaggtagtattgctgcaatagctgtgtaatccatcgcttctgcaatgaagcgctttgaagcatgctacgtatgttgtgtctgtgggtgattgtatttctggtagtaacagtgattcttcctgaanaaaaaaaaaaaaannnnnnnnnaaaatattaaaaataaaataaaaaaaaaaataaaatatttattaaatttatttatatataatatat

SEQ ID NO: 10166 - DNA, 415 bp, Zea mays
  Clone ID: LIB3156-012-Q1-K1-C3
gaagaggtgttcgggaagtgctgtgacactgctgaccaggaccttatctgagccagacgcggaggcgtcttgtcagctgcgaaaactttagggttctctgaattgtacagcagtagttggctattttgatttaatgcctcacttgttcttacaggaatctcatctctgtccttggaacatcatctgcttgtgatttcgtcacatgattaatgtaaatccgtagatatcatctgtcgatctgttgatagcctgtggcatgtatgtatcatctttgttgtgacggtgtctcttgacctgagcgttttttctatgtgctagcgagggtcatgtaataaaagctgttgttgttccttgaccctgtctgcaaataaatgtaacctgccagtcaatgtattccgaaaggtcatttttatct

SEQ ID NO: 10167 - DNA, 381 bp, Zea mays
  Clone ID: LIB3156-012-Q1-K1-C4
gcaacctccttttgacaagaaatcatttgtgtcttacatcaaaaaatacatcaagaatctcactgctgtgttggagccagagaaagcggatgagttcaaaaagggtgtcgagggtgcaaccaagtttctccttagcaagctgaaggacctccaattttttgttggtgagtccatgaaggatgatgcgtctgtggtattcgcctattacaaggatggtgccactaatccgacattcctctatttctctcatggtcttaaggagatcaagtgctaggcgtgcggcgaaattagttacccatgttgggtactatctatgtactattattatatccaaaactatagttgtcctggctgaattgaactcaaaaaggtttgtttgag

SEQ ID NO: 10168 - DNA, 172 bp, Zea mays
  Clone ID: LIB3156-012-Q1-K1-C5
gatttggtactttcgacttgagtggttattaacaaaaggggagcctggtatttgggtggcaggatggcttttttggggttattaatgaaccaaaacgggggccccctgcttccaaacccaaggttccagaccccggggacttaagggaaggaaaaaggcaaaaaacctggtc

SEQ ID NO: 10169 - DNA, 390 bp, Zea mays
  Clone ID: LIB3156-012-Q1-K1-C7
tgcttatatttcatacactcctgaaattgttgtcagctttggtgcagggttgattggatcattggtgtatctccgcatgcttggaaccagtatagattccctagcaggtggaactggagaaactgtcaagagtgctgctgcacaaccaaggttgcttattccagtggtacttgtgatgatgtataacagatggaatcagatattagttccggattatggtttcatgcagcttgagttaataccaatgcttgttgggttttttacctataagattgctacattcgctcaagcaatccaggattctatacctccagtcggaaatcgtgaaggttgaaaagtgtcatgttgtatataaacgaaggtggtagccatggtccctggtcagtggtc

SEQ ID NO: 10170 - DNA, 393 bp, Zea mays
  Clone ID: LIB3156-012-Q1-K1-C8
cggacgcgtgggtgaaggtagcgggcgcggaggaagatggggctcgcgttcgggaagctcttcagccggctcttcgccaagaaggagatgcggattcttatggtcggtctcgacgccgccggtaaaaccaccatcctctacaagctcaagctcggcgagatcgtcacaaccatccccaccatcggtttcaatgttgaaactgttgagtacaagaacattagcttcacggtctgggatgtcgggggtcaggacaagatcagacctctctggaggcattacttccagaacacacagggtcttatctttgttgtggatagcaatgaccgtgaccgtgttgttgaagccagagatgagctgcacaggatgctgaacgaggatgagctacgtgatgct

SEQ ID NO: 10171 - DNA, 403 bp, Zea mays
  unsure (1)..(403): unsure at all n locations; Clone ID: LIB3156-012-Q1-K1-C9
ttaattcnnngtgttgatggcgtctaggagatatcactatcatgggagcgagccttaacataaactagccctctcgaacccaaatggttgttttgcgaccctctaaagcgtggtaattaactaactttggaagaaggaaatagtacctagactcttgatggcaaanatgtggccctgatgccttctgatacctgatgncttcctcccactataannggttccgttctcaagaacctgtctacatntgagaanaactgattttcgcctaaaggactcaaaagactactatgggctagcccctggtaaatctgtcatgctaaggtatgcgttccccataaaatgcacagatgttatctctggtgatagtcctgatgatattgttgaaattcgagctgaatatgat

SEQ ID NO: 10172 - DNA, 454 bp, Zea mays
  unsure (1)..(454): unsure at all n locations; Clone ID: LIB3156-012-Q1-K1-D10
ccgggctcggacccacgcccgtccgcgcccttctcgtcgaacctgagggactttctcgagtaggccnnngagacctacctctcgatgtctcgcgcatggcgagactcgactatctaacgcgctcgctcgcctcgcctccagctcggctgaggggatctctccnnngtggtcggnttccgtcctctctcaaatcctccctgcaaggcccaactaagcgcctttcgagatctaagaaagtggaaccgctctgtcgcgccttctggnngcatgggatnnatcgtcgtcgacaacctgcgcctatctgccgcnnaaccacatcanntggatctatgcanntcgagtgcnncaggcgannaccaagctttagcgcgacnncagcgaggnnagtgcactgnntcgcttggggtgggtctgggtaatcatgnccttttcacttttccactnnngcatcagc

SEQ ID NO: 10173 - DNA, 345 bp, Zea mays
  Clone ID: LIB3156-012-Q1-K1-D11
ggttagacagtttcacccagtgtctcacacccttattccatcagggcatgtgttcgaaccccacctttaaaaaaaaaaaaaaaaaaaaaaaaaaaaaaaaaaaaaaaaaaaaaaaaaaaaaaaaaaaaaaaaaaaaaaaaaagggcggggggttcatagaatacaagctaacgtacgctgccctgcgacgcgataacttatatatagtgtaacgaaagttaaattcaatggacgggcatttaaaatacatggatagaaaaaacaaaaccgtgacctaactaaattgacttgaaggacataacattttcgttaggtggggtaatataaaagaggaaaggcccgatc

SEQ ID NO: 10174 - DNA, 233 bp, Zea mays
  Clone ID: LIB3156-012-Q1-K1-D2
gggccatcccgttcaagagcaggtcttaagctgccgcgggtgtgctgagacatgcatgccagttcggaaggacgagcgtcttcctgtggggagtgtcttgtctgcccacgcctagtttctctgctgaatctccatctctcttcccttcaagactgctcactgctgcactgctctgttatctgaacccagaactttgtgtactcctgtaccgagctgtgtgtatgttttttttt

SEQ ID NO: 10175 - DNA, 403 bp, Zea mays
  unsure (1)..(403): unsure at all n locations; Clone ID: LIB3156-012-Q1-K1-D3
gctctccgtggctccgtgtgcaaatctctttcacggtcgtgttttaacgcctgattggatggttgcccgctggcgcgcccggccagcctcgtacggccacttcggacgcatctgcatcttcggaggtacccgcagatgtagatgaatggccgtaaaatggtttggtctgcgtctctttacatataggcaaccaaatgaaactcagataaagttaactcatgtggagatggtgcgggtaaccaatcgaacggttaacaaattcaggtcgtatgtatatcctggtttacagttagtgtttcctaagtgcatttgtagattatagagctgtcaagattgaacgatacatctgtaaggtgttacaaatgctaaatgctaatcatgattttgtggcttgnnaaaaaaa

SEQ ID NO: 10176 - DNA, 331 bp, Zea mays
  unsure (1)..(331): unsure at all n locations; Clone ID: LIB3156-012-Q1-K1-D4
gccagtctggcacgcgcaccacgcctgcttctgagaaatcaagaggtgcgagcatcgtgagccgcataaactccagagttgagcggatcgaagcgtggagatgagaccgaaagccatttccatcgctgttgtgtactagatgatgactgacccagcgtttcctgaaaatagcaccccccgaactgcttgcttgcacattttacatttttctctctctctctatgcgcttatcatttcttgctgtatcatggccatggtattttgagattcgatcttcctgtctttactaacttctgtatctttcttatggttaattctgtgagtcantgna

SEQ ID NO: 10177 - DNA, 249 bp, Zea mays
  Clone ID: LIB3156-012-Q1-K1-D5
cggacgcgtgggtgacattatttatttctcgcttggctgttataggaaggatttgaagaagccacttatgatataccgatgtggttgtactcgtggttgcttccattctttgaagcaaccacctcttgctgttgacgtagctattgctattgctgggagctattgcactcttgcattggatccgttggaaaaactctcccctccctacagtgtgtaatgaatgaaatccatgtcgttgggtttgcatgg

SEQ ID NO: 10178 - DNA, 453 bp, Zea mays
  Clone ID: LIB3156-012-Q1-K1-D6
aaataaaaaaaaaaatttataaaaaggctgataatttttttgaaaaaaaaaaaaaaaaacacgggcatgggatagaaattaaaaaattctttagggtcccctaaatgggaggccccttgtctgcttccccctacatccaacctgttaaactctctttttgggcccccttaattcaacttactgcccattcttttacacgccagttgacgtaaaaacccctgggaaacccccgtttatccctcctaaaattaattccctttaaatcggctctcggaattcccctgtggcccccccattaccccctcctatacatttgtccacctttattggttctttggtcgcgccttgtacccccccattaatcccccataaatcgtgtgtttccttttagttaccccttttccttcccttccttttactctcctttttattcttttttttttttctttttcc

SEQ ID NO: 10179 - DNA, 364 bp, Zea mays
  unsure (1)..(364): unsure at all n locations; Clone ID: LIB3156-012-Q1-K1-D7
cgatacattgcatatctcctgtgttttttttggcgatgtaaagttaattgactctgctggtctttggcagctatttcttttgagagccgctggatttttgctgccatgctatattatggcttgggctattagtatcatgcagcgtcaaagacaaagacaggttggtggctcggtgccaatggaaatgtttctctttcatgtgtatactgtattgacttttgacggaaaagaattccacgaaactatttatacctagcatggattgaatatatatatcaacggagttaagcaaaaaaaaaaaaaacanaanaaaaaaaaaaaaaaaaaaaaaaaaaaaaaaaaaaaaaaaaaaaaaaggggcggc

SEQ ID NO: 10180 - DNA, 435 bp, Zea mays
  Clone ID: LIB3156-012-Q1-K1-D8
cttgccaacaattactggtctttagatatttcgccagctttgatctggattaaagcacatgcacagttttgatccaccatatgcgcacaatggggttaaaccagataatgtcctcataacacagaggaagcagtctcatctagcaattttgatggattttgagagtgctggtccagcaagaaagactattagatcacaagctgaagctttgcagttacaggaatgggcttcagagcactgatcttctgattaccgagcccccgaactatgggagtgtccaagtcatgctgacattgatgagaggacagatatatggtctttgggatgcactttgtatgctatgatgtatggaaagtcttcatttgattattagcttgatgaatctcctggtgaaagcttgcacagtgttatttaaaatgtacagattaaatgggc

SEQ ID NO: 10181 - DNA, 409 bp, Zea mays
  Clone ID: LIB3156-012-Q1-K1-D9
gtcaaagtgcaaggagatgccacagtggttgctgtctttgctaagatcgacgagctgctgggttctatcctggagaagaaaaatgaaatggtttccagcacatgagcaaggtaaaaatgattgggtgcagtgcagatccgacaagttcatgtaatgcaagtcacctctcatgataggaacttctccaggggaatatatctgaagcacaggacgacacgtacaagtaatgtaagccagtctcacgtaatggaaatttctccatgtggatgtggtcaaagcataggaatttttttcctccaattattaactgtacgcgaatggaagcgacagatcattcgtaggttgtgagggcttcagagatcatctgctgctgtacatgttttgttgcttgcttgtgaacatacatgtc

SEQ ID NO: 10182 - DNA, 292 bp, Zea mays
  Clone ID: LIB3156-012-Q1-K1-E1
gaagaagtgtcgaaacctcaagctgccggacatgctgctgaggccgagaagactgagtcggcggaagccaagactgagtcggctcagagcagctgaagatgcttccgacatgatctaaactagttgtatcgtcaagttaattctgctgaatcggtggacaaacttctacgttgtggcactggccgatcccagtgacttgccctaaaatttacgttctgtctttacatgggcatcctagtgttatgctcatcacattattgatattgtttctgtgatgcttcctttggtcgac

SEQ ID NO: 10183 - DNA, 431 bp, Zea mays
  unsure (1)..(431): unsure at all n locations; Clone ID: LIB3156-012-Q1-K1-E10
ccccggcggtgacctggccaaggtgcagcgtgccgtgtgcatgatctccaactccaccagtgttgtggaggtcttctcccgcattgaccacaagttcgacctcatgtacgccaagcgcgccttcgtgcactggtacgtcggtgagggtatggaggagggcgagttctccgaggctcgtgaggatctggctgcgctcgagaaggactacgaggaggtcggtgctgagtttgacgagggtgaggacggcgacgagggtgacgagtactagacgctctactggcgcggcgtcgtcgggcttgtgtgccactgctatcctgtgatctgccctgagtggctcctatcgtgttatgtttctgtcggttcttatctatctgtcgntgtgtggtttacaacttacgttgtaagactttattcccccgctttgctactgg

SEQ ID NO: 10184 - DNA, 218 bp, Zea mays
  Clone ID: LIB3156-012-Q1-K1-E11
cttcgccactgtagcagtccagggaatggccattttactcgtcataccctgattaccaagggaaatacgcaaacaatgtagaccagcccataggccactgggagtgcgagaatgttcaccaacatcatgcgagctcagaatttgcaatacatatgtacccattgtaaaatgcatttagcacgagcaaattaccagctacactgattcttaagatccct

SEQ ID NO: 10185 - DNA, 421 bp, Zea mays
  Clone ID: LIB3156-012-Q1-K1-E12
ctgctcccaagatatacaaagagcacaggtcaatcacgacaaaggatttccttagtgctgttcgacaccacctccaggagcagcgtgaggcctcaccgttgctgcatgatgtcatcacttgcaaaaaggatgatacaatcaaggacatcatactgaagctggactctgagaagatccacaggatctacgttgtggatgacaaagggaacaccgagggagtcatcaccttgagggacataatctccaagctggtgcatgagccacgccattactttggggatttctttgatggtgttgttcccctgcctgcaaacagcaccgtatgacacatcttcgcggtccaatcacactgatgtatctgtgcaaatgtacattttgagctattctcttctgaagttgcttctagtgtattccttttctc

SEQ ID NO: 10186 - DNA, 415 bp, Zea mays
  Clone ID: LIB3156-012-Q1-K1-E2
cgctgggcgccggcaagcgcgggcagtggacgtggaaggacccgcgccgcgccgcctgcctgcccaggcttggcccgctcttcgaggacctgcgcggcccgcccaagtacacgcgtggcggtggaggcggcaagcgccgcgccgaaggcggcggaccagagcggcgggtcatcgcgtcggaggacgagaacgaggggtcgagggcgcccttggtgcagcagctcctcggcgtgctccgcatctacttgacgctgctggagtcggtgaagcgcgtggcggtgggcatcgtggccggcgcgcacgcgtcgtcggggcggtcgtcccgcgcgcacgccgtggcggtgctgtccgtcgcctcgttccagctcctgttcatgctgctcgggaagcccttcgtcaagaagcgggtgcagct

SEQ ID NO: 10187 - DNA, 390 bp, Zea mays
  Clone ID: LIB3156-012-Q1-K1-E3
aaagcatatagtttcaaatgcttctgttccatcatctcctgtcagcaagagtcaaaatggtaccatagaagtgcaccattatcaagaagcattgaactggttcaaccagggggagctttttgttaaaggatcaagtagatcagaccttaagaatctttggtctgattgttttgatcaatcttcagagtaccatccaacattaagttggggctcttttgcaacgtgtggtcgaagggaaaccatggaagacacccattttgtacttccccatgtgagcgaagaaaatgatgtttttgcctttggcatttttgatggccatagaggttcagcagccgctgaattttctgtccgagcagttcctggatttctcaagcaatttggtcagggtgc

SEQ ID NO: 10188 - DNA, 404 bp, Zea mays
  Clone ID: LIB3156-012-Q1-K1-E4
cacaggcctctcgccctccgcgcggctccacaggagagcaaaaatggcgaccctctccatggtctgcgtccccatcgcaccctcctccttgtccctttccacccggggccgcagctcctccgcatccttccccgctaagaagggaggaatcggtcacggtggcttgcggatcgagtgcatccgtattggtggtgttgagattccaaaccacaagagggtggagtactcgctgcagtacatacatggcattggacgctcacgctcacgccagatcctcctggacctcaatttcgataacaagatcaccaaggacctctccgaggaggaggtcatcaccctccgtaaggaggttggcaagtacatgattgaaggagaccttaaacgtttcaaccgtgtggcgattg

SEQ ID NO: 10189 - DNA, 387 bp, Zea mays
  Clone ID: LIB3156-012-Q1-K1-E5
gggcgacccacgccttcggtccatgacctcgcattggtatagttgcaaggttatgtatgcatgcttacggatgttttcatggcttaatggcgccgctaggaaatgacatagatatgcctgtttatctcctatcatccctggtttgatgacaaggggataggagaggagaggaaatcccttgctattcaaaaaattttcttcaccatggatcccctctaattctcttgtcgccaaactagctctcggttatcaggttgccacttgtgcataatgttgttcagttgtattgtgctggaaatcgcaagtaaactgctcatccagttctatgaagaaaaaaaaaaaaaaaaaaaacaaaaaaaaaaataaacaaaaaaaaaaccccccccc

SEQ ID NO: 10190 - DNA, 286 bp, Zea mays
  Clone ID: LIB3156-012-Q1-K1-E6
cccgctcgtcggcggcggcctcgctggcctcgtctacggcgacgtcttcattggcggctcctaccagcaggtcgcggaccaagactacgcctaatttattcaccactccatctccgctctggatgaatggattcaaaaccgtcgtcgtttgcttttgctcctcgccacgttcaattaatggttgtgtatgcatgtatgtgccaatatgatgtgcctttgccctggtccattcatttccctttcttttttcggggtgaaatagatgtaaagatctcgtcttgcccca

SEQ ID NO: 10191 - DNA, 259 bp, Zea mays
  unsure (1)..(259): unsure at all n locations; Clone ID: LIB3156-012-Q1-K1-E8
gttggacttttctgatgtgtgtgtactatgtccagagtgtattgaataaactttggtgaagagtggttaaaggactattgatcggtgctaaggatgagaagacaacaatgttctgntgtatcttgtgcattaaccgtatatgtggcgtgaagatgtaatacgttctatatcttnagtgtttatatttcatacaaaaaatgtgcattgggattatttgagctgaatatggacccatttaaactcagattcctactcttgc

SEQ ID NO: 10192 - DNA, 323 bp, Zea mays
  unsure (1)..(323): unsure at all n locations; Clone ID: LIB3156-012-Q1-K1-E9
gtttggcgttccggcacatgccaccaaatgtgtgcacataccataccgtggattcctggagtcatctgctgatcctacaccgtgaggtcaattatgtaagtgtgacttagaaaaaaaatgtagatagatcctcattctggaaaaagccgggtatttgattgtaattcaatactgtgcttgatatatcacaatcagctcgcattttgtaattcaatactggacgaatataaattcaatcctttgttttactgctcccnttgaaatatgataaaaaaaaaaaatattaaaatgtaataatggtaatttgatttaaggggggggtt

SEQ ID NO: 10193 - DNA, 434 bp, Zea mays
  unsure (1)..(434): unsure at all n locations; Clone ID: LIB3156-012-Q1-K1-F1
cgccaaggtcatgcgccgcgtcgcctacaagacgggcaagcgggtggagccctggccctacgtgccctacgagatggtgcagcacccctacgcgccgggcgcctacgacaagaaggcccccgccggctacgtccgcaacgtcgtcgccgaccccaccgccgcgccgctcgccagggcctcctccaccgaggtccgctacaccgccgccttcagcgacgagaaccccaacgcctgctccgtcatgtagacccacccaccgaccccttgttttctttctggacttctggatctcgacctcaagaggtggcagctccatcgntcttcttgtctctagctattagttagtactagtatagtaggtgcttgcttgggagagttgctcttggagggaggttttgctcttcctggtttttttttcttttttttttcggttt

SEQ ID NO: 10194 - DNA, 437 bp, Zea mays
  Clone ID: LIB3156-012-Q1-K1-F10
gctcgacccagatcgagggctcgatccgtcggccatggcgctggagtgggtggtgctgggctacgcggcgggcgcggaggcgatcatgctgctgctgctgacgctgccggggctcgacggcctgcgccggggcatgatctccgtggtgcggagcgcgctgaagcccatgatgtcggtggtgcccttctgcctcttcctgctcatggacatctactggaagtacgagacgcgccccacctgcgacgacgagcacgcctgcaccccctccgagcacctccgccaccagaagtccatcatgaagtcgcagcggaacgcgctcctcatcgccgccgcgctgctcctctactggatcctcttctccgtcacccagctcgtcgtcaggctcgagcagatgcagcagcgcgtcgacaagctcaggaagcgcgacgactgatgga

SEQ ID NO: 10195 - DNA, 379 bp, Zea mays
  Clone ID: LIB3156-012-Q1-K1-F11
ccagattaggatttgtagtctgctgcatctccatgaattgttcaaagcggccggctggataatgttgtagctggtccaggaatgcagctgtagagagagagagaggagtggaggcagaagagtgactgattatgcattcttttgctgtggtgttagtagctgtgtacccgtgacacatgtcgtctttcttggaacggagaaagatgcaggtgaagtgtgcattgtgcccttttgttctactgctagtggtaaggcaggagccttgcagttgtcggggggagaattgtctgtaagattgtaactgatgagaacagtgccttcttttctgaaggaaaatcccgtgtggaatcgcttggaattagtcttggctcgtgataac

SEQ ID NO: 10196 - DNA, 238 bp, Zea mays
  Clone ID: LIB3156-012-Q1-K1-F2
gctaggcttacaggagtacagggcgactagcatgggagtagtgcaatacttttgggagcaatagataacgaggatcctggtctttcgaatagtattgttaatgaaatttttcgttcggttgtgtttctgatgtaatcgttgtactgagtagaccttctggataccggattctgagtagacctttgaatccttgatggatcagccaatctcggaaaggaagtttcgtattttgttgttc

SEQ ID NO: 10197 - DNA, 331 bp, Zea mays
  Clone ID: LIB3156-012-Q1-K1-F3
cgccgcccaccgcggcgtgctgcagcaggctcagggagcagcagccgtgcctgtgcacgtacgcgcgcgaccccaagctgcagcgctacgtcagctcgcccaacggcaagaacgccatggccgcgtgcaaggtgcccgtgccgtcgtgctaatttaaacttctgttagcgccgccgccgccgcgcgcgtacgtacgtgtcgtgactcgtgaggcgtacctgtgtcggtagcagcatggcccactggacagggacagagtgtggcgtcgctttttttctgtttcagtacgtacgtacttggatcgcggaagcccgtgtatgcgtgttccgtt

SEQ ID NO: 10198 - DNA, 354 bp, Zea mays
  unsure (1)..(354): unsure at all n locations; Clone ID: LIB3156-012-Q1-K1-F4
tgggcatctgctgagtctcagctataaatggactgacttcttaccaagttgtgtgcgtgtgaatttgtggcaacggagttgccaacggtgcgtggtgcagagttgggagaggtaggagtagctgtaacaggtttagcatggtttgataggattaaactagcgtggtagcaaaagtagcataaataggaaacagaattgaggtgtggggtagtactgcaaggaaaggttttgtacatcattggttcgaggtatacttgtacagccaatcaatccagtttttacctagcaaaaaaaaaaaaaaaacananaaaaaaaaaaaaaaataaaaaaaaaaatattattttaaaaattatt

SEQ ID NO: 10199 - DNA, 396 bp, Zea mays
  Clone ID: LIB3156-012-Q1-K1-F7
cggacgcgtgggttgagcccgagcaagtggaaggaagagcactttgttctagcaagcctctcaatgtggggggttattttttatggtggttacaagctttttagtggaaagaaggaagccaagactgaggcggcatcaccacaggcataggtggcggagatggagttctacccatatctgtggcctggcaacaatgttaaataaaaggaatgctttatgttgtgctttcaagttgataaattgtggcaacaggagattttgctttacctaggcaatatattgagaagctactcttactcatccaccatgaataatctttgctgcagtggagcttcatgtcggcgaacaatgcaaacgttgtacttcttttatgcgattgagtaagtgatgttttac

SEQ ID NO: 10200 - DNA, 438 bp, Zea mays
  Clone ID: LIB3156-012-Q1-K1-F9
ggcctacaaggctgctcaggacattgcgctggctgagctggcacctacccatccgataaggcttgggcttgctcttaacttctcagtgttctattatgagattctgaactccccagacaaagcttgcaaccttgcaaagcaggcgtttgatgaagctatctcccagttagacacccttggggaggagtcatacaaagatagcactctgatcatgcagctccttagggacaacttgaccctttggacctctgacctcacggaggatggtgctgatgagggcaaagaagccccgaaaggtgaggctggtgacggacagtaatcttgggagagcgcatattgttcgagcccattggtttagatgctctatgctgtccaagcttaaactgtgccgtgctattaattgaactgatttcctggtcccttacttcttttttatat

SEQ ID NO: 10201 - DNA, 318 bp, Zea mays
  Clone ID: LIB3156-012-Q1-K1-G1
gtttggcgttccggcacatgccaccaaatgtgtgcacataccataccgtggattcctggagtcatctgctgatcctacaccgtgaggtcaattatgtaagtgtgacttagaaaaaaaatgtagatagatcctcattctggaaaaagccgggtatttgattgtaattcaatactgtgcttgatatatcacaatcagctcgcattttgtaattcaatactggacgaatataaattcaatcctttgttttacaaaaaaaaaaaaaaaaaaaaaaaaaaaaaaaataaaaaataaaaaaaaaaaataatattttaaaggggg

SEQ ID NO: 10202 - DNA, 435 bp, Zea mays
  Clone ID: LIB3156-012-Q1-K1-G10
gacgcgggcgctcggacttgagaaactattcttgcttacttcaaggtcagcggattggtttgttcgtcggggctgtgaggagtgctctttcgattccctgcctttggtgaggagaaaacgtatcgacctctcgcgcgggtcaaaatattacatgaagtggctccaggcagcagaggttgggcatatggctgccgacggttttgccatgagatgatgagtgctgcaaacaagcatctctactaatctagtcgatggacgtgaggtttctttatgagctgtgcaatcgcttatacatcgtataaatgtatatttattgtgcaagaaaataatcagtcaataatcgaacatgtggttgtgtttcttgagttgatttcttcttgagcatagcaatgctcaaaagagttgttgatctgcacactgcttacaaaaccttca

SEQ ID NO: 10203 - DNA, 409 bp, Zea mays
  Clone ID: LIB3156-012-Q1-K1-G11
ccatcatcggcggcggcgactctgtcgctgctgtcgagaaggctgggctggcggacaagatgagccacatttcgaccggcggcggtgcgagcttggaactcttggaaggcaagactctacctggtgtccttgccctcgatgacgcctagatccgctgctgctgctgctgctgctactcaggttctgccagctttgcgtgtcatcttgtttcggaccttggtgtaacgctgcaaggttaaggtttactcctccacacatggacttttggggataggcttgccatcgtgttttgctagatgagtcgtgaaataagcttttacttcctcgctgctgtgggtgaagtaactggaattcggaaatttggaactaacaaaaccccccgtggatttgtatgatatgttttgttcga

SEQ ID NO: 10204 - DNA, 416 bp, Zea mays
  Clone ID: LIB3156-012-Q1-K1-G12
cgtagatggcggcttcggaggctgcagctgtggcggcaacaccggtgacgccgacagaggggacggtgatcgcgatccacagcctggaggagtggagcatccagatcgaggaggccaacagcgccaagaagctggtggtgattgacttcactgcaacatggtgtcctccgtgccgcgccatggctccaatttttgctgatatggccaagaagtccccaaatgttgttttcctgaaagttgatgtcgatgaaatgaagaccattgctgagcaattcagcgtagaggccatgccaacattcctgttcatgagggagggcgacgtcaaggacagggtcgttggcgcagcaaaggaagagctagcaaggaagcttgaactacacatggcctcgtagatcagtgatgccgtaatgtaatat

SEQ ID NO: 10205 - DNA, 372 bp, Zea mays
  unsure (1)..(372): unsure at all n locations; Clone ID: LIB3156-012-Q1-K1-G2
ccgcccgaancccggtcgccacgcgtcggccggcacgcaccacaaataaacggagcccggctggcatccattattcgtgcagtagtcgcagctgcggacgactgaaccaccgacagacaacatggccgcctccgctcaccgtctccggcctcgccggcgcctccctggccagccgcccggcgttcttaccagcttacgcgggcagccgggtgtcggcgaggaaccccctgatgagcaggaacctggagaggaatggcaggatcacctgcatgacgtttccccgggactggctgcggagggacctgagcgtcatcggcttcgggctcatcggctggatggggccgtccagcgtcccggccatcaacggcaaca

SEQ ID NO: 10206 - DNA, 370 bp, Zea mays
  Clone ID: LIB3156-012-Q1-K1-G3
cggacccgtgggcggaaatgagacccagatctgcacctccaagccaatcaacccaagcggacaattcaggttggtctgtggaaactctgatggaactcttagatttcactccacaggaaataaccaaggccatttcggcgaccgagagtaaccgtttcgtagcatctgtcgtcattgctttcctggtggttctgtcaaactggggccttgacattggtggtgccatcaccagagtattagttggtacaaggcctcttctatttctcattgtaaccaacatcaccattgtcttcacattgttgatggagaacaaagaccccaatgtgagaagcagacccgttggcgtcaatctgggatctgctgatagctt

SEQ ID NO: 10207 - DNA, 409 bp, Zea mays
  Clone ID: LIB3156-012-Q1-K1-G4
cttggacttgagaaactattcttgcttaccacaaggacagcggattggtttgttcgtcgcggctttaaggagtgctcgttcgattccctgcctttggtgaggagaaaacgtatcgacctctcgcgcgggtcaaaatattacatgaagtggctccaggcagcagaggttgggcatatggctgccgacggttttgccatgagatgatgagtgctgcaaacaagcatctctacgaatctagtcgatggacgtgaggtttctttatgagctgtgcagtcgcttatacatcgtagaaatgtatatttattgtgcaagaaaataatcagtcaataatcgaagatgtggttgtgtttcttgagttgatttcttcttgagcatagcaatgctcaaaagagttgttgatctgcacact

SEQ ID NO: 10208 - DNA, 371 bp, Zea mays
  Clone ID: LIB3156-012-Q1-K1-G5
gtgacaggccaagattcggaggaagggcctctatcagcagagggaagagccttctgcctctgttcgatgcagtcggcgacgaggcctgtgaccgaatgccgccatctgcaggagcaggagaggcagaccaggccgacgatgcagcaacgaagccggcatccgtgcttgtcaaagagcaggagaggctggcgatcatagaggaggtcgaccatgtctacgaaaggttgcaggcgctggaggcggacaaggaattcctgaggcactgcatcaagtccctgaagaaaggagacaagggcatggaccttctccaggagatcttgcagcaccttcgcgatctccgcagtgtggagcttcacgtcaagaatgccggt

SEQ ID NO: 10209 - DNA, 303 bp, Zea mays
  Clone ID: LIB3156-012-Q1-K1-G6
ccgacatcttggaaaacgctgagagcagtggcattatctcagccttgcagaagaggactttgctccaggagatagcgtctaggcttttgtaggacacagttctaacgccagtagttgtgtgtagctcaccctatagctctctcacgtcttcagcagccagaggcttgcttctgggctactagagaattgcgcctggtcgttgtacatacaccatcatgggattttaccctgattcggattgtgtgttgtgtatgattctgtaaaattttgtacaccctattgggtgagcatacactgacactg

SEQ ID NO: 10210 - DNA, 355 bp, Zea mays
  Clone ID: LIB3156-012-Q1-K1-G9
tggtcgaactcaacgggaggctgaacaagtgcggcgtcatcagccctcgctttgatatcggcgtgaaagacattgagggatggactgcaaggctgctcccgtccaggcagttcggatacatcgtcctcacaacttcggcaggcatcatggaccacgaggaggcccgccggaagagcgtaggaggcaaggttctaggtttcttctattgaagaagctgagaatctttgttatggcctgcctgcctgtcttactctctcagactagagtacctgttattttactttaatatgtctctctcagactagagcgccttcttttacttgaatattggtgactgcattggtctttcactttt

SEQ ID NO: 10211 - DNA, 361 bp, Zea mays
  Clone ID: LIB3156-012-Q1-K1-H1
cggacgcgtgggttttttttttttttttaaccaaacaactgagcacattttcatatatccaatcgtgaaagggtgaacattattctgatgccttttattcgtgcataacgacgatgccattatttttactagcaatttataggaacgatcgaagcacacacacatgacacatccattattcggcgacggacaggaacgcatggcatgtccgagttattcattttgtagatttaaacctcagccgatgtggggtgcctccgcgacggtgtcgacgaagatgcggacgcggttggggcggaaatccatggtcaccggcgtgccgacgggcagcacgacgatgtcggcgtcgggcttgtcgcac

SEQ ID NO: 10212 - DNA, 383 bp, Zea mays
  Clone ID: LIB3156-012-Q1-K1-H10
caactactacctggtgccctactcggcgcggtcgcgggagttctcgctgccggactacgtctcctacctgctgtcggagtacgcgcaggtgctggaccgcctctacgacctcggcgcgcggcgggtgctggtgcagggggtgggacccatcggctgcgtccccgcggagctggcgctgcacagcctcgacggcacctgcgacgccgagctgcagcgcgccgccgagatgtacaacccgcggctcatggcgctgctggaggagctcaacgcgcgccacggcggcggcgaccccgtgttcgtcggcgtcaacatgcagcgcatccacaacgacttcatcgacgaccccaaggcgtacggcttccagaccgccacctacgcgtgct

SEQ ID NO: 10213 - DNA, 378 bp, Zea mays
  Clone ID: LIB3156-012-Q1-K1-H11
ctcatccatgcggattcggtgttcgccctgtacaaggacaggtgtgagatggaccgcatgctcctggagatggacaggatcctgaggcccaagggcacggtgatcgtcagggaagacgtggacatgctggtgaaggtcaagagcctggcggacgggatgaggtgggagagccagatcgtcgaccacgaagacggcccgctcgtcaaggagaagatccttctggttgtcaagacgtactggactgcccaggaccaagaccagtagcaggaccggacttgtgaagcgaaattcaacaatgttgataagcatttttcttgctttcaattgcattggatcgccatttctagcttcttgagctagaagaggtctctgtctctt

SEQ ID NO: 10214 - DNA, 416 bp, Zea mays
  Clone ID: LIB3156-012-Q1-K1-H12
caaggagctggagaaggagcccaaatttctcaagaacggtgatgctggtatggtgaagatggttcccactaagcccatggtggtggagaccttttctcagtatcctcctcttggtcgatttgctgtccgtgacatgaggcaaacggtggctgtcggagtcatcaagagtgtggagaagaaggacccaactggagccaaggtgacgaaggctgctgccaagaagaaatgatctatctggctggtgacgaaggctgctgccaagaagaaatgatctatctggctggtgctgtgcttgcttgttggttacctcgtggaagcttaaaatatctcgtcttgttgacatccttgcagttgtcgcgtgaacaagtaatctatgatggcaatgtttgcctggtcatgaagtattattactttcg

SEQ ID NO: 10215 - DNA, 357 bp, Zea mays
  Clone ID: LIB3156-012-Q1-K1-H2
cgaggtacagggagaacgggtgaatgtctgacgttacgtattataaagtgatgtgcaatgatgactacaaactaaaaatatcagtggatgaccatagcaggaagcatcaaaggtgtgacagattgctacccatttgttcccttggttcgtggcacaatgcaaatgcggcatcagtacaacagcgtacgcaatccttcgcacgcgcgcggtgcagcatggttttacgttttacacgctgcctttagtgaaaactgtatggagctgtcagtacttgtacaggtagtgaagaaccaaggcatgaagtcaaaacctgcatgcacagctaccagaaacagaagcttttcggcactttgagca

SEQ ID NO: 10216 - DNA, 344 bp, Zea mays
  unsure (1)..(344): unsure at all n locations; Clone ID: LIB3156-012-Q1-K1-H3
ggctggcttctcctccccctcttaccaagtcctcctcgggttagggttccttagggttttgtggaggggcgatggcggcggctgatgtggagtaccgttgcttcgtcggcgggcttgcctgggccaccagcaacgagtcgctggagaatgccttcgcctcctacggcgagatcctcgactccaaggtcatcaccgaccgggagacggggaggtctcgcggcttcggcttcgttaccttctcctccgagaactccatgctcgacgctatcgagaacatgaacggcaaggagctcgacggccgtaacatcaccgttaaccaggcccantcccgtggcggtggcggt

SEQ ID NO: 10217 - DNA, 384 bp, Zea mays
  Clone ID: LIB3156-012-Q1-K1-H4
ggattcagcagcgatgagagaataaaggtcatagctgcaactaaccgtgctgacatccttgaccctgctctgatgcgatctggacggttggaccgaaagattgagttccctcacccatctgaagaagcaagagctagaatcttgcaaatccattcaagaaaaatgaatgtaaatcccgatgtcaactttgaagaattggctcgctcaactgatgacttcaacggagcacagctaaaggcagtttgtgtagaagctggtatgcttgccctacggcgggatgctacagaggtaactcacgaggatttcaacgaagggatcgtacaggtccaggcgaagaaaaagtcaagcttgaactactatgcttaagctgtttgtcaaaacata

SEQ ID NO: 10218 - DNA, 405 bp, Zea mays
  Clone ID: LIB3156-012-Q1-K1-H5
ctactgacgagctcgccatggcctccctctcctctgccgccgtcaccgccccttccttcgccgcacgagcgccagcccgcgccgtggtcagaaggaggtccttcaccgtgcgcgcctctctccgcaaggccaccggcaccgccgccgtggcaatggctgccagcgccctgcttgccggcggtgccatggcccaagaggtgctgctgggcgcaggcgacggcgggctcgtcttcgagcccagccagttcaccgtcaaggccggcgacaccatcacattcaagaacaacgccggcttcccgcacaacgtcgtcttcgacgaagacgaggtgccgagcggcgtcgacgccaccaagatctcgcaggaggagtaccttaacgcgccaggcgagacctacttcgtcaccc

SEQ ID NO: 10219 - DNA, 381 bp, Zea mays
  Clone ID: LIB3156-012-Q1-K1-H7
ctcagagaacctttgtctacatcaaggatgctatcgaagctgtagtgctgatgattgaaaatcctgctcgagccaatggccacatcttcaatgttgggaatccgaacaatgaagttaccgttagggagttggcccaaatgatgacagaggtctacgcaaatgtctcaggagaggcaccgctggatgagcccatgattgacgtgagctcgagtcagttctacggcgaaggatacgatgatagcgacaagaggatccccgacatgactataatcaacaagcagctaggttggaacccaaagacgcctctcaaggatctgctggagacaacactgacatatcagcacaagacatacaaagaagctgtgaaaaggcaaatgtcgc

SEQ ID NO: 10220 - DNA, 308 bp, Zea mays
  Clone ID: LIB3156-013-Q1-K1-A1
gactttgctgagctatatgtgttcaagtggaccagtttgctcatccctccgaccactggtcttgtcattaacctggtcggaatggtggcaagaatttcgtatgccattaacagcggctaccaatcctggggtccactctttggaaaactggtcttctcgatctgggtgatcctccatctctaccccttcctcaaaggtctcatgggcaagcaaaaccgcacgccaacaatcgtcatcgtttggtccatcctccttgcgtctatcttctccttgcttgggaagaagatcgatcctttcatcttcccgac

SEQ ID NO: 10221 - DNA, 138 bp, Zea mays
  Clone ID: LIB3156-013-Q1-K1-A10
gacctgtcattccaataatttggttctggagcaacctggagctgtatactgatctagcggcttttagtaacaaatgtaagttgctcacattttctttagattgtctatagaactttgaacgaccagctcttcccttct

SEQ ID NO: 10222 - DNA, 425 bp, Zea mays
  Clone ID: LIB3156-013-Q1-K1-A11
gtcctttcggttccacctttccctcccgcgccgccgcagccgcctcgagggccgcggaggccctagccacctcgtcagtgccgcgcgccgggtgtctcgccgccgcccgtcactgccgctgacaccgccggagcgatcggatctcgagaccgtcaggagacacgatggaggattgggattctgaagatttccagcccgttgctcctgttgtgaaagtcgagccacttaaaaatcagtgggctgatgaagatgtcgatgccgacgacgtaaaagattcatgggaggaagaagaggaagaggagaaacctaagccagcggttgtgcaaaagaacgcgacgaaacctagcgctaaggctcctgctaaaaagggaaaacagcaagcatcaacaagtgccgaggaaccagacgagcctttgagtcccact

SEQ ID NO: 10223 - DNA, 418 bp, Zea mays
  Clone ID: LIB3156-013-Q1-K1-A12
ctctccctgtctcccgcacgccgacccgcagccgccgccgttcgccatgggtttcctcgacgcgctctaccgtgtggtgatgcgccgcaacgccgtctacgttaccttcgtcgtcgccggcgctttcgcgggcgagcgggcggtggactacggcgttcacaagatctgggagatgaacaacctcgggaaaaggtacgaagacatatcggttttggggcagaggccagctgaggaatgataaattttggtcaccagtttgcttcggtttgaccgtttcattttggcacagtaataaacgatgtaaacttacgctgctcctgtgacctccttctcattcgtttactctgaaaatgcttttgtggggatttcgtggtgcatgattgaaacctgttatatagaacatgcaaatactgaaata

SEQ ID NO: 10224 - DNA, 397 bp, Zea mays
  Clone ID: LIB3156-013-Q1-K1-A2
cgagatgtggctcggcgacgacagcatcgcctccgccgagctcacgcagaccgccaagagcgagaagcaggggatcaccaggatgcaagtgccctttagcttcaagcccaaagacttcggatccgctgtctgggacatgatcagggggaggggcacgggatacaccatcaagggaaagatcgatgtcgacactcccttcggcaacatgaagctgcccataagcaaagagggtggaaccacccgcctcaagaaggaggacgacgatgatgacgatgatgacaactgaaatgaggactgctggggggcgctgctgttacctttcacgaaacgcagcgaagcagaggatgcggggatcgtcgtcgacctgatacccatacccttagcgctggttaagctc

SEQ ID NO: 10225 - DNA, 421 bp, Zea mays
  Clone ID: LIB3156-013-Q1-K1-A4
ccctcgtcagctgtctcctctcgtggctgagcatccgccggcctggcctgcgcagccgcctcaccccttcttcgtcttcacaaaccatgagatgagtgcatcaggagatctccacaggaggcctgcaggggctgttcccagctgggcatggcaggtggcagcagcagctcctcctcctgccgccctgccgtcgtccgctgcagcatcatcaggattctccaacaccgccacgacagctgccaccaccgccccatcggcctcctccctccggtactgcccgccgccgccgccgccgccgtcgagccatcaccatcgccgctgagagaatcaagaagccgcactgtaaatctgccgggaatgaagctagcattttccccccggccctcccctctccgggcgttgcgaacttttcagttttgcg

SEQ ID NO: 10226 - DNA, 356 bp, Zea mays
  Clone ID: LIB3156-013-Q1-K1-A5
gcctcctcgtctcctcggtctcccctccctgtcttccagagacacagagcaaggggctcttcggtcggaggagaagcgcgaccacgaccatgggctttatctcgttcgtcggccgggttctcttcgcctccctcttcctcctctcggcctaccaagagttcattgaatttggaaatgacggtggacctgcagcgaagaccttgaagccaaagttcaatttgttcgtcaagctagtgtccaagaatactggactggggctgccgcatatggatataaaaactgtcattgcagctaccatgtttcttataggctttggagggcttctagtcatagtcagcagctcattaggagcattc

SEQ ID NO: 10227 - DNA, 423 bp, Zea mays
  Clone ID: LIB3156-013-Q1-K1-A6
cgccgcagcctgaggtaagagtttatggtcaagatatgcccaattgaaatgagacttaagagatgggagcgaaagaagtgtaaaccaaacagtcttcctgtgctgcacaagatgcatgttaggatcggggacacggtacaagttattgcaggccgtgagaaaggaaaggttggagaagtcacacgccttttcaagcacaacagcacggtgatcgtgaaggacctgaacttgaagtcgaagcacaagaaatgcacagacgatgaacccggtgaaatcgtcatgattgaaggccccattcatagctcaaatgtgatgctctactctaaggagaagagtgtggtaagcagggttggccacaaattcctggaggacgggaccaaagtccgatacctggtcaagaccggtgaagtaatcgacagtgtt

SEQ ID NO: 10228 - DNA, 313 bp, Zea mays
  Clone ID: LIB3156-013-Q1-K1-A7
cggacgcgtgggcgactctattggtctcggagaagatggcccgacccatcagaggatggagcacctggtgagcttccgtgcgatgccaaacatactgatgctccgccctgctgatggcaacgagactgccggagcatacaaagtcgcggtcctcaacatagaagaggccgtccatcctcactctctctaggcaaaaactccctcacctgcctggcacctctatcgaaggcgaaaaaaaggacaaatacaccatcttcgacaactcgcccggcaacaagcctgacctcattgtgattggcaccggctccgaact

SEQ ID NO: 10229 - DNA, 389 bp, Zea mays
  Clone ID: LIB3156-013-Q1-K1-A8
ctcggcgcctgcgtggacgttctcgggaacgaggtgcacgtcggcgacgccaacgtgcagtgctgcccgctcgtgaagggcatcgccgggctctccgcggcggcgtgcctttgcaccgccatcaaagccaaggagctcgacatctccgtctacgtgcccatcgcgctcgaggagctcgtcaactgcggctgcaccgtcccgccaggctacaaatgcacttgaacgattccatcccattccatttccatttccacccagcacacgtgcacagcaaaacgtctccttttgccctcccgatgcaaaggtagaaaaggctcgtcgacagatttgggtggtagccgcccgcgcgccgccgggctgttcaacaagtgcattccttcatttggttt

SEQ ID NO: 10230 - DNA, 350 bp, Zea mays
  Clone ID: LIB3156-013-Q1-K1-A9
ctgggacgaccaatggatcttctgggtgggcccactgattggcgccgccatcgccgccgcctaccaccagtacgtgctgagggccagcgccaccaagctcgggtcctaccggagcaacgcctaagttcccgccggccgcccggacgcgccaggatctgggcaccgttccaattctgttcctccacatgacgccctgttctgtttccgtgtggccaggactccgcttgctcgctgctgttttctacttcggaccaaagtgtgatatatctttgctttctggatatgtatgtaggaatgcatcatgtaaggagaaattggaatacaattgcgggagtttttatccgatcacg

SEQ ID NO: 10231 - DNA, 155 bp, Zea mays
  Clone ID: LIB3156-013-Q1-K1-B10
gacgaggaggagaacgcaaccatcccagttctcttggtacggactggggtcaagaacggggtgcaatcggccagggcatccaggaacaacttcatggtggttccaacgggccacccatcgctcaaagagcatgcagaatctctgaaacttgacaa

SEQ ID NO: 10232 - DNA, 289 bp, Zea mays
  unsure (1)..(289): unsure at all n locations; Clone ID: LIB3156-013-Q1-K1-B11
gataagnggtgttattgttgaagctctccgggttggacttgagcctgggattgcatcggagaaaattgccgccctggctcgacaaatagctacggacaaaaataggcagtcaccttttgcatcagctgctcaagaagctgggtaccggtattatggtgggaagcttgatgacataacagtcgtggtctcatatgtgaaaagcgctggagccccatgatctgagcctttcttttatttaatgtaatgcacataaatcatttgcctgaactggcggcgtatgtatgcacca

SEQ ID NO: 10233 - DNA, 369 bp, Zea mays
  Clone ID: LIB3156-013-Q1-K1-B2
aactgcatggtgagcgactacagtgtcgcggtcctggcagcggcgatgcagctcaagcggcgtgtcctctcgctgtctggctgtatgaaggtgacacagaagagcgttcctttcttgggcagcatgtcttcatccttggaggcgctgaatctccagttcaacttcatcggtaaccacaacatcgcttccttggagaagcagctctggcggagcgacatccttgcttagagggaacaagggcgattggttgctggagactctgggtcagcaaccttttttctccagatgcagatacacgaccgtaggggtagcatatacttaagtctaagcctcagtagttgagtctggtttctggctcgagtttgtgtc

SEQ ID NO: 10234 - DNA, 377 bp, Zea mays
  Clone ID: LIB3156-013-Q1-K1-B3
cttttagtcttcgcatcattcccagatatggggcaaatgaagatttcacacatattgacgcctgggccacttactgctgactaggtgcatacatggtgctccacattagctaggtgacctgattgagccaaagacaactttgtgggacttggtttaaccatttagaaccttaaggaagaaagtgaatctgtagtggaacttcaaggaagaattcacccattctttcaacattgttaatgaatgccatttttccgaaagtggtcttgaattatctggaatctccaccagtttcccgctaaattgttaactcttgcagatactcccataaaaaacaggtattgaagtcgtggagaagtcttggattctgcaacgcattc

SEQ ID NO: 10235 - DNA, 388 bp, Zea mays
  Clone ID: LIB3156-013-Q1-K1-B4
cggacgcgtgggtggccgcgctgttcttggcgtaccgccgcgcggagttttcgccgatggacaacacctacgcccaagctttcggggtggatcctgagctggctcttgctgccgagcagaaagccgcggcagagagagctcaacgaggtatcaacaacactcgcatgctcaattctagctgtactgttgttcttgttactgtgtacttgaaattgatgggtaaacaatgttcctactgctttatagatcaagcaacaattattttgatgtgaataacggagtggatctgattcaaataatttctatttcacttctgtctaactgttggttgcattttttttatcaacgaaagtgattattggatttgggatgatattcatgcagaaac

SEQ ID NO: 10236 - DNA, 205 bp, Zea mays
  Clone ID: LIB3156-013-Q1-K1-B5
tctagctgcaatgtcataattatggtcgtgttaagttttgttccacctttggcggtggggtgatttttttgtaattcctcggcactgaagtgaagttttgtcagaatattgcctcgtaacataattgcccggtccctgttctagttgtggcgcagtctggtttgttttgacatttgttttcaaagttcatccttatttgcattgc

SEQ ID NO: 10237 - DNA, 236 bp, Zea mays
  Clone ID: LIB3156-013-Q1-K1-B6
acccacgcgtccggaagaggagaaagaagagagcgacgacgacatgggattctccctgttcgactaagagtgtgtgtgtcatctggatctcagaagtggtggtttggtcctgttgccgtatttaattttgctgtcctgtctgtgaacctgaagaactcttggtaattgttacaagcgacctattccagtttatgtgagaatttgatatgttgtttggaatctaaataatttaatta

SEQ ID NO: 10238 - DNA, 414 bp, Zea mays
  unsure (1)..(414): unsure at all n locations; Clone ID: LIB3156-013-Q1-K1-B7
cagacgcgtgggtttgactgttgctgaacatttccgtgatgctgaaagacaagaggagggtctgtttattgacaacattttccgttttactcaagcaaactctgatgagtctgctcttcttggacgtatcccatctgctgtgggataccagccaacccttgccactgatcttggaggactgcaagagcgtattacgacaacaaagaagggttctattacatctgtgcaggccatctacgtgcctgccgatgacttgacggatcctgctcctgctactacctttgcccatcttgatgctacaactgtgttgtcacgacagatctctgagcttggtatntatcctgctgttgatccactggattccacatcaataatgctttctccccacgttcttggtgaggatcactactacac

SEQ ID NO: 10239 - DNA, 367 bp, Zea mays
  unsure (1)..(367): unsure at all n locations; Clone ID: LIB3156-013-Q1-K1-B8
gcgaaagacggtctcgtgtactctctatagtttaagtgtcaaggaattgaggaacagacgaattttgagctgtataattttgcgagatcagatgagtgttgattgttattgtttcggccaagaaggaaagaaagaagccatgaattttggtcttgggcgaccagcttaatttgcaggagtcctagatgaacaaggctaaatatgttgttactatgtccacctaaaatgttgttagttattttcctgtgactacacatttttgtaacgttgtactatgattttggaatgttttattgggtacaatatattgtgttatttaggagtcaaaantttatatattaanntattattttttataaattatata

SEQ ID NO: 10240 - DNA, 421 bp, Zea mays
  Clone ID: LIB3156-013-Q1-K1-B9
atccatgcggttgagcgatctatagctgggatagagaaaaagcatgcgaaattgaagggtaatgaaaaggctgtcgttgcacggcatgaagtaggtcatgcactcgtgggaactgctgtagcgaaccttcttcctggacagccacgtgttgagaaattgagtatattgccaaggtcaggaggtgcattaggctttacatacacccctcccaccacagaggatagatatttactctttgttgatgaactacgtggccgtttagtaacacttctgggtgggagggcagcagaggaagttgttttagcaggacgggtttccactggtgcacttgatgacataagacgtgctactgacatggcctacaaagctgtagcagaatacggtcttaatcagcgcatcgggccaatatcacttgctacac

SEQ ID NO: 10241 - DNA, 128 bp, Zea mays
  Clone ID: LIB3156-013-Q1-K1-C1
cccattctgggcagaaacggaacaaggtgttgctcaagcaatcattcgatctgtcattgatttggaaagagatccatggccaaaggtgtctgatatcaccaaagaccttgtcagaggaatgctgtttc

SEQ ID NO: 10242 - DNA, 265 bp, Zea mays
  unsure (1)..(265): unsure at all n locations; Clone ID: LIB3156-013-Q1-K1-C3
ggaaaattatctctagcatttattgtagagtaatacaaagagtaatcttggcagaagatgggtacgttgttgcccagtttccctttgtatttgtcagtaatccatgatttcatgacaacgatgaattgctggctgaaatcggctccacctttaagccaaaatcctgaaactgctaacgcatgcttgcaagttcctttgtatcctttcttctgagcataccnnanaataaaaaatataaaaaattaaaaaaataataatacccttt

SEQ ID NO: 10243 - DNA, 253 bp, Zea mays
  Clone ID: LIB3156-013-Q1-K1-C4
aatgatcaatgccatgactgctgaagaaagggagaagccagagttactggctgaatcacgtgagaagaggataagagtggctgaagagtctggaaagactgaacaagaggtgagtcaattggttgcccagcttttccaaatgcgtgctcagatgcagaagttgatgggtatggtgcaaggacaagaagctatagctggcatgggagatctcaaggactcgcttatacctgaaaagaaagcaccttctggcacc

SEQ ID NO: 10244 - DNA, 416 bp, Zea mays
  Clone ID: LIB3156-013-Q1-K1-C6
cttcgcagcctcctgcaagagcccgtgatcaaagaggacagcttgaaagacaggatggaggaccagcgcaaggggaactacgtgataacgagcgaggagctggaggacgtcatggaagaagcgatgcacatcctgtgggagttcatcaaggccgacagggtggagacgactacgacggcggcgtcggtgctcaagggcctgtcgagcgctcacgtcgagctccaggacccttcggaccatgatctcatggcgcacatccactccacgctacagaagatagagaagaggctcaaggaccttctcaagaccggcaactgcatcgggaaaaacaaccacgcctccgagttcttcctcaagaccatcaccatcgacgacgtcccccggcacgggcccatcgtcttcgttggcaactcatg

SEQ ID NO: 10245 - DNA, 270 bp, Zea mays
  Clone ID: LIB3156-013-Q1-K1-C8
gcgcggcggaatccggcgcccactcgtacctaaggggttcgtctttggtggcctctgtaatcgcgggttatctcaaaggtctgaacggatgatggtgcctgacagacccggtgggccctctgtaaaatcgaatgtgacatggggtcactatgcttggattccttctgtcttattgtttctctaatacattttgaaagctacgttggtcttttgggcaggggcatggttgctttatacatattggctgactgtggatggctggcaacgcct

SEQ ID NO: 10246 - DNA, 267 bp, Zea mays
  Clone ID: LIB3156-013-Q1-K1-C9
gtagcatcactgacaaatattctccacattttgcaagcaaaatgatggggaatgttcacgtggatttgcaaaaggaccctcccacctcatgcagtgcagggcctgctggagaggatctatcccactgtcaggcctcaatcatgggtcctagtgacagcccttatacaagctgggttttcttaattaatatccattttccttctgactacccctttaagccttcaaaagagaacttccaaacaaatagtttatcaccctaacatctac

SEQ ID NO: 10247 - DNA, 187 bp, Zea mays
  Clone ID: LIB3156-013-Q1-K1-D11
gcacttgcctattcaatagaattcacctttaatcacacatgctgcatggtccttttacgggaaaattatctattcaagctttatccataccactgttggcatatttaatgcatccactttgactactctaatatatcatactcccatcttactatttacttccaaatataactcctattgttaatcc

SEQ ID NO: 10248 - DNA, 361 bp, Zea mays
  Clone ID: LIB3156-013-Q1-K1-D2
tcaagcccaagttcatcttctacgccacctacctgtccgagaagatcgggtactggaggtacatcaccatcttcaagcacctcaaggcgaacccggagtaccaggtgtaccccatcttcaagtacttcgagaactggtgccaggacgagaacaggcacggcgacttcttctctgccctgctcaaagctcagccgcagttcctcaatgactggaaggccaagctctggtcacggttcttctgcctctcggtgtatgtgaccatgtacctgaatgactgccaacgcactgcattctatgaaggaattggtctggacaccaaagaattcgacatgcatgtgatcattgagaccaaccgcacaac

SEQ ID NO: 10249 - DNA, 169 bp, Zea mays
  Clone ID: LIB3156-013-Q1-K1-D3
aacgatcataggtatcatccaccacggaattggacaattgctgcacgtgagcacctcaagagagagtgcaagtgtggaaggcatcgtgtcatcggctatgttgtcaaaacctgtatcgtttcttgcccacccattgccagattgctcttgcagaacaccaaaatcacct

SEQ ID NO: 10250 - DNA, 327 bp, Zea mays
  Clone ID: LIB3156-013-Q1-K1-D4
gccttttagtagtaccagttgaatttgatagttacgccgatcgagatcagtaaaaaaatagggctgggaaaaaaaaaaaaaaaaaaaaaaaaaaaaaaaaaaaaaaaaaaaaaaaaaaaaaaaaaaaaaaaaaaaaaaaaaaaaaaaaaaaaaaaaaaaaaaaaaaaaaaaaaaagaaaaaaaataagaaaaaaaaaaaaaaaaaaaatattaataaagggggggggggccctttaaaaggaccaaagtttaataccggggggatgggggaaaaaaagttttttttttggggcccccaaaattaatatctggggggggggggtttta

SEQ ID NO: 10251 - DNA, 391 bp, Zea mays
  Clone ID: LIB3156-013-Q1-K1-D5
ctctactccatcccctcgatctcgaagcgcaacagcagcagtcaagcggccatggacgccagcgcagcaagagccggcgggaaggcgaagaaaggcgcggccgggcgcatggcctgcgggccgaggaagaagtcggtgacgaggtccgtcaaggccgggctgcatttccccgtcggccgcatcgggcggtatctgaagaaaggccggttcgcgcagcgcgtcggcacgggcgcccccgtctacctggccgccgtcctcgagttcctggccgccgaagtgctggagctggccggcaacgctgccaatgacaacaagaagacccgcatcatcccgcgccacgtgctcctggccatccgcatcgacgaggagctcggcaagctgctgttcggcg

SEQ ID NO: 10252 - DNA, 325 bp, Zea mays
  Clone ID: LIB3156-013-Q1-K1-D9
gcagtggcctgttcgagagaattcacctccaatcacacatgctgcattctcgtgtgacagtcaactgatctatgcaagctttatggatgccactgttggcatatttaatgcatcgagtttgagacttcaatgtcggattcttccagcttcgtatctccccccaaatatcagtccgagtgttcatcctgttgtggttgcggcacacccttcggaagcgagtcagtttgctctagggctgactgatggtggtgtttttgtgttggaacctttggaatcagatagaaaatggggaaatcctccaccggtagaaaatgggtctgctagc

SEQ ID NO: 10253 - DNA, 388 bp, Zea mays
  Clone ID: LIB3156-013-Q1-K1-E1
cttgaaggtatcacaagcaatgacaaagcattatgtgaaggtcacacctacattcaccatcgaggagacaacaaggcttatgcaagagaagcagcaaagctgtgttgttgttgtagataatgaagattttcttgagggaattgtaacattaggtgaccttcgtcgtaaaggatttgtgccaagtgaaaactctgatagtacccaggcaaattcatcgaccgtggatgcaaattcttctcttgtgtcatcatgccttactcgaggttttcagttccatggcaatgaaagaagactggtgacctgctttccagatacagacctgagtactgccaaagttctcatggaagttaaaggtattaaacagctttcagtggtcaaacgtggtgct

SEQ ID NO: 10254 - DNA, 422 bp, Zea mays
  unsure (1)..(422): unsure at all n locations; Clone ID: LIB3156-013-Q1-K1-E11
atgggatggacttctcgaatttcggtggcatgggtggtatgggtggcatgggtgatatggctggtatgggtggtcttggtggcatgggtggcatgggcggtcttggtggcatgggcggtatgggaatggatgatttcgaagatgagagtgatgatgaagaagaagtgtcgaaacctcaagctgcggacaaggctgttgaggctgaggagacggagtcagcggaaaccaatactgaggcggctcagagcagttgaagatgcttatgatctaagctagattgtatcctcatgttaattctgctgaatcggaggacaaaccttacatttgtggtgctggcaagtcccagtggcgtgccatgaaaatntacgttccgtcttttaactgggtatcctagtgtcgtgctcaacatattatggatattg

SEQ ID NO: 10255 - DNA, 200 bp, Zea mays
  Clone ID: LIB3156-013-Q1-K1-E12
gaagaagtgaagaatgtatgaagatggtagcatcaacagtgttttacgtcttaccccgaatttctcattcaacagtgtttacaccttgccccgtatttccacatttttgaggtcgcttgccagtagctctaggttccggtatcgaaaacttgtacaacaaggctccagactgttgaaggatttgtattaataacatgcac

SEQ ID NO: 10256 - DNA, 407 bp, Zea mays
  Clone ID: LIB3156-013-Q1-K1-E2
ctcctccagagctcgtcgccaccggccaccgccaccctcgatcacgccgtccgtcgaggtaaggtcagcatggtgagggtcagtgtgctcaacgatgcgctcaagtccatgtacaacgctgagaagatcggcaagaggcaggtcatgatcaggccgtcgtccaaagtcatcatcaagttcctgacggtcatgcagcgccacggctacattggagagttcgagtacgttgatgaccaccgatcgggcaagatcgtggtcgaactcaacgggaggctgaacaagtgcggcgtcatcagccctcgctttgatatcggcgtgaaagacattgatggatggactgcaaggctgctcccgtccaggcagttcggatacatcgtcctcacaacttcggcaggcattatggacca

SEQ ID NO: 10257 - DNA, 426 bp, Zea mays
  Clone ID: LIB3156-013-Q1-K1-E3
cgtacacgcagttcaccatcgaacagaacccaatgtcgagcaagctgtgagtcgatgaggcggcggccgactattccaaccaatggggattcgagaagctggttttccggaactcgatcaccggggtgaggagggacaggaagtacgcgatccaagcgaagaacgcgtacgccacaagcgtccacatgtccgagaacgtgatcggcaacaccacgcacaagacggagcacctcatccggtactaccactaccacaacaccatcaacgtcctcggcgaggtgtgccgcgagttcgtctccgttccaccgaagaaaggcggcggcctgacgtggtccgagaagacgccctggtactacgacggcagcatgaagcgcgtcgccagcgctgtgcgcgagttcgagatggagaccatcggcgacgtgcggg

SEQ ID NO: 10258 - DNA, 294 bp, Zea mays
  unsure (1)..(294): unsure at all n locations; Clone ID: LIB3156-013-Q1-K1-E4
gtggtggttgaacaataataagcgaggctgtgctggctgccatacataggtattgtgtggtgtgtgtgagagagagagaaacagagttcttcagtttgctatctctctctgcatgtttggcgtcagtctttgtgctcatgtacgtacgtgtgtctacctgcatgttggttgatccgattgcatctgctgtaaccatatattaattggtccacgatgatatgatttgatactttnttaaaaaaaaaaaaaaaataaaaaaaaaaaaaaaaataaaaaataaaaataataaaatcc

SEQ ID NO: 10259 - DNA, 208 bp, Zea mays
  Clone ID: LIB3156-013-Q1-K1-E8
ataaaaaaaaaaaattttttttgattagttttggtttttaatatttattattgagtataaaaaaataaattaattttttttggtgtatgggtttggattttttttttttaatattaaaatttaataatttgaaattaaaaagggggggggggttaattaaataaaaatatttaattaaggggttatatgattattttttttttttttt

SEQ ID NO: 10260 - DNA, 354 bp, Zea mays
  Clone ID: LIB3156-013-Q1-K1-F10
ataccagtgtatgttttgtaccatacacagcatgtcaatgtaaggatagtagaaaagccactttaggtccctccctggctccctccccttgcaaaccaaacacctacattccttgtgtgcctagttagatatgttgtttgccatatagcctttcccttagtaaattattgttgtctactgtgattaagcctcctaattgtacccgccatgtggcccgtgctgccagaatcaagaagttttgactgtaccttctgtatgtgtaaatgcaatggggaaaaaatgatgaaaaaaaaaaaaaaaatatttaaaaacaatttataaaaaagattaaaaatttatataaattttaataaa

SEQ ID NO: 10261 - DNA, 424 bp, Zea mays
  Clone ID: LIB3156-013-Q1-K1-F11
cttgagaagagagaggaagacgagagctagaagcgaaggagaaaagcagttcttcagctaggcaggagggcacaggaaggaggagatggcgtcaaagaggattcagaaggagctcaaggatctgcagaaggaccctcccacctcgtgcagtgcaggtcctgttggtgaagacatgttccactggcaggcaacaataatgggtccatctgatagcccatattctggtggagttttcctagtcacaatccattttcctcctgattatcctttcaaaccaccaaaggtggcatttcgtactaaggtgttccatccaaacatcaacagcaacgggagcatttgcctcgacatcttgaaggaccagtggagtccggcactaacaatctccaaggtgctgctgtccatctgttccctgctgactgatccg

SEQ ID NO: 10262 - DNA, 384 bp, Zea mays
  Clone ID: LIB3156-013-Q1-K1-F2
gtacgtgagcaggtctaagagcgagattggaaattggggatatccctggtgcacttggggatgctgaggaagcaataagaatagctcccagatttcctcaagctcacttattgcgaggcgacgcactttttgcaatgggtgaatattctgtcgcggaagatgcctatgcagatgccttggatcttgatccatctattcgccggtccaagtctttcaaggctcgcgtggaaaggctacgagagaagcttgttagtgccaataatccgtagttcattttgaagctctctctccatcagaagttcgatccacaaagaatgtagatatgttcttggtaggtctgaattgctagatgcaacatctgggaagtagtatacatagatagct

SEQ ID NO: 10263 - DNA, 424 bp, Zea mays
  Clone ID: LIB3156-013-Q1-K1-F3
gcccatgggcctgtccatggcgtccaccttcatcggcaactcgacctccatccaagagatgttccggagggtgagcgagcagttcactgccatgttcaagaggaaggctttcttgcactggtacacgggcgagggcatggacgagatggagttcaccgaggctgagagcaacatgaacgacctcgtgtcggagtaccagcagtaccaggacgcgactgccgacgaggaggagtacgaggacgaggaggaggtgcaagccgatgacatgtgaggggagggctgttatcgtgtgaagccttgtggtcctagggcaagcggacctcgatgagttcggtgttccctttcgtgttgttgccatctttctactgctagcgtacccaccctcgtggcccattccgtcgctgttgacgcatgtatttttctt

SEQ ID NO: 10264 - DNA, 353 bp, Zea mays
  Clone ID: LIB3156-013-Q1-K1-F4
gcctttagtagtaccagtagaatttgatagttacgccgatcgagatcagtaaaaaaataatgactgagaaaaaaaaaaaaaaaaaaaaaaaaaaaaaaaaaaaaaaaaaaaaaaaaaaaaaaaaaaaaaaaaaaaaaaaaaaaaaaaaaaaaaaaaaaaaaaaaaaaaaaaaaaaaaaaaaaaaaaaaaaaaaaaaaaaaaaaaaaaaaaaaaaaaaaaagggggggggggcctttaagggtccaaaaaaaatgacgggggggagagaagttttaattttttttagggggcccccaaataaaaataccgggggggggggtaaaaaacgggggaggggggaaaaaaccgggggg

SEQ ID NO: 10265 - DNA, 51 bp, Zea mays
  Clone ID: LIB3156-013-Q1-K1-F5
gcctcccgtcctaccactccaccttgattttctactcgacctccatgcagc

SEQ ID NO: 10266 - DNA, 343 bp, Zea mays
  Clone ID: LIB3156-013-Q1-K1-F6
atctgactgcaagctcatggcttcctgctcggcggataccacggttgcgctgagggacgtctatcccccaaaaccccaaagcaaagcggacatcacagaaacagacgaggcctcctgctagctcatgtagtttgggccttcctgataccttctggcagaattttggagcttccgtgcaatgaaaatctgaacttgtcgcaacagtgcaagcgatttattctttttcgtcaaagaaaagagtaagttatgatgtgccttctacagagaagcgcaaacgtatgcatgtaactgttgttaggaacggttctcttgatttctttatttttcattgaaattctacccg

SEQ ID NO: 10267 - DNA, 384 bp, Zea mays
  unsure (1)..(384): unsure at all n locations; Clone ID: LIB3156-013-Q1-K1-G1
aagagaattgaccctccatgaagcggagaccatagccctttctatcctgaagcaagttatggaagagaaggtgaccccaaacaacgtcgatattgccaaggttgcccccaagtaccacctctacacccctgccgaggtggaagccgtcatcgggaggctgtgaaacgctttcgagctcttgctatccacgtcatcaatcgggaataaacgacccttgtacgaaacgtgggcaccatggtccttgattatggcttgattatggcaaggacaagcgatgttagtttgattcacagctcaaccgggctcacttgtctttntaaatttttatgaattaacggtgaaaactttggactgccaaaaaagttcattttttttttttaaaaa

SEQ ID NO: 10268 - DNA, 423 bp, Zea mays
  Clone ID: LIB3156-013-Q1-K1-G11
cggacgcgtgggcggacgcgtgggtgaaggcacagacccttggtgacacatcaagcctggagttcatgagaggtagacggatttttgagatcaaccccgaccatcctatcatcaaggacctgaacgctgcttgcaaaagcgagcctgaaagtactgaagccaagagggcggctgagttgctatacgaggctgcgctgatctccagtgggtatactcctgacagtccagcggagctgggaggcaagatctacgagatgatgaccatggccctcggcgggagatgggggaggttggagacagaggaggctgaagtcatcgccagcatggacgacgcggactcttctggaggtgccacgaccacgaccacgacggaggtagccgagccctctgaggtcaggacagagagcgacccgtggaaggatt

SEQ ID NO: 10269 - DNA, 372 bp, Zea mays
  Clone ID: LIB3156-013-Q1-K1-G12
gggacgcgtgggcggactcgcgggcgaaggctcataccttcgttgacgcatctatcgtggagttcatgaaaggtccacggatccctgagatctaccccgacgatcctatcatgaacgacctgaacgctgcttgcaaaagcgagcctgcaagttctgaacccaagagggcggctgagttgatatacaaggctgccctgatctacagtggggatactcctgacagtccaacgtagctgagatgcaagatctacgatatgatgaccatggccctcagcgggagatcggggatgttgcagacagatgaggctgaaggcatcgccagcatggactacgctgactcttctggaggtgccacgaccactaccacgacgg

SEQ ID NO: 10270 - DNA, 286 bp, Zea mays
  Clone ID: LIB3156-013-Q1-K1-G5
gcggtggccggccgcggaggcgtcgacgaagcatggggaatgcggggcgctggctgcggagcttcctgtcgggcaagaaggacaggcatgcggcgcctcccaaagacaagcggtggatcttcaagcgccccccgccggcggcgcaagaagggacggcggcggaccagcaccaccatgggcctccgctcggtctgccggcgccgggcgtctacgagctcgacttcgaccaaaagaagcacgccgtgcctcgtctatggcgccgccgccgtcaggaaccatgccaccc

SEQ ID NO: 10271 - DNA, 186 bp, Zea mays
  Clone ID: LIB3156-013-Q1-K1-G6
gttgtcttctcctccccctccggttcggtttcaggttcgtgaggttctcctgggttcaggtccctcggtgagcggatcgagacagccacgcccctatgtttaatacccctgcttcttccgctgtctcccctcttccacggtctaccactccctccacatctccttcattaccttctgtgaggtcct

SEQ ID NO: 10272 - DNA, 411 bp, Zea mays
  Clone ID: LIB3156-013-Q1-K1-G8
cacatcttggctggtctggcatcagcagttggcggtctgagtgcaccatatgaaagagcatcacgtattcatgaaagacatgtagtgaactggctgtgggctgcaggctgtcatccgtttggaccattctcgaactcctcacagatcagtcaaattcttcaagatgtagcactgagaactacaatttatgctcaagtcgatgctgctcttcgcaaaataagagacacatcagagtttgtccaatcttttgcatcagagcatcttaagacgccattaggagaacttgtgaaaggtaataaaaacaagtccaccactgagttatgggtagagaaattctataagatagtaaccaatctaccggagccttttcccatgatcttggtgagaagtagaagaatactggataacttg

SEQ ID NO: 10273 - DNA, 419 bp, Zea mays
  Clone ID: LIB3156-013-Q1-K1-G9
cggacgcgtgggttctgcgcgcggcgagctagggaggaggcggagggaggagagagatggacgcggagaaggagcgccagcacgacggcgacggcggcgcggtggaggcggacatcgagcggctccccgtcgacctcctcgcgcacatcctctccctcctgtcgcccttccgcgacctgtccatggcggggggagtgagccggaggtggcgctgggcggtggagcggtcgctggcgtcgcggcggcggctgagcttcgcgggccagcgcaccggcgacgacaccgtcgcgcgcctcgtccgcgccgccgtcaacctccgcgacctcgacatttcacgaagctgctggggctgccgaatcaccgacgatggcctcatcaagatttcgtccgcggattgcgtcggcaacctgacgtccata

SEQ ID NO: 10274 - DNA, 419 bp, Zea mays
  Clone ID: LIB3156-013-Q1-K1-H1
ggaagacaccgaagatgatgaggattcggtcgacgaagacgatgcgagagaagaaacagaagaggaattcctggaaagatacgcactagcggcggctgcgggcgagtcagtggaggaaggagacattgatgaagagacccaagacatcgaattgggctctctggatgacttggacatacagcaggtggttattcccctgatgcagaaacttcctgctctgcagcccggagcgtttccggacagcctggttgaaagaattgcagaaacattcccggaatacgaacagtttttgcaaggcctccgacgagcttagagcatatgaaacatgtgcagatttttctcctttttgttatatagttatattttagaggcatttttgagttgcttctacctcgagcgttagtccgagatgtgtttct

SEQ ID NO: 10275 - DNA, 395 bp, Zea mays
  Clone ID: LIB3156-013-Q1-K1-H10
ggcgaaagcacagccagcgagggagccgcagaggagcctcgagccgagcagatggagacagacaaacctgagggagccacagatccctcggcttagctttgccagtgatcaaacatttgtgtgattgaccctgttcacctgctgttatagtcggtaggggggagtgaactaagcgagaggttcgccacatttgatttgaggatgtgtgttgggacattcaaggtattctgtttcttgtccttgacaagggaggtggttgggtgtttgaaggataagagcagtggggtacactttctcacgtttgtgtgccccacacgctcgatatctttgttgtaaaaaaatagaggccttaatacgacaaaatatttattccgatcaaaaaaaaggtttactcg

SEQ ID NO: 10276 - DNA, 235 bp, Zea mays
  Clone ID: LIB3156-013-Q1-K1-H11
gtccaggccatcgtcaccgggaagggcccgctcgagaacctcgctgaccacattgccgaccccgtcaacaacaacgcttgggcctacgccaccaacttcgtccccggcaagtgagggaggcgccgccggtgacctttaggtgtccggatgcatgtgagcgcacgctggttttcagtttgtaccatgatgtaaactattgttcaatcgacaaggaataattgtgttcattgtcatt

SEQ ID NO: 10277 - DNA, 259 bp, Zea mays
  Clone ID: LIB3156-013-Q1-K1-H12
gtccaagccatcgtcatcgtgaagggccttttctataaccttgctgaccacattgtcgagcacgttatcaacaacgcttgtgtcctactccaccaacttcttccactgcaagttaagtaggctccttctttgacctttacgtgtccctatgcatgataacgctcactaattattatttagtactcatcatctaaactattgctcatatctggttggatataaattttttctacaatctttcttttttttttttcacaaa

SEQ ID NO: 10278 - DNA, 260 bp, Zea mays
  Clone ID: LIB3156-013-Q1-K1-H4
ctctgattggcacatcacggagttagcgagtagggcaaagctgctttgccattgggaacccttatggatatgaacacactctaactactggggttattagtggattggggagggaaataccatctcccaatgggagagcgatccgtggggctatacagacagatactgctataaatgctggtaactcatgatgcccacttatagactcttatggccatgtaattggtgtcaatactgctacattcacacgtaaaagatct

SEQ ID NO: 10279 - DNA, 270 bp, Zea mays
  Clone ID: LIB3156-013-Q1-K1-H6
cagacgcgtgggtggtgcagctattcgtttctttgacaaagcgattggaattaatgttgcccgctcaagatttctcccagtgaaggctacatctgatttattgcttgtgcagtctgatctttacaccttggtcgaaggctttgtcatccgcaacccattcagaacgaattcagcttacccttcgattgagcttggacccgagttcaagaaggttgccaatttccttgctcggttcaagtccatccccaacattgtcgagcttgacagctt

SEQ ID NO: 10280 - DNA, 412 bp, Zea mays
  Clone ID: LIB3156-013-Q1-K1-H7
tggaagtccaagcagctggagcgcgagttctcggcgctgcgcgacgactaccaggggctgctctgcagctacgagtccctcaaagacgacatgcgcgcgctcctcaagcagctggagaagctggccgagatgctgcacgagccgccgcacggcaagtactacagcggcaatgcggacgacgtgcgctctggcggcgtcggcggcacgaaggaggtggaggagtccacagacgcctgcgccggggccgcgctctactcgtccgagtgcgctggcggcggcaggttcatcgcgcacttcttggcggacgacgacgcgggagcagccctcttccggccgccgtcgtcttcgcagccgaccgctggcttactcacgtcgtcagagccggcggagcaccagccgttccagtttcact

SEQ ID NO: 10281 - DNA, 105 bp, Zea mays
  Clone ID: LIB3156-013-Q1-K1-H9
ttcaagtccaagcagctttagcgccaattctctaatctgctcgacgacggccactcactggtatttatatacaaaacccttaactacaacttactcgcacttctt

SEQ ID NO: 10282 - DNA, 424 bp, Zea mays
  Clone ID: LIB3156-014-Q1-K1-A1
cgacgtctaaggaatccttcaacgacctctgtccagcaagcgctacatgggcttgcatactgtgtgtatggcaaacctgacgtgcggcgtttgatgttcgaggtgtttgacttcgaacaggtccagcctaaagcagtctgaggatcttctccattggtaccgatgctagagttgctgaatgctgaccaacaagaccccaatggcagtggtacaaatgctgtagattcttgaagtcgtccattcgacaggagatctttcgattctgaagcctgaagccctgaaccctgagctgggacagctgattagccactgggtcctgtctctcctgaaaccgtcactgttccaaccttcttgtccgtcggaaatggtagactagtgatgctgtggatcggaggctgctgttgtttgaacttacaattttgat

SEQ ID NO: 10283 - DNA, 410 bp, Zea mays
  Clone ID: LIB3156-014-Q1-K1-A10
ggaagctgctaagtgggttgcaaaagtaagagatgtcggatgcccatcctgttcccggggagttattctcaaaactaatatgcaaagtggccattttggtgagggtgggcgtttcacgcactgtgatgaaacagcctttgagtatgcatttctcatgaaggccttgggtttggatgacgtagctatgatgtagcggactcatgcctgaggattttcacggaacagatttttttgtggctctggaagcaaaaactgagataattaccttttgtgatatgctcagggataagattgtatcctcataattattgattaaaagagctcgcaatggaaggtgatgcacccttgaggtgtgttcttgatggcattggcttttaatattcaagttgtggatttctacatgcatatta

SEQ ID NO: 10284 - DNA, 433 bp, Zea mays
  Clone ID: LIB3156-014-Q1-K1-A2
gacagaacatgattaccatgttgacatatggagcctgggtattctgtgttatgagttcctttacggggtcccaccttttgaagctaaggagcactcagaaacatacagaaggatagtaaaagtcgacttgaagttcccactgaaaccattcgtttcgcccgctgcaaaggatttgatttcccagatgctggtcaagaactcggcccagcggctgcctctccacaaggttcttgagcacccatggatcgtccagaacgccgacccttccggtgtgtgcagaggatagaaccaccaccaccgtctgaagggagtgcgattctttccactctccccatttcgaggggagtgcgattctttcgactgtttatggcttctgtcgcccgaattgccccaccccgaactgtatcttgtagcaccgtgtactgtgtaattg

SEQ ID NO: 10285 - DNA, 140 bp, Zea mays
  unsure (1)..(140): unsure at all n locations; Clone ID: LIB3156-014-Q1-K1-A3
agataggttcggtgtaacactagttatagctcgtagaacatatgccatctagggagcatggtaagctcaaaagtcaaaatattgtgattctgctgaatgtactactctttttttttaaaaaaaaaatccttcacgaanaa

SEQ ID NO: 10286 - DNA, 447 bp, Zea mays
  Clone ID: LIB3156-014-Q1-K1-A4
cggacgcgtgggctggtgcaggtccagggccaggtggtcgtgtcgccgcctccgctcccgcgccggcgccgctccgcgtgtcactcgccgcttctcttccattccaccccgcccccattctccctcctcgcgcgtcgcgatgaaagaggcgcaggcttgagcgagaggaccgcgctggacaccaccgcatgctagggtggcagggaggggagagaggggagccgagccgaggacgatggcgctgggcgtgttgttccacggcgcgcagctagcgctggatctggcggtggccgggatgtcgctggcggtggcgctcgggttcttcgccctcatcactaccttgctctgctccgcggcgttcctccaccactccaagcccgccgcgtagtcatagccttcacagcgaccaacgcgcctcaacctctggggatcgtaatactgttgctg

SEQ ID NO: 10287 - DNA, 454 bp, Zea mays
  Clone ID: LIB3156-014-Q1-K1-A6
ccccacgcgtccgcaaccatccaatgctgggggtgatgtttatcctttggaatcttacgagagcttatcaggggaggatgttcttgatgctcattggggcgttccggatgatgatgatgcgactggacttcgctcgcatactctctccatccttgtgaatgactgtcctggtgtcctcaacattgtaacaggagtctttgctcgcaggggctacaatatacagagccttgctgttggcccagctgagaaggaaggcatttcgcggattacaacagttgttcctggtactgttgaatccattgagaagttagttcagcagctttacaagcttattgatgtgcacgaagttcatgacattacccactcaccttttgctgaaagggaacttatgcttattaaggtttctgtcaacactgctgctcggaaggaaatcctagatattgctgaaatcttc

SEQ ID NO: 10288 - DNA, 266 bp, Zea mays
  Clone ID: LIB3156-014-Q1-K1-B1
cggacgcgtgggcagctacgacggggtcgagctggaggaaatggtccagctggctctgctatgcacgcagtaccacccgtcccaccggcccagaatgtccgaggtgatcaggatgctggaaggcgagcccgggctcgcggagagatgggaagcgtcgcagggcaacgtggacacgccgaagtccgtctcgtcggagctcctgcctcccaagtacgtggatttcgccgctgcagacgagtcctcgcttggcctggaagccatggagc

SEQ ID NO: 10289 - DNA, 352 bp, Zea mays
  Clone ID: LIB3156-014-Q1-K1-B10
cagaatacaagaggcgcgttagactgcaggcgaagcagtatcctgcattggtctgagagcgtcgccctactagggatccatgctgcacatccgcatagttgttgctagtgtcttgaatgaaagaccaaatgtaacatggtgcttggagaagtaactatcgccattgcggactgtgtgtcttttaacagccttattaactgtttggagtgtgtgatttgcgggatgatgtcaaaaccttgctgtgtcttgttatcaagaattgctctgtgttgtctgacaaaaaaaaaaaataaaaaaaataaaataaaaaaaaaaaaaattaataaaatataaaaaaataattattattaat

SEQ ID NO: 10290 - DNA, 420 bp, Zea mays
  Clone ID: LIB3156-014-Q1-K1-B11
cggacgcgtgggttcggtggaggcaagtccactggcttcggcctcatctacgataacgctggagtctgtcaagaagttcgagcccaaataccgcctcatcaggaatggtcttgctactaaggttgagaagtcccgcaagcaaatgaaagagcggaagaacagggccaagaagatccgtggtgtcaagaagaccaaggctggtgatgccaagaagaagtaaacagtcatttatatttctgtattactgtcctgaactctgggtggtcgtctagttgcaatgtcataattatggtcgtgttaggttttgttccgcactcagcaataagtgaagttttgtaattcctggatgtgaacttacccggattggctgtagcatgttcccaaatgagaaggcttttttgacatgcccttgtgtcattt

SEQ ID NO: 10291 - DNA, 451 bp, Zea mays
  Clone ID: LIB3156-014-Q1-K1-B3
aatcagccagccctcgcagcctgacctgctgacggccgacgcccacaaagcattgaagagagggggagaatggacgccgccgcgcgagttcacgtggacgatggagagcgccgctcccgttatcgccaggccgtcgctgcccaagaagccctcgccgtcgttccgcctacggaacggcagcctcaacgtcctgcgcctgcgccgcgtgttcgacctcttcgaccgcaatggcgacggcgagatcaccctcgacgagatggccgcggcgctcgacgcgctcggactctgcgccgaccgccacggcctgcacgccgaggtaggcgcgtacattccggccggcgccgcggggctccgcttagacgacttccagtgcctgcaccgcgcgctcggggacgcgctgttcggccccatcccggaggcggtgcctgaagaggacgtcaagggggacatg

SEQ ID NO: 10292 - DNA, 429 bp, Zea mays
  Clone ID: LIB3156-014-Q1-K1-B4
ctacatctgcgacaccaatggcgccttcgtgcagcctgctttctacgaggcttttgggctgacggtggttgaggccatgacctgcggcctgcccacgttcgccaccgcctacggcggtccggccgagatcatcgtgcacggcgtgtctggctaccacatcgacccttaccagggcgacaaggcgtcggccctgctcgtggacttcttcgacaagtgccaggcggagccgagccactggagcaagatctcccagggcgggctccagcgtatcgaggagaagtacacctggaagctgtactcggagaggctgatgaccctcaccggcgtgtacgggttctggaagtacgtgtccaacctggagaggcgcgagacccgcgggtcctgtagatgctgtacgcgctcaagtaccgcaccatggcgagcaccgtg

SEQ ID NO: 10293 - DNA, 235 bp, Zea mays
  Clone ID: LIB3156-014-Q1-K1-B5
gagctctgatacaatgcatgggagagttccaaagctcgagaggagtagtagcagcgtcgcataggtcattaggtgaaacggttgctgtttcctccacatagcagtttatgctacagagatgtaacagaaacaagtcaggttttgcccgatggtctatcagtctatgcaaccccgactgcctacgtactcccagaacagtttcctttacatctcatgaaaactcgaatttgtctat

SEQ ID NO: 10294 - DNA, 323 bp, Zea mays
  Clone ID: LIB3156-014-Q1-K1-B6
tcgaccgacgcgtgcgaacggggagtgccttccaaggcgaccgccccctttcgcgctccatacgtccatccgtcggcccgcagccttaagataacgcaggcaacaacaagagacaccgtcgagcgagcgaggcggggagaagcaggtccaggaccaggagaaaggaaaaggaagcccacctctctctagcctggagccgagaagcctaaggagcgagggatcatcaaggcatggaggagcccgttccggctgatcctcccaggattttctggaagtcaaggagatcacccaatggcctgagcctgcaataagagcctgacaaa

SEQ ID NO: 10295 - DNA, 412 bp, Zea mays
  Clone ID: LIB3156-014-Q1-K1-B8
ctaaaggctcagagacctggtgaaactgcatgcactggactacttcacaatgctggggcgcatcactttgacgactgtgcccgcttcatggcctaccaccttacagagtacaggcggtactgtaacatcaataacatattactgacgctgaacttgcagcacgccatgaacaccctactaatgccaccaaacactcaatctagcttacatgatttaatagaccattacatgtacaacgacacagctcctcctctaaacgtcttctacacatatttctagtatcattatatcaaccaaattgatcaacaacaatatctgaagatgttagagccgacaaattttatccatgaattcttgacctgaatttcaatttccccaatgtaaaacatagtgttaaatttactgtcaattt

SEQ ID NO: 10296 - DNA, 442 bp, Zea mays
  Clone ID: LIB3156-014-Q1-K1-B9
gtcaagaatgccggtggtgccatggctgcaaattcagcctagcaagttcatctatgcgcgggaacgatgacactactagcttggtatggattcagtcgattggattgtaggactccaaagcactgcattggtgatggtccctgcaaggtactgccggagttatagggaggctctgctcattttgcctgtgggccggaagcaagccctcccttttgtgctggtccagcactgccaactttttctgtcgtggtggtcgcctggtctggtcggtcggtcgtaggaatcattagcccttccaaagctgcacaaagctgaatcacggtgacagcttctgcagcatgcacggggcaaaagaaaaaagatagccccagtggagatgtggatgtttttttttcttgtctgattgaatcttttgattaactttggatttgtttgtgcgctg

SEQ ID NO: 10297 - DNA, 391 bp, Zea mays
  Clone ID: LIB3156-014-Q1-K1-C1
tgtatttgtattaatgtgttggaacacgtatatgtagttgcaacttcttttcaaaaaaaaggggggaaaaaaaaaaaaaaaaaaaaaaaaaaaaaaaaaaaaaaaaaaaaaaaaaaaaaaaaaaaaaaaaaaagggagaaaaaaaaaaaaaaaaaaaaaaaaaaaaaaaaaaaaaaacaaaaaaaaaaaaaaataaagggggggggcctttttaaaggaccaaggtttacttccccgtccttccagccttaaaatttttttttggggccccaaaaattaaattagggggccgtgttttaaaacggcgggggcgggaaaaccctgggggttcccaaatttattgctttggaacaaattccctttttggacggggggtgtaaaaccaaaaggg

SEQ ID NO: 10298 - DNA, 207 bp, Zea mays
  Clone ID: LIB3156-014-Q1-K1-C10
cgacccacgcgtactctcttcttcgccacccaccgtggccttctgttcaagtacctgtaagggccacaccagtgcgtcattattttaaatatacgaccgacctaccgtttacatctctaataactcctgccaaatctcccgttcatgtgtattgtgcgctagccgtctatctgcactgctgttttttaggtctcattgttcgaattt

SEQ ID NO: 10299 - DNA, 356 bp, Zea mays
  Clone ID: LIB3156-014-Q1-K1-C2
tgttaagcaggtgcttgagattattagcaaaggtggcgtgaaaggactagcccacatcactggtggtggctttactgacaatatcccaagagtattcccctccggatgcggggcaaaaatttttactgggtcatgggaaatacctccaatcttcagttggcttcaacaggctggaaacattgatgatgcagagatgcggcggacattcaatatgggcattggaatggttcttgtggtaagtcgagattcagcagacagaattattgaagacacccatggatccaatcctgcttatcgcattggagaggtgattgagggtgatggggttcagtatgtctgacctcgtatgcctttta

SEQ ID NO: 10300 - DNA, 401 bp, Zea mays
  Clone ID: LIB3156-014-Q1-K1-C3
gaagtatgatgacctccctgagcagtcattctacatggttggtggcattgaggaagtcatggcggaggctgagaaaattgccaaggagtctgcttcataaggaggcttcttgcttgttcaaccctgtacaagttccatttttggattttaagcgtttatttatgcttttcccagttaggcatgacgagctggagagtccatctcctgctgagagatgtttgttttacccttctttgcttcctccaccttacacccaaataagcaactgcagtgacgttggtttcggctgcacccaaactacatgactgaagaaacttgtggcctgtgtaacgcgaatccatcagaacgccaaagttatggcttctggttgtggcaaattatggttcctccctgttcggttg

SEQ ID NO: 10301 - DNA, 367 bp, Zea mays
  unsure (1)..(367): unsure at all n locations; Clone ID: LIB3156-014-Q1-K1-C4
cgctctaccccgagtgctgagacgctgcgctgcgctatacgcctatacctacagtgacgagctgagggtgtcggagctatatggaaccgcgaggcgcgagcaactcgcaacacaaacgtatatttgaatattacaacttggaagaagaaaaacgaatcaatctgatatagaattatcattgtcaggttgtgttctgaaaacaaatttgaaattataattccatcgagagaatgtcgaggtacacggagaacgagtgaatgcctgacgttacgtnttntnnaaaaaaaaaaataaaaaaaaaaaaaaaaaaaattataattaaaataataaattattataattattaatttaaaagggcggccgtttt

SEQ ID NO: 10302 - DNA, 336 bp, Zea mays
  Clone ID: LIB3156-014-Q1-K1-C5
gcgtccgattgtcgacatcgagggagctgactcgcctctatgtcgattaccaaggctccagtgatccgccgcttcttttatacggttcaaggtgtcatcaccatcaggtgcttcaggaaggaggaaagcttcttgcacgagaacctgaaccgggtgaactcaagcctgaggatggacttccacaacaatggtgccaacgagtggctcggtttccggctcgagctgattggaagctttgttctctgcttcacagccgtgctcatggtcacattgcctagcaacttcttgaagccagaatatgtcgctctgtcactatcatatggtctatctctcaac

SEQ ID NO: 10303 - DNA, 454 bp, Zea mays
  Clone ID: LIB3156-014-Q1-K1-C6
cgtccgcttgtgtcccaggtcatctcatcccttactgtttctctgaggttcgatggtgctctgaacgtgggtgttttcgagttccagaccaacctgctaccctacccgaggatccacttcatgctttcttcgtacgctccagtcatctctgctgagaaggcctaccacgagcagctctctgtggctgagatcaccaacagtgccttcgagccatcttccatgatggccaagtgcgacccacgccatggcaagtacatggcctgctgcctcatgtaccgtggtgatgtggtccccaaggatgtgaatgctgctgtggccaccatcaagaccaaacgcaccatccagttcgtggattggtgcccgactggcttcaagtgcggcatcaactaccaacctcctagcgttgtgcctggtggcgacctgtccaaggtgcaacgtgccgtgtgcatgatct

SEQ ID NO: 10304 - DNA, 437 bp, Zea mays
  Clone ID: LIB3156-014-Q1-K1-D1
gggacatggggaaaggaacttggtgcggaggcttatgactgcaacaacatggtcgagcaggagctgtctggaggtgggatcctcatctaccagagcttctgtgctgctgaagacgccgttgctagctcgcccaaatccgttcttcgctgctttgatggcgagaatgcagcaccttttgcgaaggactgcaagctggctaatcttgtctgcttggaggaagttggatgctatcgaggagaaggatggagtgcttgatgagtaagacgggtttctggtgtcgatttgcttctgagtttttttttctttttatatcgttgcgatctcgtggttgtcgtttggttagcagccaagccaggctattagtacgaagaatgtcgtctataaacatgtgttcctacgttgccacatgctgagtcaatctgtatacagctagctct

SEQ ID NO: 10305 - DNA, 413 bp, Zea mays
  Clone ID: LIB3156-014-Q1-K1-D10
gaacctttccccattggttcaaacattctatccacgtctgggagatcccggacttcctgccgtgattaaaatcaccatgacatccaaacagtcttgaccaacggtgacacttcttccaatggagctgacaattcaggtcccaccaaggatactgagtagctgaactgcagcttgctgcatcgctaaccacaaaggcccaagttattactttttgcagacctattttcagttctagcccctcccttcccatttcgattttgtttgttaagtcctcccgatctgtatttattaacttgcatgatgcgggtcaccgaagacttacgctgctgcagaagttttgtctctggcgggaagctatatgcaagagggtggtaccgtttcgttccccagaatctatgtgcttgataacctga

SEQ ID NO: 10306 - DNA, 252 bp, Zea mays
  Clone ID: LIB3156-014-Q1-K1-D2
cccacgcgtccggtcgtgactcgtgaggcgtacctgtgtcggtagcagcatggcccactggacagggacagagtgtggcgtcgctttttttctgtttcagtacgtacgtacttggatcgcggaagcccgtgtatgcgtgttccggtgtggtgttgctgtactcgatctgctgcatgtgtgtatctaccgagctcttcggacagatacgcgtgcgtatgaataaatgatgtaataacgacgtgtgcatccgct

SEQ ID NO: 10307 - DNA, 449 bp, Zea mays
  Clone ID: LIB3156-014-Q1-K1-D3
gaacagctcgctagctagcaggctagctggtgcggctgcctcttcgttcgtgagcgccatggaggagaggcggaggccccgcgggagcgccagcggctggaggcgcccgtcgtcgcgcgcggccggtgctgcgctgcgccgaaaggtgcgggagctgcgccgtctcgtgcccggcggggaggaggcgcccgcgggggccctgcttgtccgcacggccgactacatcgtggggctgcgggctagggtggatcttctcagggcactcgcggccgtctacggagtcggcgtgggcgccgtcgtcgccgacgccgccgacgctgatgcgtgcgcttcatgagttgtttatcaaccactagtagtatagtatgccgtagatttgtgcgtgcatataaacacgcacttgaggattcatgcatgcggcttttagttaatttcaaaaatagcatgca

SEQ ID NO: 10308 - DNA, 400 bp, Zea mays
  unsure (1)..(400): unsure at all n locations; Clone ID: LIB3156-014-Q1-K1-D4
cgaccgcacgcgtccggcgttccttgacaccatttacgccttcgttgatctgtacaaggaccaacggatcaccccggcggctggttttgaagctagagggttcatttatcgncctcctatcgctctagccatcactgctaaatttgtacctttgacgaagcctattaagttgccacgcgatgtgatctccgaagaatattctctggaatacggaactgacaagatatacatgcatgttggagctgtacatgccaactatcgggctcttgtaatcgatgatcttattcccaccggtagaacactctgtccacctgtcaaacttattgaacgtgtttcatcaaaggtcgttaagtagtcttgcttcatttaattgtcataactgaacggcccatacaaactt

SEQ ID NO: 10309 - DNA, 444 bp, Zea mays
  Clone ID: LIB3156-014-Q1-K1-D6
cgcgtccggccaggctgacccgagccactggagcaagatctttcatggcgggctccagcgtatcgagggggggtacatttggaagctctactcggagaggctgatgaccctcaccggcgtgtacgggttctggaagtacgtgtccaacctggagaggcgcgagacccggcggtacctggagatgctgtacgcgctcaagtaccgcaccatggcgagcaccgtgccgctggccgtggagggagagccctccagcaagtgatgcgcgacggcggccacagacctgatcgatcgatgagcgagagggagcactcggagtgtcgtgtcttttcccttgccatttctttctttttttccctacccggaggcgaaaaaaagagtctgcttttgctaggcggcgggcgttcgttgctgctatttgcttcaagagttaaatttacctacctt

SEQ ID NO: 10310 - DNA, 129 bp, Zea mays
  Clone ID: LIB3156-014-Q1-K1-D7
aaacccggaccgacccacgcgtccaatcaacctttcgctacttatgaccattacctttctcggtttcaacatcaacaactgggcggttatataaaataacatccttttctttctttatcattactttct

SEQ ID NO: 10311 - DNA, 100 bp, Zea mays
  Clone ID: LIB3156-014-Q1-K1-D8
ggccctcacgggccgcaccgctggccgaccctgatcttctgtgaagggttcgagttggagcacgcctgtcgggacccgaaagatggtgaacggtttcatg

SEQ ID NO: 10312 - DNA, 475 bp, Zea mays
  Clone ID: LIB3156-014-Q1-K1-D9
gaataaacgggccgaccgacgcgtgcggaacagctcgctagctatcaagcttacttgtgctgctgcctcttcgttcatcagcaccggccgcgatatttttaagccccgcgggagctccatctgcttgaggttcccgtttttctgctcggtctattttgcacttttcctaaaggtgctgtagctgctcccttttctttccttcggtgaggaagctcccgtcggggccctgctttttcttacgtcctactacatcatttggctgcttgctacggtggatctttttaaggctactccgtccgtctactgattctgcgttggctccttctttctctactccgccgacgcttatgcgtgcgcttcatgagttgtttatcaaccactagtaatatattatgccgtaaatttgtgcctgcatataaacactcacttgaggattcatgcatgcggcttttaattaatttcaaaaataacatgc

SEQ ID NO: 10313 - DNA, 352 bp, Zea mays
  Clone ID: LIB3156-014-Q1-K1-E1
gcaaagcctcgggcgtgatcaagtcccacgaccgcgtcgtcgtttgccagaaagtgggggattgctctgtggtgaagatcattgagctggatgattagacaatcaggctatgctgttgtctactagggcacgtttttgccaatttttttgcctaggccgaaacttattggctatgtataatcctatagcgcttgaaaactgagcagtttttcctatggtgacatcataggatttgcttttacagttccaattatggtgtagttcgaaatttgctcgactaaactgcggtgtaacagttaaatgggcagatggaataatgtaatcatactgttccctcgttaggttgtcactg

SEQ ID NO: 10314 - DNA, 446 bp, Zea mays
  Clone ID: LIB3156-014-Q1-K1-E10
cggacgcgtgggcagctacgacggggtcgagctggaggaaatggtccagctggctctgcgatgcacgcagtaccacccgtcccaccggcccagaatgtccgaggtgatcaggatgctggaaggcgagcccgggctcgcggagagatgggaagcgtcgcagggcaacgtggacacgccgaagtccgtctcgtcggagctcctgcctcccaagtacgtggatttcgccgctgcagacgagtcctcgcttggcctggaagccatggagctgtccgggccaaggtgaccgaccatctggtcgcacaggacaggacgcataggaaagcctatggttgtattgcattggagtcggttaggtgtagagagcccccccgacacaagggaaggcgtcaaattttctggtgggttggtgggtgtgatctgtctgtatatagctgtggtggcattca

SEQ ID NO: 10315 - DNA, 104 bp, Zea mays
  Clone ID: LIB3156-014-Q1-K1-E12
ccatacttttgctgtataaaaacaaaagattcacaacctcacaaaaaaaaaactacaaaaacaaaaaaaacaacaacatcccttccacaaaaaatccaaactac

SEQ ID NO: 10316 - DNA, 356 bp, Zea mays
  unsure (1)..(356): unsure at all n locations; Clone ID: LIB3156-014-Q1-K1-E2
caaccacanttcattctaatccaatctcttcaaatggaaccttccaagttcccccccgccagtttacatatataccaggaacacttntttttccaataataccattttataactcaactgctgttgatccatacatccaactcatgttggtgatgaatccatttctttctccaatcacctcaaacctctcagcatacacctatcaccttaagtcatacaacttatatccagaacttctacactatctctaaatacacctcatgaattaccaaccacttcaattattcatttacttcaagcttctatcacacatattcccttaccttatgtttttctactacataccaaaatctttt

SEQ ID NO: 10317 - DNA, 375 bp, Zea mays
  Clone ID: LIB3156-014-Q1-K1-E3
aaaaaaaggagaggaactacggtgagtttcggctgtgtctcgcggtgggtgctggtggcgagggcgattctaaatgaactgccatgtgtttattaccacgtgtgccagggcaaggccctgtatcattttgtgattcgaaacacaagcttgctgctgtagactcatctcatgcctggttgatcaccagatccctgctgtggttgttttttttttgtttttggtttggcttgttttgttttgcttgtttgtctgtttgggtgtgtgtttcaacaaaatgaagtagccgacgagcctaagctcccgacaggtctggataatgtatatgtatataactatattattagcaggttgcgacgaatgctgcgcttggtttgc

SEQ ID NO: 10318 - DNA, 260 bp, Zea mays
  Clone ID: LIB3156-014-Q1-K1-F11
ggaaaaaccgggccgacccacgcgttcgttaggtgaaggatgagtacttccgtcttttctccaacaagttctcggaacaccagcccgaccgttcttattaaacatggcacctaccacaaggactacaatgagccccctcctgcaccactctttaagccctatgagctaaagttcttatcctactaccattccatcattttttatttctttgcctctttactctaactctacatttccattctcaccttaattatcatttt

SEQ ID NO: 10319 - DNA, 131 bp, Zea mays
  Clone ID: LIB3156-014-Q1-K1-F4
cttcgtttctttcttcttctcggaaatttcagccattcatgtcgtcgggaagatgacaatggggtgatgcgacaaaatgctccagaatgtatcattcttttgctgtatgaaatgaaatgattcagaagctc

SEQ ID NO: 10320 - DNA, 205 bp, Zea mays
  Clone ID: LIB3156-014-Q1-K1-F7
cggacgcgtgggcaaaaggcttctagtgaacaggatattttcaattcctagtgagaacttgtgtaacagaggaatccaagtatttcatatcaaagttaaaaagtcttatcgagggttcgcggtatggatgtatcctgtttcaaatgatttcccctaatgtatgaatgaaaacggttaatggatgcccccagtactcattgctttt

SEQ ID NO: 10321 - DNA, 222 bp, Zea mays
  Clone ID: LIB3156-014-Q1-K1-G1
ggcattggtggatttgggagttgtcagatactcatatgatgttttttcaaatccaatacgggggtgtccatcgctggagccggctgggggggccttgtaaagattttgtacctgggaaccccaaaaaaattgccaagactttattaccaatcgtggtgccccatttggtccttaaaaaaaaaaaaaaacaaaataaataatataaaattataaaaatactta

SEQ ID NO: 10322 - DNA, 344 bp, Zea mays
  Clone ID: LIB3156-014-Q1-K1-G3
gcgcgaagctgcgttccatcgcggcggtccaggtcgccgcagagccggagccgtcggcggcagcgagctcctcggcgagcaggtcgtgcatccggaaaccgtcgctggtgcggaccagcggccggcgcgggcgcgtggcatggcgagcgcctctggcccgatgtttgggcgtggccctggcagccccagcgcgggccccggtggccacagcgagcgtgcacggcgtctcttcgagttcttggcgacatgatgcatcagaggcaattttctagccttaataatgatgatggatgactgatgtacctcgtgtcgcatcaacaatggcgaaccgcactggttattgt

SEQ ID NO: 10323 - DNA, 228 bp, Zea mays
  Clone ID: LIB3156-014-Q1-K1-G4
caccaaatatctattccttatacggaaggtatcttatacaccagtaccacccatttagacagcagacatcttttactatacaaacctacatactctcacacttattcactcggacacatcattcatactaaaacacctagtctatacactcgcctcactctccttttaaaaacaaaactatacacaccacaacttacgcttattatgtcacatccaaactcaacggtg

SEQ ID NO: 10324 - DNA, 450 bp, Zea mays
  Clone ID: LIB3156-014-Q1-K1-G6
gcaagatcgaggaagctgcaaaacctctaggatttgatgttcagaagaaaaattacaagttgaggctcgaaaaggtaaaggcagggaggaagggaaacctcaacgttgctactgagatactgcaagttgcgccctctctccacatggtagaagtccgaaaagcaaagggtgacactctggaatttcataagttctacaagaacctttccaagaccttgaaggacgtcgtctggaaatccgacgatcttcaaacgcaacatgcttcttagcagaacctcagagaggaggaatggcaaactattttgtgcaccatcctttcaagcaaactattctgcatgtaacggtgggtgcccaggaaattgcgctggtgctccaccatcgttgtatatgctgcgtcttgagttgcttgctgtagctgaagggaagttcattcagtacgttttgagtatg

SEQ ID NO: 10325 - DNA, 69 bp, Zea mays
  Clone ID: LIB3156-014-Q1-K1-G8
aaaaacccgaccgacccatacgaacttctattcctcaaatccaactaaccactctattcatcccacata

SEQ ID NO: 10326 - DNA, 311 bp, Zea mays
  Clone ID: LIB3156-014-Q1-K1-G9
tctatcgctgctgttcatgtcgccgcacagcccgagccgtcggcggggggcagcttctaggctactgtttcctattagcttttcgtgtacgagccggaggctcttgctcctgttggtcctcatgatccgttctccttggcgcatgctgttttttctgatgagctctagatggctaacgattgatgccgtgctcacttcatttatttctatctttattttattaatttgcgctcgtgatggtttagtctctctctcccttacattttcatttcacactgtatttttctgtttatttctcttcttatatttac

SEQ ID NO: 10327 - DNA, 467 bp, Zea mays
  Clone ID: LIB3156-014-Q1-K1-H10
ggaaacccgggccgaccgcacgcgtccggttcccagaaaagtatgttgctctgatattatgtgttccagcaattattcacccagggcgtcttatactggctgtgagcaagcacaatcctccaatttttgctctatactgggacaagaagcagcaattttctcttcagggaagaacagctctgtgggatgccattctacttttatgtcaccaaataaacgttgggtatggcggtgtggttagaggaatccatatcggttcgtctgccttgaatctcctgtcagttatagattcagattcagaaagctgaaagttagtttggtagtcttgaggggatgaattatgtcaagctagtttactggtgttaatgttgtaatttacactatcatgtttggaattgacatagctttatctagctgtaatatgccctgtggtaccttggatttgtgactatattaatatttgtctt

SEQ ID NO: 10328 - DNA, 118 bp, Zea mays
  Clone ID: LIB3156-014-Q1-K1-H12
atcttgatatgactgtccaatcttctatggttgaagagcacatcttctcccccgaccattttttctaaaaaaacttacctccctttcaatactgtatcttaaaacctaaatctaaaaa

SEQ ID NO: 10329 - DNA, 439 bp, Zea mays
  Clone ID: LIB3156-014-Q1-K1-H2
cggacgcgtgggttcggtggaggcaagttcactggcttcggcctcatctacgataacctcgagggtgccaagaagttcgagcccaaataccgcctcatcaggaatggtcttgctactaaggttgagaagtcccgcaagcaaatgaaagagcggaagaacagggccaagaagatccgtggtgtcaagaagaccaaggctggtgatgccaagaagaagtaaacagtcatttatatttctgtattactgtcctgaactctgggtggtcgtctagttgcaatgtcataattatggtcgtgttaggttttgttccgcactcagcagtaagtgaagttttgtaattcctggatgtgaacttacccggattggctgtagcatgttgtgagatgagaaggctattttgtcatgcagttgtgtcatttgcaagccaatccattttgtc

SEQ ID NO: 10330 - DNA, 414 bp, Zea mays
  Clone ID: LIB3156-014-Q1-K1-H4
gaccaatatgatggaatggtttactacggggtggttaataacattgctgacgaagaatctggccgcggaatataagtactctgtgccccagatcgcattctacaagggactgctagaagcaatagtccaggaagctggaaatgatgggagcataaccagtatcgacgccctcaatgtccggcttgataaccaggtcgcagtattagacggttcacaggacagccagtctcgccttcctagctccataaagaacttctcaatgagccagaaggagaaaactctcgatgagctgatacgggaccgctggttgtcgtacaccgcgacaggcaagatcggcctgagcaccaggtcatttcttgaccttcggagctggttccgtggcaacgatattccgtcttgtgttgtctgcaacca

SEQ ID NO: 10331 - DNA, 204 bp, Zea mays
  Clone ID: LIB3156-014-Q1-K1-H6
gcggcaaggatcttgttgtgactgtccagtctgctatgggggaggagcagatctgcgcgctgaaagatgttggccccaagtaacttacctgccttggaatactgtatctcaaaacctaaatcgaaaaaagaagtgtttcagggatggttacaaagcacatccatctggctggagctggcttttgttatggcaaacacaagtgca

SEQ ID NO: 10332 - DNA, 440 bp, Zea mays
  Clone ID: LIB3156-014-Q1-K1-H7
cagccttcatcaaccctcaggctggatttgctttccagcaacctctgatgcctggtatgaggcctggtggtccaatgccgaactttatgatgcctatggttcagcaaggacagcaaccacagcgtcctgctggtagacgtgctggtggaatgcagcagcccatgccaatgggtggtcagcaacaggtgttccctagaggtggtcgtggctatcgctatcctactggacgtggaatgcctgatcctggcatgcacagtgttggtgctgtgatgccaccttcatatgagatgggagggatgccaatgagagaagctgccccccaacctgttccaattggggcgctagccactgcacttgctaacgccccaccagatcagcagagacttatgcttggtgagaacctgtatcctcttgttgaacagctggaacgtgagcaggct

SEQ ID NO: 10333 - DNA, 328 bp, Zea mays
  Clone ID: LIB3156-014-Q1-K1-H8
ctttcaagagagcaactggacagaagccccagaggatcatattctacagggatggtgtcggggagggacagttctatcaagtattgttgtatgaacttgatgccatcagaaaggcctgtgcatccttggagcccaactaccagcctccagttacttttgtcgtggtgcagaaacgacatcacactaggctgtttgctaataaccacaacgatcagcgtacagttgatagaagcggaaacatactgcctggcaccgtggttgattcgaagatttgccatcctactgaatttgatttctacctgtgtagccatgctggcattcaaggaac

SEQ ID NO: 10334 - DNA, 433 bp, Zea mays
  Clone ID: LIB3156-015-Q1-K1-A1
cggacgcgtgggcgtggcggtagtgccggtggtggtcaaagttctctgggttatctcttgggaagcggtgagccccccaaaccagcagtggcaccagctgcaagtgctccacctgttgagaaaccatctgctgcaaagactgatgcggccaagcaggttgctgctggggttaccagccaaaccaataactaccacagggctgatggtcagaacactggcaacttccttacggaccgtccttcaaccaaggtccacgctgctcctggcggtggctcttccctgggctacctgttcggtggcaactgatgcccgtgctggtgcgctcaccaaagttatcctcccctgcctgctgcgtgctatgtctgaatcgtgaacaacacgttgttgtcaatttaatgtgtgtacccccgtgcaatgctttgtgcgcatgggt

SEQ ID NO: 10335 - DNA, 444 bp, Zea mays
  Clone ID: LIB3156-015-Q1-K1-A11
cggacgcgtggggtggtttggattgcaactaggatgtcagtgcatcagctcccccaatctgcatatgcttgaagtatattttctggtgtttgtccccatattcagtgtctgtagataagagacatgaaatgtcccaagtttcttttgatccatggtgaacctacttaatatctgagagatatactgggggaaaatggaggctgcggcaatccttgtgcagttgggccgtggaatacagcatatgcaagtgtttgattgtgcagcattctttattacttggtcgcaatatagatgggctgagccgaacagcaaggtattttgattctgcactgctcccgtgtacaaacttggttctcaataaggcaggcaggaatgcatctgccagtggaacagagcaacctgcacattatttatgtatgcctgttcattggagggcttgttcat

SEQ ID NO: 10336 - DNA, 156 bp, Zea mays
  Clone ID: LIB3156-015-Q1-K1-A2
agaccatggaacacgcgtccgccttcctttcgcgcgcgctcaccactccgttcccggcacgcgaggtcctaccgcggcgccgcccggctcgcgtgttcttcgacgtctctgcgcctgagcacaagccgtcgggcgcggaggcgttcaccaccaact

SEQ ID NO: 10337 - DNA, 421 bp, Zea mays
  Clone ID: LIB3156-015-Q1-K1-A3
ggcgaccacgcgtccgcggacgcgtgggcgccaacgcgccggcgcccttcttccctgcgcctcagcctgctaccgtgcctgcgccgccctgtgctccggtcctccgccctccgcatctgcctggcaccgtgctagtgccgccttcgcatccgtcctacgcctgggtctacggcctccgcggctccggcttgcgactataccctgcacggaccgccgccggccggtcgcccgttcggagccactgacccgagtttccgtacagcactccagggaccagagcctgttcgtccagagtaccaacagatctcgtcaagaggtctgaaggatgaggaagggactgcatcctcagatgcaatggatttcatatgtgacgcagagtggtatgctgatcaatatcatgatgaccaaagtgaaccatact

SEQ ID NO: 10338 - DNA, 340 bp, Zea mays
  Clone ID: LIB3156-015-Q1-K1-A5
gcgcgacgtcgcgctggaacctgcgtacctcttgagccgtcacctcacggttgtggtcgtgtgtggtggcacggggtttaccacgctctgtattctcaatcacgttaaccctgagaacgtcacgctgatctaccagtccgagaaggagatcgacatggcccggttttaggtggcacttaaaggggtcaccatcatggatggcgactcctaagacctctcgttcctcaccgactttttttaccgatacatatctcacagcatgatgttgtactggccttacccacagcgcgggatcaaggaagcctacagggtcctgagatttgatgggcttgcttttgtg

SEQ ID NO: 10339 - DNA, 179 bp, Zea mays
  Clone ID: LIB3156-015-Q1-K1-A7
cccactgctgctgcatttgggggtgtatggcattggcccattgaccgtcctggctgatttaatggttgcaatgggttaaggacctggttttttgttggttgtgccattaatttccaattccttcaaaacctttaaaaaggaaaggccactggacctgggttctttgggttttgaataat

SEQ ID NO: 10340 - DNA, 230 bp, Zea mays
  Clone ID: LIB3156-015-Q1-K1-A9
ctagaaacggttgtattatggctatcaccttgctcctggataaaaaatgtgcgaggagggggatttccttgaggccttgctgtaacgtgttgagcactggcacaaatcccgcctatggtggaaaagatgataagtgtatggtcttgtcttgatgcctactgtatcgccactggatacgaggcatattcttttgtataacatgagctaaaacaacatactgtgaagcatgg

SEQ ID NO: 10341 - DNA, 301 bp, Zea mays
  Clone ID: LIB3156-015-Q1-K1-B1
ccaagcgtccgatcctgaccatgcgcctataacaagtggacgtgttattggtggcttaaaatatattccaccattcataccccagtggagtgggacacttggcttaatttttcagcaagctggagctcgcgatgactaaaggaattcgggcatgaaggaggtctataacagccaattgactgccagtggacatgattatgatgacacactgttggctaaagttgaaagtatctacacagattctggagaccatagcactacaaagcttgttttgaacattgagcaaggtctttcctgttct

SEQ ID NO: 10342 - DNA, 448 bp, Zea mays
  Clone ID: LIB3156-015-Q1-K1-B10
ccgaaccctcgccgactacaacatccagaaggagtcgacgctgcacctggtgctccgactcaggggaggcgccaagaagcgcatgaagaagacgtacaccaagcccaagaagatcaagcacaagcacaagaaggtgaagctcgccgtgctccagttctacaaggttgacgactccaccggcaaggtcacccgcctacgcaaggagtgccccaacgccgagtgctgctcgggggtcttcatggccaaccacttcgaccgccactactgcggtaagtgtggcctcacctacgtctacaaccagcaagcgtaagatgcccagtcttgctaggagataaccctctatgctttgatatgttttgttgcaatggtagtagtttcttggaacagaacaactgcatctataatggagacgcttaatttgtttttaattatatcatgtagttatggg

SEQ ID NO: 10343 - DNA, 434 bp, Zea mays
  Clone ID: LIB3156-015-Q1-K1-B11
cgccgatggctgcaacaccaacacccactgccgccgttttgctcgcgcgcccgctcatcgcactgtccagtgctttcacctcccctcatcgtgcgcgggtgccgagcggtccctcctccatctcggtgccgccactgaggagtcgatggtgccagtggcgcggcccgctccgatcgctgccccccgaaggatctccggccgagctgatggaagaggactccaagtttgtgccgttgaacgcggacgatcccatgtacggcccaccggcgctactgctcatcggatttgagaaaggcgaaactgtcacgattcaggccttcctgaaagagcttgaaggtgaattcctcaaggtgatccattgtacagaggagatgacaaagcaaaccttatgggatgccatgcacactgagcagcctgatttggaagctgtcaag

SEQ ID NO: 10344 - DNA, 393 bp, Zea mays
  unsure (1)..(393): unsure at all n locations; Clone ID: LIB3156-015-Q1-K1-B2
tcgggtgggcatggagccacaccgannttctctgctggcatgcatagcaccctacattggcgggtaaatgaatatttgggtcagtggtgcccagaggaggaggnaggggagganggaggagganagagtcatcnagaacacatagagcggtgatgnctggagcatncgggtagtgcacccagaagctaggagtgatcaaggcacatccctacgaagagacgcagctcattcaatccaagcttgaaggtgctgtacgaagatctgctgatggaattcaatgtgaagggtgccgacacaaggaaattcatcgatgagaagttgaagaagaacaaacctgcagccgcctgaggaacatgctngcaggcaaagcttttgtaggtataactggtcttg

SEQ ID NO: 10345 - DNA, 403 bp, Zea mays
  unsure (1)..(403): unsure at all n locations; Clone ID: LIB3156-015-Q1-K1-B4
agaagattggccagtcatgccggtggagcacataggcttcatgctcatgccacatggattcttcaactgctcgcctgcggtcgacgtgcctcccagctcgtccgatgcggatgtcaaggaagccgagtcgcccaaggccatccagaatagcctcatatcgaagctgtgagctttgctgttctgccgaggaaaaaggatccgcgcgcggctgctctccctactatttttttatcgtattccgcgagtaaaaaggaaaactgctcgatgtccttttgtttgttgcttggtaataccgttctgtttgctataattgtttgatggttttctatgattatcgatcagcgggatgtgaagtactgtttacattgctcgcgttctaataaagtactgtttggactngctt

SEQ ID NO: 10346 - DNA, 263 bp, Zea mays
  Clone ID: LIB3156-015-Q1-K1-B6
gcctgcctgaacggaatgaaatggaggacaaatcgatgtccatcttatgtacgtaatcgaggttcttctcgactagtgtgtaccatactttttaatcatgctgctatgttcctacggtacaagagcagtgatgatttatgtaaaaacacgtgtggctatgctgatgactggcgtgaagggcttctagttgggttggttacgtgttttaagtccgggttcagtccgggttcggctttccgtgggatcaaattctatgtcgtggt

SEQ ID NO: 10347 - DNA, 414 bp, Zea mays
  Clone ID: LIB3156-015-Q1-K1-B7
ggctggggtaggctgaggacgacagtgatattgcagggttttgttgaggctttgagaatcttggagaggaaagaaacgccactaaggacagtctttcagattgaggagattcacagcatagtctcacaagcccttgcggaattaactcagtggaacattatgagctagttgccctgagatcgatagtgcaatcagaactcttttcagttcggctagctttgctccaatgtggtagacgatcatgcagtgctgggagacaggtcagcactaatgcaacagtttttttttttttgcgtaggttggaatactgcagacacggtgattataacataatacacatcattagaaaatttgtccgatacaaaatatcacaatttttttgcgaccgtttacaagattttttgtcactcggat

SEQ ID NO: 10348 - DNA, 406 bp, Zea mays
  Clone ID: LIB3156-015-Q1-K1-B9
ggaaaagaaggccgagctgcttcactcactgttacagtttcaatagatcccgttgtggggcggcgctccgctccgcagctctctctggctggccgccaggggcgctgtgccgcacatcgagtttagtgcactgcacagaggcacgcgtgggtggagtggatctaaacacctatgatggtgacagatcaaacctgatctgctggtcggaagcttaaaccgacaccatactttctctgactggaacgggatcttatggactgtgtgctaaagctagtggcgtgggggtgtcagatttgtgccgtagcaccatcagtctgtaataactgttcgaatcatgacagcatatgttatgtactagccctttacaatatgatcgccgactctctggtaaaaccgacccccttta

SEQ ID NO: 10349 - DNA, 445 bp, Zea mays
  Clone ID: LIB3156-015-Q1-K1-C1
aataaatcctggaattcaacagttgttacttctgatctatttatttagttgctcagtatggccggcgaaaaaaaaaaaaaaaataaaaaaaaaaaaaaaaaaaaaaataataaaaaaaaaaaaaaaaaaaaaaaaatagggggggtgaaaaaaaagttccaatgttttaataagcgtgcatgttacttgggggggggcctttttaggggacccaagttaatgtccccgggcttgcgaggtaaaagcttttttttggggacccccaattttattccaccggccgggtgttaaaaaccatgggcttgggaaaaccttggggtttcccaaataaacccctttcgatatcatccccttttttcaagggggctgtatatggaaatggcccccacccttttgccttccaaaaagttgccccgccttaatggtttagtgggccccccccctt

SEQ ID NO: 10350 - DNA, 430 bp, Zea mays
  Clone ID: LIB3156-015-Q1-K1-C10
atggcccaaaaagttaccagatctggctgggtggaacaccaaaccagagtacgctggcagaatcatttatggacaaagtgaagcttgatgacatcgagaaggttttggaacctctctttacctattggaatggcacacgccaggaaggcgaatcttttggaagcttcacaaaccgaacaggattcgacaaattgaaagaggtagtgaataagtgggcagagtcaccatcagccgcatgaagatttcgctttcgttggataaaatcccaggctcgcagcacaattttggccacgggattaattatatgacgaaggaaatccagataagccgagaaatggaaaaaggaagactcgggttgtgagttgctatgtttgttgggttgagtgatcgaattttttgtgtgtgctctcaggagacctctgtgaacttg

SEQ ID NO: 10351 - DNA, 271 bp, Zea mays
  Clone ID: LIB3156-015-Q1-K1-C11
gctgtataaaaaaatgccaactctttctctttcttacattagttacacgccacggggggggtaaattatatgcatgtgctacaaaattgattcaacaacctcaaagaacctaaaggcaaagaatatttaaaatttatatgccttctgtaccttatttgaagaaaagagcgtacaatactgaccatattaaagatgctcccctcttgcatattattgctgacaacatgaaggccggatctacataacttatttttgttcaaaaaatcaacat

SEQ ID NO: 10352 - DNA, 277 bp, Zea mays
  Clone ID: LIB3156-015-Q1-K1-C12
atcaaactacatgctaaccgacccatcttttcctcacaaaatcctacccgccacggggggagttctttatgtagatatagaaccaacctcactacactcacagaccacatgaacaccctatcctactataaaatacacgcttcatacagtgtatagggcacaccactcaccattggctgacctcaccattggacagaaaaaatagccaatcctttttttcatccaaaatgaaactgatctgatctcgatgccaaaaaataacatttacttagctctt

SEQ ID NO: 10353 - DNA, 212 bp, Zea mays
  Clone ID: LIB3156-015-Q1-K1-C4
ctcgtatatcgtatcagcagcgtggcctgtgtaattggatatacgtcatctgtacgagcgccatggcccttgaggagctggtgctttgtgttgttattagtcgtccgttgcagattttaaagacatcgggttcaggttgggcgcccctggccctgtttggtcggaaaacaggcgctctttcaaaatgagttatttctttgtaccgtatgatc

SEQ ID NO: 10354 - DNA, 406 bp, Zea mays
  Clone ID: LIB3156-015-Q1-K1-C5
ggttgctctagatccgttcatcctggtggttttgtgaggtcgaaagcggcgagcgaattagaagatgctggacaagctgtgggacgacgtggtggccgggcctcgcccggagacgggcctcgagaagctccgcaaggccaccaccgcccgcccgctcgtcatcaacaaagacgcggacggcggcagctacaagcgggcgcagtcgatgccgtcgaccccgacgacgccggtgacgccgtcgtcgtcgtcgtcgtcgacgacgccgcgcggcgccggcaacgtgtggcgcagcgtcttccacccggggagcaacctgtccaccaaaggcatgggcgccaacctttttgaccggccgcagcccaacttcctcaccgtctacgactggctctacagcgacgagaccagg

SEQ ID NO: 10355 - DNA, 446 bp, Zea mays
  unsure (1)..(446): unsure at all n locations; Clone ID: LIB3156-015-Q1-K1-C8
cggacgcgtgggtgaatcttttgccgacgatgcgccactgctaccctcaggcttccgtgtcattccactggatgcaaagacggatccaccatcaggcacacgcacacttgaccttgcatctaccctcgaggttggatctggtgggacaacgcgtgcttcgagtgacgcctccagcacctgcaacacaagatcagtgctgaccattgctttccagttctcatatgaaaatcacctacgagagagcgtcgcagccatggccaggcaatacgtcaggaccgtggtggcatcggtgcagagggtagccatggcaatagctccttcgcgcattggtggacagcttgaaatgaagcaaactccaggatctcctgaggcacacacgctggcaaggtggatcggcaggagctacaggttccacactggagccgaacttctncgcacggacaccc

SEQ ID NO: 10356 - DNA, 215 bp, Zea mays
  Clone ID: LIB3156-015-Q1-K1-C9
ataaaacaaaataaatttacaaaggatcttattaataaaaaaaaataaaaaaaaaaaaagggacttcttattaaagctgatagtaaaaccaactttaactactcggaacacatatacactccctatttctttaaaatagcttattcatccccaaacaacatgggcgtgccgctttcggaactttttgaccattcaagccttacacgcccttttat

SEQ ID NO: 10357 - DNA, 308 bp, Zea mays
  Clone ID: LIB3156-015-Q1-K1-D11
gccgagcgacgcgcccaagctggttttgttgttttttgcatgtatttcaaagctcatcgggttgaagggggtgggggggtttaattggaacacaaagtggcgcactaatggaccccgttgcgtcaaacaattgttgcttattcaaagacagacagtccagttggttcgaaaagaaagacatcatttattgttgaaaaaggaatacctgcatgtaccactgctcagaaattggacaaacttgggatgcttggaagtgatacatctgagcttgtttctttcaattgctttattccacaaaaaaatatttt

SEQ ID NO: 10358 - DNA, 408 bp, Zea mays
  Clone ID: LIB3156-015-Q1-K1-D2
ggaccgtcttgtagcagagaaaagagaaaagccagaatcaatgaatgcatttgctcttatttcgaggtcacagggcttcaaccttggaaatttgtttgagaaggagatgatgggaatggtaaagagggaaacatctttcacgtctcaatgtacagcacaggagatcatgtcaaaaatagaggatgcatgtgggccacttggtttcaacgtgcggaaacaaaattacaagatgaaattgaaaggtgacaaatccggaagaaaaggccacttatctgttgcaactgaggtttttgaggttgctccttcacttcacatggttgagcttcgtaaaaccggaggagacacattggaattccacaatttctacaagaatttctcatcagagctgaaagatatcgtgtggaaagc

SEQ ID NO: 10359 - DNA, 287 bp, Zea mays
  Clone ID: LIB3156-015-Q1-K1-D3
ccaagattctgtcctccccctccctccccccatgttgtaggctggtagtggtcaaattagttggccctgggtccatttggactgatgtattgtttactgctattgaagtcattcgttctcgttttgctcttgcagtggatcgctatagccttgtgttttcaatcttttagggcctgtttgggaatgcagtttcaaaatactgtaattttgagataccatagtttataattgtacatgacataaatactacggtattgctttaccacaataaaactatagtattgctc

SEQ ID NO: 10360 - DNA, 439 bp, Zea mays
  Clone ID: LIB3156-015-Q1-K1-D4
gggaacgccggcggcgggacctacgcgaaggacaagctgggcaacgacatcacggtggaggcgtggctcaacacgcacggtcccaacgaccgcacgctcgcgcaggggctcaagggtgaccccacgtacctggtggtggagcaggacaagacgctggccacctacgggatcaacgccgtgtgcactcacctcggctgcgtcgtgccgtggaacggcgccgagaacaagttcatctgcccatgccacggatcccagtacaacaaccagggcaaggtggtccgtggaccggcgcctctgtcgctggccctggttcacgccgacgtctacgacgagaaggtcctcttcgtcccgtgggtggagaccgacttcatgaccggcgaagacccgtggtggaaggcatgatgatgatccgaaaccagcggtgctcagtgctcacaca

SEQ ID NO: 10361 - DNA, 406 bp, Zea mays
  Clone ID: LIB3156-015-Q1-K1-D5
gtgttcgtgaaggtgatgatccacagccacggcctgccagtgacttgcactgatagcgaggcaccactttacggaaaacagaacaaatccggtgatctgagacaaaggtggtagtgaagtccattggtggcagagctacttcgtgcacggagatctcttttgcattttctggatccagggatcgacttcgtactcacagtttacttcacacagaaagcctatgtaaccatcctgtgataacatctactttctttttgatccaaccaattggttattcaccttgcgtgaattattttgccctaatgtaatcttagtgcatcttgtttggattggtcactcttaacttgcaacatgggaattacctaaatatgtgctggctagagggtcacttgtagagatgtcaatg

SEQ ID NO: 10362 - DNA, 437 bp, Zea mays
  Clone ID: LIB3156-015-Q1-K1-D6
ctggtcagtccttcagcgaagcgttgaagagttcgaggaagcctccgttgcagtacgatgcctccgaatctgcagacggtggcccaggtggtaagggcgcaaagaagaaaacgaagaaaggaaagcagattgacccttctcttcttggcttcaaggtccacagtaaccggatcatgatgggcgagattgttcgagatgattagcacgcatgagtgtacatacccggtaggagttggccttagaatcatgattggcttcaagctctacagtaaaccctaaactctgtacatgccagaaattttgtgccatggcttcacttctgcttagatcttctcttagcctctgttagttatagacttgcccgatttctcatgtttacagaagtgtcatttgtacagaacagccaagatcatcatgtatttagtggcaaaattttg

SEQ ID NO: 10363 - DNA, 300 bp, Zea mays
  Clone ID: LIB3156-015-Q1-K1-D8
ctatagcatccttgctccaaaccctggtcactcttatgcaacccgcccatatcgggggaggggcgccctatgacttactttcccaacgcccgtattttcaactattctttaaggagttccccatccaccccggtgcccccagtatcacattctccctccacaacttttacaacatgtgcgtccacaccgctaatcttgattgcttcgcactagccaacaaaaaacttcttttttcgtgcgcgagcacttatggcacacacaaaatgctttactactacgagatccagaacaaaacgtaca

SEQ ID NO: 10364 - DNA, 174 bp, Zea mays
  Clone ID: LIB3156-015-Q1-K1-D9
cccagtctttggtattatcatgctcacatgtcgaaccatcaccctcgaacctagggctgggattgtatgatccacagctattgcctcctcacaggaccctccgtgcaacatttattagctattccaaaagacacacacaccatagcttccttagcatgtcatacatcatttttg

SEQ ID NO: 10365 - DNA, 392 bp, Zea mays
  Clone ID: LIB3156-015-Q1-K1-E1
gaaggccgcaatggggctgacaaggagagcaacattgaccggggatccgttaagagcatgagcttgaaccttggagagggtgagatcacaaaagctttcaaccgccgggactcaaagctagaaaagccatcgccgccaactccaagaccggcccgtccaacttccaggcattcccctttgacgccctctgctagagtggcaccgatacctgcgaggagaaaatttgtcacgcccaagaacgggctttcacaggtggacgatgacgcgaggagcgtgctcagtgtgcagtctgagcggccaagaaggcacagtatagccacctcgactgtgcgggacgacgagagcctcacgagctccccgtcgctcccaagctacatggttcccacagaatc

SEQ ID NO: 10366 - DNA, 353 bp, Zea mays
  Clone ID: LIB3156-015-Q1-K1-E10
ggccagaccgacgcgtcacgcctccctttcgttctaataaaacatttttttaggtataaatttcctcttggtgaggggggggctctattaataaactggcctacacacattatctgaaataaaaaaaaaaatattgtctgtcctcctaatgaagaaccaaactttgttatgctccatacaagccactgatttgaaagactgggataattaatagtaataacccgcgcaaaaattgatggtttttttctattaacctaatcctgtgattagcgggaaaacaggccccttaatcaaacttcagtttctactggtcaagctattactttggggcaaaccagagatttaacattact

SEQ ID NO: 10367 - DNA, 445 bp, Zea mays
  Clone ID: LIB3156-015-Q1-K1-E12
gtttgtattcgttgtgcgccgcgaataaactgcgatccatttctgagcttcgatgaatcgacggtcaagcttgggcgaccaaatgacccagttcttcgagttctacaaaattgaagaccctgagcatctgtttggtgaaggtcacatggcaaccatacaacgcacctgagttggatgggatgatctttagctcagtatgaaacatcgacgaggaaatcaataggatgcaatgtcctatgatatgtttctagtgtgttgagtggcacctaccgcacagggttgagaagcagtttggtaggaaccagatatggctagttgaagatattccaacttctatagagctgcacacggtcttctaggggcaaaggtgtgggaaatgagagacgaaaggatggagggaagttacctccaatgtgtttcgaaggccctattggtccagattttt

SEQ ID NO: 10368 - DNA, 399 bp, Zea mays
  Clone ID: LIB3156-015-Q1-K1-E2
caggcttctgtgagggagataaagtgggacgcttttaggaagtactcggaggatcgtctggaagctgagcagcagcgtgctgaggagctggaactacaagtagcagctcttaaacaacagctccaagaagctgagatccattataagcaaaaggaagaacaagtttctctaagggaggttcaatgggaagcggatcaaaaccattccctggatgagcttaacgctcagcgtcagtatgccacggacttggagaaacaaatcgaagatctgacacagaagttaacatcagctgatgcacactacaagcagaaggtgacagaagagagggacaaacttgccgaggtcaccaaagagttgagcgagttgaaacaaaaagtaagcgagagtgttgaattggag

SEQ ID NO: 10369 - DNA, 442 bp, Zea mays
  Clone ID: LIB3156-015-Q1-K1-E3
gacaacctcctcgagaacaagaccgccttcaccaccaagaaggactacgggcgggaagagagggaggcgcagtgggccaccgcgcagaggacgctgcacgggctccagccgccggaggcttcctccaacacgctgttcaacgacaagagcagctaccgcgagctgtccgagatcgccgagcaggccaagagacgagctgagatcgcgaggctgagggagctcaacaccctcaagggccacgtggagtcggtggtcaagctcaagggcctggacatcgacaccatccagcagaactacacggtgtgagagcccctctgctgcgatgtcgacgacaacacctttgctgcccgacgggagccatctgattacagataaaaattttcctagcttgtaagctctctataccaccagatactgccatatgatggtatgggtgggtacc

SEQ ID NO: 10370 - DNA, 59 bp, Zea mays
  Clone ID: LIB3156-015-Q1-K1-E4
gtcgcgatccgtcgccacctcggtgactggtgtgtgtagcaaggtcccaagtcatactc

SEQ ID NO: 10371 - DNA, 140 bp, Zea mays
  Clone ID: LIB3156-015-Q1-K1-E5
gtttgttacggcgaggatatctagtctcactctatcgttctgagctcatcacatagagtgagatctattccgcgggacgcctaaaagacttatctactcgtcctatgtctaatacagcatcaacaacaatggcatctaca

SEQ ID NO: 10372 - DNA, 422 bp, Zea mays
  Clone ID: LIB3156-015-Q1-K1-E6
tgaagaacaatgccattgtctgcaacattggccactttgacaatgaaattgatatgctcggccttgagacctaccctggcgtcaagcgcatcaccatcaagccccagactgaccgctgggtgttccccgagaccaacactggcatcattgtccttgctgagggtcgcctgatgaaccttgggtgtgctactggccatcctagctttgtcatgtcctgctcattcactaaccaggtcattgcccaacttgaactgtggaaggagaagagctctggcaagtatgagaagaaggtgtatgtgctccccaagcaccttgatgagaaggttgctgctctccacttgggcaagcttggtgccaagctgaccaagctcaccaagtcttatgccgactacatcagcgtgccgatcgagggttcctacaag

SEQ ID NO: 10373 - DNA, 85 bp, Zea mays
  Clone ID: LIB3156-015-Q1-K1-E7
gatagactatgcaaaacttaaattattttcaccttgacaaactaatactagggtggtctttatacaaagacaacataaaacacat

SEQ ID NO: 10374 - DNA, 316 bp, Zea mays
  Clone ID: LIB3156-015-Q1-K1-E9
cccactctttcgattcaattcataattacttacacgaaaaccacaacttgttcagagggagcgcgcaaactgagatgctaaacggccgttagcctttcttctgatatcaaacttcctatgttggctgtgtacatgcttatgaaccaaactatgttaaaaagcaagcttgtttttgatacgatactgtagtttatttatcataattagagcgcctgagagtgtcttggtcttcttttaaagaacatgccttcacaacatgagttggagaaaatattttctctcgctagacagttttttgatatatatatgtgggacg

SEQ ID NO: 10375 - DNA, 434 bp, Zea mays
  Clone ID: LIB3156-015-Q1-K1-F1
ggagggtccgtgttcgtggaggtaacgtgaagtggagggctcttcgccttgatactggtaactactcatggggaagtgaagctgttacccgcaagacccgtatcctcgacgtggtctacaatgcatcaaacaatgagcttgtgaggacacaaacccttgtgaagagtgccattgtgcaagttgatgctgccccattcaagcagtggtacctcactcactatggagttgacattggtaggaagaagaaaacccctgctgcaaagaaggataatgctgagggacaagaggttgaggcagcagctgaggaaacgaataagagcaaccatgtcacgaggaagcttgagaagcgcaaggagggacgtacccttgacccacacattgaggagcaatttggcagtggacggttgctggcatgcatttctttccgccctgga

SEQ ID NO: 10376 - DNA, 451 bp, Zea mays
  Clone ID: LIB3156-015-Q1-K1-F10
cccaacgaagtgcgagcgacccacgtccacacgacacgaaccaccaccaaccagcagccgcaccacgcacccagcgcaaagcgatggcgtcgctcaccatgatggcgtccttcgccgccgtggcggtggccgcgccctcgcgccgcggcaccttcgccgtggtcaggtccgccaaggtcgaccgctgccaggagcccgccacgctggcggcggccgaggccaggcccgccgccgacggacgccgcgccgtcatgctcgcggctgctgctgcggccgtggcagccatcggcggcgccggcgccgccatggcgggccccaagaacgggacccccgaggcgaagaagaagtacgcggccatctgcgtcaccatgcccaccgccaaggtctgccacaactgagcacgcccgcgttgcagctgcagggccggggggtggtatataattaatgtacg

SEQ ID NO: 10377 - DNA, 420 bp, Zea mays
  Clone ID: LIB3156-015-Q1-K1-F11
gttggcttctcctccccctccggttcgggttcgggttcgtgaggttctccggggttcggtttcgtgggtgagcggatcgagatggcggcgtctgatgttgagtaccgctgcttcgtcggcggcctcgcctgggccacggacgaccactccctccacaacgccttcagcacctacggcgaggtcctcgagtccaagattatcctcgatcgggagacgcagaggtcccgcggcttcggcttcgtcaccttctccacggaggaggcgatgcggaacgccatcgagggcatgaacggcaaggagctggacggccgcaacatcaccgtcaacgaggcccagtcccgcggcggccgtggaggcggcggcggcggctacggtggtggccgtggaggcggcggctaccgcggtggcgggcgccgtgat

SEQ ID NO: 10378 - DNA, 443 bp, Zea mays
  Clone ID: LIB3156-015-Q1-K1-F12
cggacgcgtgggtttgcatagtaagttttgcctaccatgtccctgcgtcctggagatgtcaagtcgtcaacggagatttgatctgacaaatgcttcctgcacttggcgccaacatttgtttttttttgtggctgcaactgtgaacccatttaacttacatcagattggcggtggcgatcttcctgatgacactgtattgacctgctcacgtggcttcgacaacgcactggagtttctatcaacatgcaagattgcaaatctgactattaaagcagaactcggatgctgcttgctgcatcgaggcggtagattgaccatccaggagtgtctgctgcagtgcgagcaaaaccctttggaccacctgtccttcccaataatcagcacagccatagagtacgatccattcccatccctcaaggagcaagggcacggagtaacggtcg

SEQ ID NO: 10379 - DNA, 379 bp, Zea mays
  Clone ID: LIB3156-015-Q1-K1-F2
ggctgccctggggagataccccggcatggcagctggccctgggatggcggagccggtggtcaccgggcccgaggacgccctggggctggacctgcagctcagccttgcgcccgccggcttgtgacttggctggtcccgtcgtcgatggagatcgcgcgcgcgagctgtgccctgccacgcaccgtcgccttggtaaaagagaattgatcacctactagcttgctactactaaaaagtttgtactaagatcgatcgttgctggctagataattagcactagtaattaagtttagttgctgggaatgggatttggatagctgcatgcatgtaagccacctgtaagattccggttctagctaattgatgtgcatgatgatcg

SEQ ID NO: 10380 - DNA, 385 bp, Zea mays
  Clone ID: LIB3156-015-Q1-K1-F3
caccggaccagcagcggctgatcttcgccggcaagcagctggaggatggtcgcaccttggctgactacaacatccagaaggagagcaccctccacctggtgctccgcctcaggggtggtatgcagatttttgtgaagacattgactggcaagaccatcaccttggaggtggagtcgtatgacacaatcgataatgtcaaagccaagatccaggacaaggagggcattccaccggaccagcagcgcctgatctttgctggcaagcagctggaggatggccgtaccctcgtcgactacaacattcagaaagagagcaccctccacctggtgctccgcttgcgaggtggtctgcagatctttgtgaagaccttgactggcaagaccat

SEQ ID NO: 10381 - DNA, 417 bp, Zea mays
  Clone ID: LIB3156-015-Q1-K1-F4
gtttttgaatatgggttcaggctatgctaattgcagcagaggccaagcgagaggaggaaaaagcaaagggagtgagtgctgatgaggcagctgataatcaagatattgtgctgtttgatgacaatgaagaggacgaggaagaggaaagcgaggaggaagaaggcaacgcccaagagtctcagggaaggggaagaggaagggggatgatgtggccgcctcaaatgccgatgatgcgtggggcaatgttggcagggcgtggcttccctcccaacatgatgggtgatggctttggttttggcggcggtttcggcatgcctgatccatttggcatgccacgcggcttcccaccattcgttggcccaaggttccctggtgactttgctagaggcccgatgccagggatgggttttcctggca

SEQ ID NO: 10382 - DNA, 424 bp, Zea mays
  Clone ID: LIB3156-015-Q1-K1-F5
cggagaccatggcggaccagctcaccgacgaccagatcgccgagttcaaggaggccttcagcctcttcgacaaggacggcgacggttgcatcacaaccaaggagctcggaactgtcatgcgatcactgggtcagaacccaaccgaggctgagctccaggacatgatcaacgaggtcgatgcggacggcaacggcaccatcgacttcccggagttcctcaacctcatggcccgcaagatgaaggacaccgactccgaggaggagctcaaggaggcgttcagggtgttcgacaaggaccagaacggcttcatctctgcggcggagctccgccacgtgatgaccaacctcggcgagaagctgaccgacgaggaggtcgatgagatgatccgcgaggccgacgtcgatggcgatggccagatcaacta

SEQ ID NO: 10383 - DNA, 384 bp, Zea mays
  Clone ID: LIB3156-015-Q1-K1-F6
gcctgggccaccagcaacgagtcgctggtgaatgccttcgcctcctacggggagatcctcgactccaaggtcatcaccgaccgggagacggggaggtcccgcggcttcggcttcgttaccttctcctgcgagaactccatgctcgacgctatctagaacatgaacggcatggagctcgacggccgtaacatcaccgctaaccatgcccagtcccgttgcggcggctgtggcggcggtggctactgcggccgtcgcggcggcggctgcggatatggtggcgggcgccgtgacggcggatatggcggcggtggctgctactgcggtctgcgcgacagtggccgcggcggctacggaggcggtggccgctacagctgtcggcgcgag

SEQ ID NO: 10384 - DNA, 345 bp, Zea mays
  Clone ID: LIB3156-015-Q1-K1-F7
gggaaattcaggagatccgtacaccaggaggcaaccaaaagtggaagaacaagggcaagaaaacactgaagagggcgaaggataggagaaaatgagactggtgcgcccagctttgtgctccagttgtgagggaaccaaggaacgccttcaagtcgctctagtgcttttctctcaactttgcagtatagattctggttccagtgtagtgttgtggacttcatgatgaattgatttgtatttctataaattttataatattgctgtaacagcggaattcagaaatatgagttggtagactctttcaagttagctagcttcatatatgggagaagcactgtctcagct

SEQ ID NO: 10385 - DNA, 235 bp, Zea mays
  Clone ID: LIB3156-015-Q1-K1-F9
gccacgcgtccgcccatgcgttctcccactctttcggatcgaaacctttgattagaatggtattcacttcgccgccaatgtactaaataagcttcatggtaaatacatgtatgtctacctttacatttcggatgccaacactggctctcgagagaacattgatatagatcttgtctactaaaacagaacacgcatttatttgtgtacagaatctatctactttcatttctataag

SEQ ID NO: 10386 - DNA, 435 bp, Zea mays
  Clone ID: LIB3156-015-Q1-K1-G1
ccgtcttccaagctgtggtgtcatccctgcgttctgacccaagatgtatctccagtattacatcaacgagaagggtgacaaggtctacaccaccaagaaggagtcgcctcttggggtgccgacgcagtctgctcacccagctcgcttctcaccagatgacaagtactctcgccagcggtacctgttgaagaagagatttggacttctgccaacgcagaagccagcactgaagtactgaagcttcaactttccaaccatggatgtgcagtttgtgtcactgcttgatgcttgttggttggaatgtagaataggtatctgaggaaagatatcaaacactgctaggcactactatgacatctcaccgcattcaggcactatatgtaatgctatgtgattgacaggtcttgttcttattatgtacttggtgtgtgggcc

SEQ ID NO: 10387 - DNA, 450 bp, Zea mays
  Clone ID: LIB3156-015-Q1-K1-G10
cggacgcgtgggcgccgtcgccgcctccggcatctgccccagcgcggccgccgtcgtagccaccatgggtcgcgtgcgcgccaagaccgcgaagaagaccttcacgcatgcgatcgagaagtactactcccgcatgaccgctctcttccacaccaacaagaaggtgctcgaggaggtctagatcctgccctggaagcgccttcgcaacaaggtggctggcttcagttctcacctgatgcgccggattcagctcggtccattccgtggcattttgctcactctgctagaggaggagcgcgagctccgcatggacttctatccggagaagatcacgctcgatgtcctagagatccgcgttgacaaggagaccatggagatgctcgctgacctcagcatggccgacctgcccggcgttgagcgccatgcttgtgtctccaacgcccgcggcta

SEQ ID NO: 10388 - DNA, 469 bp, Zea mays
  Clone ID: LIB3156-015-Q1-K1-G11
aagggccgacccaggcgacccgaacaaagcaccattaccgccgtcaggtgcattaggaaagcaagcagtggcactgaggatatgaggagatgcagcagcctttatcggttgcaagtttattggagcacaagatactctttacgatcacattggcaggcactacttcaaacgctgctacatccaagggtcagtagatttcatattcggaaatgggctttccctctataaacactgccacttgcatgccgtaaccaacagctatggagccttgacagcccagaaaagggaaagcatgcttgaggaaacaggcttcttcttcgttaaatgcaaggtcacggggtcgggcgccctctacctcagtcgggcttggggcgttttctctagggtggtctttgtttatacttacatggacaagatcatcacccctataggatggtatgattggggagacaaaaatagagaaatgact

SEQ ID NO: 10389 - DNA, 381 bp, Zea mays
  Clone ID: LIB3156-015-Q1-K1-G3
gatcatcatgccctagagttgagggataatgagctccttgtgtcagagctgcaaaacacgcttgatcaaaaatcaaaacagttgggtgaaactgaaattaaacttagtgccatgatggatgaggttaattctctgaagaaagaacttgaacaaacccggggccttcttgatgaatctcagatgaattgtgcgcaccttgaaaactgtttacatgaagcaagagaagaggcccgaacaaacaaatgttcagctgacagaagggctgttgagtatgatgctctgcggtcgtctgctttgaggatacatggtttgttcgaaaggctaaataactgcatcactgcaccaggtgtgactggctttgcagagtcactgcattttttg

SEQ ID NO: 10390 - DNA, 423 bp, Zea mays
  Clone ID: LIB3156-015-Q1-K1-G5
gatgacagtaattttcccataagttattttcatgacggcacattgttacaagttaggaatctgtttttacctgttcatttgaacatactttgatgtaagttgtgctttgtcttattctgattccatacattgtgtgcagatctaggattgcagtttggcagataggcctaacattacaatatggtgttcttgacagaatggacagcatagcgtctgtatttcttcaatgttatggaatatgaatggtgtctggcaaagatcatattatttgcggtagcctgtgctttgttacgtgtgcaagccaccgctgcggcgtctggtggaacctctttactgaactagtagtgctagttcctaaatgtcaaaatgtcatttctgactatgttatagttgctttctatttgagtgccagattgtactctt

SEQ ID NO: 10391 - DNA, 239 bp, Zea mays
  Clone ID: LIB3156-015-Q1-K1-G6
ccgttccaacggcaccgggccgggttaccgaagggggaggatgttgtcgtcttccttgccggggggcacccgcctggatctggatgggaaccccattgcttccctcaccatctgcattatcggcgccggcgggttcattggctcccacctctgcgagaagcttatgggcgagacacaccacaccgttctctctgttgacgcctactgtgacaaagatacccaccttgtggaacccccgc

SEQ ID NO: 10392 - DNA, 154 bp, Zea mays
  Clone ID: LIB3156-015-Q1-K1-G7
gttctgtactgctatctgaagaccgcgcttctaagatagcggacattaacgtttggcgcggagtgatttctcaagggcaaacgaccaccaattgttaccaacaagcgttgttcgcttgccttcttgccggggatgtgtaccacttctgtgcttt

SEQ ID NO: 10393 - DNA, 218 bp, Zea mays
  Clone ID: LIB3156-015-Q1-K1-G8
gtcatacataaccatggcgcttgcccacctctccttaccccttctctgggtagtcgggggtggccgttttaaccgtcgccgacgacggcctcactgacatcgatgtttacccgctcgagaccttcaccgtggcgatcaccacggccggcggcttgatgcattccccgctatgcgccaactctttggtcgggagccagcacatagttctcgactatatc

SEQ ID NO: 10394 - DNA, 445 bp, Zea mays
  unsure (1)..(445): unsure at all n locations; Clone ID: LIB3156-015-Q1-K1-H1
gcccgggatgatcagcatcaacctcgacctgaagaagggcggcaacaggttcatcaagaccgccgcctacggccacttcggccgtgacgacgccgacttcacctgggaggtggtgaagcccctcaagttcgacaaggcatcggcttaaggttgggagtgtcactgtggacatgaggactaccttcctctggctctgctgttacctgcaagcattgctgctgctggatgtgtgtgtttgatcagtgactggctgctgctccatagaagatgaacggagagaaggatgatgaaaggctttggcaatcgccgctgcaactgcaacccatgccatgccggcttagtgattgggtataatttggcttggcagcagccagcattattatgtgctgatctgntatcttttactagtttggtcgtccgatatctttcttttttttttcccccc

SEQ ID NO: 10395 - DNA, 277 bp, Zea mays
  Clone ID: LIB3156-015-Q1-K1-H10
cggacgcgtgggttcttctcccccatgtctggtctatttttgggcatgctaagatggacctgaccagcatgcagctagcacgatatggttgagctgagcttgagccactataaataaaaaaaaaaaaataattgaacatataagcaataaaagaatgggaaaatactgatgcttataggaaaacacatttaaaaagaacttgcctaaaatttaaggttatgaaaaattgggttgtacatctaaaaaataaaacctcagttacttctattctgattat

SEQ ID NO: 10396 - DNA, 131 bp, Zea mays
  Clone ID: LIB3156-015-Q1-K1-H11
tttattcttataataacatccccctttatttattatcctcgtttttttaggtgggtggttgttttttaaatttcacaacacataacacattcataaatccacaatatacatgaccttctgaaaaaaataca

SEQ ID NO: 10397 - DNA, 348 bp, Zea mays
  Clone ID: LIB3156-015-Q1-K1-H12
ccacgggggagcatactcatagttggcttgtcattattcgtggccacatttcattacggaatttgagttccaataaacggaatataccttcttcgatcaccttgaaggattgtatcattagaattttcatacagggctggccttttgagtctctgcctacgcacgcagatgttgtggttcttgtgtttgtagcctatatgtactccctgagtcgattatagaaatgtttatgccattttgagcttaactgaaaccaaataatgaattattactatcttgattcacacacacacaaaaaaggaagcccaatccaattccaggttcactctggtcctgttgacttgaggg

SEQ ID NO: 10398 - DNA, 439 bp, Zea mays
  Clone ID: LIB3156-015-Q1-K1-H2
gctaagtttaatgacctacgtcagttcctgcgtactaaaaaatattcgctagtttagtcgttccggcatattcaaaattattagctacagttgttcctgcatgcgtctaatgtccttcggtgaacttgtctgtcattatcatttaaaaacgtatctagatgcattatgggagatttttagtttcctttgttatatttgagaagttatatattgtatataccgagagatgcacctgtgtattgtttgttgtagcttcgaatgcgagacgtatggttgtagtcattttattgtagttagtttatatgatacattgttgtcaccgcatgaagattaactgctgtgccatatgaagacctcctgcctcatcacggtgtttgtatataagatcaactgcagtgcctacacggtggacggagtatttgtatgatgtgaaggtcac

SEQ ID NO: 10399 - DNA, 466 bp, Zea mays
  Clone ID: LIB3156-015-Q1-K1-H3
tttcctttggcttcaggataggcctaataagaaaacaaataattccaattcatatatgaacatttttgcctccttatttcttgaaaatgtggaattggaattcctttcctttggcttcaggataggcctaataagaaaacaaataattccaattcatatatgaacatttttgcctccttatttcttgaaaatgtggaattggaattccccgaggaattccgatctcatttcctttggcttcaggataggcctaataagaaaacaaataattccaattcatatatgaacatttttgcctccttatttcttgaaaatgtggaattggaattccccgaggaattccgatctcatttcctttggcttcaggataggcctaataagaaaacaaataattccaattcatatatgaacatttttgcctccttatttcttgaaaatgtggaattggaattccccgaggaattct

SEQ ID NO: 10400 - DNA, 417 bp, Zea mays
  Clone ID: LIB3156-015-Q1-K1-H4
ctcaagtatatctggagaacagagggccttcgtggacttttcaagggcaatggtaccaattgtgcaaggattgttccaaattctgccgtgaagttttttagctacgagcaggcgtcaaagggaattctgtgggcctaccgtcaacagactggtgaagaggatgctcagcttactccgctcttgcgccttggagctggagcatgtgctggtatcatagctatgtctgctacttacccgatggatatggttaggggaaggatcactgttcagacagacaaatctccctaccagtaccgtggtatgtttcatgcactgggtacagtctaccgtgaagaaggctttcgtgctctatacaaagggtggcttccatctgtaatcggagttgttccatatgttggtctcaacttcgctgtatat

SEQ ID NO: 10401 - DNA, 352 bp, Zea mays
  Clone ID: LIB3156-015-Q1-K1-H5
ggccatcctgggcgaggtatactacctcagctactccaaatcccgagatgccgctggtggtgctggctccagcattggcatgggcccttacaactaaaggagcttgatcgaggcacgcaggcagcccccgtgttttcaactctgcttcgtggtggaggaatgcagtgttctttttaacattagggacggtgtaattggttgttggatccgcggttttttttctctctttaggttcttgtatgaggttactcggttgggctgtatactgtttggattattgggctggattctggacatggtatacacgtattcgttgtccatacaataccttattaatttttgggtgttattt

SEQ ID NO: 10402 - DNA, 286 bp, Zea mays
  Clone ID: LIB3156-015-Q1-K1-H7
gggacgcctgggcgggactacccgcttgttctaagcatataaataagcggaggtgaggagacttactaagatatctggagtcacggcaagcgaacacagtgcattcctgctagagaatagggcgaccttgccggcctaattgtacactggtgaggagtacttctggactgaccccgactaagttgtccgtaaagggacgcctgagaaggttagaacctcttgcggcccgtaccctgttgcaccactaggcgccgacaacaagtcgggttgtttgggaatgcatccc

SEQ ID NO: 10403 - DNA, 428 bp, Zea mays
  unsure (1)..(428): unsure at all n locations; Clone ID: LIB3156-015-Q1-K1-H8
gccagcgggaacaggaagctggattctgcttaccatgcagccaaagagaaagaagagcattgccctattttcttgtttttctcagttaatggaagtggccaattctgtggcgtggctgagatgattggacctgtcgatttcgacagaagtgttgattactggcagcaggataagtggagtggccagttccctgtgaagtggcacataattaaagatgtaccgaacaaccttctgcggcacatcattcttgagaacaatgacagtaaacctgtcacaaatagcagggacacacaggaggtgaagctggaacagggcctccagatgctaacaatcttcaagaaccatgaggctgagacaacgatcgtggaagatttcgacttctatgagcagcgggagaaagccttgcangagaacagacgtcaacagca

SEQ ID NO: 10404 - DNA, 392 bp, Zea mays
  Clone ID: LIB3156-015-Q1-K1-H9
ccagtgtccgccgtcgtgcgctcgctacccctctccctcgaggcctttgccggcgaagagcgcccagtctcccaccaggatgaagtgcgatgctgcctacctgcttgctgacctcgctgggaactccagcccctctgccgaggacttgacagccattctggagtcagatggctgcgaagttgacactgaaaagatggaactacctctgtcccaactgagcaggcaggacattaccgatctcattggcagcggcacggagaagaatgcttcattcccatgctgcagtggcggtgcggctgtagcggcagctgcccctgatgctggcggagcttctgcagctgaggcgaaaaaagaagagaatgtggatgtgaatgcataaagtgatgacgaca

SEQ ID NO: 10405 - DNA, 362 bp, Zea mays
  Clone ID: LIB3156-016-Q1-K1-A1
gaaaagactgcgcggatgcctgctcctgctcgtgttacttctggcagacgtatcacgcaggcgtgctgaaactggcgtcgatctgggtccagactcggaggacggcagcaagaggaggtcggtggccaccgccatgttctgtgtggcgaaacaaggcgcggacgcagcggcgctgcacgcacgtctcaactggtcgtgcggtcaaggccgaacgaactgtgcgcccatccagcccggcgggccgcgctacatgcagaacgacctggatgcgctagcgtcctacgcctacaacgactactaccagaagaactcttgtaccggcggctgctgcggctttcacggcacagctacgaccaccacca

SEQ ID NO: 10406 - DNA, 382 bp, Zea mays
  Clone ID: LIB3156-016-Q1-K1-A10
ggcgaaaaaggctgaggtgaccaagtcccataaggcacagacgaagggagcggtccagatgggttccaagggccccaagttgggtggtggctgtggcaagcgctgaatgaacctaagtgttgttccttgaccttgcaattgctcctccatagcccaccttgttgcaccaacgccacttttgtagtacctcggttaattttgcattttctttcagagttgtttgtgggttttgagttccatctcaagagagttgagtctatttatctttatattgggtgaaatgttcatatgctttcctcagcttgtatgatggtttgctttgaaatataactctctcttgctaccacaaaggtatcatagccaaactctgcaattactcctt

SEQ ID NO: 10407 - DNA, 319 bp, Zea mays
  Clone ID: LIB3156-016-Q1-K1-A11
cgaatccggccgcccacgctacggacaaagtccagtcttacatcaagagcaccatgcggaaaccattcaggattggtagaatgatattgtgaagtctgctctttatgacataggatccgaccgatgtgatcgaactaaaacttactatatcatgcaaggttggttggacatcgagtctgggaagtgatgactcattcgccctgtctttcagatctctctatataaatatttaagaggctcacaaaaggcaaaggatataacgtgatgtcactctgtgtggtgtcacgcaggtgccccgaaagacccacataggtctgcc

SEQ ID NO: 10408 - DNA, 341 bp, Zea mays
  Clone ID: LIB3156-016-Q1-K1-A12
accggactggaaaacccggcccgacccacgcgtacgcgaggtacacggagaactgttgaatttctttcgtaacgcataataaattgatgagcaaggtggactactaactaaagatgtcagctcctaaccatatcattataaagtaaaggaatgccatatagctaactatttcgtccacaatttccatgaaaaacacaaatccctcatctgtacaacaatatactctattcctcacatgcctgcagatcagaagtgcattacctattacaagcttacctcaactaaatctaaacccatctgtgcttgacaagataaccatgctacctctaaaactggtgcaa

SEQ ID NO: 10409 - DNA, 301 bp, Zea mays
  unsure (1)..(301): unsure at all n locations; Clone ID: LIB3156-016-Q1-K1-A2
cggacgcgtgggttgaattactggtacctgtttcatgaatttatcttgttggaaaaacctgttatgtgtggtttggttggacgagaataactatactcgcttcttttatattgagttcgcatgccgtttgttgtcngcnaaaaaaaaaaaaaaaaaaaaaaaaaaaaaaaaaaaaaaaaaaaaaaaaaaaaaaaaaaaaaaaaaaaaaaaaaaaaaaaaaaaataaataaaaaaaaaaaaataaaaaaaataaaataaaaaaaattaaaattatttatataattaagggggggcccttttt

SEQ ID NO: 10410 - DNA, 371 bp, Zea mays
  Clone ID: LIB3156-016-Q1-K1-A3
ctttctccagagcaattagcagcttgctgaaagcacaatatgtgaagaagggagactacgtcactcttgttcagagcggagtgacttcaatctggagagaggaatccactcaccacatccaagtgaggaaagttcaggtctgatgtgccggtgggaattggtcgtctgagaaattttgatagcgccgcctgatgtgttatcatcattatatgtgtaattttactgttttaccaggagattgctacgtcgagttatatgttgtgtcgaattcacgtgtaggctctgaatcttgactgtgttcgttcattttcgcttgtttcacactgaagtgttataagctcaactttactgcttttgttttcttgtgaaac

SEQ ID NO: 10411 - DNA, 423 bp, Zea mays
  Clone ID: LIB3156-016-Q1-K1-A5
gccggattcggcaagggtggtggtcttggctgcggcgatggccttggcggtggaagtgggcatggcatgggtgccggattcggcaagggtggtggtcttggtggcggcggcggcggaggtggtggcggcggcggcggtgggtttggcaaaggatttggctttgggtttggcaaaggcagcgggttcggtggtggtggcggcggtgggggcggcggcggcatcggtgatcaccattgatacgtcagcatgcagcatacgtctcctatggttctatcacttacttttgtattcgttcatgcttcgtaccttgtcatgcctatgggtgatggtgacatccttcacagtagtattatgtacgtactccatgtaatgctcgctctctaaaagattcgagaaatataaatgacgtttaaacttcgtttg

SEQ ID NO: 10412 - DNA, 369 bp, Zea mays
  Clone ID: LIB3156-016-Q1-K1-A6
gtttgcaagcatggtcaaagaacctttttgttaaagaactgaaacctgagactgcgtgtgaacgtcaattaatgacgatgttgaggaaatcctataacaaataaagcccaccccaactcttgtgtttggatctcttctgggcctctcagcactttcctatgctttactggaatgggagatgactttgcaatacatagctgttttaagcgttgggctgactatctacttgcgattctctacatatgaagactccgaagatttggagaaagacctaaagctgtagctgtctccagtaagagtaggcgcacacgccttgtcatgggcagcttagaagatagagccaaacaaggtgggcctgccaacgtcttc

SEQ ID NO: 10413 - DNA, 201 bp, Zea mays
  Clone ID: LIB3156-016-Q1-K1-A7
tccgacccacgcgttcggctgcgtgttcccggagctgctcgttcgtttctgcgtcaagttcggcgaggccgggtggggaaggccgagtcgcatatcttcaaccagggtggactggactacctcggcaacccgagcctgatccacgcgcagagcatgctcgccatctgggcctgccatgtcgagctcatggtcgccatcgat

SEQ ID NO: 10414 - DNA, 335 bp, Zea mays
  Clone ID: LIB3156-016-Q1-K1-A8
ggaagaaaaggttgaagagaaggaagagtctgatgaagatatgggtttcagcttgttcgatgaaaacaccactgccagtttacagtttctctcgcgaatggtctcacaatattcgctggtttccacaaaataagattgtcaatagctactacgtacttatgctattctgcatgtgatgtacgagtgtgcatcttcaagaatctttaagttgaatggtcccataataatattgataacaatgtaaattgtatgtcctgtacgtactttggtatcgcgacatctcagtgtgcatcttcaaggatcataagttgaatgttatcattaaggtcagtttg

SEQ ID NO: 10415 - DNA, 269 bp, Zea mays
  Clone ID: LIB3156-016-Q1-K1-A9
attcgagccacgaccacgcgtgcgatacgcgttgcctgacatcactatcaccttcctaagcctggccaacgacacgggggtgtccatttctctgacggcgaaacatctcatgaacctgcaatctcgtcatataagcaatgtgcgtctgatacatccatttcgtctcatgcagcaagggcccgttcgaaaatatgcttatccacttgattagacaattcaacaacaacatacgttctttccttgacaactgcatacacgtcctcatatat

SEQ ID NO: 10416 - DNA, 391 bp, Zea mays
  Clone ID: LIB3156-016-Q1-K1-B1
cggacgcgtgggcggacgcgtgggctggtttccatcggaggcctgaaccctgatgtgaacaagaagcttagtgctggcatcgcttctatcctggagtcaaagctgtctgttcccaagtcacgcttctacctcaagttctatgactcgaagcgctcggacttcggttggaacggctccaccttctagacttgaggtctgcagctgaaataaaagaaattcgtggaatcatggtacctaatgcccatggctattgcctattaaggacaatgtcataagatgtgtcttaatcggtgctgaactgagaaacagtaactgttgtcgtggaactggaagtggggtgctggcgtgtcagagtgcttgcttcctacctagcatagcatgcctgtgctat

SEQ ID NO: 10417 - DNA, 289 bp, Zea mays
  Clone ID: LIB3156-016-Q1-K1-B10
gggtgctacactcgagacagtcactcctattccttatgatgtggtcaacgatctgaagggcggttactagagagaatttttgtaccttcagcagttcaaacgagctggcaaacttatctgaatctttttgataattggctagttcttctgttctggtgttctataaaaaataaattacattaaatacaaaattcaaataaaatattatatgttttggatgaaataaataaaattaaaagatgactaaaaaacacaaatacttaaaaagggtcggcccttttaaaggacc

SEQ ID NO: 10418 - DNA, 365 bp, Zea mays
  Clone ID: LIB3156-016-Q1-K1-B11
gggattcgacccacgcgccacgcctacccgtccgtaatactctaccaatgaatctgatatagtctatggaaaccgaagtagctcctggaatgacggactattggtagagggcagactttgcattccagatgcttctcatgctcgctcatcttggaattgcaagcttcaataccaacgataatggatgcaacgctctcatcatcactacgatggctatcacaaatgcagagatcgctacacaccatccaagtttgtctacattcttatcgacgcattctgtaagcatcactcactattgcatcatgtgcgtcagaggcacagaaacagaagtgcatgccctttttaacgcagatgatgacgatagc

SEQ ID NO: 10419 - DNA, 438 bp, Zea mays
  Clone ID: LIB3156-016-Q1-K1-B12
ctccactatacgctatccattccttcatatttattattgatatccagggtctcgggacggtgttcacatgcttagatgctgataaagaatgctatgatgcaataaagattgctaagtttatggcattgatataacagatctacaatatatttatcagcaagaacatagtctcctgatgaaatcaaagggagggtgcatcatcattcctttcctgtttgtcttttccagccacgtaatgtccgattggagcacaagacattgaagcttttgaagtattggacctggcaataagttatagttaggccagtatgttccattctgattatagcactccagctttttgggctgtaccccagctggatcagctggacgtttagtattatactgaacttttcagtctccatagccttatatgcattggttctcttctaccacttg

SEQ ID NO: 10420 - DNA, 342 bp, Zea mays
  Clone ID: LIB3156-016-Q1-K1-B2
cagcattatcccaaaatccaggccaagttcgtgatgatgccctcttggatttctataacaagtggcagcatgaatacttggttgtaagcaagtggtttgctcttcaagctacttcagagattcctggaaatgttgcaaatgttcagaagctgctgtctcaccctgctttcgacctgaggaatcccaacaaggtgtactcactaatcgggggattctgtggctcacctgtgaacttccacgcgaaagatggttctgggtacaagttcttgggtgagatcgttttgcagcttgacaagataaaccctcaggtggcctcccgcatggtttcagcattttctcggt

SEQ ID NO: 10421 - DNA, 408 bp, Zea mays
  Clone ID: LIB3156-016-Q1-K1-B3
cactgccctgtcttacggtgaccttgtcaagagggtccttgggtgcttcggcccctcggaattttctgtcgccgtgaccatcttcggcgggcggggccaagctgggacatggggaaaggaacttggtgcggaggcttatgactgcaacaacatggtcgagcaggagctgcctggaggtgggatcctcatctaccagagcttctgtgctgctgaagacgccgttgctagctcgcccaaatccgttcttcgctgctttgatggcgagaatgcagcaccttttgcgaaggactgcaagctggctaatcttgtctgcttggaggaagttggatgctatcgaggagaaggatggagtgcttgatgagtaagacggggtttctggtgtcgatttgcttctgagttttttttttt

SEQ ID NO: 10422 - DNA, 338 bp, Zea mays
  Clone ID: LIB3156-016-Q1-K1-B4
caagtcagcacccgcgcgcggcaaggagttcacgcccatggcgagcaccaacatggcgtcggccacctcgcggttcatgctggccgcgggcgtgcccactgccagtagcggcagcggccgtgtcagcttcgcctcggcgcccaaccggcttggcaggaggcttgtggtccgggccgatgaggagtccccggcagagccggcgcccacggcggaaggggagggcgccgtggccaccaagcccaaggccgagaagccgccgtcgatcgggcccaagaggggcgccaaggtgaagatcctgatgcgggagttctactggtacaacgggatcggcaacgtcg

SEQ ID NO: 10423 - DNA, 425 bp, Zea mays
  Clone ID: LIB3156-016-Q1-K1-B5
cccaaatccacacctggcccggctgccccaaatgcgtcggcatcgcgccgtcgctgctgcgcaccgtcgatgactcccgccccttcgaacgccgccggcgacctcttcgctgccaacctcacgggcgcgctccttgcggttgcctcctccgccttcattggcgtcagcttcatcgtcaagaagaagggcctacgccgagccgccaccgccggcgcccgcgcaggtgttggaggctatgggtacctcttggagccactgtggtggattgtgatggttacgatgctgattggggagattgccaattttgtggcctacatgtttgcgccagctattcttgtcaccccttttggtgcgctcagcataattgtcagtgcttgtctagcccatttcacccttgatggagaaccttgaacgatgggtgtgtt

SEQ ID NO: 10424 - DNA, 398 bp, Zea mays
  Clone ID: LIB3156-016-Q1-K1-B7
agaagaaggacagctcttctcgccaatctgcttccgcaccagctccagttccagctcggcgagcgacgacgaggaagaggaggtgatcgatgagaacggcgagattgtcaagaggaagaagaagaagggccttaaggagaaggtaaaggagaagctggcggcccacaaggcccacgatgagggcgaccaccaccagacgcccgcgccgcccgtggtggtggacacgcatgctcaccaccaggagggagagcacttcccggcgccggcgccttccccgcacgtggagacgcaccaccccgtcgtcgtccacaagatcgaggacgacgacacgaagatttagaccccaccacatgcaccggaggaggagaagaaaggcctgctggacaagatcaaagaga

SEQ ID NO: 10425 - DNA, 348 bp, Zea mays
  Clone ID: LIB3156-016-Q1-K1-B8
gtcaagtacatggcctgctgcctcatttactttggtgatgcggcccccaaggatgggaatgcggctgtgtccaccatcaagaccaaacgcaccatccagttcgtggattggtgcccgactggcttcaagtgcggcatcaactaccagcctactagcgttgtgcctggtggcgacctggccaaagtgcaacgcgccgcgcgcatgatcttcaactacaccaacgttgtggaagtgttcttccgcatataccacaagttctacctcatgtacgccaagcgtgccttcgtacactgatacgtcagtgatggtatggaagaaggtgagttctcttttgcccgtgaggacctg

SEQ ID NO: 10426 - DNA, 357 bp, Zea mays
  Clone ID: LIB3156-016-Q1-K1-C1
ctatgaaggctctcggcacaggcatcctccgccgctccgcgccgcactggtccacagccgccgcttccttcttttccccacccttccgcccccgccgctgccgtcgcgcgcccgctcctgcagccgccgcgcgtaccccgcggtcccgcgcgagtgccaaggcccgggcgaagctcctggcggaggttgaggcccgggacccctggctcgcctccctctcgctgcttccgaccgacgacatccccagtgctgacgccaccaccaacgggtgggtgattggggtggatcctgacattggaggcgccatcgccgtcctctcgcctgacggctcgtctcaggtgtttgacaaccccgttc

SEQ ID NO: 10427 - DNA, 226 bp, Zea mays
  Clone ID: LIB3156-016-Q1-K1-C10
gaaaacccggcccgacccacgcgttcggtcccattaaggaggtcgagaccctatatttaaacttaacctaccttagcggtgggagcgagaactatagctgcgcgttaactctcaaacttaaccatgccataaagcaagacacagaggctgaattccttatggaccgtcgcgccaagatgtcgtatatctaggtgcacttgcgctacaactagctaaccagcgatgg

SEQ ID NO: 10428 - DNA, 356 bp, Zea mays
  unsure (1)..(356): unsure at all n locations; Clone ID: LIB3156-016-Q1-K1-C11
ccggncgacccggcggccggggcacaaaacngnggcnnacancncnantttaccgaggangggacnncggggggagggggangcnggagggagaaacgggccnggananacangnggacangaagggggaagggaaaaggangcgnnncncngnnggacggncaccaangcnnagggngcnggaaanggcancggaggaaangcggggaagagngcagagnggccagaagagcannnacagcccanccgaganggagccagggggngngccagcgnnacccacggggaccaaagggggaagaagcancnngggagaagnggagaacncacaaaaaaaccaccagngagccaacaca

SEQ ID NO: 10429 - DNA, 243 bp, Zea mays
  Clone ID: LIB3156-016-Q1-K1-C12
ggacgcgttgattgtggtgacccagtgcttttctttatactcataactatcataccatgtgattggttctgacgtcatagttgtatgtgaattcttaaacctactacttgattgaaggaatattgtaagtttgattgtattattcacctccacgcaaacatgttatatatcaaagacaacaaacaaatcaacatctacaaaaatgacagacacctttcttctcttttcctactaaagccctaa

SEQ ID NO: 10430 - DNA, 379 bp, Zea mays
  Clone ID: LIB3156-016-Q1-K1-C2
cggacgcgtgggcggacgcgtgggttcgccggcaaggccgtgaacgtgccgtcgtcgtccgccttcggcgaggcccgcgtgacgatgcgcaagacggcggcgaaggccaagcctgcggcggcgtccgggagcccgtggtacggccccgaccgcgtgctgtacctgggcccactgtccggcgagccaccgagctacctgacgggcgagttcccgggcgactacggctgggacaccgcggggctgtcggcggacccggagacgttcgccaagaaccgggagctggaggtgatccactcccgctgggccatgctgggcgcgctcggctgcgtcttccccgagctgctcgcccgcaacggcgtcaagttcggcgaggccgtgt

SEQ ID NO: 10431 - DNA, 308 bp, Zea mays
  Clone ID: LIB3156-016-Q1-K1-C3
aaagacaagataaaatttgcctcttttagcgtcagtatattaaggcctcagcactgcacagtgacgtgctgcgatggaggaattttttgagaatttgttttatttcttgtcgtgtccaaaatccacaaatctgtcaataatgataggcaggttcgactgacgtggctgacttggttggccaccggatgttttcttacaacgagtcatgaaccataccgtcccatcttttgttggaagattttactttggcaaataattttgtggcacgttatatgtaaagatggtacagttttagcttcattgtccac

SEQ ID NO: 10432 - DNA, 316 bp, Zea mays
  Clone ID: LIB3156-016-Q1-K1-C4
ggcatttcggcaaggagattggcggccatttggtgcatgattttgttggctgacatggcaggtgctgctgcattgttgcttctggtcagctgatctgatctcagcttgctgatggtgcacaagcatgtatttgtaccactactagtatgttagaatggtatataagtgtatcacttggtggctttggcttgatcagtttgaatcaattcctgaggatggagaaaaaacattgctgaaaaaaaaataatcttaaacaaaaaacaactagaggatggccacaccctaacatactacaacattcaaaaagagagcaccc

SEQ ID NO: 10433 - DNA, 360 bp, Zea mays
  Clone ID: LIB3156-016-Q1-K1-C5
ctgactcgtgggcggacgcgtgggttggtattaccttgatcgttacagtcatccgggttggtagaatacctaaccttaaggtgggttcagccctcctgggttgtgccttcttatatgacatcttctgggtttttatctccaagatgttgttccatgaaagtgtgatgattgtggttgcacgtggtgacaagactgatgaggatggtgtacccatgctgttaaagattcctcggatgtttgatccatggggtggatacagcatcataggctttggtgatatccttcttcctgggctgttggttgcttttgcattaaagtatgattgggctggcaagaagaccttgcatctggctacttttg

SEQ ID NO: 10434 - DNA, 355 bp, Zea mays
  Clone ID: LIB3156-016-Q1-K1-C6
gcccagagcaataagataagaggactttggttaaatcacatgtcccctgagcatgcgagggggggcaagaaacgtcccaagtgtacatgttcaagtcggcagaatggtcttcccactagatgatggcaggcttggtgaactacattttcctgggatggggggtactgattttggtccgagtgcccaaagtaccataagaagaaatctatcaaacaagtacgagtggaccatcctagactcatcataaacagaaggacggaatgcaaaatattgcaccgaatagcactgtcactcaaattgtatcatcggagcaaagaatatatctgcagacacagaatcaaatgacttgagcaat

SEQ ID NO: 10435 - DNA, 188 bp, Zea mays
  Clone ID: LIB3156-016-Q1-K1-C8
ccgtaccacatgctcagacatagattttcgatttctttttcataacagatacgccccaactgagagagggacaactatcatgttacctcacctttcaatcttcaagctttcataaacatgtacatattcttatatggtaacgatacctttattcggtgctggaacacccacctaatgattcggagatt

SEQ ID NO: 10436 - DNA, 427 bp, Zea mays
  Clone ID: LIB3156-016-Q1-K1-D10
ggaagaacgggcccgacgcacgcgtacgcatgcaaatacaaaacaggatgattatatttatagaaaagcgctgcatccatgatgcagggtgtgtgtgcaggaaacttattcctcacaattctattgtctatggtaggggcttaagctatcatatcttgcttctattgttttggaggcagcctctgatcaatatccacgagttgagctttatgcaaaccgagcatttgatgatgctttagactaaatacaaaaggccctggctgaatatagcgaactccaacccattgatacactataagaagagtattctcatcttattcacgacaataattcacactatggcattgactgcaatgatgatgccactaatcatatgcaggagcaagacttttttgtttcacttatcgggtagcagcaacaaatctta

SEQ ID NO: 10437 - DNA, 450 bp, Zea mays
  Clone ID: LIB3156-016-Q1-K1-D11
cacggacaaaaaagaaagcatagagagagacagagagaggcatatgctactgcgatggatgcttgggaggtagcacacttaaagctacttgttgatcagtgcaaatcacacccttcaattatccacactccctctgtttccttcttcaagtcctatctcctaaggctgggagctcaaattccaaccgacccacggacggatagaggtggcgttaaaatggaagagcctgagcaacactctgatgacaagaaaccctatttttcaaatgaagaacatgatgatattattgagtccgatgtcgagttagataataacggtgttgtggaacctgacaacaatcctacacaaaaaatgggagactcttcggatgaagttacggaggaaaagcgggatgctgctcaatcggaaaaattaaaagccatggatgcgatatctggaggtaagctggat

SEQ ID NO: 10438 - DNA, 242 bp, Zea mays
  Clone ID: LIB3156-016-Q1-K1-D12
cgggccagacgcacgcgtacgcgtacgaatacgagacaagatggtgatagttgcatcaaggccgcagctccatgatgcgggggccgttggcaggaagctcattcgcaccatttctatctgattatggcgggggctcagcttagacatactgcttatttgctgtgggtgcagctgagcatgatatatacaggagatgaacagtattcaatcccatcatctgcatgatgcttgagactaaatcc

SEQ ID NO: 10439 - DNA, 351 bp, Zea mays
  Clone ID: LIB3156-016-Q1-K1-D4
gaagcttactgggaataccgacttaagccatgggatatggctgctggcgtcctgatagtagaggaagctggtggggtggtaactcgcatggacggtggagagtttacggtcttcgatcgctctgttcttgtttccaacggacttgttcatggacagcttttggatcggatcggccctcctactgaagaccttaagaagaaagggatcgacttctcgttgtggttcaagcctgacaagtacccgaccgacttttgagctgcatcaagggcaccaccagcagccatgggccaccataataaagcagccatcattttttttggtgggggggttctgatagaaaatgtgttttac

SEQ ID NO: 10440 - DNA, 162 bp, Zea mays
  Clone ID: LIB3156-016-Q1-K1-D5
ctctctcactgtcaatcccgacgtcttctttcctgtttggcacgaggaacaccacatgtagaggctcttacaagggcggattctgaactatatcttctgcatacatcatcaagatccatggcggtcaccaacatattacaatgcactccacactcaacagct

SEQ ID NO: 10441 - DNA, 82 bp, Zea mays
  Clone ID: LIB3156-016-Q1-K1-D6
gaaagagaaagaaacaaaacagttggtttcttgttacttgtaagtggttaaactgaaatacaaatggatgtaagattgaatg

SEQ ID NO: 10442 - DNA, 385 bp, Zea mays
  unsure (1)..(385): unsure at all n locations; Clone ID: LIB3156-016-Q1-K1-D7
atggcctctatgctctccagtggatcatcgaaattaatgggcaaccaacaactgatctggaaacttttataaaggtggtgaagggtctcgaagatggtgaatttgttagggtgaggacggtccatttaaatggaaagcctcgggtacttactctgaaacaggaccttcactactggccgacctgggagctcagctttgaaccagaaactgctacatggcggaggaaaataataaaagcattgcaatcagccagggcgtgatattttcatgttttgctgcgaccttttcatgctttcagaggagcatagaggtaaggaagttagaggttcatgcctttgtttggtaagctaaatcgtgcattatgcangattaagcaaccctgcac

SEQ ID NO: 10443 - DNA, 403 bp, Zea mays
  Clone ID: LIB3156-016-Q1-K1-D8
tatttctgtctcttgttcagttactgtaacatatcagccttgttcgatctactgacgagagggccaatgtcatgaataatggggttccatactttgcaaaccaccaacggtctccgatggtacttccagtgggcattcctgagagactacagtgacatgcagatgcttaaacttgatagagttaggtaccacgactgttaacatatctggttgcctgaactccatgcattatactgagcctagtgataacatctgaatgaaaatagtctgactgctgctaaagatgactgtatcaaaaacatgcatgactggtacagacatgagcctctatcgcataaattatgaactttccctgattattattggtgtgatcagagaaatggcattatctgctgcttagttg

SEQ ID NO: 10444 - DNA, 452 bp, Zea mays
  Clone ID: LIB3156-016-Q1-K1-D9
aacggaaaaaaaagaaagcatagagagagagagagagaggcatatgctactgtgatggatgcttgagaggtagcagacttaaagctccttgttgatcagtgcaaatcaaacccttcaattatccacactccctctctttccttcttcaagtcctatctcctaagtctgggagctcaaattccaaccgacccacggacggatagaggtggtgttaaaatggaagagcctgagcaacactctgatgacaagaaaccctatttttcaaatgaagaagatgatgatattattgagtccgatgtcgagttagataataacggtgttgtggaacctgacaacaatcctccacaaaaaatgggagactcttcggttgaagttacggaggaaaagcgggatgctgctcaatcggaaaaattaaaagccatggatgcgatatctggaggtaagctggatga

SEQ ID NO: 10445 - DNA, 364 bp, Zea mays
  Clone ID: LIB3156-016-Q1-K1-E1
cttttccgtgcttcctttcaggtatgcggcgattgctgatcagtcaaaaccaagccctttgcagcctgaactgaacctgcccatgctgacacgcacgaggtccatgcccagcatcaggctcgccaaatactcaaagtggttcgacgacagctcggaggacatcaggagcctctgcgggaaggcgctgcagatgctgcgcacgcactacggctgggagagcgtggacgtcaccgtccctgagatcgaagagatgcggctggcgcactacgtgaccatgggctcggagtgcactgcctccctcgccgccaagtacctggacagcatggacaggtccgaggtcgggtgggacgtgcggatcgcgctc

SEQ ID NO: 10446 - DNA, 275 bp, Zea mays
  Clone ID: LIB3156-016-Q1-K1-E11
tccaggccgaccacgcgtccgcgacgattacggctcacatcttcttagtcttaatctgaggcaacgagcacccaaagatggtggtgcttcaaccagatctggccctgagcgagctgacgagcatgtactagcggagcacggagaatggctccgtctgggtcacgatgaagcgatcaactctcatgggcaaggcacatgtgcggtagatggataataaggggcaggatgtagagcacatgtgcctggtacgcgcctccaatggcgagaagaacatc

SEQ ID NO: 10447 - DNA, 370 bp, Zea mays
  unsure (1)..(370): unsure at all n locations; Clone ID: LIB3156-016-Q1-K1-E12
ccccgtttgctacgcgtgcgtgtgagagtgatatcgagcgccggccggcctgcacgcccgccgtgttgtgcgtacgtacgtacgtatacatgtatgtatgtatatgcgcgcgtgtgatgcacgaataagcgtggctacgtaatctatcgtatgtatacgtgtgtgtatgcatgagcttgtgtatgatcgtggtacgaggaccgaaaaaatgtatgcaactctgatttacttacatgtttagttgtttacgtttctccaaaagtatctgtacccattatgttatattttactatattatatttcattgattattnaaaaaaataaataataactgaaaaaacaggattggaaattaagtaaaatggatacg

SEQ ID NO: 10448 - DNA, 420 bp, Zea mays
  Clone ID: LIB3156-016-Q1-K1-E2
cggacgcgtgggctgggacactgctgggcaagaaaagttcggtggcctcagggatggctactacattcatggtcagtgtgccatcattatgtttgatgtcacctcgaggctgacatacaagaatgttccaacatggcacagggacctgtgcagggtgtgtgagaacatccccatcgttctctgcggaaacaaggttgatgtaaagaacaggcaggtcaaagccaagcaagttacattccacaggaagaagaacttgcagtactatgagatttctgccaagagcaattacaactttgagaagcccttcctttacctcgcaaggaagctggcaggggatcagaaccttcactttgtcgaagccgttgctctgaagccaccggaagtgcagattgatatggccatgcagcagcagcacgaagc

SEQ ID NO: 10449 - DNA, 394 bp, Zea mays
  unsure (1)..(394): unsure at all n locations; Clone ID: LIB3156-016-Q1-K1-E3
ctcgcgccttctacccctggagatggcagctgagcaagaaggagagggtactagtagtagggcaggacgcgcagcatggggccagggccagcgtgttcactcccttcggcggggggcctcgcctgtgcccgggccacgagcttgcccgcgtcgtggtctccgttttcctccaccgcctggtgacgcgcttcagctgggaagaggctgaggaggacagggtcgtcttcttccccaccacccgcaccctcaaagggtaccccatcatcctgcggcggcgaccgggttgggatttctgacctagctcatcatgttacaatagagtcgatccatctatagttgttacactcatctntctctctctctctctgtctagaataacactactgtctaatat

SEQ ID NO: 10450 - DNA, 286 bp, Zea mays
  Clone ID: LIB3156-016-Q1-K1-E4
ggctaatcaaatgtattcacattgggcataatcacgccactggagtctggcccgaatcaaggtgcaggttgctgcgctgtacgagccagactgagctacatacacttctgacagagcgtaaatgcgtgctttccctgctacatattatctaggtcatgtatggtgctaccatcgtggttaaataacgaaaataatgctgagcatattcgtttgaatgctaaccaaaatatagggcgggcagtcttcaggactcaatcttgcgtacacgtacatgcaacttcttacg

SEQ ID NO: 10451 - DNA, 417 bp, Zea mays
  Clone ID: LIB3156-016-Q1-K1-E5
aaatatctaaaacatagaaccccacagttctaaagccgtgtgacctatattctccatttcagacataattacttactaattccttagttattttcaattggatgagagagtgtcggatgcttcttcagatactatttcttggtccgtcaaatctgcttgacccaaatgcaagttctgctcaaatgtggcaaaaataattgtctcaccaattgtcagcccgcctgcttccagcaaagtttcagagaaggaaaagatggaatgtaactcaatttttggtggccacacaagtgtggagacttgaattcatatatatatttagttaggctcaatattagtgcaaacagtcgataaccaagttttgcaattagtatttagttttggctttagagtacacttatgtatgagttatttgacaat

SEQ ID NO: 10452 - DNA, 327 bp, Zea mays
  Clone ID: LIB3156-016-Q1-K1-E6
cgatggcgtacaagatggcgacggaggggatgaacgtgaaggaggagtgccagcgctggtggatggagatgaagtggaagaaggtgcaccgcttcgtggtgtacaagatcgacgagcggtctctcgccgtgctggtggacaatgtgggcggccccggggaagggtacgaggagctcgtggccgcgctgcccggcgactactgccgctacgccgtcttcgacttcgacttcgtcaccgtcgacaactgccagaagagcaagatcttcttcatcgcctggtcaccggcggcgtcgaggatcatggccaagatcctgtacgcgacatcta

SEQ ID NO: 10453 - DNA, 439 bp, Zea mays
  Clone ID: LIB3156-016-Q1-K1-E7
gacagatttagaatcctatatgaggtttcttctggatggtggtccaagtgattcagttgggggccttctgaaccttgatggatcgcaggatgttggtagcgacatggacctctggagcttcgacgacatgcccatcgtcggcgatttcttttgaggattttgaagcttggtcataggagtatgtacatagggactaggggaataaagaccgggggagattgggaagcacctgcttggcaccttgggggtagcatttgctcgtgtctagctcagagatgcagaagttgcattctgaaactacttggttatcgacctgttccctattttagctatctctttatgagagccatttatgagactgaaccattttgttttcctttcttttcgttgttacaatatatgggttaacattatgatttatggatatgtgccaaatatg

SEQ ID NO: 10454 - DNA, 387 bp, Zea mays
  Clone ID: LIB3156-016-Q1-K1-E8
gtcagatttagaataccatataaagtttcttctggatggccgtccaagagatccagggggtgtgcttctacaccttgatggatcgcacgatgttggtcttgacattaacctctagagcttcaactacatgctcatcttcgacgatttattttgaagattttataagctagatcataatagtatgtacatagggactatgcgaataattaccgcgggagattgtgaaacacctgcttggcaccttgtgcgtggaacttgctcgtgtcttgctcaaacatacataaatttcatactcaaactacttggttatctacacgttccatataatacctatctctttatgataaccatttatgagactgaaccattcttgtatacctttttttc

SEQ ID NO: 10455 - DNA, 393 bp, Zea mays
  Clone ID: LIB3156-016-Q1-K1-F1
acgacgacgtctgccggcagtgctcctgctcctcctcctccttcccggccgccgcgcgagcttggtgggttagtgtctcttcttcgcggagacctgtgaggagccgtcgtcatggccgctgttgagactgttgtcctcaaggttgctatgtcatgcgagggctgcgccggggcggtcagaagagtgctctcgaagatggaaggggttgaaaccttcgacatagacctcaaggagcagaaggtgacagtcaaaggcaatgtcaagcctgaggacgtcttccagacggtttccaagtcggggaagaggacctcctactgggagggggaagccacagccccggacgctgcggcggctccagaagccgtagcagcttccagcaccgcggcagaagcg

SEQ ID NO: 10456 - DNA, 434 bp, Zea mays
  Clone ID: LIB3156-016-Q1-K1-F10
cggacgcgtgggcgcggacgccttcgtcttcgggggccgcaccgtggggtccggcctcggttacatcgaccaccagctccggcagcagcgcgcgctgcagcagctcggcatgatgcagggcggcgcctggcggccccagcgcggcctacacgagcgctccgtctccatcctacgcgcctggctcttcgagcacttcctgcacccataccccaaggatccggacaggatcatgctcgccaagcaaaccgggctcaccaggagtcaggtgtccaattggttcatcaatgcgagggtgcggctgtggaagcctatggtggaggagatgtacctggaggagacaaaggaccaggacgctggaggcagcggcaacgacgagggctagtccggaggctgcagcagcaagagcagcgacaccgtcgacagcgtcatgccta

SEQ ID NO: 10457 - DNA, 294 bp, Zea mays
  Clone ID: LIB3156-016-Q1-K1-F11
acgcgccacgcgagccagaacatggcaaggatcaaggcgcacgagttaacgggccaaccaaagacagagctggggggtgaactcaaggatctaaaagccgaaccttctctccttggacacgccaaggggactggcggtgcccccaataagctctgccagactaaagcggagaggctatccattggtcaagtattcaccgtgagatacaaaaaacataaggctgctctgagggaagcttatacggggaagacgtttttgacgcttgatctccgcccccagaagaccacaactatt

SEQ ID NO: 10458 - DNA, 372 bp, Zea mays
  Clone ID: LIB3156-016-Q1-K1-F12
ggccacgacgccacgcgttccaacgttcaccgcaacttgagctttttctttcgtatatacacccagttctttgagccagagggtattgcaaatgcacaaagatcgctgcggttgggacaggaagaaaaagctcttggagtgcgttaatgagaataaaaagcatttgggatttttgtggaatctgaaagtgaatttatgatatgatttctttatatggttatctttttaatccatgaccaaactgtagagacatggaaaaggaactctcaaatcttgtttgaaattggtagagttattctcagttatatttatttactcgcgctcgagctatcctataacacccaaccctgtataccgaatgataagcaccct

SEQ ID NO: 10459 - DNA, 427 bp, Zea mays
  unsure (1)..(427): unsure at all n locations; Clone ID: LIB3156-016-Q1-K1-F2
aacaaatcttctnctcttcctctccgtattcgcatcagtccatcaccttcaatggcggcggcggggggtgctgccaccttcttcaccaccctcgccgtcgcgcgttcggcggggcagcggtccctccttgcctccaaggccgcaccttcgccgctcctctccctccgtggcgcccgcatcccctcgcaggccgtctccttctccgggggccttgcggcgtcgccctctcacagccgcgcgcgcttcgctacatccgccagcgccgagcccaaggaagcagatcttcagtctaaaatcaccaataaggtgtattttgacataagcattgggaaccctgtggggaagaatgttgggaggattgtcatcggcttgtatggggatgatgttccacaaacagcagagaactttcgtgctctttgcactggag

SEQ ID NO: 10460 - DNA, 295 bp, Zea mays
  Clone ID: LIB3156-016-Q1-K1-F3
gcttcctcttctccgtccccttcctcgccggcgccggcgcaggaagaccccgactgcaacgaggaggagtgcgccccggagaaggaggtcgggagcctgagcgctgagtggctggccgaggagaggacccaggtcgtcggcactttccctcccaagaagagagggtggaccggcttagtggagaaggacaccgtcggccagaccaacatctactccgtcgagccgatggtgtacgtggccgagagcgccatcagctccggcacggcgggtacgtcggcggagggcgccgagaaca

SEQ ID NO: 10461 - DNA, 249 bp, Zea mays
  Clone ID: LIB3156-016-Q1-K1-F4
gcttcctcttttccctccccttcctagacttctcctgctcaataagaccccaactgcatcggggagaattcctcccaaaccaaggaggtctgcaccctaaccccttattgtttgcccaagataagaaccaagtcctttgcactctccctctcaaaaaaagagaggttgcccccctttattagaaaaagaccccctctcccacccaaatattttttccctagaccattttttatacttgccaaatacccc

SEQ ID NO: 10462 - DNA, 391 bp, Zea mays
  Clone ID: LIB3156-016-Q1-K1-F6
gttgggagcacggaggttggggatcctagacgtgccagcgatcggctgtaccccaggctcgggagtccccatggccaacggcggatgcaacgacgctgccaactctatggcgcagaacttcaataaactcctaaggctcgaggtggcgaaagccgtcgcatcctccatgcccggcatgagatactccattgcaagcacctacaattttctcaccgacttgatagacagccatctagtggctgggctccgggtggtcgacagggcatgctgcggatcgggaaaactgaacgccgcggtcatgtgcgcccagccaaacacgacttactgttcggatcgcgacgactacatgttctgggacatgctacatcctacgcaggcaacatatgaacgt

SEQ ID NO: 10463 - DNA, 192 bp, Zea mays
  Clone ID: LIB3156-016-Q1-K1-F7
tacatattttacttctctccagccatcttgctccccattttccaggtattcttcaaaaccaacaaatcacacaaccacactcacaacactaaagcccaaaaaaaaaaaaaacacctaatgctcttttctttccaaagaataaacatccgccagcccctttaaaaaacacaacattccaaccccccaaaacaa

SEQ ID NO: 10464 - DNA, 66 bp, Zea mays
  Clone ID: LIB3156-016-Q1-K1-G1
cttttcttatcgttcagtaaactacattgttaacactctcctgccattttgctcctgattttcctg

SEQ ID NO: 10465 - DNA, 446 bp, Zea mays
  Clone ID: LIB3156-016-Q1-K1-G11
agaagccgaagaaaattcgaagacgaggaccagctacactgcggacggacttcgggcatggagggccagttccaggttggcaaggaggaggtcatccaagcatggtacatggacgacagtgaagaggaccagaggcttcctcatcatcgcgagcccaaagaattcattcctctcgacaaactttccgaactaggaatattaagctggcgcctaaatgctgatgattgggagaatgatgagaacctcaagaaaattcgtgaagccaggggttactcttacatggacatttgtgatgtgtgcccagagaagttgccaaattacgaggctaagataaagaatttctttgaagaacacttgcatactgatgaagagatacgatattgccttgagggtagcggctattttgatgtgagggaccaagatgatcagtggatccgtgtagcggt

SEQ ID NO: 10466 - DNA, 442 bp, Zea mays
  Clone ID: LIB3156-016-Q1-K1-G12
cggacgcgtgggcggacgcgtgggctggtttccatcggaggcctgaaccctgatgtgaacaagaagcttagtgctggcatcgcttctatcctggagtcaaagctgtctgttcccaagtcacgcttctacctcaagttctatgactcgaagcgctcggacttcggttggaacggctccaccttctagacttgaggtctgcagctgaaataaaagaaattcgtggaatcatggtacctaatgcccatggctattgcctattaaggacaatgtcataagatgtgtcttaatcggtgctgaactgagaaacagtaactgttgtcgtggaactggaagtggggtgctggcgtgtcagagtgcttgcttcctacctagcatagcatgcctgtgctatcttgttattggtattggcttgatatcagtctatattatcatttattatggg

SEQ ID NO: 10467 - DNA, 443 bp, Zea mays
  Clone ID: LIB3156-016-Q1-K1-G2
gcagtgggccctagcggaccatcagggagctatagtgctggttctgttagcttacagcaaccagggaatgaagagcagcttacgcctgatgtggagtcagctcttctgcagcaagtcttgcagctgacacccgagcagctgagttcgttgccaccagagcaacagcagcaggtgattgagctccagaagatgctttcagttagtaaatagaagcaactgagagctaacgcagcaaaaatgctggttgagaatctggcacatcacataatggcgagttggtaactagtggaaactggaaatgatcctcagatttgtttatgaagtcaccacgccgcctgtaacctgtaagcattgtcggcatcctgatgccatcaggatccatatggttttctttcttcagctcggagataaaagaaatgtgataggagaagagtagtgtggaa

SEQ ID NO: 10468 - DNA, 417 bp, Zea mays
  Clone ID: LIB3156-016-Q1-K1-G3
gttttcgcgccgtcgccgccgccgccgccgtatccgcaacaatgccgtcgcacaagaccttgcggggcaagaagaagctggcgaagaagatgcgccagaaccgccccatcccctactggatccgcatgcgcactgacaataccatcaggtacaacgccaagcgcaggcactggcgccgcaccaagctcggcttctgagcgtcgggattggccggctgctgcgtcggaaggctagggtctaagagctatcttccttctgttttatcaatgtgtcagtttttctgtaagctagcaagtgttgctatgacgcttttattaagattctggtgagcggcgatgttaagagaaaattggcactactgtggtgtaccccaagattccttgcagcattgctatgctaaagaaagaaccctttatc

SEQ ID NO: 10469 - DNA, 343 bp, Zea mays
  Clone ID: LIB3156-016-Q1-K1-G6
cggacgcgtgggctcctccaccgcctcctgtcccagcgcgccgccgccgcagccacgatgggtcgcgttcgcaccaagaccgtgaagaagacctccaggcaggtgatcgagaagtactactcccgcatgaccctcgactttcacaccaacaagaaggtgctcgaggaggtctcgatcctgccctcgaagcgcctccgcaacaaggtggctggcttgagtacccacctgatgcgcctgatccagcgcggtccagtccagggcatctcgctcaagctgcaggaggaggagcgcgagcgccgcatggacttcgtgccggagaagtccgcgctcgatgtcgaataga

SEQ ID NO: 10470 - DNA, 179 bp, Zea mays
  Clone ID: LIB3156-016-Q1-K1-G8
ccgggccgacccacgcgtgcggaaacctcagggttggctttgatgcaaagatttctgcatgtcgtcaccaagctcgggatggggtaactgggcagctactgccccccatacctcatttaacaagctatcgccccgattctcactgttcaaacatcccatcaattttgaaatagtagcaa

SEQ ID NO: 10471 - DNA, 326 bp, Zea mays
  Clone ID: LIB3156-016-Q1-K1-G9
ggaaaacccggcccgacccacgcgtacgcccacgcgtccgggattcaaattacacccttttggctgagctctacaacaaatgcaagggggtgaccttagagatcttaacctccacttgcagtcactttttgaagcaagaaccactggtccagccaaccaagcagaatattctgcttgcaggagatgcagcgatgcatatcttattataaacagggacgtatgcaacgacccaaagaccgaacctgtgttgaagatcctaagaacaaagaattgtggcttcttgtgatctacgataaaaccaaacttaactaacttcttagttccta

SEQ ID NO: 10472 - DNA, 69 bp, Zea mays
  unsure (1)..(69): unsure at all n locations; Clone ID: LIB3156-016-Q1-K1-H1
gtgccattcaaaaaaaaaaaaaaaaaaaaatttaattataaaaaaaaaaaaaaaaataatttgtgnagg

SEQ ID NO: 10473 - DNA, 359 bp, Zea mays
  Clone ID: LIB3156-016-Q1-K1-H11
acgcgaaccaatattgaaaatgcacataatctttctttttttttaacggaacaccccaaagggggatatttaattttcagagaacaccttcactccatcaacgatctatccccaaaaaccaaggagatatttagttatccaccttccccttaatgattttcaacatttcagcaccacaatcctcatctactatgggatcctcatattatccaacttcaactccgcaaagatccttatcatgaccttctacaagacactaatccgtcttcctccaaacaaaactgacaagcccataaaatattgcttgcagcttgacctacatatgataaaatgacattgaaaccctttttactggttgt

SEQ ID NO: 10474 - DNA, 165 bp, Zea mays
  Clone ID: LIB3156-016-Q1-K1-H12
gaaatccaggccacgacgccacgcgtccgtgataatgctaatctgtggtggacacattttagcgttaagggggcacacgtagttgtggtgttcttcttgctgttttatttctacgagcttctcactgtatttttagtccacacaaaaaaaaagacacatattcat

SEQ ID NO: 10475 - DNA, 393 bp, Zea mays
  Clone ID: LIB3156-016-Q1-K1-H2
gtgccggcgctgtcggagttccactccggcggctacgatttcgactcggcgtccatccggcggatggagctgctggtgctgtccacgctcggatggcgcatgggcgccgtcacgcccttggacttcctcccctgcttctcctcccgggtccacccgcacggcggcgccggcgccggcggccacgtcgcccacaaggccatcggtttcatctttgccacggctgaagctggtagcgtgcttgatcacaggccgtccactgtggctgcagctgcaatcttggctgcaacctatggacctctactgaccaaagaagcactcgattccaagatgagctacctttctccatcttgtcttattgagaaggaacatgtacatgcctgctacagtatgatg

SEQ ID NO: 10476 - DNA, 342 bp, Zea mays
  unsure (1)..(342): unsure at all n locations; Clone ID: LIB3156-016-Q1-K1-H4
ggattgccgaggagatgcagaagcaggtggctgctgccggtgcggcagcacaggtcaaggaagacagcgatgacgatgttccagagcttgttcctggagagacttttgaagaagtagctcaggagacaaaagcctgatcataggctctaaatagtgaaatgttactgcaccaatgctgtgaggtcatggttttcgtgtgatggcactcttcttcctcccctcctaggccagccccagccactctttgtgttcgctgttggaaacttttagtttctccatctcaagcttttacctaaggttgtgcatgttgagatgccatggaaatccattttgctgattnat

SEQ ID NO: 10477 - DNA, 282 bp, Zea mays
  Clone ID: LIB3156-016-Q1-K1-H5
gccgccgcctcctcgacttcgtcaagtcccgctccgcggacgccaaggccggtgacacgccgtctgaggaggcccgggcccctggcgcgcccgaggccgaggccgtccatcccgcggcgtgagcgccggacagccattcgttccgttttgtatttcctgcagcctgtgtttggcttgggtctgagtttgtatgacttgaacgttagctgtttgcacatctatgcaattctggttcttccatgaatagccccgttctagggcgtgttcctgtttttctgggaa

SEQ ID NO: 10478 - DNA, 353 bp, Zea mays
  Clone ID: LIB3156-016-Q1-K1-H6
cggacgcgtgggtccaaatgttgagcccctctgaaatcccacaaagggactggttcccctctgacttcaccttcggtgccgccacttcagcgtaccaaattgaaggtgcttggaatgaagatggaaagggggaaagcaactgggatcacttctgccacaatcatccggaaaggatactggacgggagcaattcagacattggagcgaattcgtaccatatgtacaaaacggacgtcagattgctcaaggaaatgggcatggacgcatataggttctctatctcttggcccagaatactgccgaatggaaccaaagaaggaggtattaacccggatggcatcaagtactacaga

SEQ ID NO: 10479 - DNA, 377 bp, Zea mays
  Clone ID: LIB3156-016-Q1-K1-H7
catgaatttaattctgccaagagggcatcctgtcattttgtcgtcggtactgtcgacgggggtgcgatcggcccgagttccagccacggtcggtcggtaccgactagctagctagctagcggtcgatgacgctgatgaccacccatgaaccgtagatcatctctgctgccacgtgtgtcgtcttttcattagtccacattatttcgatgtccaaaatattttaagaacctaaggaaatatttatgaatcatgtaacatttatatttacatattatattttttatgtttgagtcaactttatttatgatgcacaatttatgtgatttgcatttctttgaaaaaaaactacagaaaacctatctacttggtggttgaaa

SEQ ID NO: 10480 - DNA, 453 bp, Zea mays
  unsure (1)..(453): unsure at all n locations; Clone ID: LIB3156-016-Q1-K1-H8
cttcgcatccggccagggaccccttcacatcgcgggagatggctgatcacgaggccccaggggcagttgaggcaccaaccccagttcttggagagccaatggacttgatgactgcgctgcagctggtgatgaagaagtcaagtgctcatgatggacttgtgaagggtcttcgcgaggctgccaaggccattgagaagcatgctgctcagctttgcgttcttgctgaggactgtgaccagccagattatgtcaagctggtgaaggcgctctgtgctgaacacaatgttcaccttgtcactgttcctgctgctaagactcttggcgagtgggctgggctttgcaagattgactccgagggcaaggcaaggaaggttgtaggctgctcctgtgtcgttgtcaaggactacngtgaagaatctgagggccttaacatagtgcatgagtatgtcaagt

SEQ ID NO: 10481 - DNA, 454 bp, Zea mays
  Clone ID: LIB3156-016-Q1-K1-H9
ggcacgacccacgcgttcgttaaaatttaaatcatgatgagatagattttgagttcttgggcaacagaacagggcaacgatacattttttacaccaatgtgtatactggtggcaaaggagacagataacaaatgatttacctttggtttgacccaaccaaagaataccactactactctgtcctctggaacaagtatcatatagtgtgagtgctctttttctttttttaagtatttcaactgaaatgcacttgttatttagcgattctgattaagcttttgaaaaaaaaaataaagggggtgcaggttctttgtggaccacataccaatcagagtgttcaaaaactgcaaagaattgtgagtgaggctgccattcaaccaaccaatgaagatatactccagcttatggaacgccgatgactgggccacaaagagtggtcttgaaaagaccgact

SEQ ID NO: 10482 - DNA, 395 bp, Zea mays
  Clone ID: LIB3156-017-Q1-K1-A1
cggctatcttgaagccagacaatgaggtcagaattttggtagatggggaagaaaagaagaaggcgaacttcctttctgctgatgattttgagccagcacttatcccatccaagaccattcctgaccctgatgacaagaagccggaggactgggatgagagagctaaaattcctgatccagatgcagtaaagcctgatgactgggatgaggatgccccgatggaaattgtggatgaggaagccaccaagcctgagggatggttggatgatgaacctgaggagattgatgatcctgaggcagccaagcctgaggactgggacgatgaggaggatggtgaatgggaagcgccaaagattgacaaccctcagtgtgaagaggccacctgatgtggcgag

SEQ ID NO: 10483 - DNA, 166 bp, Zea mays
  Clone ID: LIB3156-017-Q1-K1-A10
cgacccacgcgtaaaccttcatttttttcgcctctccttttcgattccaaatcatacatatccccattgacacgggtcaattcaataacacctgctcatacagtccatcccaatctatacctccaccctcttctcaattactaccccatcaaaatctttgatcacc

SEQ ID NO: 10484 - DNA, 267 bp, Zea mays
  Clone ID: LIB3156-017-Q1-K1-A11
aagcactgcatccatgtccacaatagctagggccctagccctactatacgtcgtcgtcagcagaaagtctggttttgatttgaataataagatgcacctatatgtgtgtgttatatgtacgccgttgtcttaattactgtgtggtgattggactcactagtagctattgtcgtcgtgttgtcgtctctcggtgagtcgtacttgctcttggaccaaatgctgcgttaaatctgtaaaccctacctataaaaaaaaggaattattcct

SEQ ID NO: 10485 - DNA, 180 bp, Zea mays
  Clone ID: LIB3156-017-Q1-K1-A12
gcagctggtactgatggccaaaagataacataccgtgtcataaaacaccgtttgggcgagcgtattttatcgcctaggatctcaaaagttcgaggatcctgcctaaggtgaagaaactttggtcggcgaatttaagaaactgtatgatgacctcaccactggtttccgcaatctcgaaga

SEQ ID NO: 10486 - DNA, 364 bp, Zea mays
  Clone ID: LIB3156-017-Q1-K1-A2
ggtggggtgagagaaaaaaacaaggtatgtagtccaccgacgtctctgatgggggatggagaggcatgagatcttggtatgcttatgcatgggccatgggtgtggctgaaatctgtaacttttgtagccatcaacttgttttccagaaaccatgtaatatgggggacctgtgtatagctattagacattaacaaaattttgtgctttgtgtgtccacctttgctttcatcttagctggtgtggttcataagaatctacttttagtgctgagccttttatcatctatgtgttcttggctggaactttttgtaactttaaaatataaggaagaatgggctgtgaaaaattcttttttttttttttt

SEQ ID NO: 10487 - DNA, 300 bp, Zea mays
  Clone ID: LIB3156-017-Q1-K1-A3
aacaaggaatgaaacaggcatatgaaagtttgactgttggttttggaaggacagcctctgctctcattggcaaccctattaaagtttataaccgaggggcgggtgttggatcagttctagctactgcaatctgtggagcaccagctgctgcagtagctccagtctcggcatctgctcgcgctttacattatgcacttcttgggctaaggaacagccttgatcctgagcacaagaaagaatccatgtacaaataccacggaccctctcaagcatatacgtgattgagaagatgagttggga

SEQ ID NO: 10488 - DNA, 356 bp, Zea mays
  Clone ID: LIB3156-017-Q1-K1-A4
ttgtacaccactgttgatcacatacattgtatttgcattttgtttgatggttattttatcaatgaaattgtttctatttgtaaattaaaattaggagaatttggaaaataccaccacaagggccaccttagttgtaaactaccgtaagtgtttctatgacatttggtgacaacgcctacatgtcatcctcacatgatcacatcatatgggcatatggtgttttctacatatgagcatctttgtgatggaatcctcttaatttgaaatttctttttcttgtaagcatttatttgttacattcttactcccactcttttctttgttttcttaaacagtaagcgcatgaaaactcattt

SEQ ID NO: 10489 - DNA, 409 bp, Zea mays
  Clone ID: LIB3156-017-Q1-K1-A5
ggcaagaggcaggtcatgatcaggccgtcgtccaaggtgatcatcaagttcctgacggtgatgcagcgtcatggatacattggcgagttcgagtacgtggatgaccacagagctgggaagattgtggtggaactgaacggcagactaaacaaatgtggtgtaattagcccccggtttgatgttggggtaaaggaaatcgaaggctggactgccaggctgcttccgtctcggcagtttggctatatcgtgcttacaacctctgcgggaattatggatcacgaggaggcccgacgcaagaacgttggaggcaaagtccttggtttcttttattaattaaagggtcgtccgagtttcttctattaaatggtgggtcaaccgaagtttttgtttttgttttgggtctgaattg

SEQ ID NO: 10490 - DNA, 344 bp, Zea mays
  Clone ID: LIB3156-017-Q1-K1-A6
ggtgagggcaaacctgctgtcgacccagtttaaactccagctacaagtgcagagtcaccaaagtccgagcctagcgccccaccactttctgagaccgaaggagtcgacaacatgggcctcgatgaggtcagaggtgatgctgcggagggcgcggaagagcttgaccctgcgctcgaggagacgccgatggaggagacgatccgtgtgacgcgcgccaagctaaggaggcgcaccgccaccgaggattctgctgggaataagctgcatgccgtgtgattccctgcacattgtattgatctttttccgagttttaggctcacatgttgcttgctggaatggagata

SEQ ID NO: 10491 - DNA, 236 bp, Zea mays
  Clone ID: LIB3156-017-Q1-K1-A8
ggaattgcccacgcgacccacgcgtacgcttagttgttaggatggcataatcttcccttgggcatcgcccgtgctatcttgaaggacgggtgggatcctggttatagacaaatcaaccaaatcactggatgtcgactacaaggggatccttcagtatgcactggacacagtgatggtgaaccatacagtaatggtcgccccccaccgtctgtcaacgatacaaaatgctggtcata

SEQ ID NO: 10492 - DNA, 191 bp, Zea mays
  Clone ID: LIB3156-017-Q1-K1-A9
ccctgcttttttttggcctctcctctccgttggcgacgcatacatccggcgagggagcggaagaagtcaataaattctgtcgctccaatccggacgaggagatgccgcggatccctctgatcaagttccccaagcggaatctgaaagccccatccgcgccagtgccgtcgcaacccgcagatcaacacgcg

SEQ ID NO: 10493 - DNA, 389 bp, Zea mays
  Clone ID: LIB3156-017-Q1-K1-B1
gtcggggcgggcggggctaccggtgcggatgttctcgtcgggccgctctgccggtggccctaagattgcagccacgacgtgggcggaggcggtgagcgtcttcatcatggcggcgggcaacctggcgtgggacgtgttcaccacggagcacgaggtggaggccatcctcaagggcagcctcaacctcctggcggggctagggggcttcgccgtggaggccgtcgtcggcgcggctgtcaccaaggcggtcgcaaacgtcggcgccggcgtctttgcttgctctctcgccggcttcgtcgtgggcgccatcgccgggctgatcttcgtcggcgtcagcggcctcctcattaacctcatcatcggctccccaaggaaggtgcctgacatga

SEQ ID NO: 10494 - DNA, 366 bp, Zea mays
  Clone ID: LIB3156-017-Q1-K1-B10
ggatgagggagctcagggaccacacggacgccaacatcgtgatcatgctggttgggaacaaggtggacctgcgccacctcagggctgtcccgaccgaggacgccaaggcctttgccgagagggagaacgccttcttcatggagacgtcggccctggaggcgatgaacgtggagggcgccttcaccgaggtgctcacccagatctaccacgtcgtgagcaagaaagccctcgacatcggcgatgaccccgcaacggcccccaagggccagaacattaatgtccgccgcaaagaccatgtgtccccaatgaaaaaatctggctgctggtcgtcttaacttggaaaggggtaggacatgtacttggggt

SEQ ID NO: 10495 - DNA, 112 bp, Zea mays
  Clone ID: LIB3156-017-Q1-K1-B11
gtctgattaaatttatccacccatctgtcatctacaaaatgctcattcctgctgatatcgaggttgtttttttccttctgatcactcaccttactccttacattaataaaca

SEQ ID NO: 10496 - DNA, 217 bp, Zea mays
  Clone ID: LIB3156-017-Q1-K1-B12
aacaaaatctataaggctcattcttttttcatatcacacaaataactcaggctcagatgatgcataatggtcgaaaggaaaaagaaactaatgatatctaacagggtatcagcaaggtgatcaaggatgatgaaacaaaagcatttagatgatctaatgactcagttgactcatgtgcagaaacaataccttgagatcatcacaaacttaaacttta

SEQ ID NO: 10497 - DNA, 347 bp, Zea mays
  Clone ID: LIB3156-017-Q1-K1-B2
gccggttgtggccaaatgggtatcgaaatattgtgcctaagcttgatctaccttctacttgggcgcgtgctcaccaggagctacgccgtctatccatcgtcgcccgccgtgtcctcatcggcggaaatccatctttcatcggggccatggcagctgccgctgatctgcagccaacactacctcctgctgtcacggttcagcgacctgcctcaccgggcgctgcgcgagatgtccggaacatacggaccgctcatgctgctccgcctcggctccgtgcccacgcttgtggcctccttcgccgaggccgctagggaggtgatgcgcattcacgacgtggccttctgcag

SEQ ID NO: 10498 - DNA, 351 bp, Zea mays
  Clone ID: LIB3156-017-Q1-K1-B3
cggacgcgtgggctttgccacatcacattgaacaagaatgctgtcttcggtgacagcagtgcattgtctccgggtggtgtccgcattggcgcgccagcaatgacctcgaggggtctactggagaaggatttcgagcagattggggagttcctccaccaggcagtgaccatctgcctgaacatccagaaggagtacggcaagctcctcaaggacttcaacaagggcctggtgaacaacaaggacatcgagaacctcaaggtccaggtggagaagtttgccgactccttcgacatgcctgggttcacgcttgagagcatgaaatacaaggagtagatatgcctcttccatgcg

SEQ ID NO: 10499 - DNA, 258 bp, Zea mays
  Clone ID: LIB3156-017-Q1-K1-B4
gttggtttcagtttgtattcccactctgtcgcagcgtcgcccgtcgccgctgagatcctaggaagaaatggagctctctcgcaagctcttcacggccgtcctcctcgtcatgctgctgctgctgtccgcagaggtcgggccggtggcggtggcggaggcgcggacgtgccagtcgcagagccacaggttccggggcccctgtctccgccggtccaactgcgccaacgtctgcaggaccgaggggttccccgacggcag

SEQ ID NO: 10500 - DNA, 252 bp, Zea mays
  Clone ID: LIB3156-017-Q1-K1-B5
gatttggaacctgccactgatggtgtccaaataaaataaatatgaccacagattacagatttgatatccagggactttctaatcagcctattagaatctgaagataaatcttgtagcacctgtccggtgacccatagtaatattattttactcttgctgtaagcagaggttaacactaaaaaaagtattgtgattggtctgaactttttgtgcggtgtaaagcatgtgattcagctcaaaaaaaaacacaaa

SEQ ID NO: 10501 - DNA, 406 bp, Zea mays
  Clone ID: LIB3156-017-Q1-K1-B6
cttcttctgggtgccttttacttgctcagtaggtatgccatacactgcacttgggtgacatctgaggcttactcttctccatctatagttttggccgcaaggggtcataatggtggaagagttatctttgatgattatcgtgaggcatactattggcttcgtcagaacactcctcctgatgctaagattatgtcttggtgggactatggataccaaattacagctatgggtaacagaactgtcattgttgataataatacatggaataacacacacatagctactgttggacgtgctatgtcatcttatgaagatgaagcatatgagatcatgcagtcacttgatgtgaactatgtgcttgttgtatttggaggtgttactggatattcttcagatgatatcaaca

SEQ ID NO: 10502 - DNA, 380 bp, Zea mays
  unsure (1)..(380): unsure at all n locations; Clone ID: LIB3156-017-Q1-K1-B7
ggtggcaatttcttattatcactacctgaactttctaggatatgatgttcttccatttctagatagaacaacattcttcctgtatccgattggtctcgtcatcatcctgtctccacttatgatactaatagggtttaatccgacaagatactttctaagcttgtacttcggttaaagtctacggctagaatgccatgtacaagcaaaaatatggtgattggcgataactaatggcagatctggatacatactctgtagtaaagcattttagatatcttgtgtgaacggcggcgagtgaagttcagtaaagctcggagcattctatggatgtatcangtgcctcgggcaaggctcacaatggaagacatatagtctttttg

SEQ ID NO: 10503 - DNA, 342 bp, Zea mays
  Clone ID: LIB3156-017-Q1-K1-B8
ggatcattgtgtaccgaggtctttactttggtatgtatgattccctgaagccagggcttgttgttggtaccctgcaggataactacttggccagcttcttgcttgggtggggtataaccattggagctggccttgccttctaccccattgacactgatcgccgccgcatgatgatgacatctggtgaggccgtcaagtacaacagctacttggacgctttcaagcagattgtcgcagaggagggtaccaagtccctcttcaatggtgctggcgcaaacatgctccacgctgtagctggtgctggtgtccttgctgggtacgacaagctccaggtggttgtct

SEQ ID NO: 10504 - DNA, 350 bp, Zea mays
  Clone ID: LIB3156-017-Q1-K1-B9
cccaacgaagtgcgagcgacccacgtccacacgacacgaaccaccaccaccaaccagcaggcgcaccacgcacccagcgcaaagcgatggcgtcgctcaccatgatggcgtccttcgccgccgtggcggtggccgcgccctcgcgccgcggcaccttcgccgtggtcaggtccgccaaggtcgaccgctgccaggagcccgccacgctagcacaaccgaaggccaggcccggcgcgaacgaagccgggcccgcatggtgcgggttgtggcgcgggccgggcaaccattggggggggcggcgccggcatggcgggccccaagaaccggaacccccaaggcaaaaaaaaata

SEQ ID NO: 10505 - DNA, 364 bp, Zea mays
  unsure (1)..(364): unsure at all n locations; Clone ID: LIB3156-017-Q1-K1-C1
caggcagcctacgagtacctgcagcaggccgtcggccatggcgcgtggttgggcacacagacactgacgctgttgtttatttacgtacccaccgaactactggtggttgcgtgcgtcggcaagagcacgtagttgttcggtaaggggagagaagncgcttccttccttgtcgccgggcagccttcccatcgtggggcacctacaccacatcgggccccagacccacatctcgctccaggagctggtggccaagtacgggcacaacgggttcctgttccttcgcgccggcgccgtgcccaccctgatcgtgtcgtcgcccagcgccgccgaggctgtgatgcgcacccacgaccacatcttcgcg

SEQ ID NO: 10506 - DNA, 378 bp, Zea mays
  Clone ID: LIB3156-017-Q1-K1-C10
cttgctgaacgccgagaactaccattggcaatggacgtcgttttcttctgcagcctcaagcgctctgtacgtgtatctgtactccatctactactaccatgtgaagacacagatgtcaggcttcttccacacaagtttctatttcagctacacgctgatgttctgtcttggcctaggcatactttgtggagctattggctatctaaggtcaaccctttttgtaaggggaaatcaacaggaatattaaatggggataaaaccctggtggtttagctagcctcaaaaaaaataatttttttttccaggagcgtgggctaaaaaaaaggattttaattgtgaaacctggattttgaaccgctgaagactttcttccctttt

SEQ ID NO: 10507 - DNA, 355 bp, Zea mays
  Clone ID: LIB3156-017-Q1-K1-C4
cggacgcgtgggcgaagctcaagaagaagctcttcggcaagcagtcccgcagggatcagcggcagcatcagttcatgcgccaggcggcggcaagcaatgggatgatgaagcaagaagcggcaaccagggaggcagccggaagcagtatcatggcagtggccaactacaactggcaccaccaccatcaagccatggcggccgtgcctgtgcaaccaatactaggctcgataatggaaggccatcgcgcaggggatgaggtagatgagtcgattcggaagcttctgtataagctaggaggagcaggcccttccacagcactctcggatcctcagtgtgttcctccaatgtactgtgg

SEQ ID NO: 10508 - DNA, 238 bp, Zea mays
  Clone ID: LIB3156-017-Q1-K1-C5
gtgcactctagggcgaggggcctgtcaggcgctggtgcactcaccagggggacccgggtcagcgctaaggctattcaatccgagaaggcaacactaccatgtggtgcaaaccatcaacggggaccgagctcattggcagcctggagacgccgggcacctgcagcctgcttgtggggtggtacctctccaacctgcggggctaccgcaccaccttgagcccgctagctgcgtgtgtcta

SEQ ID NO: 10509 - DNA, 316 bp, Zea mays
  Clone ID: LIB3156-017-Q1-K1-C6
ggccaagcggattcgcacaatcaagcgcaacacgctcacccactcccgctccttctcctgctccggcatgtcggagggcgagtgggtcgacgaggatttcaagaggatgtacgcaatctgacgacccacgctacctgcatgtgtttgagatcatctcgtgcaatggccatcgcgttattgtcaacttgccgtgcttcggaccgggctaacattcttcttccgtcactccttagtggcgattgaagtattgtccaaccgaataaacctacctgtgcgccgcctgcgagagagaagtaataagttttgtcttcataga

SEQ ID NO: 10510 - DNA, 334 bp, Zea mays
  Clone ID: LIB3156-017-Q1-K1-C7
acacttctgtggagtctggagggaatgcttacacagccggtctgaaaaccggggacctggtcctgtacacaagcagcttattcggagaccaactatggcctgcggataaacttgggttcaccaagacagccatccaagcgaagtcagactccgtctacttcgtcgtgagcaggggtgcccaagctgacgtgaagcgcctacctaataagactgcgccaccccggcttggacggaagctgactgattcacaaaaagagagagcaacgcacgttttgcttgattgtgggtacatatacttactacccaagccttttgacgaacagaccgacgacta

SEQ ID NO: 10511 - DNA, 267 bp, Zea mays
  Clone ID: LIB3156-017-Q1-K1-C8
cggacgcgtggggccagggagagcaagagaagaaggaagacaagtcagacaaaacagaagacgagaagaactgatgtagccatgttcatgcttccatgctcacaaagaaattgaacattggtctgcatcggctgcgcatactctcttggctatggaatttgcttatcctcatgtaacagtgctttgtttataacttaatgccgagggaatttgtattgtgactgcaacaatcttctcgtcataaatgttcaagtgatttcgtgtttc

SEQ ID NO: 10512 - DNA, 226 bp, Zea mays
  Clone ID: LIB3156-017-Q1-K1-C9
cggaggtcacggtgcgcgcgacgggcgacgcggcgggggcgccgcggtgcacggcgacggacggcgcgccggcggtggtgttctccatcggcgggtacacgggcaacatcttccacgacttctccgacgtgctcgtgccgctgtacaacacggcgcggcggtaccgcggcgacgtgcagctggtgatggccaacgcggcgccctggtggctggtcaagtacgacag

SEQ ID NO: 10513 - DNA, 185 bp, Zea mays
  Clone ID: LIB3156-017-Q1-K1-D11
atgcgttggacttctttcataattgttatctatgtcaaaaatatgagcccgtcagcttagttgaacaagttacttttctaatgcaattttccttccatatgcatccactctggcatgtttcaagaagaaaggtttactcgctacaaaggttttcaaggataggtgccttaaaaaaaatttctttt

SEQ ID NO: 10514 - DNA, 290 bp, Zea mays
  Clone ID: LIB3156-017-Q1-K1-D2
gctcctcgaggattattacagggccacaatctatcgtatgctccgagaaactgtcacctgccacatggagagcttgaatcttgtggcgtgttcatgcttccatgctgacacagaaaatggacattagtctggatttcctgatcataatcaattggctctggaatacgcttatcctcatgtaacaggcctttatctataacttaatgccgtaggaatttgtcttgcgactgcaacactcttctggccgtaaatgtataaatgcacatccgcttctcttatcaatgaacaaa

SEQ ID NO: 10515 - DNA, 249 bp, Zea mays
  Clone ID: LIB3156-017-Q1-K1-D3
gtggtccctgtctttttccttcggccgagccctccaggcgagcaccctcaaggcctgcgctggcatggtggagaacttctataaggctagagctgtcttcctcatcttgtgcacggccaactctgaggctaccctcgacacctacaagggtgatgctatcgccgacaccgacagcctacacgttattgactacaagtactgagatgcttctcttagcttgccccatttggaactgctgcctactaccta

SEQ ID NO: 10516 - DNA, 386 bp, Zea mays
  Clone ID: LIB3156-017-Q1-K1-D4
accgcgtcggataacatttttaatccatctgaaggtataccttccaccatgaacgctgacgccttggatgcgtttcaaacatcttgcctttccgagtgcttccctaactccattcaagagttcatcggcagtccggatataaacacactggcatttatgtcgcctgagatgcaacaattggatgccggcagcaacttgccgagcacatccaactcctatgtgcagatgagtttctcagaggagagccacagcgcatccttaagtggccttcgcatggaagccatccatataaacagctcgtcatgctctcagccactggcgactgggagcttcgatgcaggggcgttcccgaaactgtcaaacataagagaatgccaacccttgcc

SEQ ID NO: 10517 - DNA, 347 bp, Zea mays
  unsure (1)..(347): unsure at all n locations; Clone ID: LIB3156-017-Q1-K1-D5
gtgaggatggggttcgacgacatgtacctctgcagcccgggaggcatgtacgacaagttcggcaaggactactttctgtgcacggggatggcgtccatgttggtgcccgtcgtcgtcaaccccggcgaggagtggaaggcggcgcangtcatcgagcatgacaacttgtaacttcttcttcttctccttttggtcaacggaattacagaatcgaatacatgtcgatggccccgatctccagtgagatatatacatcattacagatagttctttccatgggaagtgttaaacagtgaatgtaaaatgagaaagtgaatgggaaaactatcatttttntttnnnnnana

SEQ ID NO: 10518 - DNA, 397 bp, Zea mays
  Clone ID: LIB3156-017-Q1-K1-D6
cgagtccaaggaggggatcgatggcgagttccaggagaagaaggctgatctccagcccaaggtcgtcgagatctacgagtctgcccctgcaccactcaaggtcctgatcaaggagaggagcaaggtgtccgggatcaagaagaactccgccgcaatcaccaagttcttcgaggagctggccaagatcggtgagtagatcgatgtagtactaggccacacagtgacagtgccagacagacagcaaattaataaatacacatccgcatatctcatcaatgaacaaattccctggagccaagcaagtgagcgacggcatctccaaggccggcccggccctgctgtccggccccatcttcgccacgttcgagaaggtctccacgctgctccctgtcgtcgc

SEQ ID NO: 10519 - DNA, 319 bp, Zea mays
  Clone ID: LIB3156-017-Q1-K1-D8
ctctaaaaaaaagacggcctttttagtttggtcgttttcctcatcatttgtgcatgccgcacttgcgtgagtggcgcaccatcaagacaaggctgtgagctcttaactttttttgatgaatgcaagggcccgtttgacccttgacctcaccaccaaaaaggagatttgggtcaaaagaaagcagaaagggctacactgaggactttgatgacatatcgcttcacgccgagtctcgagaacccaaagaaaaagggggcggcctgtttttagaaacaaaatttaacccccggctttttcagacgaatagttttttttttgg

SEQ ID NO: 10520 - DNA, 364 bp, Zea mays
  Clone ID: LIB3156-017-Q1-K1-E1
gccacccgcaacctcaatgccatgaacaagctcagcaccaagaagccgtggtccctgtctttctccttcggccgtgccctccaggcgagcaccctcaaggcctgggctggcaaggtggagaacttggagaaggctagagctgccttcctcgccaggtgcaaggccaactctgaggctaccctcggcacctacaagggtgatgctgccgccgacaccgagagcctccacgtcaaggactacaagtactgagttgcttctctttgcgtgcccgttttggaactcctgcctacgagctaagatgcggagtgtggtttgctcgttagagcttattttcggacattcaaaaacatgctttctatgtggg

SEQ ID NO: 10521 - DNA, 216 bp, Zea mays
  Clone ID: LIB3156-017-Q1-K1-E10
cggacgcgtgggccagatcttcagcgagggtggactggactacctcgggaacccgagcctcatccacgcgcagagcatcctcgccatctgggcctgccaggtcgtgctcatgggcgccgtcgagggctaccgcatcgccggcggcccgctcggcgaggtcgtcgacccgctctatcccggcggcagcttcgacccgctcggcctcgccgacgaccc

SEQ ID NO: 10522 - DNA, 368 bp, Zea mays
  Clone ID: LIB3156-017-Q1-K1-E12
gcaagagcgacagagagagaccgacgcgccggcagatcccaagctcaccggagagggggaagagggcgaccgaaggcggcgatgggtttcatcatggacttcgcggagaatctgatcctccgtctgatggaggacccggacaagcgcgaccaggttcggcgggagcatgtctacaagatgaaggagcggtgcgagcgcactaaggcggggtggagccttcctctgcgcccctaccgctttttgacctttcacccgtttaacctgcaacttttcttggatccccaaaataaccaagcccgccgcccgcgggaccccttccaacaccttattggccggcacttttgcttggcggcgtctttcttaacacc

SEQ ID NO: 10523 - DNA, 393 bp, Zea mays
  Clone ID: LIB3156-017-Q1-K1-E2
ttagctcagacatggttctcggcctctacaccttcgccgacatcgacgccgacggagcaccccgcctcgaggttgccgatggcgaggagttcgtccgtgtcgatcgcgttgtcgagcttgccctcggtccccgggtgctgaaggcccctggaaccctttacctcaccaccaggagggtgatttgggtcagcgatggcggcgagggctacgctgtggacttcgttgccatctcgctccacgccgtgtcgcgtgatcccgaggcgtatccatacccctgcatctacacacagatcgagacggaagctatttctgacgaggagtctgatgtgtcagattctgaaacaaatggagaactcgagctctaaaagttatggaaatgcgcatcataccttc

SEQ ID NO: 10524 - DNA, 175 bp, Zea mays
  Clone ID: LIB3156-017-Q1-K1-E3
gcgccttacgcgcatggtttgctcgacgtgcactgtaactaatcgactataagcgtggtggcgattgacgagatgatgccggtggaggaggcggcggcggatgactggtcggagtgcgcgttctcgctgacctgcgaggaagactgcgccgacctcggcgacggcgagctattcc

SEQ ID NO: 10525 - DNA, 413 bp, Zea mays
  Clone ID: LIB3156-017-Q1-K1-E4
gggtgcggtgcagctacgccaaggacgccaagaacgcggccccagtcagcaccaagggcgcaggcgcgtcgctgctcgccgcagcgggcgcggtgaccgcgtcggcggggcccgcgctggcgctcgtggacgagcgcatgtccacggagggcaccgggctcagcctcgggctcagcaacaacctgctggggtggatcctcctgggggtcttcggcctcatctggtccctctacaccatctacacctctgacctcgacgaggacgaggagtccggtggcctctcgctctagatccacctcctctcctgttaatgatctgaatgtaaacatggtggcggtcatcggtgtaaatttagacatggctatttgcatctaagatccatcccctcctgttaataatgtttggagactacg

SEQ ID NO: 10526 - DNA, 180 bp, Zea mays
  Clone ID: LIB3156-017-Q1-K1-E5
gcgacccacgcgccgcgccttagcgcatggttgcttactgcactgtactaatcactatagcgggtgggactgccctaaactcggggaggaagcccggctatactggcagaactgcaaagcctgactgccagaaactgggccaactcgcgacgggagctatttccgtctcagtgccggcga

SEQ ID NO: 10527 - DNA, 138 bp, Zea mays
  Clone ID: LIB3156-017-Q1-K1-E6
gtatttttgttgcattgttaaattttgctacccgtgttccttccgagccccttgaactgtgttgtcagtgtaccgtggagcaagtgtcgcgaactatatttgtggttctcagtcaatgaaaatgattgtttgtagttt

SEQ ID NO: 10528 - DNA, 377 bp, Zea mays
  Clone ID: LIB3156-017-Q1-K1-E8
ggacaagtggtggcacgacacggaaagtatcatccccataaggatgaattgttggttcagatcggatgatcaatcaatagggaaaaaggaagggattactgtaagatggaatgctcgcgtcggaattcattcttctcgttaccgtagcctgagaccatctcagagctcagttagagcctctcaattgatagaggcatgttcatatgaagcgctacgcatatcttattttaccaaaatagggtggcgctggtaattgaagatctgggatctatcagtcaaagtggactactaaaaaaaaacttctgtttgcaaggaaatcttttttttaaagactatttagcttctttcgtagaaaagaaaggaatttgctgcttttc

SEQ ID NO: 10529 - DNA, 164 bp, Zea mays
  Clone ID: LIB3156-017-Q1-K1-E9
ggagaacagaggatctcatttgaatatttgatcctcttttaatgtttcttattgcctgagcatcacagaaaaaaaaaaaaaaaaaaaaaaaaaaaaaaaaaaaaaaaaaatctaaaaaaaaaaaaaaaaaaaactaaaaaattcaaggccgaccaaatataaag

SEQ ID NO: 10530 - DNA, 71 bp, Zea mays
  Clone ID: LIB3156-017-Q1-K1-F1
gttttgacactcgttgtatttctgtatatcgcgtcagactgtgaaataaaagcagtacagtgtgtttcttg

SEQ ID NO: 10531 - DNA, 189 bp, Zea mays
  Clone ID: LIB3156-017-Q1-K1-F10
cggacgcgtgggcggacgcgtgggtgcggaggcaggaagagagacgacggcggccatggcgacctccttccaggggacgaccaccaagtgcaccgcctgcgacaagacggtgtaccttgtggacaagctcaccgccgacaaccgcatctaccacaaggcctgctttcgctgccaccactgcaagggcac

SEQ ID NO: 10532 - DNA, 207 bp, Zea mays
  Clone ID: LIB3156-017-Q1-K1-F12
gcgttccgtgacaccatctacgtcttcgttgagcggtacaaggaccaagggatcaccggagttgctggtgtggaagctagagggttcatttttggtcctcctatcgctctagccatcagtgcgtaatttgtacctttgaggaagcctaataagttgccaggcgaggtgatcttcgaagaatattctttggaatacggaactgacaag

SEQ ID NO: 10533 - DNA, 402 bp, Zea mays
  Clone ID: LIB3156-017-Q1-K1-F2
ggacaagtggtggcacgacacggaaagtagcatccccataaggatgaattgttggttcaaatcggataatcaatcaatagggaaaaaggaagggattactgtaagatggaatgctcgcgtcggaattcattcttctcgttacggtagcctaagagcattcaagagctcagttagagcctctcaattgatagaggcatgttcatatgaagcgctacgcatatcttattttaccaaaatagggtggggctggtaattgaagatctgggatctatcagtcaaagtggactactaaaaaaaacttctgttgcaaggtaatttttttttaagtctatttagcttcttcgtagaaagaagggatttgctgctttcttagtaacaatattcttatgctatctggctatc

SEQ ID NO: 10534 - DNA, 199 bp, Zea mays
  Clone ID: LIB3156-017-Q1-K1-F3
ggacgcgtgggctccgagtcgcccctccccttccgccgtcgatggcgctgccgtcgagcgccttccattcgtcacggccatcctcggggtcccctggtactacaagaaagcggcagcctcgggccgagacatcaggtggtggtgcacctgtgatgagccccacgtggcgtgcttggaggacctgggcgttcctaccacc

SEQ ID NO: 10535 - DNA, 276 bp, Zea mays
  Clone ID: LIB3156-017-Q1-K1-F5
ccgtccgtaccctccagaggaccgtccctgctgctgtgcctgctgttgtcttcctctccggtggacagagcgaggaggaggccaccctgaatctcaatgccatgaacaagctcagcaccaagaagccatgggccctgtccttctccttcggccgtgccctccaagcgagcaccctcaaagcctgggctggcaaggtggagaacgtggagaaagctagagcggccttcctcgccaggggcaaggccaactccgaggctaccctccgcacctacaaag

SEQ ID NO: 10536 - DNA, 350 bp, Zea mays
  Clone ID: LIB3156-017-Q1-K1-F8
cttgctctagctagctagctgctcccggcccatatccactacacaagtaggctagcagcagcagcagcaatggcctcggtgacgaggttcccggccgtggccctcgtcctgctgctcgccgccagcgccttcctggccagcgaggtggcggcgtgcggcggctgcccgaaaccaactcctcctccatcgccaccaccgtcgtcgcccaccaacacgccgtgccctacgccgacgtacagctccggcggcaagtgccccaagaacgcgctgaaactgggcgtgtgcgccaacgtgctgggcctcgtcaaggtgtccatcggcaaggtgcccaccgactcgtgctgcccact

SEQ ID NO: 10537 - DNA, 264 bp, Zea mays
  Clone ID: LIB3156-017-Q1-K1-F9
gggcgctcgggagggaccgcacgacgtgggagaagccggaggagttcatgccggagcggatcgtgcatgaaccgggcgccgtggacgtccacatgaagggcaaggacctcatgttcatcccgttcggctccggccggaggatctgccccgggatgaacttcagattcgcgaccatggagatcatgctggccaatctcatgtaccattttgattgggaggttccgggctctggaacatgggttgtcatggacgaatcctttgggc

SEQ ID NO: 10538 - DNA, 225 bp, Zea mays
  Clone ID: LIB3156-017-Q1-K1-G1
gagagccaattcaacatagaagggatatgttcttctttgttccagaatcagcagccacagcgacagctgctggtagcaccagacatgtatgacaaggacttgcatagaatgtaactatcttttgagaatatataggcattatgtttcaccacatggaagagagcagatcagaagaagcagaaactcgtactcaccagagatttgtggtcagaattattctttatt

SEQ ID NO: 10539 - DNA, 298 bp, Zea mays
  Clone ID: LIB3156-017-Q1-K1-G10
cgcgtcactcaagctaatgagagtgtcatcaccaacatctagtgctagtccccctttctttcatccagccatggtatgcatcaacaccttccataactgccccattgccataagagcaaagatcaacacgaggtccaagggcttcagcagtaacgtgacgaaagggttaccaacaccatccttccatttcctgtgcagggcgtctactttcgcggctgacaccatccctcctctcgtgctggacgaaaaccccaaagcgatcattttgggggcgtggtcctggaacttcttccttctt

SEQ ID NO: 10540 - DNA, 255 bp, Zea mays
  Clone ID: LIB3156-017-Q1-K1-G11
gggggatcaagaagcctcgtggcctatgccagtggcccgcattgcacatggtgggtgcggtggcttaccatctccccaagtgggagagtggacgtcataatttgtggtagagggggtacgcgttcgcgcggcccctgccaaatcttataaattttatttaagtcccctttagagaagggcttgaaatgtaatctttgttattagttcccttcaatgaaaagcttggaaagggaacctttgttccccccattttat

SEQ ID NO: 10541 - DNA, 296 bp, Zea mays
  Clone ID: LIB3156-017-Q1-K1-G12
agcgccggagcatcctcaccggcctcaagggtcgcgacgcccgcagcctcgacgccgggggcgaagcctgcggtgatgcagaagacggcgacactcgctaccaaccatgaccctatcgtggtctcgcaagcgatagaacccagccctccactccctttctccatcctccgatggaagatgcagacgcaaccgtcgcacgcccgatgacagcactcgcattcgtccctttttcttttccttccgggccagggcaaacctggcgtcactgggacgggaaaacggcaacccttggcttc

SEQ ID NO: 10542 - DNA, 273 bp, Zea mays
  Clone ID: LIB3156-017-Q1-K1-G2
gacgccggtttcaagagcgagcctgagaagactaaaccatggggcaatcaaacgcaacagcagtccggctctagatggttgctcgcagctggcatggtcaagggaaacaagcattctctgatgaaatccaaagctgtcgtgaagccaaccaaagaggcagctggccaggcatgaaacaccctcttgagcatctcttcacgtgttcatggagccggcaccaggtggtccgagctagcaagaaataagagccattcacggaaccccaatatcatg

SEQ ID NO: 10543 - DNA, 367 bp, Zea mays
  Clone ID: LIB3156-017-Q1-K1-G3
ctctacttggccaatggtgaatagaacagctatattctcaaaaactagaatagaactgttgaattctaattgactcttcaactaacgtacacttattcgccgctgccgggtgcctgggtttgttgtcagaattcggaactcacaaggcggtttctccgttcttcagagatctgggccagtcgacgacacacacattttttttttgtttttgcttggtcattgtatccatggcccgggagtatgcatgtgctgtgtctcctgcttggcaaacacgtgtcacccaatctagtaataagaaaagaaatataagtagaacagatggaaagacggatcggttaactgatgaatgaacaaatgaacgaatgct

SEQ ID NO: 10544 - DNA, 370 bp, Zea mays
  Clone ID: LIB3156-017-Q1-K1-G4
gctctaccctccttcgcgcggccggcctgattcctcacccctgctcgccgcgaagcacagctctgtcaccgcggtttgccgtggccggcgaagatgatgtccggcggtgggtactccgccctcgacgaccccaaggcctccggatccgtcccggcggccacggggacagatccgccggccatcaggttcgccgactccaacctccagaccttcccgccgtccgaggccaggggcaagatctccggcgcctaccggccgcccaccgacgccgatgacaccttctcgtccaagggcggaggagccggaagcggtggcagaggcggcagcgccgggttggatgatgccgcgcagggcggctggttccgcatgt

SEQ ID NO: 10545 - DNA, 376 bp, Zea mays
  unsure (1)..(376): unsure at all n locations; Clone ID: LIB3156-017-Q1-K1-G5
accgcgaggaggaaggatgcccgctcagtgaagatcaagaggagcaaggatgttgtcaagttcaaggtgcgctgctccaagtacttgtacacgctctgcgtcttcgatgctgagaaggcaaacaagttgaagcaatctcttcccccaggtttgaccgtcgaggaggtctgattggatacatggcaacgccgggttgaactacccaagcttctttatcagtagcagagcatgctactcatgtacttttggaacctaagctattagacctgtcagtgttggatgtgtggatcttgcatttttgtggagaaataccaatttacctcgttcaaagaannanaaaaaaacaaaaaaacacccccanaaaaaannttggggc

SEQ ID NO: 10546 - DNA, 372 bp, Zea mays
  Clone ID: LIB3156-017-Q1-K1-G6
acgccgcctcctacggtaggtagtagtagcgatggtctataactggatcggacaaggacgacgacgacgaggacgatcgatcgccttcatctgatccctacatcgtgcacgtgcgcatgcagggttcacggtgaccaacgccgggtgctgcggggtcggcaggaacaacgggcaggtgacgtgcctgccctaccaggcgccgtgcgccaacagggaccagcacatcttctgggacgccttccacccgtcggaggcggccaacatcatcgtcggccgccggtcctaccgcgccgagtcgcccaacgacgtctacccgatggacatcagcacgctcgcctccatctgattctcattctgatccctccataaata

SEQ ID NO: 10547 - DNA, 183 bp, Zea mays
  Clone ID: LIB3156-017-Q1-K1-G9
aacgacaacaaagtcaattacatcatgatcttaaaccaagaacacacgaaacttcctgaagggttggattaccactcaatgacaaatctatcacttgaagctcgtgagaaactttccaaggtgcgtgcacatacaataggtcaagctagcagactcggcggtgatgagcccatccgacatgac

SEQ ID NO: 10548 - DNA, 356 bp, Zea mays
  Clone ID: LIB3156-017-Q1-K1-H1
gccaccctaaccgtaaagaagccgacgcatttgtctttggagcatttgatgggccatttaaggctgcggtgaaggctttgatgaataggcgcacttaccttctggagatgaatggcttctagaaatcttgtggtatcgagcttgttggtgctatgcatggcatatttagctaagcttttcatctttgtaatatccaagaaagcaccatctctagttgctgcttttagtctgctgttttagctctttgtacagtgttaacatttgattatataaaaatcgtatcaagttctctagtgtaatagcgaatcgctccatagttcaccattctggcccctggtgtaatatccaagaaatca

SEQ ID NO: 10549 - DNA, 210 bp, Zea mays
  Clone ID: LIB3156-017-Q1-K1-H10
gttccagaagaccaagctcatgacccgcctcacgtacacgctggacgagatcgagggcgggctcgaggtcggctccgacggcacgctcaagttcgaggagaaggacggcatcgactacgccgccgtcaccgtgcagctcccggggggcgagcgcgtgccgttcctcttcaccgtcaagcagctcgtcgccaccggcaagcccgaaagctt

SEQ ID NO: 10550 - DNA, 230 bp, Zea mays
  Clone ID: LIB3156-017-Q1-K1-H11
atgaggctacagatatctacagagagcattaggctcctgttgtttacgctgaacatgtgggtgatgaatgcctcgtgaacccaacttgttatttttcttcaactgaggcagagcctgagacacttgacgattatgtggacgatcaggaacaaaaagaccaacacttcacccagcggcgctcttaccagaaccagcgtaatggcggtggtcgtggtggtggcaggaagggc

SEQ ID NO: 10551 - DNA, 93 bp, Zea mays
  Clone ID: LIB3156-017-Q1-K1-H12
aagatgtgtcttttatttacacaaagtttggacttttgatacataacagtttggtgggctggaatagacaactgaagacatgtcttctgcaaa

SEQ ID NO: 10552 - DNA, 126 bp, Zea mays
  Clone ID: LIB3156-017-Q1-K1-H3
gtaatcttttgtggtgccacagatgagaactcttcggatttaaaccgtcaatctttcaggcgggtaagtgaaataaatataactataaaaataaaactctagacctaaacaataaataaaaaataa

SEQ ID NO: 10553 - DNA, 419 bp, Zea mays
  Clone ID: LIB3156-017-Q1-K1-H4
ccgtctcccgccttcctctcgccgcggtctccgccgcgcgtcgcgagtgtctctttgggggaagggtggtaggaggagtggtgagggcgcccgctagactttctaagcgcgggttgtgcgccggcgcaaaggctgacgactcggccgtcacggtggaggccatggaatgggtcaagaaggacaggagacgcctgctccacgtcgtctaccgcgtcggggacctcgacaagacgatcaagttctacacggagtgcctgggcatgaaactgctgaagaagagggacattcccgaggagaggtataccaatgcctttctggggtacgggcctgaggattcacattttgttgtggagctcacttacaattatggtgtggagagctataacattcggactggttttggcccacttggaattgct

SEQ ID NO: 10554 - DNA, 208 bp, Zea mays
  Clone ID: LIB3156-017-Q1-K1-H5
agcgatcccactcccgatcagcagctgatcgctcactcttgcagctcgatcattcttagctgctctagctctagctctagctctagcctctagccctagcccctagctagtagctagccactcgatcgtgtagtcatcagccttctgatcgtcacccatggccactgccgaggtccagaccccgaccgtcgtggcgaccgaggaagcg

SEQ ID NO: 10555 - DNA, 362 bp, Zea mays
  Clone ID: LIB3156-017-Q1-K1-H8
ccgatgccgcctttctctcgcgcgggtctccgccgcgcgtcgcgagtgtctcttttggggaagggtggtaagaggagtggtgagggcgccccccagactttttaagcgcgggttgtgcgccggcgcaaaggctgacgactcggccgtcacagaggaggccatggaatgggtcaagaaggacaggagacccctgctccaccttgtctaccgcgtcggggacctcgacaagacaatcaaggtctacacggagtgcctgggcattaaactgctgaagaagaaggacattcccgaagagaggtataccaatgcctttttggggtacgggcctgaagattcaccttttgttggggagcctcacttta

SEQ ID NO: 10556 - DNA, 296 bp, Zea mays
  Clone ID: LIB3156-017-Q1-K1-H9
caagacccagtaggctagtagagagatagatttctgcctccctatcgtgggtcgtccccgatggcctttggtcgcagaccatctttgctgcttgtctatgctgagaataaatgtgaacggtgcccctggacgctggatccatgctggttttggacacgctgtctttttgtgtttaacttatctgctgccgtcctgtaacgaattcgcaaggtttagttcttttgggctttgttaaaccaaaaaaaaacattaggaataacaaaaaaaaaagggggggcgcttttaagggtcccaac

SEQ ID NO: 10557 - DNA, 307 bp, Zea mays
  unsure (1)..(307): unsure at all n locations; Clone ID: LIB3156-019-Q1-K1-A1
aaannannnnnnnaggggncnntggggggggaaaaaaaaaaaaattttcgggtattccccctttgagacggggggggggggcggaaaccaaaaaatttttttttttttttaagaccccccggtttaaacacaaaaatgcatggggcttaaaaaaagggagttattttttttttttttaaaaaaaaaggggccttccttttgggggggggggacaacccccccggggaaaaaaatacccccccccctccaaaaaacccgttggaaaaaatgaggcccttcaaaaaaaaacccccccttttttttttcc

SEQ ID NO: 10558 - DNA, 386 bp, Zea mays
  unsure (1)..(386): unsure at all n locations; Clone ID: LIB3156-019-Q1-K1-B1
ttttttttttttttttttttttttttttttttttttttngggnnnnttcccaaaagggctctttgggttttttataaacccccctattaaaaaaaaacacatttttcggggtccaaaaaatatggaaatttgtgtgggaaaaaaaaaaaaacaaaaaagcgttccctatccaaaaaaaccacccccccaaaaagaaaccaaattcccttttatatacacaaaaaaaaaaatctttttcccaaccaaaatttttttaaaantccnaactccccggcccaaatcccaaataaaccaaggtccaaaaaaaagaccttaattttcccattaaaggaaccctgggcccccttgcaccngtttagcccttttttttccgccccttaataact

SEQ ID NO: 10559 - DNA, 105 bp, Zea mays
  unsure (1)..(105): unsure at all n locations; Clone ID: LIB3156-019-Q1-K1-B4
aaagtaaanatagtataaaagtaagtttttgaaaataagataaaaaagaataaggatgtaatttgtanaaattttaaaaaaaaaaatttttttttttattttaaa

SEQ ID NO: 10560 - DNA, 357 bp, Zea mays
  unsure (1)..(357): unsure at all n locations; Clone ID: LIB3156-019-Q1-K1-B7
aattagagtgaaaggttnnatttttttttttttttttttttttaaannnaaaagaaaaggaattttttaaaaggtttatttttggttgagggaaaaattaaagggggtaaattaaagggaatttttttttaaggagggggattttaaaaaagggaaacaaaaaaaaaatttttttttgggtcccaaaaaattttttaaaaaaaaatggaaagggaaaaggggttttatttatttttttaagtttaaaaaaaaaaaaaaacacttttttttttaacccaaaaaatatgtccacaaaaaaaaaaagccccgccggggagaaaaacacgggccataacaacccaattatttgttttccct

SEQ ID NO: 10561 - DNA, 266 bp, Zea mays
  unsure (1)..(266): unsure at all n locations; Clone ID: LIB3156-019-Q1-K1-C1
aaantnnaaaaatnnnaagggggantggtgggtatttataaaaacaaaatgggggggctttttttttaacacaaaaaatttggatttattttttttgggggaccccggaccccccccctttgttaaagacccctccccaaaaaaaagttaaaaaaaaattttttttttgtaacaaattttttaaagggtttttaaaaaaaaaaaaaggggtttcccccccccccccccatataatgggggccacccccctcccccccccccctttt

SEQ ID NO: 10562 - DNA, 92 bp, Zea mays
  Clone ID: LIB3156-019-Q1-K1-D2
aatagtagtaatattttaaataattaaaaaaaatttttaaaaaatatttttgaaaaaaacttttaaaaaaaatttttattaaattaaatgtt

SEQ ID NO: 10563 - DNA, 182 bp, Zea mays
  Clone ID: LIB3156-019-Q1-K1-H4
ggacccaaaaaaaaaaaaaaaaccctccaaaaatgaaaaaaacccccccccccccaaaaaacccaaattcccacaccccccccctaaatttttaaaaaaaaaaaaccgtttccaaacttttgggcggtgtttttaaaaataaaaaaaaaaaaaagccccaaaacaaggggctttttttaaac

SEQ ID NO: 10564 - DNA, 294 bp, Zea mays
  Clone ID: LIB3156-020-Q1-K1-A11
cttcaatccacctgtccgtgatccgctcacctagaacctgctagaaggcgaaccaacccgcacattcacttctcttcccatccgtacgaactcgcagatcagagagaccgaggcgcccgcggttctgctttccttccttgccccgttcacgagagaagtttctggagtcttcgactcgagcagggttccgatggcgctgcaatggatgatcctggcgtgcgtggtggcggtggaagctgcggtggctgcgctggtcacgctcccggtgccccgcgctgtgcggggccagatcgt

SEQ ID NO: 10565 - DNA, 302 bp, Zea mays
  Clone ID: LIB3156-020-Q1-K1-A12
gttagctttgtaattatcaagcatttggttcaattttgacagaggattgatgtgtgtgtataaaaaaaaaaaaaaaaaaaaaaaaaaaaaaaaaaaaaaaaaaaaaaaaaaaaaaaaaaaaaaaaaaaaaaaaaaaaaaaaaaaaaagataaaaaaaaaaaaaaacaaaaaaaacaacaaaaaagcagaaaaacactctcaacaagaatggatgaaaactccatcccttcattccaggagatgaacatatacaatgacgaggtcactctccagttcttgaaccctaaggtgcacgctatcat

SEQ ID NO: 10566 - DNA, 387 bp, Zea mays
  Clone ID: LIB3156-020-Q1-K1-A3
cttgtacaatgcattaataatgcatgcttatttggcatacggtgtccctgaaaatgacattaagctgttcgcgctaatgcaaaaggcctgttacacgatcggcgggcagcctgtcagtgcagccgaaatagagtttgtgattctgaagatgaagacaccggtgcaccggccacagctctccttgatgctggcccttcacaagtttaaaacgtcagagaacctcaggagatattcaatcgatggcactgagcctcgcgtcctcttcgcgctctgctgtgggatgttctcttctcctgcggtaaggatcttctctgctgaaaacgttcgagctgagcttcaggagtccatgagagactacatccgagcgtcagttggcataaacgacaa

SEQ ID NO: 10567 - DNA, 382 bp, Zea mays
  Clone ID: LIB3156-020-Q1-K1-A5
tcggcaacagcatccccatcaacctggtggtggccgtgatcgcggaggtcatcctggtcggcggcgccgagtactaccggatcaccaacggactggaccttgaggacaagctgcaccccggtgggcccttcgaccccctgggcctggccagcgaccccgaccaggccgccatcctcaaggtgaaggagatcaagaacggccggctggccatgttctccatgttcgccttcttcatccaggcctacgtcaccggcgaaggccccgtggagaacctcgccaagcacctcagcgaccccttcggcaacaacctgctcaccgtcatctccggcgccgccgagaggacgcctagcctgtaaggacggacgccacgccgccgagcaat

SEQ ID NO: 10568 - DNA, 365 bp, Zea mays
  Clone ID: LIB3156-020-Q1-K1-A7
ccagttcgagggccagatcccggacacgctgtgggcgtcgcccgccacggtcatcacgctggccaacaaccacttcaccggcgccgtcccggcggcctacgagttcggcgccggcgccggcgccggggccggtggccgggtccgcgaggtgctgttcctgaacaacaacctgaccggctgcgtgcccgaggcgctgggcttcctccccagcatgcaggtgctggacctcagctacaacgcgctgtcgggacacctcccggggacgctctcgtgcctgtcggggatcgaggtgctcaacctcgcgcacaaccagctcacgggcgagctcccggacctgctgtgcgacctgcgccggatcaccaacc

SEQ ID NO: 10569 - DNA, 294 bp, Zea mays
  Clone ID: LIB3156-020-Q1-K1-A9
ggcagatctcgtcgctgctgcaaggcctggcccggtcactctcggtggggagggacagggacagggacagggaccggaaagggaacggcgcaagcgaccgcaagaccgccgtgccggcggtgctgcggacgtcgggcaccctgtggggcgacggctcggacacgttcgccgccgtctgctcgcggcgcggcgagaaaggcatcaaccaggactgctccatcgtctgggagggattcgggtgccaggagggcaccatcttctgcggcatcttcgacggccacggccagtggggcc

SEQ ID NO: 10570 - DNA, 391 bp, Zea mays
  Clone ID: LIB3156-020-Q1-K1-B1
agcaacttgtctactgatctgaacggcaaggccatgcccaagaaggattcagcgtgtgcagagaaacagcctccgaaccgtgcgaggccgaaaggaatgagtggcagcagcaattttgcagacgggaaggcctcaacctcaacaaccggagatcatgaaggccgtcgtacccggcagcctcctggcggcgacagcagcattttgctgggctagcgtgcatatgaatcttgcctatgccgcctccgcacgggtggttggtccgtcagtatgtggtcttgttttcgtggtcaggccatgtgtcccatctcctgtccttcagatgatctggttcgcatctgtcttgtgtatggttttgatatgtgttggttgagacatgccccatggaacaacc

SEQ ID NO: 10571 - DNA, 291 bp, Zea mays
  Clone ID: LIB3156-020-Q1-K1-B10
gtatctcagcattccaagtacttttgcgagttctgtgggaagtttgctgtgaagaggaaagcagttggaatttgggggtgcaaggactgtgggaaggtgaaggctggtggtgcttacaccatgaacactgctagtgcggtcaccgtcaggagcacgatccgccgcctgagggagcagactgaagcatgatatagctctttatattattggggtttcctgtagttgctcttgtcaggcatgttgtgggggccttctctagtggaaatgtggaatcactgtactggctgtttt

SEQ ID NO: 10572 - DNA, 289 bp, Zea mays
  Clone ID: LIB3156-020-Q1-K1-B11
cggacgcgtggggtcgctgtcggtgagaacgcgggtggcgacgacggcgcctgtggccacgccggggtccagcacggcggccaaggatgggaagaagaccgtgcggcagggcgtggtggtgatcacgggcgcgtcgtcggggttgggcctggcggcggccaaggcgctggcggagaccggcaagtggcacgtggtgatggcctgccgcgacttcctcaaggcggccaaggcggccaagggcgccggcatggcggacggcagctacaccatcatgcacctggacctggcc

SEQ ID NO: 10573 - DNA, 291 bp, Zea mays
  Clone ID: LIB3156-020-Q1-K1-B12
cctccgacccatcactctctgctcgcgcactctcacctgcccgcgccgtattcgaccgccgccaagatgaacaaggagaggctcatgaagatggccggcgccgtccgcaccggcggcaagggcaccatgcgcaggaagaagaaggctgtacacaagacggtcaccacggacgacaagaggctgcagggcactctcaagagagtaggggtcaacaccatccctgcaatcgaggaggtgaacatattcaaggacgatctcgtcatccagttcttgaaccccaaagtgcaagct

SEQ ID NO: 10574 - DNA, 96 bp, Zea mays
  Clone ID: LIB3156-020-Q1-K1-B2
cctggattaccgagtaagccctgaaagaaccatggtgctatgccccatcgtcgaggatttcaggaacaagattttactcactgaccttcatgtgat

SEQ ID NO: 10575 - DNA, 381 bp, Zea mays
  Clone ID: LIB3156-020-Q1-K1-B3
gcaaaactctccgattttgggcttgcaaaagacggacctgtaggtgataaaactcatgtctctgctcgagtaatgggaacctatggatatgcagcaccagaatatgtcatgactggtcatctgacatcaaagagcgatgtctacagcttcggggtcgtgcttcttgagatgatgtcggggcgcaggtcaatggacaagaatcggccgaacggggagcacaacctggtggaatgggcacggcccctcctaggggagaggcagcggttctacaagctggtcgaccctcggctggagggcaacttctctgtgaagggcgcgcataaagcggcgcatctagcgcgcgcctgcctcagccgggaccccaaggcgcggcccctgatg

SEQ ID NO: 10576 - DNA, 382 bp, Zea mays
  Clone ID: LIB3156-020-Q1-K1-B5
ggttcctgtcctggagacacctgatggtcctgtctttgagagcaatgcaatagcgagatatgttactcgcttgaaggctaacaacccactttacggatcttcactgattgattatgcccatattgagcagtggatggactttgctgcgacagaggttgatgccagcattggaaagtggttgtacccacgtatggggttttatccctatgctgctgtgacagaagaatcagccattgctgctttgaagagagcattcggttccctgaacacccatcttgcatcaaacacattccttgttgggcattcagtgacacttgcggatattgtgctgacatgcaatctttatatgggctttagccgtatcttgactaagagttttacc

SEQ ID NO: 10577 - DNA, 382 bp, Zea mays
  Clone ID: LIB3156-020-Q1-K1-B7
caaaaactcatcttggagaggaagaagctaaacctggagaaacttaggatggatcggcagaaattgaaggaggacaaggaagaggaggtcatgatattgagcatggatctgagtaaatgtaaccccctacttcgacaatactacgaggctaagcaacaagagatattggcaagggttattggaaactcgtcgtcaagcaagtgaggagtgaacgaagttaatttgtgttagtggttgagtaagtcatgttatttgttttcgagaaaaactgcatgtttctgaaccatatttttgttcttgttccaagttgtttgcaaacttgatattttcagtatgtcatgcttgaacattgcaatgttggtcgatgataatggacttgtta

SEQ ID NO: 10578 - DNA, 215 bp, Zea mays
  Clone ID: LIB3156-020-Q1-K1-B9
aaaaaaaaaaaaaataaaaaaaaaaaaaaaaaaaaaaaaaggaaaaaaaaaaaaaaaaaaaaaaaaaaaaaaaaaaaaaaaaaaaaaaaaaaaaaaaaaaaaaaaaaaaaaaaaaaaaaaaaaaaaaaaatgaaagagaaaaaaaaaaaaaagttgactgggaaataaattggaaataaaaatgtgggggggggggttttaaaatttaaaatttt

SEQ ID NO: 10579 - DNA, 386 bp, Zea mays
  Clone ID: LIB3156-020-Q1-K1-C1
agaggccttgctgacaggcttctctgactggcacgacaagtggagcagaggcggcggcggcacaaactgtgacccggcctaactgctgacaggcccatctgcagtcgtccaatttgttcatctcctctctttccctaggcccccaaccttgcagaatgcaataatacagtgtacttgtcttgatgctgggttggtcattgacatgttatcttagttgtagtgggacgaggtacatctcatcaagacgagaattctcacaacttttaagtgtcaattctcgtgccctattatttctcggtttcatccgctgtcgtcgcggtgctgcatgctgcatgcacgcgccgcacgcattgtaactccgctcctgattctggagatgcatatgc

SEQ ID NO: 10580 - DNA, 286 bp, Zea mays
  Clone ID: LIB3156-020-Q1-K1-C10
ccggccctcaacctcgccgacctctggaagtactgaagcctgggcgacgatcgaccggtggctgggccgcccacccgccccggtcacgtggtctggttggttaatttgcttgatttgattgattatcttggtctcttgtgggatctggggttggtgaccggttcgctgatgcgtcctcgttcgtcacctccgccaggtccggcctctactgacctcgggtctgactagattattatccgtccagaccgccaggggattagggcttccttgttaattaattaatcct

SEQ ID NO: 10581 - DNA, 262 bp, Zea mays
  Clone ID: LIB3156-020-Q1-K1-C11
cggacgcgtgggtcagtttgctgctaccataaagaagtggaggccacctgagccatacaagggaaagggtatcagatatatggatgaagttgtccgaaggaaggaaggaaaagccgggaagaagaaatagaaagtgttttttttttgcctttcccttacttcatttcatttttcccactgtaatgatcttcgtctgctaaggctgaacctaagaaaaatattgttctgtgctgatcatggcatatagatgtacactttgagc

SEQ ID NO: 10582 - DNA, 292 bp, Zea mays
  Clone ID: LIB3156-020-Q1-K1-C12
taaaaacatgtttgacccagcattggagacagatcctgattttgacttggatattcgagatgatgtccaagatgagtgttccaagtttggtgcagtgaagcatatttttgttgacaaaaatactgcaagctttgtgtatctgcagttcgatagcgtgactgcagcagcaaaggcccaaaatgcccttcacggaagatggttcgctgggaagatgattacagcgacatttatgtccgctctggagtacagtacgaagttcccaaacttgtgagcatatgccgggaagagttgg

SEQ ID NO: 10583 - DNA, 112 bp, Zea mays
  Clone ID: LIB3156-020-Q1-K1-C3
cccacgcgtccgaaaaaacataaactttttaaaaattcaaaaaaaaaaaaaaaaaggggaaaacacgaaaatagataaaatacctaactggtgggcgagccttcatgttccc

SEQ ID NO: 10584 - DNA, 382 bp, Zea mays
  Clone ID: LIB3156-020-Q1-K1-C5
ctaatatctcacaagccatttgtgatgaagatgatgagctcagagtattggatccaccagcccctgcatcagtgagcaaaagggcaaaaaatgttggtactggtaattcaagaacaagaattaacaagcgtacacaagatgggaatgtggttgagatgatgggaaggtttctagaaatgaaagaaaaacaagctgaggcggatgaaagggccacaactaatgcaaatgaggatgatttccctattcaaacatgcattgctattgtggatggaatggaagagttttctgatgatgagatggttgattctcatgatgtttttaaggatgcccaaatccgggccattttgatgactgccaaagatgctacgcgcataaaatggtt

SEQ ID NO: 10585 - DNA, 381 bp, Zea mays
  Clone ID: LIB3156-020-Q1-K1-C7
gtggccaccgccatccgcggcgccatcatcctagccaagctctccgtcgtccccgtcaggagggggtactgggggaacaagatcggacagccccacaccgtgccctgcaaggtcaccggcaagtgtggctccgtcactgtgcgcatggtgcccgcgcccaggggttctggcatcgtcgccgcgcgcgtgcccaagaaggtgctgcagttcgctggcattgaggatgtcttcacctcgtcccgtggctccactaagacccttggcaacttcgtcaaggcaaccttcgactgcctgatgaagacctacggcttcctcactcctgaattctggagccagaccaagttctccatggccccgttccagcagtacaccgacctgctg

SEQ ID NO: 10586 - DNA, 290 bp, Zea mays
  Clone ID: LIB3156-020-Q1-K1-C9
gaaaacggaagggcgccatgggaaggggtgagggcgcggtgcaggaaggaatggggcatgttccagaccaggatggcggaggcggagaaggcgtattacaagatgatgggcatcacccctccaaactccacgcgtgtctagccgcgcctctcttcttggttttccatccccgccaccctgacctttgtggtggcgggtgagctgatgatactatactatagcactacttgattatagggagttagagatggtgggtgtagctgcttttgatggagaggtccttctgtaag

SEQ ID NO: 10587 - DNA, 387 bp, Zea mays
  Clone ID: LIB3156-020-Q1-K1-D1
ctaacttccgggaggttgccatcaaaggtttctgggacatgtacgacccagagggctactctttgtggttctgtgactacaagtacaatgatgagaacaccgtctcctttgtgaccctgaacaaggttggtggattcctgcagcggatggacctgtgccgcaagtacgcctttgggaagatgctcgtgataggctctgagccacccttcaagctgaagggcctttggctcttccgtggccaggatgttcccaagtttgtaatggacgaggtctatgacatggagctctacgagtggaccaaggtggacatctctgatgaggcccagaaggagcgtgtcaatgcgatgattgaggaccaggagccctttgagggcgaggccttgcttg

SEQ ID NO: 10588 - DNA, 293 bp, Zea mays
  Clone ID: LIB3156-020-Q1-K1-D10
cttgacaacaaatggaaagcccaaagaattattcttctccagtgatctatgtgctattgtagagcatacgaagaactacttagctcttgaagataatgaaattgttcatattaaggatggtagtgtttcgatcctcaagtttgaccctcacaaagagaagccagcatctgtgcaacgagcattgtctgttcttgagatggaagttgagcaaataaagaaaggaagttatgatcacttcatgcaaaaagaaatccatgaacagccacattcgttgaaaacaacaatgaggggta

SEQ ID NO: 10589 - DNA, 289 bp, Zea mays
  Clone ID: LIB3156-020-Q1-K1-D11
attcactacatgattggctgtacgagtacatgatgagaaaggatgagaaggagtatgttgtttggctgaagagcatgaaggagttcatcggcggaaattgattgtttgcgctttaagttttatctgcattgtgagaacgagacctgtactcatcatgaaatactagcatcataattgcgcgaagatacctggcatggctttacatcctgctggtgcaagagtttttgttgaaaaaaaaaaaaaaaaaaaaaaccataaaaaaaaaaaaaaaaaaaaaaaaaaaataaaa

SEQ ID NO: 10590 - DNA, 294 bp, Zea mays
  Clone ID: LIB3156-020-Q1-K1-D12
ttttcaacttcgccttatctcctaaccctcccggcgaagtggccatgtcgaacccgaagggctccaagatgctccagttcatcaactaccgcatgcgggtgacgatccaggacggccgccagctcgtgggcaagttcatggcgttcgaccgccacatgaacctcgtcctcggcgactgcgaggagttccgccgcctgccgccctccaagtgctccaaggccaccggctaacgcgaggagcgccgaacgctcggcctcctcctgctccgcggcgaggaggtcgtctccatgaccg

SEQ ID NO: 10591 - DNA, 387 bp, Zea mays
  Clone ID: LIB3156-020-Q1-K1-D3
cggacgcgtgggcttggaaccacccatggtaggaggatgaccgttcgatttcatgattgtaaattcttcagtagtggttcttttctccccgcctggcgattgcagaaaactgcatatacgagtgtaaatgtattttgctcttcgatatggttttagctttcgtgttgtgcgaggatagctccttaagggcttgttcggttattcccaatacacatggattgaatgggattggaaaaaattgtgaagaagtttgacttgtttgggattcaaacccatccaatcccgctcaatccacatggattgagagctaaccgaacaagccctaagtgggatgtgtgatatagtcttttctgtataacacgttgtcatggagagatgccttttaaa

SEQ ID NO: 10592 - DNA, 355 bp, Zea mays
  Clone ID: LIB3156-020-Q1-K1-D5
ccggaattcggtcgcccacgcgtcgtcaggacgcgggtggacggggcatccgtcaacaaggcgtacgggatgacgggttcgagtccacgggacggcccgcgcttaaccggtgttcaacgagggcatgaagaaccactcggatcataccaagaagctgtggactttcacgggcttcgagggcgtgtcacgctggtggacgtgggcggcggcgtggcaccacgctgcacgccatacgtcccgccacccgcacatctccggggtcaacttgacctgcgacgtatctccgaggcgccgccttccccggcgtgcgccacgtgggcggggcatgttcgagtcgtcccgcggcgacgccatc

SEQ ID NO: 10593 - DNA, 379 bp, Zea mays
  Clone ID: LIB3156-020-Q1-K1-D7
atcctcgtcctaactagctttcttcaggttttcttcccactgggacccgtgtcggtgggcttgttcggtggtctaggggctctggtcttctcaggcttcatcctgtacgacaccgagaacctgatcaagcgccacacctacgacgagtacatctgggcgtcggttgggctgtacctcgacatcctgaacctgttcctctccatcctgaacatgctcaggagcatgcaatccgacaactagccggtcaaagcaccgcaccgcggcctcttgatcgaacacggtatacccccatggtaaatgcggtcctgtgctctggttgttaagaggacgggatcgaagtgcacatatgtattgtgtgagcccactcgtgtcaacactg

SEQ ID NO: 10594 - DNA, 289 bp, Zea mays
  Clone ID: LIB3156-020-Q1-K1-D9
gcagagctcctgcggcctagacaaaatcgacttcggctctgatgtagtagaatagacagtagagccatcgcgaccacaccagggtgctgagctaaattccaaggtgcactgaatcaccctaggcttttccattacctgtgttggttactggaaaaccagtccggtagatgcgggtttgcgcagaacgatggagtgtttttccctgcacatttgatgtctcatgttcgccaccaagtttcaaggtttgtaccacaagatccatttatcagaaagaccacacagtgagata

SEQ ID NO: 10595 - DNA, 388 bp, Zea mays
  Clone ID: LIB3156-020-Q1-K1-E1
ggcgcccatgccatcgctgggaggcacacccctggtacattcactaatcagctccagacctccttcagcgagcctcgactgctcatccttactgacccaaggactgaccatcagccaatcaaggagtctgctctggggaacatcccgaccattgccttttgtgacactgactctcccatgcggtacgtcgatatcggcatcccagcgaacaacaaggggaggaacagcattggatgtctgttctggcttctgtccaggatggttctgcaaatgaggggcactatccttcctgggcacaagtgggaagtcatggtcgatctgttcttctacagagacccagaggaagcaaaggagcaggaggaggaagttgccgcggcccctgagtttg

SEQ ID NO: 10596 - DNA, 291 bp, Zea mays
  Clone ID: LIB3156-020-Q1-K1-E10
cacgacttcgtcttcaaatctggcaaaaatgtccttattgaattctatgccccctggtgcggacactgcaagaagctggcgcccatcttggacgaggcagccaccactctccagagcgacgaggaagtcgtgattgctaagatggacgcgactgccaatgacgttcccagtgagtttgacgtccaaggctacccgaccttgtacttcgtgaccccgagcgggaaggtgacatcctacgacagcggcaggacggcggacgacatcgtcgacttcatcaagaagagcaaggag

SEQ ID NO: 10597 - DNA, 296 bp, Zea mays
  Clone ID: LIB3156-020-Q1-K1-E12
gcgggatagcgatggaaaatccaggtgttttggatttgtcaattttgaaaatgcagatgctgctgctcaggctgttcaagagttgaatggcaagatattcaatgataaggaactgtatgttggaagagcacagaagaagtctgaaagagagatggagttgaaggagaaatttgaaaagaatgttcaagaggtagctgagaagttccaaaacacaaacttgtatttgaagaacttagaggagaacattgatgatgagaaattgcgtgaactctttgctgagtatggcaatattactt

SEQ ID NO: 10598 - DNA, 384 bp, Zea mays
  Clone ID: LIB3156-020-Q1-K1-E3
ttggtctttaccaggccctttcaaatgtagcaaatgaggggctattgacagaaggatttttctggattccatcactgggaggtcctacaacaattgcagctcggcaaagtggttctggaattacatggctcttcccatttgtggatggtcatcctccgctaggctgtcatgacacaatatgctaccttgtattgcctgtgctacttgttgcttctcagtatgtatctatggagatcatgaagccacctcagagcgatgacccatcacagaagaacacaatgctcattttgaaatttcttccatttatgattggctggttctctttgtcagtgccatcaggattgtctatttactggtttacaaacaatgtcctcagcacagccc

SEQ ID NO: 10599 - DNA, 375 bp, Zea mays
  Clone ID: LIB3156-020-Q1-K1-E5
atcagacggcgccatggccggcacgtgcgcccacgtcgagttcctccgcgcgcaggcggcgtgggcgctggcgctggccgccgtgggcctgctcgtggccgtccgcgccgccgcccgcttcgcgctctgggtctacgccgcgttcctccgcccagggaagcccctgcgccgccgctacggcgcctgggccgttgtgacgggcgccaccgacggcatcggccgcgccgtctcgttccgcctcgccgcggacgggctcgggctcgtgctcgtcggccgcaacccggagaagctggccgccgtggccgccgagatcaaggccaagcaccccaaggtccccgaggtgcgcaccttcgtgctcgacttcgccagcgaggg

SEQ ID NO: 10600 - DNA, 378 bp, Zea mays
  Clone ID: LIB3156-020-Q1-K1-E7
ctcctcttttcctcttcctctcccgttgccaggcatggggttggcctagttgtgcccgttgagcactagcagcctccttgaaacctccagatctgtgcctccaaggcccccgttcctcggcaacaagccgtccagatggacaccgccgcgcccctgcaactgaaagcctgcgccggcgacgccgcggagaagctgctgctcgccgtcgcagccgagggtcctatctgtggtgtgccagacttcaagatgaggggaaagaagagtgatgagctcgaacctgtcgatgctggcgatgaagatgatgatggtggtgacgatggggacgaggatggtgactttggggaggagggtgaagaggacgtctcagaaggggaggga

SEQ ID NO: 10601 - DNA, 291 bp, Zea mays
  Clone ID: LIB3156-020-Q1-K1-E9
gtaaaacgtacagagacacttgataatatctatctatcatctcggagaagacgaccgaccaataaaaataagccaagtggaagtgaagcttagctgtatatacaccgtacgtcgtcgtcgtcgttccggatcgatctcggccggctagctagcagaacgtgtacgtagtagtatgtaatgcatggagtgtggagctactagctagctggccgttcattcgattataattcttcgctctgctgtggtagcagatgtacctagtcgatcttgtacgacgaagaagctggctag

SEQ ID NO: 10602 - DNA, 294 bp, Zea mays
  Clone ID: LIB3156-020-Q1-K1-F10
acaaaatgtggttgcaaagtgccttggcattccatttcacaatgtccgcctcatcaccagaagagtcggaggaggctttggtggaaaggcaatgaaagcaatacatgttgcatgtgcatgtgcggttgctgcattcaagctgcggcgtccagttcggatgtacctcgatcgcaagacagacatgataatggcaggcggtcggaatcctatgaaggtgaagtactctgttgggttcaagtcagatggcaagatcacagccttgcacattgatcttgggatcaatgctggaatatc

SEQ ID NO: 10603 - DNA, 292 bp, Zea mays
  Clone ID: LIB3156-020-Q1-K1-F11
gggcacacgcacggcacgcagatacatatagagagaggttagctatagcttgcacatctatttaactaactaactaactggctagctagctcgatcggcagagcaaagcgaaagcagcaagaagcaaagcaatggagaaccctgcgagtgtgctagttctaccagcgcagttcaccaaactcaccttccgaaacctgtacatccgccgggccgggccgggcagcagggagataaccgaggagggcaggtgcgacctggacaagagatacgtgagtgacttccccgtctacga

SEQ ID NO: 10604 - DNA, 295 bp, Zea mays
  Clone ID: LIB3156-020-Q1-K1-F12
ctccctctcctccctccgcgcctccctcccttcccccacccgatttcacacgtctctctcgctccgagccctctccccacgtgctcgtctctctgccgccctccctttcgcctccccactcgtttcaggtgggtacgggacctgggcggcgacttcaatctcgtccgcgggaaggttgagacggcgggggctggaggtggtgtgcgaggccacgactgggcggcggccggactcggttaagaagagggagcgccagaacgacaagcaccgcatccgcaatcacgcgcgcaaggcc

SEQ ID NO: 10605 - DNA, 353 bp, Zea mays
  Clone ID: LIB3156-020-Q1-K1-F3
cattttccagcaccagcccttctggatggtcaaggcttgcaaagggaccctagacattttgagagagctttaagtagacctgatggtttccttgattcagtacctggaaggcctccttttccaaaccatagaagtgtaggtttgcatgagggttttccaagaaaacaaaacacaactgccagtcaccctgacgtcctgtcacatggagcagaatttgatcatcacagggctattggaatgcctaatttcagaaatccaggcccatttgctcaagggacaagtggtggtcctgctgcgccccctaaaaaccagcttggctctggtaaccttcctggaaacatacaacatgcttt

SEQ ID NO: 10606 - DNA, 371 bp, Zea mays
  Clone ID: LIB3156-020-Q1-K1-F5
gtaagatgttcctgcggaggatcctgaccggcgggggcggcctggcggccctgagggcggcgcgcgccgtgaaggagacgacggggatcgtgggccttgaggtggtgcctaacgcgcgagaggttctggtagggctctacgagcgcacgctcaaagagatcaaggccgtccccgaagacgagggctaccgcaaggccgttgaatccttcaccggtcaccgcctccagatctgccaggaggaggaggactggaagcgcatcgaggaccgaatcggatgcgggcaggtcgaggagctcatcgaggaggccgaggacgagctcaagctcatcgctaaaatgattgaatgggatccatggggtgttcccgatgac

SEQ ID NO: 10607 - DNA, 284 bp, Zea mays
  Clone ID: LIB3156-020-Q1-K1-F7
ctacttgacttcacccagaagcttgaggctgcctgcgttggcgccgtcgagtctgggaagatgaccaaggaccttgcccttctcgttcacggatcttcaaatatcacgaggagccattacctgaacacggaggagttcattgacgctgttgctgatgagctcagatcaaggctggcagccaactcgaacctttgaaatccttgccgaagttgtggtgctttccagcgcgacgctttcgaaccgtttttattatgtcgccattttctttccctgtgccaccaccc

SEQ ID NO: 10608 - DNA, 209 bp, Zea mays
  Clone ID: LIB3156-020-Q1-K1-F9
ggccggacggcgctcgaccgggccaccgacgagaccagagagttcatcctcggcttcgccgccaagaaggcctgaacgaccatgtgcaggtcgatcgtgcccggttcttccggacatttggctgcatgtaactaaattcttcgttttctggaattggtggagtgttcaacctggggtgaacaagcttgttgcagaggtagctttccggt

SEQ ID NO: 10609 - DNA, 137 bp, Zea mays
  unsure (1)..(137): unsure at all n locations; Clone ID: LIB3156-020-Q1-K1-G1
tttggatgctagaattagaatggttaagattaaagagaactgatgtgataggcacatctttttgttgtccctgaaataaagtcagttgtgggcgttgcttgtccgccccntnnataaaataaaaattaaataataaa

SEQ ID NO: 10610 - DNA, 295 bp, Zea mays
  Clone ID: LIB3156-020-Q1-K1-G10
atccttttccccacaatcatggttgaagctggaaggcgttcctcggttttgaatttctttggtaggagtaatgaatcctatctggccagaggttcgaacctgggtgggtgactgggtgttccattacggtgctaccaactgagctatgcttgttctcatgtaataagaacaattcctgttcaaggaggaaaacaaatctgcaatactgctttaagataaaattttcccttttttcacaacaagcaaagataagtgctactgcgtgctaggatacctaatccattatcgatgagga

SEQ ID NO: 10611 - DNA, 291 bp, Zea mays
  Clone ID: LIB3156-020-Q1-K1-G11
cgcctcctcatgaccgcgtgaaaccgctgcgcgcgcgggcggcggatctcatctcatcacccgtccaagattttggtccgcagctgccgagttcagcggtggaagtggaacacactattcgttcattcatttcgtatggtgccagtagcgctattgtttgatttttgtggctgctcctcttgtacagtaccgagtgcgagaaaagatgcatagtcatcgtatacataccaatacaataccgtacctataggtcttcctattcctgtggaagagtagaacttgtatccttat

SEQ ID NO: 10612 - DNA, 135 bp, Zea mays
  Clone ID: LIB3156-020-Q1-K1-G12
gttttttcccgtgggttttaagaaatactccgtaccatgtatatgttgatactatagtagtattgtagaatatagaccaaaagctgtttcagacaccattgcaaaatagagctttcaatatcatggtttaatccg

SEQ ID NO: 10613 - DNA, 67 bp, Zea mays
  Clone ID: LIB3156-020-Q1-K1-G3
ctgctatcctgtgatctgccctgagtggctcctatcgagttatgtttctgtcgggtcttatggatct

SEQ ID NO: 10614 - DNA, 64 bp, Zea mays
  Clone ID: LIB3156-020-Q1-K1-G7
cacgcacgcatacacagcacagagtgaggtaagcatccgaaaaaagctgtgatctgatcgacat

SEQ ID NO: 10615 - DNA, 290 bp, Zea mays
  Clone ID: LIB3156-020-Q1-K1-G9
gcgtccctgctcgcgctgctcctcctggtctctgcgaccgccgccgctgccgggacgagcaagggccgcgcgggggtgcggccgtgccaggatctggcgacgcggggccagtgcgcggcgagcggcgggtgccggtggtgccgcagcgaggcgctcgacgacatgtgcttcgaggccatcgaggcgtggcgccttccgcgtcaggtgttctcctgcgacccaccctccggcgccgcccacgcccgcttcaactgaagtaatgccgcggccggccgccggcgaagctctgc

SEQ ID NO: 10616 - DNA, 135 bp, Zea mays
  Clone ID: LIB3156-020-Q1-K1-H10
gttgttttacgagaaataagaatggaaattactggactccatccatgcttctcatttgcttgttctgataatcatatgctcttcatctagtgcatattgaagtgatgtttcctgtcataaaatggaattgtcctt

SEQ ID NO: 10617 - DNA, 291 bp, Zea mays
  Clone ID: LIB3156-020-Q1-K1-H11
ggttgggcgccgcatatcagcaagagatagccctcgaggtttttggagatgcccaacctgcacctatgataattcagtttccacagatatctgtgagatgtgcagcactgcacgagataaccatgcttttttgcggagacagcatcatcaagccgtaggtaacacggtggaactccctgttgatgagatgcgccgtaagaggctgcaaaggtttgacagatgatgtaaatcattgttgtcagtacacacattgtgcgctgctgaacacagttgaagtatggcaggtccatt

SEQ ID NO: 10618 - DNA, 295 bp, Zea mays
  Clone ID: LIB3156-020-Q1-K1-H12
gttcgagcttacgaatgataatcgtcaactggttttcctttatgagagaggaaaaaagaaactcatggatggtgcccggatagcatttactgacgatgtagatccatcctctatcgccgggaggattgttgaatgctcctggaataaggaagaacagtgttggtcctgtatgcgtattagatctgataaatctactccaaacgacatcaacacataccggaaggtgatgaggagtatcacagataacattaccgaggaaaagcttctcgaagagattgatgagataagtcttctc

SEQ ID NO: 10619 - DNA, 51 bp, Zea mays
  Clone ID: LIB3156-020-Q1-K1-H7
ccacaacaagccagtgcaagaggtacttgctgagatgaccaacggaggggt

SEQ ID NO: 10620 - DNA, 285 bp, Zea mays
  unsure (1)..(285): unsure at all n locations; Clone ID: LIB3156-020-Q1-K1-H9
gatagaactttcttagatcttataatatttggcaggaagacttcaaccacaatgaaacattcgctactggtacaaaactcagaagtacaagatcacagacaaaacagccggacgcgtgggtgaacgtgctacggttatgatggtnacaaaaaaaaaaaaaaaaaaaaaaaaaaaaaaaaaaaaaaaaaaaaaaaaaaaaaaaaaaaaaaaaaaataaaaaaaaaaaaaaaaaaaaaaaaaaaaaaaaaaaaaaaaaaaaaggggggggccgttttaaaggaccca

SEQ ID NO: 10621 - DNA, 351 bp, Zea mays
  unsure (1)..(351): unsure at all n locations; Clone ID: LIB3156-021-Q1-K1-A1
ttcttgggatcctcgaaggaggccaactgttgagcaagcattacaacatcctttcttcaatgtgtgcaattgggtaccaagacctgtacatgatgcttaccatacaaaaacaaacggacctaaagctgaaccaagattggaactgaacctgtgggatttcagcacagaacctgataattgtgtccttgatttaactctcagtctgaagccaagtttttctggaacagaccttggtaagcatgttccacgacgtacagaagaggaaattctcctgtacccgggatttgagaatacccctgtgaagtccggttnttggcctctggtgccatctgatcgtcccgttggtgatgt

SEQ ID NO: 10622 - DNA, 202 bp, Zea mays
  Clone ID: LIB3156-021-Q1-K1-A10
cggagaccagataagaacccttccgtgcaagcacgagttccacctgcaatgcgttgacaagtggctgaaagaaatacacagggtgtgccctctgtgccggggagacgtctgggaagtcgccttgtgaagaccttggcgctgccattctttcgatgtggcgccggtggatagggcaccaccggcaggcgccaactgtttcgtg

SEQ ID NO: 10623 - DNA, 390 bp, Zea mays
  Clone ID: LIB3156-021-Q1-K1-A11
ccaagttcatcatggggagaggaggatgattaagacgattctgacaagaccaagtcggcggtcaatgacgaggatgatgaagagggtcgtgaggaggatgaagatgatgacgagtgatggtgctcctcgagacaatggaccgtgctttatccaacaatggagcggctacacaaggccccgtggcgatcacaaaaaaggagcctatatccatgtactagaattattcagtttcacttcacatagagatgttttatttttacttttgtcgcgctataacggatagcgctcctcgttggcgccactggcgggtggttctgcctctggtctggtgtgtttgtgtgtggtcacacttgccatccagcagatgcgcctgcttgtacctagattact

SEQ ID NO: 10624 - DNA, 364 bp, Zea mays
  unsure (1)..(364): unsure at all n locations; Clone ID: LIB3156-021-Q1-K1-A12
gtgatcttgtgtgtgtgtgcgcgcgcgcatcttcatttgcactggaaaatgctttataatttgtgaaggcctgtaaatctgttgtatgtatcttggtcagatgaactctattattgtgccataaaaaaaaaaaaaaaaaaaaaaaaaaaaaaaaaaaaaaaaaaaaaaaaaaaaaaaaaaaaaaaaaaaaaaaaaaaaaaaaaaaaaaaaaaaaaaaaaaaaaaaaaaaaaaaaaaaaaaaaangggggggccgttttaaagaaacaaagtttactcccccggaattccaacttaaaactttttttatggggtaacaaaaaataaattaatgggccgtggttttaaaacgtagggacgggaaaa

SEQ ID NO: 10625 - DNA, 372 bp, Zea mays
  unsure (1)..(372): unsure at all n locations; Clone ID: LIB3156-021-Q1-K1-A2
aatcagacgcgagccacccaccgcgcgacctcagggtgcctgtgcctgctcccgctgttccttcctcatggccaccgcctgccacctcgccgcgccgctcggcctcgccccgttgccccgcggctgcgcctctgctggcgtcgtggccgtcgtccggtgcgctcggtcgtcaagctccaagattccgagaggcgttgctgtcaaggcgacgtccggcggcgaaggcgccacggaggangtgccggagattgtgaaagctgcgcangacgcgtgggacaaagttgaggacaagtacgccgtggccaccatcggtgtcgctgccatcgtcgcgctctggacggtagtaggtgccatcaaggccatcgacaagct

SEQ ID NO: 10626 - DNA, 159 bp, Zea mays
  Clone ID: LIB3156-021-Q1-K1-A4
taggaagatcctttgagctttgagctacaactcttcttctttggcgttcggttacagaacattttacttagaacatctgttgtaacttgtgagctgtagagcagaacacatgcctgaatgagttattctataacaggatgctcatgtagcgtttgatct

SEQ ID NO: 10627 - DNA, 284 bp, Zea mays
  unsure (1)..(284): unsure at all n locations; Clone ID: LIB3156-021-Q1-K1-A5
gtctaaggggaatcagnnngcggcaaatgggtacctgggtgatnntcttcaacgcacaactgctanntgtatctcaaaccaagaaaatgggcatttgcagcgacacttgaaggcaanggcatgggaaccctcttgcgaacgaagaataacaggctcannactgctaggggttcttcctgcaccaaaccccaagncgtgtgcttctgattgtgttaagcatgtgattcacgcacacccatgaaccagtttatcttatagtgccatgtaattgccttgtgtgtccc

SEQ ID NO: 10628 - DNA, 107 bp, Zea mays
  Clone ID: LIB3156-021-Q1-K1-A6
atttaaaccgattcaatactacccaatccacatggattaatgctgaaacgaacaagccctaagacattgttcggttattctaattccatgtgtattggaatggattg

SEQ ID NO: 10629 - DNA, 336 bp, Zea mays
  Clone ID: LIB3156-021-Q1-K1-A8
gtctcatcgctggattcggtctctttcttccagcagttgtccggccaatcctggattcatggcagaccgcggaacaagttcctccacctcttctaaatgatgtggttgcaggtgtcaccggcaagaaaaagtagtgaacttgcattgttttctcatgtcaatattgccccacattttcttccccgtgttttttctggcgaccagattggaaggcttttcccaagagagtcttgaactctagatggtatccgcggaataatcattgtacctgaatcatatactgcaatgtggcagttttgaaaatgtttcccctcctacaaaggttgatagaatgtc

SEQ ID NO: 10630 - DNA, 273 bp, Zea mays
  Clone ID: LIB3156-021-Q1-K1-A9
caggactccattgagaagcttctcatctgatctgccgaagacctttcagtgtgatgggcctcagcgacacttttttcagaggcttggactggtgatggtgtcttgtttactttgcgcttttcaaactatatttgaacactgttaagtcgatcatacttgaattgtactgcatcttatgtttgtgattgtcatgtaatctgaagatgcctctgtattgtggtggcttctttctgctgagattccgaccacatcattgtgacggctgattactta

SEQ ID NO: 10631 - DNA, 452 bp, Zea mays
  unsure (1)..(452): unsure at all n locations; Clone ID: LIB3156-021-Q1-K1-B1
ttccaaaatggtgaccttaattaagttggatgttggcaacgtcgtcatggtgactgggggaaggaacactggccgtgtgggtgttatcaagaacagggagaagcacaagggcagctttgagactattcacgtggaggactccctgggccaccagttcgccacccgtatgggcaacgtgttcaccatcggcaagggtaataagccgtgggtgagcctgcccaagggtaagggaatcaagctgagcatcatagaagagcaaaggaagcgggatgctgctgcccaggctgctgccaacgcataaatcctctgaatgtgctgtgctgagagttttttctagttgctctgcaaggatatagaacaatgttccaagactaccatgtttttaagtctgcctgatgcttataattcatgaacgatttttgcagctagctgtaatgtgactntatcttatc

SEQ ID NO: 10632 - DNA, 342 bp, Zea mays
  Clone ID: LIB3156-021-Q1-K1-B11
atgctaaccctctccgactgagactcttgagccgagcgcgcggccaccggccagtgccaggcaacggccagtaccggaggcgggcgtgcacaggccggccgcccggcgcgcgctgtgatgtgagtagccatagctaggatctgtgttatctcgtttgtttgtttgtttttcccttggctcgctcttcttttgctgcttttcggtcggtgcctaatctagctatctactactagcactagctagctagcatctcaagactgagctccgtatggtcaatttgtaatgctcgtctgtgactgaactgaagaacaagaccattttaatcggcttcttgcttccagc

SEQ ID NO: 10633 - DNA, 403 bp, Zea mays
  Clone ID: LIB3156-021-Q1-K1-B12
gatgaaattgcagatcgctgccattgccctgaagatattgagatgatctacaaaatagtccagcacatggctgctaacgacagagcaatcatagcagaaggcagctgtggctctcctcgcagcgttaaggtgtacctcggtgaatgcaatgtagacgaagacttgcaggccgcgtaggttccgagcctggatccgtgtaaaattgtatcaggcgcaacaagatagcgatgcaatgcatgggtgttggcggatcctgctgtgcagtttgtttcttgtttggtgtttcttgcacgcgaatacgcgattgccgcaacgacgtattttagaatttgaatttttttggaacccttgaaaatacaaaataaagaagataaggtggtgtccgtcgtattttttgcttttt

SEQ ID NO: 10634 - DNA, 297 bp, Zea mays
  Clone ID: LIB3156-021-Q1-K1-B2
gggcgacgagagcccgtccttgttatacactgacagaagtaaacagccgtcgaacagtacgttaagagaccagtataggcagttagataggagcgaacatgaccctggacaaaccaggggcggtgttttattgagaagaccatctagggacaggaccgcccagacgttttattgatgttgcagggtttgggctgtagtctgtagagaaataaatagtgtaatgtagcctgtaatatgtatctcgatcgctgcaaacatgtaaaaaaagggggagaggaatgtcgtagttcatatttt

SEQ ID NO: 10635 - DNA, 237 bp, Zea mays
  Clone ID: LIB3156-021-Q1-K1-B3
ttccaagcatttttttggtgttgaaacccttttggaagtggtggcagcgggaagggcccaatgcagccaaagggataggatgttggtcatcctctgaacgtttctttggaggatttgtacaatggcacatcgaagaaactctctctgtcccgcagtgttctctgctccaagtgcaatggtaagggttcaaagtctggaacttcatccaagtgtgctggttgccaacgttctggcttt

SEQ ID NO: 10636 - DNA, 451 bp, Zea mays
  Clone ID: LIB3156-021-Q1-K1-B7
gctggctcgtcatcggcggcaaggtgtacaatgtgaccaagtttctggaggaccaccctggaggtgatgatgtcctgctgtcttccactgccaaggatgctaccgatgatttcgaagatgtggggcacagcaccaccgcccgtgcaatgatggacgagtacctcgtcggtgagattgatgcggccacgatacccagtaaggtgaagtacacgccccccaagcagccgcactacaaccaggataagaccccggagttcgtcatcaagatcctccagtttttggtccccctggcaatactgggcctggctgttgctgtaaggatctacaccaagtcggaatctgcctagtcatctgaaccaagttagcgagggttgcatcttgtaccagagtcgcatgtcagaaacttgagtctttgctgtcatacggttatatttatatgagacttctatcg

SEQ ID NO: 10637 - DNA, 360 bp, Zea mays
  unsure (1)..(360): unsure at all n locations; Clone ID: LIB3156-021-Q1-K1-B8
tcataaagaggctatccgtgaagtctgaatgacacattttggtggattctcaactaaggtgatttactgttcaaaatcatctatacagatataggcaatcaaatcagtttgcctcgcgaagagtataggcgagtattatgatcgggtgggatgcagaattatggtttagttgcataggataacatgcttctgtatgacacttgcgatgtatatatttttgctaaagagccctcctttcaggatgtttgtagccagcttcttttggatgtaacagatggaggccaagacgcctgttctgtctaatgaggcacattatatgtagctgtactattcgtggtccagcaaaattttggcnnngaa

SEQ ID NO: 10638 - DNA, 442 bp, Zea mays
  unsure (1)..(442): unsure at all n locations; Clone ID: LIB3156-021-Q1-K1-B9
ctttgacatattccagtcattctttggtggtggaagcccttttggaggtggtggcagcagtaggggcagaaggcagcgaaggggagaggatgtggttcatcctctgaaggtttctctggaggatttgtacaatggcacatcgaagaagctctctctgtcccgcagtgttctctgctccaagtgcaatggtaagggttcaaagtctggagcttcatcgaggtgtgctggttgccaaggttctggctttaaggtccaaatccggcagttggggcctggaatgatccagcaaatgcagcatccttgcaacgagtgcaagggttctggagagacaatcagcgacaaggatagatgcccacagtgcaagggtgataaagttgtgcangagaagaatgttcttgaagtgtttgtggagaaaggcatgcanaatgggcagaagatcaca

SEQ ID NO: 10639 - DNA, 354 bp, Zea mays
  Clone ID: LIB3156-021-Q1-K1-C10
cggttgctgataattacctctcggcaagatactcccttggatcttcaggtgctcgcgttagccaaccagctccaactgttcccccttttgggctctcaggtgcaagttcacaacgaggctcagtaatggacaggtattcgtatgggctttcgggtccgactggaacacagcgctcagttattgacaggtatgcgccgtccctcgatggaacgaacacaacaagatcgaggagctccttgcctgagcagtacccgttcggacaacctggctcttccggtggcgggtggcctcatcactgatcgctggaacttggtcctcagatttgaccagcaaaagtgcaaccgatttcttgag

SEQ ID NO: 10640 - DNA, 426 bp, Zea mays
  unsure (1)..(426): unsure at all n locations; Clone ID: LIB3156-021-Q1-K1-C11
ctcaagtagggttgggcccttgtaccagtcaaggagccaaagaggccttcagacaagcccctgcgtctcccccttcaggatgtgtacaagattggtggtattggaactgtccctgttggacgtgttgagactggtgtcattaagcctggtatggttgttacttttgggcctactggtcttactactgaggttaagtccgttgagatgcaccatgaggctctccaggaggcccttcctggtgacaatgttggcttcaacgtgaagaatgttgctgtgaaggatctgaagcgtgggtatgtggcctccaactccaaggatgaccctgccaaggaagctgctagcttcacctcccangtcatcatcatgaaccaccctggccagattggcaatggctatgccccagttctggactgccacacctcacac

SEQ ID NO: 10641 - DNA, 406 bp, Zea mays
  Clone ID: LIB3156-021-Q1-K1-C12
ccagaatccgcgaatcacagacgcgtctatctcagcttgctgcactgcactaccctgccgtgccatcatatcgtacgtgagcccggccgagcgagagcgagggagaggcatggctgctccgaagctcgcgacgctggcgctggccgtgctcctggcggcgaccgtggtggctcccccggccgcggtgcgcgcggcgatgtcgtgttccaccgtgtacagcacgctgatgccgtgcctgccgttcgtccagatgggcggggccatgccgccccagccgtgctgcggcggcatccgcagcctgctgcagcaggccaacaacacccccgaccgccgcaccatctgcggctgcctcaagaacgtcgccaacggcgccaacgggagcggcacctacatcagcccggccggc

SEQ ID NO: 10642 - DNA, 423 bp, Zea mays
  Clone ID: LIB3156-021-Q1-K1-C2
atagagttaagccatctccgttgcccgacagttggaagctgaaggagatctttgctacgggcatcgtgcttggaagctaccttgctctgatgactgtcattttcttctgggctatgcacaagaccgacttcttctcggacaaattcggtgtgaggtcgatcagggacagcgagcatgagatgatgtccgccctgtacctccaagtgagtatcgtgagccaggctctgatcttcgtcacccgttcccgtagctggtccttcgtggagcgccctggtctgctccttgtcaccgcgttcctgctcgctcaacttgttgccaccttcctcgctgtctacgccaactggggcttcgccaggatcaagggtatcggctggggctgggcaagtgtggtctggctctacagcatcgtcttctacttccccc

SEQ ID NO: 10643 - DNA, 399 bp, Zea mays
  unsure (1)..(399): unsure at all n locations; Clone ID: LIB3156-021-Q1-K1-C7
tagatcgctgccggttgcagctgaagagaaagaggagttggcgttctacgaaggggtgcggttttgttagggtagccaccggagttgaggtcccttgccaaggaacgaacgaacttggtgcctgtggcggacagctgctattgtagctaggcgcatacatgtttttggaaaaggaaatcgagtgtaacactgacatatttattgcatgtctatctgtatagacaagtcaataacaccgacgctgttcggctgatgcattccanaaaaaaaatgtacttttcaattttatttattaatattttgtgtaataatcgtgatacatttgtccatccttgaacaaaaaattgtgggtttgtgccaaattctagaatatttgtttttaaatgtgaatatttaatt

SEQ ID NO: 10644 - DNA, 69 bp, Zea mays
  Clone ID: LIB3156-021-Q1-K1-C8
atgtaatgctcgctctctaaaagattcgagaaatataaatgaagttaaagcttcgtttgaatttgaatg

SEQ ID NO: 10645 - DNA, 421 bp, Zea mays
  Clone ID: LIB3156-021-Q1-K1-C9
gcatcttcaaagctgcaggttcttgccactgctgttacaaccaagatcttggacagggctggacggagaatcctccttattatttcttcttttgggatgaccctaagccttcttgtggttgctgttgtattttacatcaaggacaatatttcacatgactctgacttgggtaacaccttaagtatggtgtccttggttggtgtcttggcttatgtcactgcctactcctttggtatgggtgccattccatggatcataatggctgagatccttccagttagcatcaagagtgtggcaggaagctttgcgaccctagccaactggttgacatcctttggaataacaatgacagcaaatttgcttctgtcctggagtgctgcaggtacatttgccttctacatgatggtgagtgctttcactc

SEQ ID NO: 10646 - DNA, 144 bp, Zea mays
  unsure (1)..(144): unsure at all n locations; Clone ID: LIB3156-021-Q1-K1-D1
gacgagattgagcatatacttgtccataagnttacaagattcttgacgcaacgtgcggagtccttcttcattctgcggaggaaacctatcaagggctatgacatttctttcctgataacaaacttccacaccgaagaaatgctg

SEQ ID NO: 10647 - DNA, 445 bp, Zea mays
  unsure (1)..(445): unsure at all n locations; Clone ID: LIB3156-021-Q1-K1-D10
gtcaggctgcaacctgaccctgcaagggtgcaaggaggtggctcangtgctgccacggatggtggtggagttgataaatggccagtctgatgagaacgaaaggaatgaaagcgtggacatcttatacatgtatcggtcactcgatggtccaagggaggatgttccaccgttcgtgaagatcctgtgaagctgcttctgcggagatggctgggtatcgctatctatcagtgggtgcctggctgatatgctggctgagtgcagatcatttaacggaatatatatgtaagttgttgagctgcagatgtggtacatttttatctcttagaaagatttcgaagcactgtactggagcggngcgggcggnggtatcatgtagtaggagttcatcagatgtggtacatttttatctagtaggagttcatcagtgtatccaaagcgttcacgg

SEQ ID NO: 10648 - DNA, 447 bp, Zea mays
  Clone ID: LIB3156-021-Q1-K1-D11
caactgccaccggcatagctacatttacaatgatgttgttaggaagagtgatcctcagaaagtttgggtggggagttgcagctacgatcacgcctgcagtgttactcctcacaggagttgggttcttctcactgattttgtttggtgagccattgactcctcttatgaccaagtttgggatgacgcctttgcttgcggcagtctatgttggagcaatgcagaacattttcagtaagagtgcaaaatacagtctgtttgatccttgcaaagagatggcatacattcctttggatgaggatatgaaggtgaaaggtaaagcggctattgatgttgtgtgcaaccccttggggaaatctggaggtgctctgatccagcagttcatgatcctgtcattcggttctctcgcgaactcgacaccctaccttggcggaatactcctggtgatcg

SEQ ID NO: 10649 - DNA, 436 bp, Zea mays
  Clone ID: LIB3156-021-Q1-K1-D2
cgatccaactcctgagcactttctcctcgtccccgacaagccaatcgaagccgagatacgggcatggactccaccggcaccggagcagggggtaaggggaagaagggagcggccgggcgcaaggtcggcgggccaaggaagaagtcggtgtcgaggtccgtgaaggccgggctccagttccccgtcggccgcatcgggcgctacttgaagaagggccgctacgcgcagcgtgtcggcaccggcgcccccgtctacctcgccgctgtcctcgaatacctcgccgctgaggttctggagctcgctggtaatgctgccagggacaacaagaagactcgcattattccgcgccacgtgcttctggcgatccggaacgacgaggagcttgggaagctgttgggcggcgtgaccatcgctcacggcggtgtgctccccaata

SEQ ID NO: 10650 - DNA, 415 bp, Zea mays
  Clone ID: LIB3156-021-Q1-K1-D8
gtgggttggcttctcctccccctccggttcgggttcgggttcgtgaggttctccggggttcggtttcgtgggtgagcggatcgagatggcggcgtcggatgttgagtaccgctgcttcgtcggcggcctcgcctgggccacggacgaccactccctccacaacgccttcagcacctacggcgaggtcctcgagtccaagatcatcctcgatcgggagacgcagaggtcccgcggcttcggcttcgtcaccttctccacggaggaggcgatgcggaacgccatcgagggcatgaacggcaaggagctggacggccgcaacatcaccgtcaacgaagcccagtcccgcggcggccgtggaggcggcggcggtgggtacggtggtggccgtggaagcggcggctaccgcggtggcggg

SEQ ID NO: 10651 - DNA, 342 bp, Zea mays
  Clone ID: LIB3156-021-Q1-K1-D9
gcagctccttagggacaacttgaccctttggacctctgacctcacggaggatggtgctgatgagggcaaagaagccccgaaaggtgaggctggtgacggacagtaatcttgggagagcgcatattgttcgagcccattgttttagatgctctatgctgtcgaagctgaagctgtgccgtgctattattgtagctgatttcctgttccctcacttctttttttatattagtaggctggtagtgttcgaattagttccccattgctttgtgttgccgctagttggcattaagtccgtgtggactggtattattcactggatttgagaagcatgtcagtggttgc

SEQ ID NO: 10652 - DNA, 374 bp, Zea mays
  Clone ID: LIB3156-021-Q1-K1-E10
gattaccacatcgcagatgtgtgctccttctgtgggagcctgctgactgcgacaatgatcaaatccgatacccagaagaaagtcaagcacgagatgcttgggctccccactgtgagaccagcgaagaactttgcatgccaggcctgcaaaacaagcaaggggatggagaccgtggcaatgccgtatgtgttcaggtacctggctgctgagttggctgccatgaacataaagctggagctccggttgagcaacaaatcaggattgcctctcagctaagaatcataacaccagaattagcgcttgttcatcgcgggggctgcttcgcaggagaagcttaaatgtaaccattggtcccgcgtgtagttgtttcatat

SEQ ID NO: 10653 - DNA, 439 bp, Zea mays
  Clone ID: LIB3156-021-Q1-K1-E11
cacgcacgcatacacagcacagagtgaggtaagcatccgaaaaaagctgtgatctgatcgacatggccgccgccaccatggctctcacctcccgcgcgctcgtcggcaagccggcgaccagcaccagggacgtcttcggcgaggggcgcatcaccatgcgcaagactgctggcaagcccaagccagcggcgtccggcagcccctggtacggggccgaccgcgtcctgtacctgggcccgctgtccggccagcccccaagctacctgaccggcgagttccccggcgactacggctgggacaccgcggggctgtccgccgacccggagactttcgccaagaaccgcgagctggaggtgatccactgccgctgggccatgctgggcgcgctcgggtgcgtgttcccggagctgctcgcccgcaacggcgtcaagttcggcga

SEQ ID NO: 10654 - DNA, 417 bp, Zea mays
  Clone ID: LIB3156-021-Q1-K1-E12
cggacgcgtgggcggacgcgtgggcggacgcgtgggcggcatacgtattttagatgaagcccatcaatgtatcgtggagctgcagagtcctgattactacccagaaattgttaaagaagctgtcaatcttgccctagataaaggcaccaattttgttgatcctcttgttaggctactggagcatttgtacacaaagaaaattttcaagactcaagacctggaatccggttgcttgttatatggtactctgctggatgacattggcattgaccttcctaaagctccagcacaatttggtgagatcattgctcgcctgactttgttgggtgccttgagatttgaagctctggaggttattttaaagaaaatggaagatacctacaaccgcaaagcagtttctaatgctttcatgaaaac

SEQ ID NO: 10655 - DNA, 401 bp, Zea mays
  Clone ID: LIB3156-021-Q1-K1-E2
cgcccacccttcgctcgccaccgccatggggaggggaaagttcaagggaaagcccaccgggcgccgcagcttctccacaccagaggagatcgctgctggtacttcaggtcgccctcgcacctttatgaagacatgcaattgaaaaagagaattgatcttttttatgggcgaagtgttgaagatggctttggtgaaggaaatgtcttgttagcatcaagtaagtggcgacatcacaacccctacaagcttgtgccttaaaacaagaggatacaagaagttggagtgcttttgtgaaggcttttgtgaatcacttgaggcgttagtacttttgtgaatgattctgtaaagtgcttgcaaatatgtgcaaaacataataacatgtgtaggttttgcgaatgaaa

SEQ ID NO: 10656 - DNA, 402 bp, Zea mays
  unsure (1)..(402): unsure at all n locations; Clone ID: LIB3156-021-Q1-K1-E7
gtgcctgaaggctatgtctttgttctgggggataacagaaacaacagctttgattcacataactggggtccacttccatttaagaacatccttgggagatctgtgctccgatactggccaccatcgaggataacagatacaatatatgagcatgacatggtgcagtacacagctgctgcatcctgatagtacattgtggcaataccacatgctgcaggtccatttttcctttccctgctgacaaagggttatgctgagcctttagggcttgttcggttattttcaatccatatggattgaaggggattgatacggattgagggggattntgacttactagggattgaaacccnctcaatcccnctcaatccatatggattgggatataaccgaacaaaccct

SEQ ID NO: 10657 - DNA, 448 bp, Zea mays
  Clone ID: LIB3156-021-Q1-K1-E8
aacaacttgctcgagtttttgaaaccattggcgctttcaaactccctcgcaaaggtggaaaaggaaaacagatctttgggagtgtcacggcacaggatgttgttgacataataaagtcacaacttaatagggatgtcgacaagaagctggtgacggttccagaaatccgtgaaatcggagagtatgttgcagagatcaagcttcacccagacgtgacagcgcgagtaaggctgaatgtctatgcgaaatgagctcagcagttacagaacctcgagtaatggactttggagaagcctgatgtttgccagtgcagagattttgctgcaagtgccaagtgctgcggtagacatgaagcctggtctggccgtgacttgcctggttttgatacacaattcactggctcactgcgcatcctattccctaccgtgtgaagtcaagtttcaacaat

SEQ ID NO: 10658 - DNA, 328 bp, Zea mays
  Clone ID: LIB3156-021-Q1-K1-E9
cagaagcagaagtcggcgctgcgtgaggcgtacaagaagaagaagctgctcccgctcgacctccgccccaagaagacccgcgccatccgcaggcgcctcaccaagcaccagctctccttgaagaccgagagggaaaagaagcgtgagaagtatttccccatgaggaagtacgctatcaaggcctagatcagtgaaagaacatttatcctgtcaagttttgctcagaagttacttgaatttgagacaaatctatctccatccaagtactatgtagctgatcaactgcatgatgaaaaacgagtactttttgcttgtttaaacgtgcttt

SEQ ID NO: 10659 - DNA, 425 bp, Zea mays
  Clone ID: LIB3156-021-Q1-K1-F11
ttttgttgctgcaagaattaatgtgaaaaaaaatagattctcctcttcttctttcacttggttggtcgaatggagcaggcagtagtatggcggacgcgtggggccgctgctgccgcgacatgtgacgcccgccggggtggcgtccatgctgctgggggcgtccatggcgctgatgctctgcggctcggtcaccttcatgctcggcttcttcctcatgccctgggttgtcgggctcggtttcctcttcctcttcgtcggcttcatcaccaacctctccgggatctggagggacatcatcctctggccctccgtcgcgtgctccgcatcggactcacccaaggaggcaccctccccatggcatatgttttccaagccttcatccatgtcgacgtgaagccaagtacaaagtaaggctcccacggagg

SEQ ID NO: 10660 - DNA, 427 bp, Zea mays
  Clone ID: LIB3156-021-Q1-K1-F12
gtcaagatcaccccaaataaagcggagcacatcaagcagtataagtgcccctcgtgcacaggaagcaagagggccaaggcttgattctatctatctacgatatagatatgaattgcggacaatgctccaagaaccgaggagcctttgacgggagttgtaagatgaatcttccgggtagggcagctaatagatttgaatacttcgtgtggatactttcggcattggtgctcgagatgcctctaaatatagtgtcagtactgatcaactgttaactgttgtagtttgtggggccctcaagcatctatgttctatagtctactgtgtggtggtttagataccgtctatgccatttgtgatgaagcagtcgttttaaagttagatcccagtaatttccctactatacatttgtcttcgtgtaatcgtgttt

SEQ ID NO: 10661 - DNA, 432 bp, Zea mays
  Clone ID: LIB3156-021-Q1-K1-F2
gatcgccattgcgagagctttgcttatgaacccacgagtgcttctcctggacgaagccaccagtgccctggatgctgaaagcgaatatcttgtacaggatgcaatggactccttgatgaaagggaggactgtccttgtgatagcccaccggctctcgaccgtcaagagcgccgacaccgtcgccgtcatctccgacggcctaatcgtggagagcggcacgcacgacgaactcctggaccgcgacggcatatacacggccttggtgaagaagcagctgcaggggccgaagtttgaagccaccagcagcatcagcgaggcctccgaaattgaagcggaacccagcagtaatgggcaatagcggccccgattattaggaagaccacagttgatttgaatccacacaagtgtatgtaaccctgatgttgacgtatg

SEQ ID NO: 10662 - DNA, 340 bp, Zea mays
  unsure (1)..(340): unsure at all n locations; Clone ID: LIB3156-021-Q1-K1-F3
aaatttcaccggcccggtggtccagtttccacgtaacccctcgctcttcttcagacgtccatactgccccgttctcctctcctcttcccccaaatctgcgtgcgccgcggcaaccctagcccccgcgatccgctcgccggaggggagggagccccgccggcgtccatggaggtgaagctgtggaacgacaagcgcgagcgggagctcctggagagctacgcggacctgtacgcgatcatcaaggtcacggagaagctggaacgggcctacgtncgcgacctcgtctcagccgccgactacgaggcggagtgcctcaagctcatctnccagttcaactccc

SEQ ID NO: 10663 - DNA, 422 bp, Zea mays
  unsure (1)..(422): unsure at all n locations; Clone ID: LIB3156-021-Q1-K1-F4
gtgatggtatttgggggaggccaaccttgccaaggtttcagggggtttaatcggtccaaaaaccgggatgagccactcaaagatgagaaaaccaaccaaatggggactttaatggttatgggggcgtctttgaagcccaagtttgttctaatggaaaatgtggtggacatattcaaatttgcggatggttacctaggaaaatatgctttgagctgccttgttgctatgaagtaccaagcgcggcttggaatgatggtggctggttgctatggtctgccacagttcaggatgcgtgtgttcctctggngtgctctttcttccatggtgctccctaagtatcctctgcccacctatgatgttgtagtacgtggaggagcccctaatgccttttcgcaatgtatggttgcatatgacgagacaca

SEQ ID NO: 10664 - DNA, 446 bp, Zea mays
  Clone ID: LIB3156-021-Q1-K1-F5
ttgcttttttcaaaacggtttaaaggttttgcaagatgttgttggcttctacaaggggagcactgaaataatcgttgagacatttacatcactcggattcaacgtttatggcgccaagaacgctccatacgtatgggtgcacttccctggccgcaattcgtgggatgtgttcgctgagatcctggagaaggccaatgtggtcactactcctggcactggatttggaccgggtggcgaaggctttgtgagggtcagcgcgttcgggcacagagagaacatcattgaagccgcaaggaggttaaagcagctgtataagtgagcaccgatgcagcttctgtgccctcctagacagatgtatcaataagaacacatcagggcaccaaaaatcgcttggtgaagctgccagaagatgttagattttgaacttgttttttttttaaattctc

SEQ ID NO: 10665 - DNA, 310 bp, Zea mays
  Clone ID: LIB3156-021-Q1-K1-F7
ggagagtggaaggtcaagggggtttggttttgtcacgtacggttctgccgaagaggttgagaatgcaatatctaatctcgatggcgctgacttggacggcagacagatccgtgttacggtagcagagtcgaagccacctaggcagcaatactgaaattcctcttgagatttttgtaggtgtaccggtagcccaaactctggattatagtgacgccagtcctggatttggtctcgagattcattgaagttaaaaagccctcatgtatatggctcactatttatatacatgtaatattggattcccgtgttc

SEQ ID NO: 10666 - DNA, 381 bp, Zea mays
  Clone ID: LIB3156-021-Q1-K1-F8
attcaggcccggacagcagaagaaggtgtttgtgtacaggcttgtagctgccgattctgatgaggtaaaggtccatgagacagcattcaagaaagaagtcataccgaagctgtggttcgaatggagcgagcactgtactacggaagacttcaaacttggtcaaattgatatcgatgactctggggacgaactgttggatactaaagcaatccgcaaggatatcaaagcgctgtatagaaggtaggtaacaagctttgtggccactggacaccatgtacatattgcagtgctgaccgtcgagctgatccttaaactgaaaaaagaagtggcgggtgttgcggtggctacattgcgcggtaacaaaaagaagtcattcccagc

SEQ ID NO: 10667 - DNA, 449 bp, Zea mays
  Clone ID: LIB3156-021-Q1-K1-F9
cggacgcgtgggtccagccccacctcagccgctgcgcggacctccgaatcccggcgccggtgcgcgcagggcaccgcagggcgcggcgcggccatggacatggacagcgtggagtgcctctccctcccggacgctgccatggacgtggacgacatcgaaggccgcccgcaccacggccatctcggcctcccgctccaccccgcccacctcccatcctcaggtgccggccgcgcgttccccaaggtgaatgccgggggcgccgtggcgggcccggcgggagcggcgggcacagcaagagcaggcgtggggccgccggcgaccagcgtgcacgagctgctcgagtgccccgtctgcaccaactccatgttcccgccaatccatcagtgtcaaaatggacatactttgtgttcgacatgcaaggccagggtgcacaacaggtgccctacatg

SEQ ID NO: 10668 - DNA, 358 bp, Zea mays
  Clone ID: LIB3156-021-Q1-K1-G1
taaagggatctaatagtttgaatcgggggatgaatcctaatactaagtactgcagcatccatggtaacaaagccatggaggacaaggactctgtccctcatatgtgtggttcagaaagatacataaacgctcctgctacataatgtacttctgaatggtatacttgcaattggcacacttggccatcacgtggactcactttgccctgtggcttgcattgaagaagatgatctctttatcatggatgatgagaaagcaattgtggaagagagagatgatgaagaacccaggaatgatcaagtgaaagaagattttgcattggaaacagagccatgtgaaccaatatggcctattgttg

SEQ ID NO: 10669 - DNA, 354 bp, Zea mays
  unsure (1)..(354): unsure at all n locations; Clone ID: LIB3156-021-Q1-K1-G10
ctcttcgcacgagcgcaacaccatccacccaccagttcgaagcggaggcgaccggcaacctgcggcggagatgtcaggcaggggcaagggcggcaaggggctcgggaagggcggcgcgaagcgtcaccggaaggtgctgcgcgacaacatccaggggatcacgaagccggcgatccggaggctggcgaggaggggtggcgtgaagcgcatctccgggctgatctacgaggagacccgcggcgtgctcaagatctttctcgagaatgtcatccgcgacgctgtgacctacacggagcacgcncgtcgcaaaaccgtcaccgctatggacgtcgtgtacgccctcaaacgccaggg

SEQ ID NO: 10670 - DNA, 287 bp, Zea mays
  Clone ID: LIB3156-021-Q1-K1-G11
gacggcgcggcggccaagcacaaggatgatgcccccgccccgaccgccgccggtaaggctgctgccagcaagtgaggtgcgcggcgtccggagctttttaccttgccgtagtcgccatacttgcctccccaataatggcgtttgtaccccctctacctgcttcaaattagtgtgttttatgaatggaaacgaccatccaactttccatccgtccttgcaatgtgtcacggcgggatgtttttactacacatcagctttaccagtttcaagattgtttttttccctaa

SEQ ID NO: 10671 - DNA, 308 bp, Zea mays
  Clone ID: LIB3156-021-Q1-K1-G3
aaaaataacctaaaggactgccttggtaccattgctcagagtggcacctaaaaatttttgaaggccctaaaggaaaacaaagaccttggggcggacaatggtctaattggtcagtttggtgttggattttactcagctttttttgttgacaagaaagttgtggtgtccaccatgagcccaaaatcagataaacagtatgtgtgggaagctgtggctgacagtagctcttatgtcataaacgaagagactgatcctgagacaatgcttactcgtggaactcaaattaccctgtttttaaacctgatgat

SEQ ID NO: 10672 - DNA, 87 bp, Zea mays
  Clone ID: LIB3156-021-Q1-K1-G4
tccggttggttgatgaaaaggctgggccagaagagatggcagtggacagaccaaggccccccaagcctactccagacgccgatgggt

SEQ ID NO: 10673 - DNA, 403 bp, Zea mays
  unsure (1)..(403): unsure at all n locations; Clone ID: LIB3156-021-Q1-K1-G6
aagggccttttacctccaaaggagttaatggctgtggatgggggtccaaatttggctcagtacctagtcaaattctggctcaagggttttgccaagttgggccctgcatttcaaagaggcgatcgtaggtcttattctacgtgctacgggatttgataactcaacatggatttaccttgctcctggcaagctctttggtgggaaacacttcatgaagccattcaaggctatgtttccacgtcttaaaaaccatagtatgatcagaagtggaaagctggaagaaaatatccgagggctagcagggtcagcagttgattacatggtctgtctcctgtcggacatttttatatatgatggtccgagcaacttcgcagacaatctcatgggtcatncgctatactat

SEQ ID NO: 10674 - DNA, 231 bp, Zea mays
  Clone ID: LIB3156-021-Q1-K1-G7
ggaaatgtgtgaccgagcccgcaccaaggaggagctcctgccgtaataagtgaagtgattggtactgaagtttctggaaataagaggctcttctgagatgcctgtttgtgtgagtatttgcgtttccattccgttttcatgataataaaacgcattgattattaatatatgtaatgtgatgctacactgagtggcagcgttggtatatatttgtaagaattaagaacccaa

SEQ ID NO: 10675 - DNA, 418 bp, Zea mays
  Clone ID: LIB3156-021-Q1-K1-G8
cggacgcgtgggcggcgctgcagctcttcggatttgccgaggccatcagcatcggccgccgctccacggagaagctgttcaagatcattgacctccacgacgcgctctccgatatgctgcctgacatctccgacatcttcgccgcctccaaggccacggagtcgatatacgtgcaggccgccgagatcaggtcgcggttggccgatgccgtgcgtgggatactctcggagttcgagaacgccgtgctccgcgacccatccaagactccagtgcccggcggcaccatccacccgctcactcgctatgttatgaattacatcagcctcatttcggactacaaggccaccctctctgagctggtcatctcgcggccatcagctagctcccggactgctgctgagggcaatgaggctacacc

SEQ ID NO: 10676 - DNA, 331 bp, Zea mays
  Clone ID: LIB3156-021-Q1-K1-H1
ggaagtggttcgggctcagccctggaagaagccaagaggtgtgatccctgtgcgacaaggctccgacgccgacaatcgtctgtgctgcccccgtcggcaccgctcggttgactcattggattttccgccaccaaaccgcgttcgcattcttcgtcgacactcgtcgcgtgatgcacccccacatcgggcttgagaatcaaaatctataaaaatgaataacctcggacatgtcattgcgtgcattgtccgtcgccgaataatggatgtgtgtgcttcgttccaataaattgctagtaaaaataatggcattggcggtatgcatgaataaaat

SEQ ID NO: 10677 - DNA, 354 bp, Zea mays
  Clone ID: LIB3156-021-Q1-K1-H10
gtcaacgacgacgtctgccggcagtgctcctgctcctcctcctcctccttcccggccgccgcgcgagcttggtgggttagtgtctcttcttcgcggagacctgtgagaggagccatcatcatggccgccgttgagactgttgtcctcaaggttgctatgtcatgcgagggttgcgcgggggcggtcagaagagtgctctccaagatggaaggagttgaaaccttcgacatagacctcaaggagcagaaggtgacagtcaaaggcaatgtcaagcctgaggacgtcttccagacggtttccaagtcggggaagaggacctcctactgggagggcgaagccacggccccggacgct

SEQ ID NO: 10678 - DNA, 450 bp, Zea mays
  unsure (1)..(450): unsure at all n locations; Clone ID: LIB3156-021-Q1-K1-H2
ggaaatttataacaaagaatatgcaaacgctcgaatctgtggatccaacaagtggaggaagcgtcttgctaagtttttgaggcagccacatttcattgtctgggacaacagtgatcttgttacccatgaggtgatgggtggcctgaagaatgtctatgcaatcggtgctggaatggtggcagctttaacaaacgagagtgcaacaagcaaatctgtatattttgctcattgcacgtcagagatgatattcattactcatttgctgacagagcaacctgagaaactcgctggtcctctgctggctgacacgtatgtaactctcttaaaaggtcgcaatgcatggtatgggcaaatgcttgccaagggagagttaagtcctgacatgggtgatagtatcaagggaaagggaatgattcanggtatctctgcagttggtgcattttttgagct

SEQ ID NO: 10679 - DNA, 342 bp, Zea mays
  Clone ID: LIB3156-021-Q1-K1-H3
tccgcggacgcgtgggtgacgacggaagatggttcattttactcctatttattgctacgttgtgtgtatgtgttatgcagctatgctgtatggcttatggttatgagcgccacaaatttgtttgtcaagattctggatgatatacttatgcattctgacataataggaggcaaaacctcaagattttccttatttttattttatcaaaaaaaaaacaaataataaaataaaataaaaaaaaaataaaaataaaaaaataaaattttcggtttgggtattgaataaaggtatgttttaaaaataccaaaatgacttggggggggccgttttaagggatccaag

SEQ ID NO: 10680 - DNA, 401 bp, Zea mays
  unsure (1)..(401): unsure at all n locations; Clone ID: LIB3156-021-Q1-K1-H4
tagaaaannngggaccccccccgcccggtaccaccaaaaacctttgattttaattcatgtgtagctgatgcccatgcaacattattggggggtttgggatgacaataagtgtagctccataaagtttgctgttgattggggcaactctcacaagcagaaggcacagaggatatgaaagcaaggaagcaactttattcaaaaagagctcagcatggaatatgtatatgattacatgtttcacctcttaactgagtatgccaagctcctaaggttcaagccaagaaaaccacctgaagctattgaggtctgtcctgaatctctggcttgccaagctataggccgcgagaagaagttcatggaggactccatggtgagatccgtcagcgatgctggcccatgtg

SEQ ID NO: 10681 - DNA, 338 bp, Zea mays
  Clone ID: LIB3156-021-Q1-K1-H5
ggaggttgggccaaaaggccttggccaccacggccattaggatcgatgtgaagctcaacaagcacatctggagcagcgggatcaggagcgtgccgcggagggttcgtgtgaggatcgcccgcaagaggaacgacgaggaggatgccaaggaggagctctactcccttgtcaccgtcgcggagatccccgccgagggcttgaaggggctggggaccaaggtcgttgacgaaaccgattaagctgtcgcgttatctacatctttagagagttcctagtttgtatttgcaacagcaaaaccttttgtattcacaaagttgtctatttccgcaacagaattg

SEQ ID NO: 10682 - DNA, 321 bp, Zea mays
  Clone ID: LIB3156-021-Q1-K1-H6
acgtcatgtacacacaacggcaaattgtgcttcactggactccgacgtaacatctgagagccagcctgatgatgatcataggcctacccacatgaatgcatctgatataatatctctatcaactggctggcacctctgtggcttatttgaagaatctaactggaagagagaatccaaagacacatgtaccaacacaagctcgactatcatatgaaacatcgaagatactgcacagaataagctgctgaatgtgacataaaaggatgtacgcatgtttatgatggaagcttcaaagcctggaaagacacgggaaatgggtat

SEQ ID NO: 10683 - DNA, 451 bp, Zea mays
  Clone ID: LIB3156-021-Q1-K1-H8
gttcctaaggatgtcaacgctgcagttgcaaccatcaagaccaagagaactgtccagtttgtggactggtgccccactggattcaagtgtggcatcaactatcagccaccctctgttgtccctggaggtgacctggcaaaggtccagcgtgccgtgtgcatgatcagcaacaacaccgccgttgccgaggtgttctcacgcatcgaccacaagtttgaccttatgtacgccaagcgtgcattcgttcactggtatgtcggtgagggtatggaagagggtgagttctcagaagcccgtgaggacttggctgctcttgagaaggactatgaggaagtcggtgcagagggtgccgatgatgaaggtgacgagggagacgactattgagtagctggctaataagtagttctctggtggttaatggttgggttattttgagtatatactctatggg

SEQ ID NO: 10684 - DNA, 451 bp, Zea mays
  unsure (1)..(451): unsure at all n locations; Clone ID: LIB3156-021-Q1-K1-H9
agtcactagatcttcttcaacagaaccaactattgtactcattgacactacagggtgtgatatggaagaagtaaaagatgaagaggagagcaccatgaatgagggcgaggcagcagtatccattgctcatgccaagttgcttgttgagagtggcgttaatgcttctgatattggaataattacgccttacgctgcacaggtaacctgcttgaagatgatgagaaacaaagatgccaagttgaaagatttagagatatctacagttgatgggtttcaaggccgggagaaagaagccatcatcatttctatggtccggtctaactcaaagaaagaggtggggttcttgagcgatcacaggcggatgaacgtggcggtgacgcgagccangangcagtgctgcctggtgtgcgacgtggagaccgtgagcagcgacaggttcctgaaacgcttg

SEQ ID NO: 10685 - DNA, 97 bp, Zea mays
  Clone ID: LIB3156-001-F3-R1A
tcacgcatccgtgacggctgctgagaagacgacataagggggtaagattggtgtactttgttatgagccacagcttgtcacaggtcgaacgaagcga

SEQ ID NO: 10686 - DNA, 579 bp, Zea mays
  Clone ID: LIB3156-002-A12-R1A
ccgaaagctgcaagaactcgttccaaatatggacaagcaaaccaacacatctgacatgctggatttggctgtcgactacatcaaggatctccagaagcaggttaaggtgctaaaggagagccaagataattgcacctgctcagcaagcaagaaccagcagcactcctgctgaaaccgtaatgctcactgtacatgacctcgaaagcatgtccactcgggaaagaaaaagatgtaagacagctctcatgcatgttgtttcatgaggttttgaactgcagcagttgagaggctttatctaccaggcactgtagcttttgtatgagcgaagagggatggagcaatggcatcaccaagcattcaagtgattgggagaagggtagaaaaaagtggggagagatatatatataggagaaacaactgtatagtttggctgtagcttttctatatatacacacacgcactacccttgtcagtaggaagtgggtaatgtacctatgttagagcatctccaagagaggctctaaacatggtcctatgttacatatagggctcaagaccataaaacatccttccaacagc

SEQ ID NO: 10687 - DNA, 658 bp, Zea mays
  Clone ID: LIB3156-005-B10-R1A
ccgaccactgttcttgtcattaacctggtcggaatggtggctggaatttcttatgccattaacagtggctaccaatcctggggtccgctctttggaaagctgttcttctcgatctgggtgatcctccatctctaccccttcctcaagggtctcatgggaaggcagaaccgcacaccaacaatcgtcattgtctggtccatccttcttgcatctatcttctccttgctgtgggtgaagatcgatcctttcatctccccgacacagaaagctgctgccttggggcaatgtggcgtcaactgctgatcgagacagtgactcttatttgaagaggctcaatcaagatctgccccctcgtgtaaatacctgtcacctgaggaggctagatgggaattccttttgttgtaggtgaggatggatttgcatctaagttatgcctctggtcattagcttcttccgtgccggtgctgcagcggacgaagaatcacggagcctttctaccttgcatgtagcgctaccagcagcgtaagatgtgaattttgaagttttgttatgcgtgcagtttattggtttagagtaaattatcatttgtttgtgggaactgttcacacgagcctatattgggaatgctggtgattatacacaaaggcgacaatcgttt

SEQ ID NO: 10688 - DNA, 254 bp, Zea mays
  Clone ID: LIB3156-002-A12-F1A
ttgttttttttttttttttttgctttttttcttttttttttttttttttttgttgttttggtggtcgctctggtgttttggcggtgggtggcttcgtcctggtatagaaaccccgtttgggcaattagaaagaaaagggggttcatggaaaggagtgtgtcatgtgtagcccccgtttgaaaacgggggccggtttagagccctccgctgggggggctgcagaagggggtggagaaccactggggcgggaaagg

SEQ ID NO: 10689 - DNA, 460 bp, Zea mays
  Clone ID: LIB3156-005-B10-F1A
tgtgcgcctgatttttttttattattcgttataacatttgccttatattgttgtgctaatagattacagtgttctgactgtctgcacacattccaaagaatgtagtctttgtgtataaataacagcattgccaatataagctcgtgtgaacagttcccacaatcaaatgataatttactctaaaacaatatactgcacgcataacaatactttcaaattcacatcttacgctgctggctagcgctacatgcaaggtagaaaggctccgtgattcttagtccgctgcagcaccggcacggatgaagctaatggacagaggcataacttagatgcaaatccatcctcacctacaacaaaaggaattcccaactagcctcctcaggtggcaggtatttacacgagggggcagatcttgattgagcctcttcaaataaggagcactgtctcgatcagcagttga

SEQ ID NO: 10690 - DNA, 506 bp, Zea mays
  Clone ID: LIB3156-016-F10-F1A
attcggctcgagtcaaccgcaaacctcaccgttctggtcgtaggaagaaaaacaaaagaaggtgggaccccaattatccaaagccgaataggagtggctataacttcttctttgctgaaaagcattacactctcaaaactctctacccaaacagagaaagggagtttaccaaaatgattggccagtcatggaacagtcttagcccagaagaaagaatggtttatcagaacattggcttaagagacaaagaaaggtacaagagagaattgacggagtacaaagagaagatgaagcttaggcagacctcagaagttggacgtccatagaatctcattggtacccgtttgtggaggcgaaagaatggcttagaaaatttttataatctgttgacttttacgtgcatattgttgtggataatggtccactggactgtggtctacagaactattgtttttttcttttcaaaagagaaaactagtgtctattgttagtcagagaccctttca

SEQ ID NO: 10691 - DNA, 362 bp, Zea mays
  Clone ID: LIB3156-001-Q1-K1-H9-F2A
gatacgaaaacaaaattaaactcagcatcacgtcaattcagtaacaggggtaccaatatgtcagatactactgctccatttaagtttcaacctcagacagatctacatgagatacagttcgagtaaccaacagctggatgctcgatagggtaggcggataaagcaaatcggggcaagcaattacgccttctggttgtagacataggtgaggccgcacttgccgcagtagtggcggtcgaagtggttggccatgaagacgcccgcgccgcactctgagttggggcactccttgcggaggcgggtcaccttgctagtggtgtcgtccaccttatagaactgcagcacggagagcttcaccttct

SEQ ID NO: 10692 - DNA, 182 bp, Zea mays
  Clone ID: LIB3156-002-Q1-K1-C9
ctttttgttcagaacttgagactcatgtgttaaactcgacttgttaaagttttgatggctactttgtgcttgttggaccagctataatcagaagattgaaattttctcactcaaaaaaaaaaaaaaaaaaaaaaaaaaaaaaaaaaaaaaaaaaaaaaaaaaaaaaaaaaaaaaaataaaaa

SEQ ID NO: 10693 - DNA, 72 bp, Zea mays
  Clone ID: LIB3156-002-Q1-K1-F1
aaaaaaaaaaaaaaaaaaaaaaaaaaaaaaataaaaaaaaaaaaaaaaaaaaaaaaaaaaaagggaaaaaaa

SEQ ID NO: 10694 - DNA, 235 bp, Zea mays
  Clone ID: LIB3156-002-Q1-K1-H9
cggaaagctctccagcaccatcgacgatcttgaccatgccgcgaagatcaagagcacccaggaggccgagaaatacttcggagcaaccaaagatgctctcggcgatgttctcgccaagctaggctagacgcaagggctaataatgccatgtaatttcggacttgtgtttgttcatatggacccagcaaggcaatgtaccattttatgttgatattgtatcaggaagcacttaact

SEQ ID NO: 10695 - DNA, 125 bp, Zea mays
  Clone ID: LIB3156-002-Q1-K2-A7
gacattcacgacaaaaaaaaaaaataaaactttaaaaaaaaaaaaaaacaaaaaatcacatgagacaaaataaaaaaaaaagttgaccacaaaaaaacacaaaacaacaacacaatctaacaaaa

SEQ ID NO: 10696 - DNA, 128 bp, Zea mays
  unsure (1)..(128): unsure at all n locations; Clone ID: LIB3156-002-Q1-K2-E7
cgcctgcagtaccgtcccgantcccggtcgaccacgcgtccgtctatatcgcgagcgcgcggtctttttttttttttttacttaatgatcgctaggacacattctcatactttgcgcggaaaaaaata

SEQ ID NO: 10697 - DNA, 240 bp, Zea mays
  Clone ID: LIB3156-002-Q1-K2-F7
tacgcagtcgcgtagcaggtttccttatggttatcgcttgagctgagggggagggaaggagctgtttgcttttgctgaagaataatggtgtactcggctggggtgaggcgatgtgcgttgccagatacagttttgtcttgttgactctacttatctgattatcatttgtaagcgatttgctcaagttatttgtcgttatgaataacttgctttcctcaaaaaataaaattaatattttgg

SEQ ID NO: 10698 - DNA, 446 bp, Zea mays
  Clone ID: LIB3156-003-Q1-K1-A4
cgcccaacgccttccgtaaaaaaaaataaaatataaaataaaaatttaaaaaaaaaaaaaaaaaaaaaataaaatgggctatttttaaaaaaaaatacgatatataataatattttttggggccccctattttaatatcccaactctttcttccccgggctccctctttataactttctctattttttcccctattttcaattctttgccctttttttaatacccccataattgaaaaacctttgctgttcccaaactaattctctttgcaaaaatactccctttccccattttaattttacctcaaaaaaccccccctctttccccttttcaaaaattttccaaactccatattcttaatttctccctccccccttttcccgcccctttattatctctccaatttgtttgtttcttttctccctagttttaatctttcccacttt

SEQ ID NO: 10699 - DNA, 141 bp, Zea mays
  Clone ID: LIB3156-003-Q1-K1-C7
gtaaaattttgcaaattttcgtgaggggcagagttcctaatttgtgtgcggcgcattcgatgtaaccgaggcttatttggtttgcatgaaatgtgcaaactgcaatgctatgtattgctcgtaaaatatgtctatggattc

SEQ ID NO: 10700 - DNA, 342 bp, Zea mays
  Clone ID: LIB3156-003-Q1-K1-D10
gccggtccaaccagttccgcccgcccaccaatgatgaatgatcggtttgtaattcggcgcgattttatttgtttggggtgtgaagaactgcgatcaatctggaactgttcgtcgtgatagaacatgcatgttgatgctgtaaataaatgcgattggtttggagcgttaactctacgttaaccgtacctagtgagctagcttagctaccccagtacgtatctgtgactcgtgagcgagttcagtgagacgctgtgcttgtaactgtaaatctgtgatggcatgccaacgcactggtactacatgtattactgcccttaattgtgtatatataaatttcttgtg

SEQ ID NO: 10701 - DNA, 461 bp, Zea mays
  Clone ID: LIB3156-003-Q1-K1-E2
acgccttccggagaacgtttttcgggcaccgtttaagccacgcgacgtcgccgttctcgaacgtcttcgggaactgtgcctactactggaccttcggcgcttacattgcttactactgcaaccacccgctgtacaccccagtgagtgatctgcagatgaagattgggtttggttttggggtcgtctgccaggtcgcgaacttctactgccacatcctgctgcggaacctcaggagcccaagcggcagcggcgggtaccagatcccccgcggtttcttgttcaacatcgtgacctgcgccaattacaccaccgagatctatcagtgggtcggcttcaacatcgccacgcagaccgtggcaggttacgttttccttgtcgtggcggcaggcatcatgaccaactgggcgctcggcaagcacagccgtctgaagaaacttgttgaccgcaaggatgggatgccc

SEQ ID NO: 10702 - DNA, 331 bp, Zea mays
  Clone ID: LIB3156-003-Q1-K1-E4
tccccgacgccttggccgaccccttggaacttgttaatgggcgtccatggcgctgggctcacggactgcgtgttccttccgcacggcgccacactgatccagattgtaccttggggcgccctagatgggatatgcaggatcgattttggctacccagcagaacagatgggcctgaggtaccagcactacagcatcggcatgcacgagagcagcctcacggagcagtaccctctggaccacgagatcttcagaaacccgcttgcgttccacaagaacgggttcgagttcgtcaggcagaccttcatggatacacagaatgtaaggcttgact

SEQ ID NO: 10703 - DNA, 212 bp, Zea mays
  unsure (1)..(212): unsure at all n locations; Clone ID: LIB3156-003-Q1-K1-F10
cggacgcttgggttttttttgagcgcttttctactctctcctctcttttttcctnttagcccgcgtttttttaatttggggggtctcttattttattacatttttttctatctcatctcctatctcacttattttctttctcttaacttctttctatttttttcttttttttttttttttttttttctttttttttttttccttttttttta

SEQ ID NO: 10704 - DNA, 197 bp, Zea mays
  Clone ID: LIB3156-003-Q1-K1-F2
cttccgaaaaaaaaaaaaaaaaaaaaaaaaagggtctcccataataaaaaaaaaaaaaataactggcgcgtctttctaaaaaaataaactcttctatactctcacctacattctattccctgtctcacgttttacaacatcttcactgccaaaaccctgtcgtaacccatcttaatcgcctaaaccacatcctcctt

SEQ ID NO: 10705 - DNA, 358 bp, Zea mays
  Clone ID: LIB3156-003-Q1-K1-F4
cttcggggaaaccaaaaagaccttcgcggccgtttaaactcgccgtctttgaaaagctttgctaggtttttgtcatggtgcccgctaagccccccggcagtaggttggagttttgcggagctcgcgtttttacaaatctctgtgctctgaaacgagcgtcgtagccccctttgctgttgtgcatcccgattgagtgctgttctttgccaccttgtttaatttcgtcacctgacgacataaggttcattttacacgtgattgagagatctcacctctagtcttgtggcgtagtttgtcggaaaaattccctatatgtcatcagatgttatactcattccttacaaggctttttctagtt

SEQ ID NO: 10706 - DNA, 392 bp, Zea mays
  Clone ID: LIB3156-003-Q1-K1-G12
gggaggatgctccgggagcgcactctggctgccatgcggcaggcctaggacgcgctgggcgaggtttgtaaatcggaggccacactgtccgtgctggtggacaactggaaacgtacttgacttggttgctgtggattatgttggaagggggtgggggttactctacactattcgccatttgtggactttacatcgaaactagactttctatattatcaattttttttcttattaaatattatatattattttttttctttttttttttttaataattcttttttttaattttttttattatttattttattctttttttttacattatacactttattaattatattctttttatatctttatattaatttttttttatttttattttattt

SEQ ID NO: 10707 - DNA, 407 bp, Zea mays
  Clone ID: LIB3156-003-Q1-K1-G2
agccttccgaaaaaaccggaggtggacctagctaacaagagggcaaccgtaaaaagaaggggaaggggagagctcctgtcacagaaagcagtgctgctaatgatgtgaatagtgcactagcagataacattctggagactgtaagaaggcttcaatcaaaccagcaggctcgggaaggaggagctgaggtgctgtcgaaggatgggtatcgaccttccaagggggtccaaccggcagctggatcttcatctaatctggacagtgatactagttccaactcaaaatcatctggtgcaaaagataacataggcaagggaggaggcaataagcaaccgaagaagacagcaaagtttctcagagctcgtttaagtgacaactcattagccacacttgatttaagtcgtcca

SEQ ID NO: 10708 - DNA, 418 bp, Zea mays
  Clone ID: LIB3156-003-Q1-K1-G3
cttcgctgaaaccttggccgcaacccaattccattaacttcaaaagccggaaccattggccccaggaggttttgcccggagggggtcggcctaatcctgaaaaaacccaaaagggtaatcctgtgcgacaagcccgacgccgacatcgatctgctgaccgtcggcacgccggagaccatagatttccgacccaaccgcgttcgcatcttcatcgacaccgtcgcggaagcaccccacatgggctgagaatcaaatctataaaatgaataactcggacatgtcatgcgtgcatgtgcgtccccgaataatggatgtgtgtgcttctgtccaataaattgctagtaaaaataatggcatcgtctgtatgcatgaaataaatgtatcagaatgctcatcctttcaaaaaaataagaccctt

SEQ ID NO: 10709 - DNA, 247 bp, Zea mays
  unsure (1)..(247): unsure at all n locations; Clone ID: LIB3156-003-Q1-K1-G7
cactaacnaacgaactcttgctccgatttctagctanctgacgtcnactattgcgccgccgctntataacacgagggcgccgcatgtagtggccgtgctggtggtggtggcgctgctggcttcgtccgcgtcggcggcgatcacctgcgggcaggtggggtcgttgctggcgccttgcattccgtacgcgacggggagggccagcgcgctccccgcgtcgtgctgcagcggcgtcaagagcctcaac

SEQ ID NO: 10710 - DNA, 271 bp, Zea mays
  Clone ID: LIB3156-003-Q1-K1-H2
cttcgccgaccccttggccggaccccttgggttttgttcgaaaattccatttagcggcgccaaagggagaaatacaagtctcaggagcattactgatagtaaagacaacagacaacagacacctgaagaggccgacgctgcgctacccaaacaaacaggagacaccgcagcatacagtccacgcaataacagcaacaaccgcatacacaactttagtggcaagttatccaggcactgcaaaagcagacacgggatcgcatcatttcttctt

SEQ ID NO: 10711 - DNA, 221 bp, Zea mays
  Clone ID: LIB3156-003-Q1-K1-H3
aatggaccagttaataaattccaaatcagttgaagaggtgggcagtgagaagcagagaagtgacaagtggcaaaggttatctgacatacagatgcttataaaggaaactagagaaaagattgcgaggattttgggtatgatagtagaagagactgaatctgggacttaagatgatagcaactacaaaacagtgaattagggcaatcaatccaccttctttt

SEQ ID NO: 10712 - DNA, 271 bp, Zea mays
  Clone ID: LIB3156-003-Q1-K1-H4
cagagcagcgaaaaaaggtggatctcaaaacttttgctagctgggaagactgtccagagaagatgatgatggacatgatgtcggacccaaacacggttcgacgggaagaccggtgattttggtttgcagcctccggagatgtacagacgacagcgtttgttgcacataggagtattttgcttgcgcatttggctgggtcacacgctatttaggttgaagtaaaagaagatttgtacagaacgtaattcccaataaatgaaatggaggttct

SEQ ID NO: 10713 - DNA, 144 bp, Zea mays
  Clone ID: LIB3156-004-Q1-K1-A3
gcgtctgttctacaaggttggggtaacctggcttgcatgtcctgctttaatagcattagttgaggggatctttctgcagcatcagctcgtctgcttctatggctactgactcactctatggacagaaagcattgtctatggcca

SEQ ID NO: 10714 - DNA, 418 bp, Zea mays
  Clone ID: LIB3156-004-Q1-K1-B10
gcgtgacactatactgcttgtatttgcaaacaaacaagatcttcccaatgctatgaatgggggtgaaattactgacaaggttggtctgcattccctgcgacagcggcactggtacatccagagcacttgtgctacatctggagaacggttgtatgaggggctcgactggctctccagcaacatcgtcagcaagtcttgaatcttttcggcagggctcctaccgagaggatgtctgaacaacttatggctgcttgttttttatatattattactaagacacaagctacatcacatatagtgcttgtgaaaaaagaaacttcttagctcttttgagggattgatactacatatggattgagtatttgtttttgggtcgatataattgcctggttggttccacaaaattgactgtcaacta

SEQ ID NO: 10715 - DNA, 312 bp, Zea mays
  Clone ID: LIB3156-004-Q1-K1-B9
ctgaatctgtattagtgcttgtgttggacctgtaagtttttgttcgtgaataatcagggggtgcacagactattaaaagcgtagtttctgctctaccaagtggactatgtttgcttgaacgatatgtactgtacgcaccagaactgaatgagagtgtacggtgttagcaaaaaaaaaaaaataaaaaaataataaattaaaaaattaaatttaaaaaaaaaaaaaaaaaaaaaaagattaaaattataaatatataaatttatgaaaaaaaattattataatagaggggcggcctttttaaaggatctaatt

SEQ ID NO: 10716 - DNA, 404 bp, Zea mays
  Clone ID: LIB3156-004-Q1-K1-C6
cggacgcgtgggcggacgcgtgggcgacaaggaggcgaaccagtggaaagaacgtggcgcaggcactgtgaagctgcttaagcacaaggagaccgccaaggtccgcctcgtcatgcgtcaggcgaagacgcttaagatctgtgctaaccatcttgtggtggcgacgactaagatgcaggagcacgcagggagcgacaagtcgtgcgtgtggcacgcgctggacttcgcggacggtgagctcaaggaggagatgtttgctatccgttttggatctgtcgagaattgcaagaagttcaaggacactgttgaagagatagctgaagagcaaggaaagaccgaggtgaaagaaaacgaagaagtcttcattgccgccgcatatttggtacagaagttaacagtgacag

SEQ ID NO: 10717 - DNA, 397 bp, Zea mays
  Clone ID: LIB3156-004-Q1-K1-C7
tcgttcttttctcaatctcctcgaaaccttatgatcgtgcttgatcggcaattaccagatggggcatatagatgcgttaacaatcccatcaaagcttgctcatgttcacccccatcaagcacccacccatgcagacaaggattatgacctccccatcaagatcctgcagttccttgtgcccattatgatcctgggccttgcattttgtatacggcagtacaccaaattcatatatattactattcttagaggcttgccttttgagcctgtattatggtaatggttctaataaaaacagctcaataattttgcattttatttttcatgtggatatttcctcattagtcacaatctacttttttttattgacatacattttgaaatgtgctcttttttt

SEQ ID NO: 10718 - DNA, 394 bp, Zea mays
  Clone ID: LIB3156-004-Q1-K1-C8
cattcatatgcttgactgcaaattctttcttggagcttcctgctggcaatgttggtagaagtgcttccttgcggagacaatctcatattctctacagatatccatcactgaaagtagttaacttcagaggaaatgttcatacacggttaaggaaactcaaggaaggagatgtgtctgctacattgttggcgctgtctggattaaggcggctaaatatggcataaaatgcaacagctgtactatcattgtaagaaatgcttccggcagttgcccaatgtgctattggaatcgcttgccgaatcaacgatgacaaaatgatggagtatctttcctcgttgaaccacgatgataccatactagctgtctcatgcgaaaaaaaattcttgcaattctt

SEQ ID NO: 10719 - DNA, 402 bp, Zea mays
  Clone ID: LIB3156-004-Q1-K1-D1
ctgatttcgaagatattggccacagtgattccgcaagggacatgatggagaagtaccagatggggcagatagatgcgtcaacaatcccagcaaagcgtgctcatgtgcacccccagcaagcacccagccatgcagacaaggataatgacctccccatcaagatcctgcagttccttgtgcccattatgatcctgggccttgcatttggtatacggcagtacaccaaatcagagtagtaactattcttagaggcttgcctttggagcctgtcttatggtaatggttcgaataaaaacagttcaataattgtgcattgtatttgtcaggtggatattgtctcattagtcacatgctactctgtattatggacatccatgttgaaatgtgcgcttttcccccatg

SEQ ID NO: 10720 - DNA, 68 bp, Zea mays
  Clone ID: LIB3156-004-Q1-K1-D3
aaaaaaaaaaaaaaaaaaaaaaaaaaaaaaaaaaaaaaaaaaaaaaaaaaaaaaaaaaaaggagaaaa

SEQ ID NO: 10721 - DNA, 187 bp, Zea mays
  Clone ID: LIB3156-004-Q1-K1-D7
ggcgggcgggctgttgccacctgtgttttgtgtcttagtgtccagagagataaaagggggttgcttctgcaagatttgctgccccgtggactgagcaattcgatgattttttggatgatgtattgcaaacccttgacttttgtcctactagttatgagcaggctgctctttacttgccctgtctcgc

SEQ ID NO: 10722 - DNA, 382 bp, Zea mays
  Clone ID: LIB3156-004-Q1-K1-D8
caaagcgtaagaaggggcacgcttacaaatagaacatcgatggaaacccaaacagtatgatggcaaatgaagctgcccatactactgccaatcaaagtggcgatcctcataaaggaagttagaaggggcaacccatgttgtcagaggacgctaccaccactgtttccccaagcaagagtaagaagcacgaaactcgtaatgatgaattggacaaagatagttgtaatttgtccaatggaaagaatgggaaaacagacaaacggaatatcgacagatacacatattatcttacaccaaacgaaaccataaattataatcataatggtgacattcttctcaagatttaagtatgagaaattcattattatgaaacatcaaattc

SEQ ID NO: 10723 - DNA, 431 bp, Zea mays
  Clone ID: LIB3156-004-Q1-K1-E11
ggcggaggagacgtgcgcggacgaccagaagggcgacgccgagtgcgcggcggcgtggggcgaggtggaggagctcagcgccactgccagccacgcccgcgacagcctcaaggagaccaacgccaacgacccgctcgagaagtactgcaaggagaacccggactccgaggagtgccgcatctacgacaactagctagtcgtatagctatatagggcgtggaatgatactctcgatcggcgcgtcatacgttgaatgaacttgtatgaagctatacctcaatgcttctctacccctaccgtcgccgccgccgcatcatcaccccgtatgatatgatacacagctgggatggtatactgatattttgggttaaaattaaattatactttttttatttataacttaaatattataaagggcggccttcttttaa

SEQ ID NO: 10724 - DNA, 436 bp, Zea mays
  Clone ID: LIB3156-004-Q1-K1-E2
gcagaagcgaatagcagcggcgcaaaggaaagggagccatgctcgcctcgccggcgctggccggcgcccactccttcgcggcgtccgtgtatggaaacatcctcgtcccctcgcctcccgtccccgcgccggcacgtcgcgcggcgctgtccgtcgtcgccaaggtcaaggtggccacgccccaggacgaccgcatcgcccgccacgtccgcctgcgcaagaaggtaagtggcaccactgagaggccgaggttgagtgttttccgctcaaacaaacatctgtacgctcaagtcatcgacgacacaaagcaatgtactctggcttcagcttcaaccatgcacaaatctctctccaaggaatttgaatactcggctgggccaacgatcgaaatagcacaaaagatcggtgaggtgattgccaagtcttgcttggagaa

SEQ ID NO: 10725 - DNA, 249 bp, Zea mays
  unsure (1)..(249): unsure at all n locations; Clone ID: LIB3156-004-Q1-K1-E5
aaagttactagcttgagaggtgattgctcttttatcaaccacatagaccagtatcagcgggctttgaaacatatgcaagatttgcatgaactctgaatttggttaaaacaggtctcaggtctgttgcgtcgtggtgagtcctttttaaccttgaaatactgaactataatcctgtgcgatgtacaaaccaccttcagaatacatattctctgatttgtctgttgtcaccataattggccactgatnaat

SEQ ID NO: 10726 - DNA, 69 bp, Zea mays
  Clone ID: LIB3156-004-Q1-K1-E6
cacgaattactttgacagttagcttgtcaagatgtcaattttaaactggcttattgtgatattttgtcc

SEQ ID NO: 10727 - DNA, 400 bp, Zea mays
  Clone ID: LIB3156-004-Q1-K1-E9
ggccgtttcacgggcgaccgccctttcttcatcgccgtccagaccaccgtcgtctgcgctgtcgccttcgacgccggctacgccatggccagggccgtgcagtccatatgacgatgatgattaatgaggcagctcgtagtgaaaagtccgctcgccggccggtcgccacatgtcgtatcattcttcaccggccggctaggatggcgaagaaaaataagggcagctactagcctactacgcatacgtggtagccaaactgtactgtacaacgtgtagtgtgcttgtactatcacagtactagtactagtgtgtgtactttgtttgatggctgcctgcgtgtcccacatgtcgtgttttggatgatttatgtgaatccaaacttgtggcccgctgggctttt

SEQ ID NO: 10728 - DNA, 334 bp, Zea mays
  Clone ID: LIB3156-004-Q1-K1-F5
cttattatttcaattcctgcaattttggatcgtatcagagatgcagtgtttaaaaaagtgggtgagaagggtggcctgacaaaaaagctgtttgattttgcatataagcggaatcttgcatcaattgaggggagttggtttggatcctgggcaccggagaggatgatatgggataccattatttataaaccaatacgggcaatgcttggaggacgtgtaagatttgttctttgtggtggtgcacctttatcaagtgacacacaaagattcatgaatatatgtctaagtgtcccaatgggtcaaggctatggtttgactgaaacctgtgcttgag

SEQ ID NO: 10729 - DNA, 228 bp, Zea mays
  Clone ID: LIB3156-004-Q1-K1-G2
gtgtgctgtggcccggtcattatgcataggtgttttacattgtcgtagtgtttgataaatgatggatggtgactgggtttgttgtgtcaactgtcataactattgtgcatttttggacgctatatgtgtagccttgatatgaatagatttactgtacttataagggctggtgtgactcagccgtttgctcctttgggcaatgtgcgcatttgggagcatcttgcattt

SEQ ID NO: 10730 - DNA, 292 bp, Zea mays
  Clone ID: LIB3156-004-Q1-K1-G3
ggcagagaggggccgtgggccccgccagacttaccgtggaggtgggcgacttggtgggtgcagcgatagacacgctggaaatgagttaagacctactcaccgggcatatgagcgacacagcggtacaggccgtggctactggatgaactgtgaacggtgtgcgcgtagaaatcgaggtacctgacctgataaatgccttgcaaataacactgggagagctgttaattctgaggagactactagacgttcggcaagacacaagaaatcctggtgatccactcactctggggca

SEQ ID NO: 10731 - DNA, 149 bp, Zea mays
  Clone ID: LIB3156-005-Q1-K1-A12
acgcagactcatgtgtcctaagctgcaactgtcattttaaatattaatttcacactcatacaaatcgggcgagcattgaataaaaaaagaataattttatatttgcctccacagcacacaatacttgattgccatttgactgatattta

SEQ ID NO: 10732 - DNA, 240 bp, Zea mays
  unsure (1)..(240): unsure at all n locations; Clone ID: LIB3156-005-Q1-K1-B9
gaaaccagatgtagttagtactataagagagtatgcttcagctggaactgtgaataacaactttagcaatctggctaatgctttcttggagaaacatgttgatccatgatatgacaattttacagggtagactaaagcttacacatttcgtgtacctgtggtgttttcatattctggatatgaactaaagaaactagagcttagatctcannnnnnnnnannnaannnnnnnnnnnnnnn

SEQ ID NO: 10733 - DNA, 153 bp, Zea mays
  Clone ID: LIB3156-005-Q1-K1-E2
acgctcatacccaccagcgcaaagccggcctatcgttctgtcgtgagaagcaatggctgaccgtggcaaggcgatcggcgctggtgcccctaagaacgcgacatcaaggagctgcaaggctggtctgcagtttcccgtcagaaggatcgctcg

SEQ ID NO: 10734 - DNA, 122 bp, Zea mays
  Clone ID: LIB3156-005-Q1-K1-E8
acgcggccgcggactgaattgccgcgaccgacgcgcccgctagttctagatcgcggagcctgccgttctaaaaggatctcaggctaaagtacgcgtgcatgcaagcgggttaacttttctat

SEQ ID NO: 10735 - DNA, 80 bp, Zea mays
  Clone ID: LIB3156-005-Q1-K1-F10
tcggtcgccctgactcctccctagcagcagaaaaccggcggcaagtctttcgtggcgggcaaggaaaggccaaggttttc

SEQ ID NO: 10736 - DNA, 207 bp, Zea mays
  Clone ID: LIB3156-005-Q1-K1-F11
tcgcgctcctcgacccccgcccaacactaccagacgtcacgccgtcgtcgccgcgagtgcttcattcaccatgatcatctccaagaagaaccgccgcgagatctgcaagtacatcttccatgagggggttctatatgccaagaaggactacaacctcgccaagcaccccaagcttgacgttgcccacctggaggtgattaaactcat

SEQ ID NO: 10737 - DNA, 217 bp, Zea mays
  Clone ID: LIB3156-005-Q1-K1-G1
gagcgcgggcggcacgacggactggaccaccgatgccgcgcatagcgatcggcgctggcaggccgagcgggcggtgatcgcggcgaacacggcggccggcatgcacgggccgggcgcgggcgacctgtccaccgcgctcgatgcgagcgagatcctgaatacgatggaagcggcgccttcgcgtgtcggacccggctcgggcgatgcggcgaacctg

SEQ ID NO: 10738 - DNA, 55 bp, Zea mays
  Clone ID: LIB3156-005-Q1-K1-G10
aaagaaaaaaacaatgtaacaaacttcaaaaataccaggatacaagcaagaccga

SEQ ID NO: 10739 - DNA, 79 bp, Zea mays
  Clone ID: LIB3156-005-Q1-K1-G2
gcggctgctcggatttgaataccgattgaacacatagacatcggaactggcgcaccaatcgctctgtgaacgcgctgaa

SEQ ID NO: 10740 - DNA, 355 bp, Zea mays
  Clone ID: LIB3156-005-Q1-K1-H12
tcgtataccgaggaaacttacgccctcgctgctctcctgccgacgccagtaatcaactgcctaggacttggtgcgtgctgttgtccatgatattcaacctctacccctaccggtgatcaacgcaacttgtggcacctcatggatcctaggcagtcatcaacatgaggacagaggtcttcgttgcatgctgctataggtgccattggaggagtacgacctgcacttcgacaagaatgtacgagaagcctaatggattttactactgctgcaaccccatcaacgtgcacacaacatgtatgtcaacatgagtcgacagtcggcggtgagaatccctctttgatgtctgattatagag

SEQ ID NO: 10741 - DNA, 202 bp, Zea mays
  Clone ID: LIB3156-005-Q1-K1-H3
tccggggccaaccggccacccttgccggggaagccttggtgcttgtaaacttttacccaacctttgggaaaactttaaaaaagccaaggcggccgtttgaaaaggaccgcctaaatcctgacctaaagctggttgggaagtttggcctgcggtgcaagcccaagctttggcccgtgcagattgccctgaccccgttcaggaa

SEQ ID NO: 10742 - DNA, 78 bp, Zea mays
  Clone ID: LIB3156-005-Q1-K1-H4
acgggcccggactgactggccggaccgacgcatgcgaaagaaaaaaaccctaactcgtcgaaagcacaacggtctacc

SEQ ID NO: 10743 - DNA, 241 bp, Zea mays
  Clone ID: LIB3156-006-Q1-K1-B12
tgcatgtcgtcgccaggaacaagagaaataatacaagaccaccacgcatgggcatactcgatatatatatgtatagcccgtgcccgtgtccgcctttgtaccaatacaagccaagactagtggatgtattattattattattattgcgctatcacatacatgtacccctgctacctgaagatggatgtgtatcgagttatcaaattaagacacctgcagcaaaaaactatatatgttgcat

SEQ ID NO: 10744 - DNA, 409 bp, Zea mays
  Clone ID: LIB3156-006-Q1-K1-C11
gaactctcaagaggaggcgaggcagaacctcaatcgcgaccgcgacccgcaggtgaggtggatacggtgcgagcgccggaagccggaagcaccggtgacgaagccttccgtgtcatcactcatcaggatctcagggttttgtttcgtttcgcgggcgttgggaatccatccatggcgaggaagatgctcatcgacggggaggtggcggccgtcgcggatggtgggcactatgactacgatctcttcgtcatcggggcgggcagcggcggcgttcgcggctctcgcaccgtcgcctccttcggagctaaggttgcgatttgtgagctcccattccaccccatcagctcagagtggctaggaggacatggtgggacttgcgtgaaacgtggttgcgtacctaaaaagatac

SEQ ID NO: 10745 - DNA, 321 bp, Zea mays
  Clone ID: LIB3156-006-Q1-K1-D12
tgtttctataggattgattgggaggccgtctactgaaaggaggaaatgatgctgcaatgtttgtctagtaggagcgccagatgagtttcagatccgagcggcaagcggagcctgctgtttgtttgcacattttgagagactttgtagtttgtaatgtttctagctcctgtatgacgattttctcggcggctgcacctgacctgcccaccgtcaccagctcaccgttgtagtagtctccgatgagcaaatcggttgttaatacgtaagagaggagagctatttttgttcttaggcaaacaatgcttaactgtttcattattc

SEQ ID NO: 10746 - DNA, 436 bp, Zea mays
  Clone ID: LIB3156-006-Q1-K1-E12
ctcacttcaacgcacagagggtgatgcctttagtgtttcttggagtggtgatgggagggttctttgcatggtcgcgcaacctgcttgcgtctatggtgctgcacagcttgtggaatggatttgtgttcttggatttgatgaagtgagcatttgatcttgatttattgtttttgttccaaccttggacatatcttcttgagcctttattgataatgtttattacatgattgtatctattcttatttcacgattaaaattatggtatttaatgcatcgtctgaacattaagaatcattttatttttaatctaaaaaataacaatttagtgcacgtaattataccacactacttaaataatatgtttattcttatgaaaatctttatttattaattattaatctcttctaattttaataatcttgtcccaatttttttt

SEQ ID NO: 10747 - DNA, 372 bp, Zea mays
  Clone ID: LIB3156-006-Q1-K1-F9
gccgcccttttttttttttttttttttttttttttttttttttttttaaccgaatgccgggttgtcatataataactaaataattatccaggtttgcacccttgaagttaacaactcaacacaaacacagtgtccaaataactgaagcagtaccaggcaagcgttacacaggagaagggtcactccaacctgacagcttaactaaaacctacacgacgacaaggactccagaggagcacacagaaatgtccagtttaaactaacaatgtgcattccctagtcttcactccttggaggacttgttgatcagggacttgtggatgtgcgggatgacgccttcacctgcgatggtgcccttgatgagggtatcca

SEQ ID NO: 10748 - DNA, 94 bp, Zea mays
  Clone ID: LIB3156-006-Q1-K1-H12
acgccagtcaaggctaccattgatgctaatttcctcaccaaggaggtacacttcaagggcaggctccttactcagtacttatggtacactgctg

SEQ ID NO: 10749 - DNA, 460 bp, Zea mays
  unsure (1)..(460): unsure at all n locations; Clone ID: LIB3156-007-Q1-K1-A10
cgcgtccgccggcgtggacgcgaggggctatgaagagcttgttagtagtattgttttgtatgctgctcctgtgcnttatcacgctcaccaatacgctggcgaaataagccacgccagcagttcgttgacacatactgtatgagtactattatactatacggcacaaacggccaaacgccacacaggcgtggatcaaaattgtactagttcctgtctacaattcgtggcctttatcatcctgattggctgcccgtatattatttatcttaagtcaaaaaaaaaaaaaaaaaaaaaaaatatgggcggccgctttaaaagaatccaaattatcttactcgtgtatgcgacgtcgtcgcttcttttataaggataccttttttcatttctttggtcgttagtttacacttctttgattgggaaaacaatggcttttctctactcaattttttttaattacatt

SEQ ID NO: 10750 - DNA, 293 bp, Zea mays
  Clone ID: LIB3156-007-Q1-K1-A12
ggatttagttccggaggtaaaaggacaggaagattgttttcgtgtaatgtcgtctggcagctaagggggacgttcttatgaccctctagatgccggattcactcgccttacttaagaacttagaagaaatggttcagcatgatacaagttttattttattttttgtttcattttgcggattatttgccctgggctggagagtgagaattgaggggaacaaaatagatgctgttactcgcgatgtactccctgattcgttaaggaattcaccagaactttgacttggccgacgc

SEQ ID NO: 10751 - DNA, 123 bp, Zea mays
  Clone ID: LIB3156-007-Q1-K1-B3
acccacgcgtccgaaaaaaaaataaaaaaaaaaaattttttaaaaaatttttttaaaaaaaaaaaaaaaaaaaaaggggagattttaaaaaaaaaaatggcccccccctctaaattttccatt

SEQ ID NO: 10752 - DNA, 360 bp, Zea mays
  Clone ID: LIB3156-007-Q1-K1-B4
cgacaagagatgacgagaagtggtttaagcactcattgttgtacggggaaaacgagaaggttcgattggcatacaggccagtgcacatgaacacattatacgatgaagtatagtccttcccgccgaaagcccgtgtctattgatcgattcgagcctcacaccctcgggaattccgtgtaaggtgttaataaagcagatgggcgttcctggctgagaacatgatctgaactcgtgacccccctttttctgtggttctgtattttgtctgatttgctagaaatataaagaacacatgctaatgcctgacagacgtttgtgtacatgaaattttgcatgggtttgttacttgttgatgctgtt

SEQ ID NO: 10753 - DNA, 271 bp, Zea mays
  Clone ID: LIB3156-007-Q1-K1-B8
ggggggtgttaacacacggtctctctgaattggccatgctaagggaagttatagtagtgcaaagagaaggatatgtctttttctttttctgaaagcccagatcgtttggctctagccttgatgtatgcagaacaagtgattgtaatggattctgagtatcctcatcgtctaaaaaaaaaaaaaaaaaaaaaaaaaaaaaaaaaaaaaaaaaaaaaaaaaaaaaaaaataaaaaaaaaaaaaaaataaaaaataaaaatataaaaataaaaa

SEQ ID NO: 10754 - DNA, 400 bp, Zea mays
  unsure (1)..(400): unsure at all n locations; Clone ID: LIB3156-007-Q1-K1-C6
cggacgcgtgggcggacgcgtgttcggacgcgtgttctgacgcgtgggtagaaatcgagaggctcatgttccacaagaagatgcagacaaaggtgtacaataagcgcaaaaccatcttcaaggttttatccatcactgttgcaactatcactatctttggtacactactcagtatctcagcacaactctcaaatgtctctaaaggctgaagtagagtttgaaaaataggtgcgctggtataggtactaggctggtgagctcactttgggctgccctttgataccttttgttctatcaatgctttgtgttatttcccttatagtagctataacattccttcaataatatacctgaatgttgggttacagttnanaatatataaaaaaattagtttaanatt

SEQ ID NO: 10755 - DNA, 279 bp, Zea mays
  Clone ID: LIB3156-007-Q1-K1-D3
gtttcagtccacatcgtgatgttttatttttacttttgttttgctataacggatagcgctcctggtgggtgccactggcgggtggttctgcctctggtctggtgtgtttgtgtgtggtcacacttgccagccagcagaggcgcctgcttgtacctagattactgtttccattgtcgtcatcatcggctaacattgtcataatgtcagtttgggtaatgttagattaagtaattattgtgttctgtattcttgtttgttgcccttaaaaaaaaacaaaaa

SEQ ID NO: 10756 - DNA, 67 bp, Zea mays
  Clone ID: LIB3156-007-Q1-K1-D7
aaagatgatgaagaaaataaccattattaaaaaaacaaacaaaaaattaaaaataataatttatggt

SEQ ID NO: 10757 - DNA, 390 bp, Zea mays
  Clone ID: LIB3156-007-Q1-K1-D8
taagctttctttcccctttttatatgcatgaggatttacgcattaattcatataggggggatctcataatttttccaatctttccaatcccataggtataggaataactgaacaaggcctaattttgcagtttttgtcacattcacacagtgtgttatagtaccagtttggtgctctgacactggggaagtttaatgtatccttacctatgaatagccgattatgatgaatggagattaaattgataaaaaaaaaaaaaaaaaggcggccgcccttttttattttttttcttttttcaactctttcataaatctttaattctttttcacatcccctttatttctttaaattttctcttcttttttattatttccttttaatttaaattta

SEQ ID NO: 10758 - DNA, 358 bp, Zea mays
  Clone ID: LIB3156-007-Q1-K1-D9
caagagcctcgccaacagcgtcaagaccgtcatcatttacaccggcggcacgatccccagcaagtgcggcgtctccgtcggattccccatcagcatgtccaccgactgcaacaagatcagctaagttacgacgaccaagctaataagcctaccgaacgtacacgtacgtcccgcgcgctgcacgagtgatgaagccaggggagaaataaaataaagcctctgtattgccaggagcagcatgcattatttatcgatctatatatatatatatatatactgtactgtagtactctattatatatgtatgtgtggcctgcagtgcgagttgcttctatccacctacttgttcacacagttt

SEQ ID NO: 10759 - DNA, 339 bp, Zea mays
  Clone ID: LIB3156-007-Q1-K1-E1
tgaatgactatgaacaaaaactgtagagtgctaacttttttctaattttgttatttccatcggttgattattttaatgaatgcgtcacggttgctccgtgggctgaagttgtggttggcattcaactgccttgagttttggaggcttttggactgccttgccagcatgagcctcctggaagaggcaccctggcatctgcgtgccatttcccatttgttcgtgccgtttggtaggagtatccattggcttatttagcaggttcctggtttgaagaaagaagcggtcagctgcaatatggacggtgccttgcctttttttcgactacttagctagtaatta

SEQ ID NO: 10760 - DNA, 353 bp, Zea mays
  unsure (1)..(353): unsure at all n locations; Clone ID: LIB3156-007-Q1-K1-E10
acgcgtggtcacaatttttatgtgcaagctttttgagattggnggagacaagaagggcaaggggacatctttcttgggaggttcggagggcccatctcgatgttggatcgaagctatgggtctactactgttctaaaaactcgtcaaatttcaatgttactagtagttctgaaagcaggtcatgctgtgtatcaaattccaatgcctgacatttgcgctgagtgtgggttgtcttttggctaaatgaagttttgcaccctgaatcttcattgaatgtgttgtgtgtttgtttgaaaaaaaaaaaaaatataaaaaaaaaaatattgggtacaacttataataacaatcaatct

SEQ ID NO: 10761 - DNA, 369 bp, Zea mays
  Clone ID: LIB3156-007-Q1-K1-E12
tccgcggacgcgtggtcccaattaataggtgcaagcatttttagattggtggagacaagaagggcaaggggacatctctctacgaaggttcggatcgcccatctcgatgttggatcgaagctatgggtctactactgttctaaaaactcgtcaaatttcaatgttactagtagttctgaaagcatgtcatgctgtgtatcaaattccaatgcctgacatttgcgctgagtgtgggttgtcttttggctaaatgaagttttgcaccctgaatcttcattgaatgtgttgtgtgtttgtttgaaaaaaaaaaaaaaatttaaaaaaaaagatggggaatgctatattatataaaaaaaaattaaaaaaata

SEQ ID NO: 10762 - DNA, 452 bp, Zea mays
  Clone ID: LIB3156-007-Q1-K1-F10
gttaattcccctgcattgctaccgagttattgataataattatggctgttaaaaaaaaaaaaaaagagggaaaataaaaaaaaagaaggaaaaaaaaaaaaaaaaaaaaaaaaaaaaaaaaaaaaaaaaaaaaaaaaaaaaaaaaaaaaaaaaaaaaaagggccggcccttttaaaaaatccaagtttacttccccgtccttccaacgtaatattttttttatagggccccctaaattaaattcactgcccgtcttttaacaacgtcttaactggaaaaaccctggcttaaccaaattaaatccctttgaaaaaaatccccttttccccagttggctaaataacaaaaaggccccaaccaatcccctttccaaacatttgcccaccctaaatggcaaatggaaccccccctttaccggcccattaaccccggcggttgtggtggttaccccc

SEQ ID NO: 10763 - DNA, 336 bp, Zea mays
  Clone ID: LIB3156-007-Q1-K1-F11
caagttgagccgtgccgactacctgaagtacaagagcgagggtagaattgttcctgatggtgtcagcggaaagctgctcggtggccatggaagacttgagaagcgtgctcctgggaaggctttcctcgaggccgttgcttaagtccaatctacagttggaatgcgaatccagacgttttggtttagcctatcttattttgctttgtgcaacatgaattttaagtgtatggggtattacagtgccttgtgtgaacctgcttatctcgtgctgaacatcgttatgcatggaagtacttatcttttgttctgctaaaaattaaagtgttctgcgactaa

SEQ ID NO: 10764 - DNA, 476 bp, Zea mays
  Clone ID: LIB3156-007-Q1-K1-F12
cccacgcgtccggtcgacgaccgccgccgccgtgctgtccccgccgtccgtggccgggcttcgcgtggggccgtctccccgggcgcgcgtggcgttccgcgcggcgcgggcgcggcggtccgtggcggcgcgcgcggagctgagcccgtcgctggtgatcagcctgagcacgggcgtgtcgctcttcctgggccgcttcgtcttcttcaacttccagcgggagaacgtggcgaagcaggtgcccgagcagaacggcaagacgcacttcgacgccggcgacgagcgcgccaaggagttctcgggcctgctcaagtccaacgaccccgtgggcttcaacctcgtcgacgtcctcgcctggggctcgctcggccacatcgtcgcctactacatcctcgccacctcaagcaacggatacgaccccaacttcttctgagcggccggcttgcggcatgttcttgagcctgcctgtattctac

SEQ ID NO: 10765 - DNA, 264 bp, Zea mays
  unsure (1)..(264): unsure at all n locations; Clone ID: LIB3156-007-Q1-K1-G1
cgggnccgacccacgccgtccgccgactgcaggtgatncggcgacgtccgcgaagatgcctatcctctctgcggagcgcancggcgcggggcgactaggccacgaggcaaagctcgcanctgcacgtgatgctggccatctgctacagcgggcgatgggacatggtccaggcgtgccgggagctggcccgggaggcgcaggcgaaccggctcagtccggacgacatcgacgagtcgatcatcgccggcaagctcgcgacgagcg

SEQ ID NO: 10766 - DNA, 379 bp, Zea mays
  unsure (1)..(379): unsure at all n locations; Clone ID: LIB3156-007-Q1-K1-G6
cgctagcccatcttctcacacaaaaatatccgcgctaccccgacctccccctcccactcccgctccgggcagcaagcagcagccagcangcatggggatacccgtggtggttcccgtcgcggcggcctactcgtgctcctcctccctcgcggcgccaccgagggccgtcgccgccgtggcgagggcgccgagccgcgcgcacgtcgcggcggccgggatgtcctccagggcgtcctccttcgtcgggggcagcggaggcgacctcgcggcggtggccgcgtcggtagccgcgcggcccaagagggcgggctccgggggaagcggcgcgctcgggtgcaagtgcctcttccggctcggcgtgccggagctcgccgtcatc

SEQ ID NO: 10767 - DNA, 293 bp, Zea mays
  Clone ID: LIB3156-007-Q1-K1-H12
atgagcgcaaaagaagcaaaggagtatggccttattgatggagtaatcatgaatcccctcaagggcctgcaaccacttccagcttccaggtagtcatgaagtgggctagaactgtcaaacatttttgtttgttgtatcaatgtgtctgttggagctgagtttgcgccgcggtgtttctagtagcctggccacataatattctacatccagaggcgtcaaagattgtaaaaaaacaagaactacggttaggatatatccttgttgatggacattcgaattgaattaacagtatt

SEQ ID NO: 10768 - DNA, 193 bp, Zea mays
  Clone ID: LIB3156-007-Q1-K1-H4
acgtgtcagttccattttctcaatatcttaaacaaggtttttatgtctcaagcccacccccctcggtggggagcccaatggaaacacgtttaatttcaagataaccaagctaatgccatgaaggaaccaagaaccggtgggtattgctattggaccaaaaatgacaagaattatgatgtggatacaatagcta

SEQ ID NO: 10769 - DNA, 304 bp, Zea mays
  unsure (1)..(304): unsure at all n locations; Clone ID: LIB3156-007-Q1-K1-H7
cgccaggcgtacacttggagccaatttaaattgttcttcatgattttatctcgccctagcttgattactgggnagcggttatctaacctgggtggggcattcataaataaacactattttttacggggtggagcaacactaattgacggtcgcaacaggtgctctcactgcactggaatcgcgcttgtctgacataccgtataacttgcatggcatgctgatcatgttatttgcgcaattactgcaactcaaaaaaaaaaaaaaaaaaaatagtagcacttaaaaaatcgggccccccctttaa

SEQ ID NO: 10770 - DNA, 82 bp, Zea mays
  unsure (1)..(82): unsure at all n locations; Clone ID: LIB3156-008-Q1-K1-A1
cgcgnncgaaaaaaaaaaaaaaaaaattaaaaaaaaaatataaaaatttaaaaaaaaaaaaannaaaaangggggggcggtc

SEQ ID NO: 10771 - DNA, 337 bp, Zea mays
  unsure (1)..(337): unsure at all n locations; Clone ID: LIB3156-008-Q1-K1-A10
gaagaagaaggaccacaaggacgccgttgatttcagcggcgagaagaagcaccaccaggtcgggggctgaccgtaggaccggccggcgcgcgaccgagctagctagctccggcgcacacaaccacacacctgtttaattctgtactgcatgcgtgtgtaatttgatggttcacaataatgagtccctctccggaccttggtagctgcttgcttgtggtgagtgagagtgtgagactgagggagaagaggtggtgggcgtggggctacgtcgagagaggcgtgttcctgtaatcctgtactcgcttcgttntctctgcatgcgtctataattgtgttc

SEQ ID NO: 10772 - DNA, 388 bp, Zea mays
  Clone ID: LIB3156-008-Q1-K1-C11
aaaccgggccgacccaagcgaacggggccctgataacctggacaaccttatgatgttggctgagattttccagaggcaggcgcctggtgctgaaggagctgcgcgaggaggataacgacgttcctgagcttgtccaaggagagacatttgaggaggctgcagagaaggagcctcaactggagcaggatgagaagaaagaatcgtaattttgttgtgaagggtcgtcggtttaattgttggcatcagccttgcgagagacctacctgctcatctggcgtgcctttacatgtgcttcgggttcgaaaagcattactgcattatgttttcttgaagacagtgtaggcatatattttcctcgagccatagtgagtttccgcatatgttttgc

SEQ ID NO: 10773 - DNA, 188 bp, Zea mays
  Clone ID: LIB3156-008-Q1-K1-D2
gggagatgactccccctgagacgaaagattcagacttgctgtcgtgaatcttggtgttctgttggtgcggacggcagcagcttcagcttgtacagacatttctttctctgtcgtttggttattaggacttgttgggtagtaggaacattaaggtctctttcgtaatgtgatgaatgacttgaaccatc

SEQ ID NO: 10774 - DNA, 400 bp, Zea mays
  Clone ID: LIB3156-008-Q1-K1-E1
gacccacgcgtccgcaatatgcaggtggcattccgcaccaaggtgttccatccaaacatcaacagcaacgggagcggctgccttgacatcctgaaggaccagtggagcccggcgctaaccatctccaaggttggtgactgctctcacggatagcatcatcttctccacggttgtttgtaggtttgggagctacctacctaccagcaacctgagcctgctcggtttcaggtgctgctgtccatctgctccctgctgaccgatccgaaccccgacgatcctctggtccccgagatagcgcacatgtacaagacggaccggaacaagtacgagaacaccgcgaggacctggacccagaggtacgccatgtaaggaggggtaccctacctggccctttgggggt

SEQ ID NO: 10775 - DNA, 306 bp, Zea mays
  unsure (1)..(306): unsure at all n locations; Clone ID: LIB3156-008-Q1-K1-F8
acgcaatggccgccgcctcctcgtcctcgttccttctgctgctccgggccgccgcctgggctggggtgacccccaacgccgccaccttcaccatcaccaacaactgcgggttcaccgtgtggcccgcggccaccccggtgggcgggggcacgcagctgaacccgggcgggacgtggaccgtcaacgtgccggccggcaccagctccggccgcgtgtggggccgcaccggctgctccttcacggcaacagcgggagctgccagacgggcgactgcngcggcgcgctggcctgcacgctgtctgggca

SEQ ID NO: 10776 - DNA, 439 bp, Zea mays
  unsure (1)..(439): unsure at all n locations; Clone ID: LIB3156-008-Q1-K1-G2
gacccacgcgtccggaaagagagagagagaaacggaaagggggaattgatccggagcctggggatcccggtgaagtggctgcatgaggcagcgggtcatgtggtgacggtggacctcaagaccggcgaagtgtaccgggggtccatggtcgagtgcgaggataactggaattgccagctcgagaacattaccttcaccgccaaggatgggaaggtttcgcagctggagcacgtcttcatcagaggaagcagagtgagatttatgattatacctgatatgctcaagaacgctcccatgttcaagcgcttggaagcgagaattaggggcaaaggatcagctattggagttgggcgtggacgtgcagttgcaatgcgtgctcgggctgcttctggtcgtggtggtggtcctgttgggcgaggcancgcgcctcctgtgagga

SEQ ID NO: 10777 - DNA, 310 bp, Zea mays
  unsure (1)..(310): unsure at all n locations; Clone ID: LIB3156-008-Q1-K1-G4
tggagcggtccaagcgccctgcgaagcaaactacgttgatggcttcggcggcggcgtgggagggtccgacggccgcggagctgaagacagcggnggcggaggtgattcccggcggcgtgcgagtgaaggggtgggtcatccagtcccacaaaggccctatcctcaacgccgcctctctgcaacgctttgaagatgaacttcaaacaacacatttacctgagatggtttttggagagagtttcttgtcacttcaacatacacaaactggcatcaaatttcattttaatgcgcttgatgcactcaaggcatg

SEQ ID NO: 10778 - DNA, 381 bp, Zea mays
  Clone ID: LIB3156-008-Q1-K1-H2
gacccacgcgtccgcggacgcgtggcccgcgctgaacgccaacggtgacggcgtgctgtcccgcgccgagctccggggcgcgctcgagtcctttcgcctcctcgacggcggcggcttcgggtccgcccagccggcgccgctccccgccgaggtcgccgcgctctacgacgccgtcttcgagcagttcgacgccgaccacagcggcgccgtcgaccgcgccgagttccacgacgagatgcgccgcatcatgctcgccgtcgccgacgggctcggctcccagccgctccaggtcgccgtggacgacgagggcgggagcttcctgctcgaggcagccgagcacgaggccgctgggatcgccgccaagatcgaagccaaccgcaa

SEQ ID NO: 10779 - DNA, 222 bp, Zea mays
  unsure (1)..(222): unsure at all n locations; Clone ID: LIB3156-008-Q1-K1-H6
gtacgcttatggcaggaacgatgtttggtgctcgcttctattttctgtgacacaatgtactccatccgtccgggcagacttaaatgatgtatcatgtcattgtggtttaatgagagttgtataactacctgaggaaactcacgtgttactatatgctaagatgctgtgacggtgagctattcagtgctcacttgtgttccnnannanananttnnannnnat

SEQ ID NO: 10780 - DNA, 425 bp, Zea mays
  Clone ID: LIB3156-008-Q1-K1-H8
acgcgccgcatcatgctcgccgtcgccgactggctcggctcccagccgctccaggtcgccgggggggactagggcgggagctgcctgctcgaggcagccgagcacgaggccgctgggatcgccgccaagatcgaagccaaccgcaaggccgaggcggaggcggccaagtgacgacgtgtccctcgtgcgggccctgcgcttgattttctgggtgtttgctactacgtactagtactacttacgtggcggccgatgtgccgccgcacgtgtacggtatactacgtaacgtaactagaagcggccagcaccagctacacaaatcactgctgatgctacttgtgaacggaataaaacctgtcaatcattttagtggtcttgcttgcataaaacacttatttgtcgtcaaaaaaaaaaaaaaagggcgg

SEQ ID NO: 10781 - DNA, 299 bp, Zea mays
  Clone ID: LIB3156-009-Q1-K1-A11
gttctagatcgcgagcgccgcccttttttttttttttttttttttttttttttttttggggttttttaacaaaagcattgtgttattacttccatgtatcacaaggtcatcaacaaaatgggcgtccatccaaaaccgctcagattgcataatctaaggggggtcattgttgcggaacatgccgtttcttgaatggcaccgttcctgctaaattctcaagacatgcctcctcccaactaatggaaaacgggttaaaaaaccgggaaggtgccagtgcatttcttttattaatttattta

SEQ ID NO: 10782 - DNA, 225 bp, Zea mays
  Clone ID: LIB3156-009-Q1-K1-A4
cccacgcgtccgcccacgcgtccgcccacgcgtccgcccacgcgtccgcccacgcgtgcgagatatttatgtgctacatttttacaatagaggagtgagatgaagtgtgccatgtaagttacaaagtagaaacaaattctactaatgcacaaaataatttctcatcctccaccccatgaatttgagatagccttgtatctgaactttagaaagtggtggaatgtc

SEQ ID NO: 10783 - DNA, 270 bp, Zea mays
  Clone ID: LIB3156-009-Q1-K1-A5
tttataaaaaaaaaaatcaaaaaaattttttcttataaaaaaaaaaaaaaaaaatattgctgaaataaaaaaggaattgatagagagattaactactgttaaaaaaaaaaaatcaatataaatagctaaatataagatatgccttgattttaatgttgtagtatttgttgcaaatgttaaaaatgcctatttggaaccttaattgaaaattttgttgaaaaaaattcttttaagtcatgcaatttcccgaactgaataataaaccggtga

SEQ ID NO: 10784 - DNA, 126 bp, Zea mays
  Clone ID: LIB3156-009-Q1-K1-A6
gtgatatatatatgccgtcactcctagtatatagtagtgactagttggtatgtgtggggctgtactatcttttctccatatgcatgttttgccagcgcgtaatgaatggaatgtgtactgctagct

SEQ ID NO: 10785 - DNA, 167 bp, Zea mays
  unsure (1)..(167): unsure at all n locations; Clone ID: LIB3156-009-Q1-K1-A7
cgnntccggttaaatagtatcatcacgttcagctccgttctctcatacataataaaactagaatgagattgttgtgggtagattcaataatctgtgtatccatatgcaatgttttgacatgcgcgtaatgaatgggatgtgcgctgctaactaaaaaaaaatacaaa

SEQ ID NO: 10786 - DNA, 246 bp, Zea mays
  Clone ID: LIB3156-009-Q1-K1-C12
gggatcaaatgtacaatacattcattctataaggcgacatatatatgatacaagaatatctgctttaataacaaaaatgtaagaaaaaccaacttgggattgagctccgtacgtgcaataagcttggattctaatttccacctccttatgaaactaaaccttttactccccaaaaaggaaacctacctattctttaatctggttcaattaccccaaagcttaatacctttgcttaatggttatttt

SEQ ID NO: 10787 - DNA, 281 bp, Zea mays
  unsure (1)..(281): unsure at all n locations; Clone ID: LIB3156-009-Q1-K1-C3
ggaatactgaaggaccctccaactagcatgaagtgtgggcaccttgcttttgcattctgtttgtggaaacctgtgcctagccataatgctgggttaagtgttaggagcatctctggaatgcttcgcgtagtatcttttgattcttctttccttttgttgtctcaatcgtgttacatgagaaatgtctgatgaactcaaataatgaaccggtgattcaaaagcctgtnnaaaaaaaaaaaaaaaaaaaaattccananataaaaaatataaaaaaataaata

SEQ ID NO: 10788 - DNA, 428 bp, Zea mays
  Clone ID: LIB3156-009-Q1-K1-C9
cccacgcgttcgaccacgcgtgcgaagaaatttgccataaatgtggtatactctttggtgagcaagaattgcagggaacctgatgtggtattgaatgtgcctcatacttctttgctagaagtaggtatgatctatcatgtctaactctaactccatttatctcaatcataagagaaatgtaaattatacaaagggaaatagggtcccttaaatttacatatgatgtgtatacaaagagacggggcacaaaataacttccaatttaacaggaggctgtcctacacgttaagaaccacttgacatgaaaatcccttcaatggttttttattttcttgctatgttagcaatgatctgatatcatcatattccaaatcaaaatcacaaggtgaatatatatatatatatacatgtctactagtttcggtgtg

SEQ ID NO: 10789 - DNA, 277 bp, Zea mays
  Clone ID: LIB3156-009-Q1-K1-D2
aagaagatccgtggtgtcaagaagaccaaagctggtgacgccaagaagaagtaaacgtggggttacatttgtattactgttctgggctctgggtggtctagctgcaatgtcataattatggtcgcgttaggttttgttccacctttggcactgaagtgatttttttgtaattcctcggcactgaagtgaagttttgtcagaatattgcctcgtaacataattgcccggtccctgttctagttgtggcgcagtctggtttgttttgacatttgttttc

SEQ ID NO: 10790 - DNA, 236 bp, Zea mays
  unsure (1)..(236): unsure at all n locations; Clone ID: LIB3156-009-Q1-K1-E12
cagagaatgttggttcgggaaatcagagtcgtcagtcatctacatagcttttctgggttgatagactgnattttaagtccatgtttatctgggatggctggggtcagcatgtttgtacaattatttggagttgcttttggaatggtcgcggtttgatgagttgcctacagcatgagatgtcttttcgctccacaaaaaaaaaaaaaaaaaaaaaaataaaaaaaaaaaacaaaatc

SEQ ID NO: 10791 - DNA, 128 bp, Zea mays
  Clone ID: LIB3156-009-Q1-K1-E2
gttgtatatacctaattggtctcagtcttttgcaggcattgtacatgacgtatgccgcggtagctttgatcgatatcgaccttgcctttaatctgcggaaccttttttaacggtgcacgtaccactct

SEQ ID NO: 10792 - DNA, 310 bp, Zea mays
  unsure (1)..(310): unsure at all n locations; Clone ID: LIB3156-009-Q1-K1-F11
cgctcgaccacttcaggctctagctacctggctacgtttcagattcgtcctttcatttgctggggtctctaattaataattccaaataataagcccgcggatggacctctgtctgtctgtctgtaatttagtttccaagtttagtttgttgtggtaataattcctgtatcaattatgtcataaataaaagctagggaaccttgataaaaaaaaaaaaaaaaaaaaaaaaaaaaaaaaaaaaaaaaaaaaaaaannacaanaaaaaaaaaaaaaaaaaaaaaaaaaggcggccgccccttttttttttttt

SEQ ID NO: 10793 - DNA, 266 bp, Zea mays
  Clone ID: LIB3156-009-Q1-K1-G2
gaaagagttggccgccgacattgagaccttgaaaaaaaaaatagctggaacagaataaacgctcatggaaagttttagagcgtcctttcttctttggaaagagatctattcgatcggagaaccaatgcaactacttgagtactattattgcccatgtattgtgtgctgtatatcttctgtatacaaaggaaggttcgtttgttatgtacgtagtagcattgtagtttaaatgtatcgtattacctatctgctaaattcttcttttt

SEQ ID NO: 10794 - DNA, 284 bp, Zea mays
  Clone ID: LIB3156-009-Q1-K1-G7
cgctgctgttgccggtaatgatggcgattacgctgctgatcctggtgatgatgatggacgatcgaggaagccgcagggccgggcaatgatggcgatagggccaccgttaggtgtgcatccgggggcacaaattaaagggattgctgtgtggagatctgcacgagtttttgctccatgcatgcttgccgttcgtgtcaaaaaaaaaaaaaaaaaaaaaaaaaaaaaaaaaaaaaaaaagaaatactagataagagaaaaagacaaaaaaaatgttgatggacctt

SEQ ID NO: 10795 - DNA, 397 bp, Zea mays
  Clone ID: LIB3156-010-Q1-K1-A3
gccgctttctttctttctttctcccttccttccttcgttgcactggtgcttcttctcgatcatcatcatcagaggaggagctacctacctaccttttgatgcaggttgccatggccaccaccaccagcagcagcttggtcaccggcttgaggtgcaggacaggtgcagcagtggcattgatcagacccactagtgccgctggggatcgccggggctggaggacgacggcgtccggccgtggagcccgcaggggcaaggtcacggtcgctgcggcctgcaagacatgcaaaggaaagggggcagtagaatgcccagggtgcaagggcaccggcaagaacaagaagaacggcaacatcttcgagagatggaagtgctttgactgccaggggttcgggct

SEQ ID NO: 10796 - DNA, 90 bp, Zea mays
  Clone ID: LIB3156-010-Q1-K1-A4
cgtcggaaaaaaaaaaaaaaaaaaaaaaaaaaaaataataaaaaaaaaaaaaaaaagggaaaaagggggggaatattaaaaaataaaaga

SEQ ID NO: 10797 - DNA, 426 bp, Zea mays
  Clone ID: LIB3156-010-Q1-K1-A5
gccgggacctacctaatcgccatcagcggcgagaagaagcccgccatgagggagatcatcatcgacgtcgagctcgccacccgcctcctccccagggggttcatctggcccgtcgcggcctaccgcgagctcatcaacggagacctcgtcgtcgacgacaaggacatcggctactactagctgctgcacctgtgcttgcacatcgctgctggcgaggcaaggcccgatccatggctagcggctgttgaacaactctctcttgtttattgataacgaacagtgaaaagattaacgtgccttgtgttcctgtttcttctgcagttgggcagtcgtcgtacgtgggaaacatggcttttggtgtaagaggaaggaatggaagtggtctggtgtacttaaagaaactagatgaggaagtcttgataactg

SEQ ID NO: 10798 - DNA, 402 bp, Zea mays
  Clone ID: LIB3156-010-Q1-K1-A6
tcgaacaggtcggtggccgccaatccacagttgttctttttgatgagattgagaaggcacatcctgatgttttcaacatgatgcttcagatattagaagatgggcgattaactgatagcaaggggcgcacagttgacttcaaaaacacactattgatcatgacatctaatgtgggaagcagtgtcattgagaaaggaggccgcaagatcgggtttgaccttgactatgatgagaaagacaccagctataacaggatcaagagcctggtgaccgaggagttgaagcagtatttccggccagagttcttgaacagattggatgaaatgattgtattccggcagctgactaaattggaggtgaaggagattgctgacattatgctgaaagaagtgtttgacaggc

SEQ ID NO: 10799 - DNA, 242 bp, Zea mays
  Clone ID: LIB3156-010-Q1-K1-A7
gcggcacagacaggaaggccggtagaggcggtcacggttggttatttataaatagcagcgtcgggtggggggtgttagcaagcaggaggcggtcagtggtgtcctgtacgtaggaggtgagtgcatgtatattatacacatagagtttggccacttgttcgtgtgcacatgagagtcgattctcgtggcggcgagactcgtcaggacggcccgtcgagattgagattggattattcttggtg

SEQ ID NO: 10800 - DNA, 326 bp, Zea mays
  Clone ID: LIB3156-010-Q1-K1-A9
agaaataccacgatgcgaaatatcagatattcagatccctgtatgagcaacaactctctcatcgcgcaaccatggcacaggcattgcagtagggctctatggccactttggctcttcactcttggttattgatacccttggtttcattgccatgttttattggcttatttacatgtaatcaatatcgccttgagtgatttgatagaatagaaaccatgataagatgcatgtatacacatataagaaaactggtaagatgatctttctcacagggacgtgaaatccccaaagcctgtgcaatgttaataaaagaaaaagaggttctt

SEQ ID NO: 10801 - DNA, 360 bp, Zea mays
  unsure (1)..(360): unsure at all n locations; Clone ID: LIB3156-010-Q1-K1-B10
gcggcagcggccagtgtggtcaacatctaggcctgcgccgacaacaaggtgcgcggttgcnccgtttagcgcggcgtgccggtggtcnccgtcgacggcgccttcgacgggtgtctggagctgcgggccctggtggacgccgccgagccgctcgccgccgacgaggaggtcggccccgacgacgtcgtcgcgctgccctacttctccggcaccaccgggatgcccaagggcgtcatgctcacgcatcgcagtctcgtcaccagcgtcgcgcatcatgtggacggcgagaactcgaacctgtactttatcaatgatgacattttgctgtgctgtgctgcctttggtccacatctactcgct

SEQ ID NO: 10802 - DNA, 390 bp, Zea mays
  unsure (1)..(390): unsure at all n locations; Clone ID: LIB3156-010-Q1-K1-B2
cggacgcgtgggtgcgcccaccagatccgggtccgggaacgcgtggggcccgagaaaggaggcctctccggcgtcttcccctgtgggtcctgctcccgcctccgccggcggccagatctggtccgcgacacgcatcgcccaggccagcgcagtggagaaggtcatctctgggagatggcacacgtcgaagccctcgtctccgccggcgccagtgacagtgccagctccggtgttgattaccgtggccccgccggaggttgagaggcctaggtctgttggggtgagagagctggacagtggggtggagaggggcgcggcacccgtgagacccgcgtcgcatgaaggaagagttggtggggaaaggagagacggngataccccagagagacc

SEQ ID NO: 10803 - DNA, 124 bp, Zea mays
  Clone ID: LIB3156-010-Q1-K1-B3
aaaaaaaaaaaaaaaaaaaaaaaaaaaaaaataaaaaaaaaaaaaaaaaaaaaaaaaaaagagaaaaaaaaaaaaaaaaaaaaaaaaaaaaaaaaaaaaaaaaaaaaaaaaaaaaaaaaaaagg

SEQ ID NO: 10804 - DNA, 290 bp, Zea mays
  Clone ID: LIB3156-010-Q1-K1-B4
aaacaaagctgtaggtgttcagtgattggctacatggtatacgtgaccagctatttaagttcctaggtttgtaacatgtatgtccgcctgcagttcagttgagatgcttcaaggctaaggttctgttgtgtgacctgtagacacgaggctgtcagcttgtattctcttggtaatgtgtgtcagcagagcgttagcattaagtctaattgaacagtgctgttatctgtaacgtctgaatttgatcagaaactgaagttaattgaggaagacatcaacaatgttctgatact

SEQ ID NO: 10805 - DNA, 432 bp, Zea mays
  unsure (1)..(432): unsure at all n locations; Clone ID: LIB3156-010-Q1-K1-B5
gaaaaccatcaaggtccatggcatcaactgtactttgcatgatgatcatcagtgcggccggttggatcagctcggttcttcttcgtcgtcaaggttccggcggcttccagtgatgtgttcgccacagaacgggcagcacctgctgcaggagcaaacacttaacaacaatgctcgtcctccagagaagaggcagcgggttccgtcggcgtataacagattcatcaaggaagagatacgcaggatcaaagcgaacaaccccgacattaaccacagggaagccttcagcacggcagccaagaattgggcacattatccaaacatccatttcggtttagacgactccgggcgagagggcaagaagaagctcgtggatcatgangcggcggcgtctgtcgtcgcagtcgcagcagcaccgacagctgctaaaaagat

SEQ ID NO: 10806 - DNA, 328 bp, Zea mays
  unsure (1)..(328): unsure at all n locations; Clone ID: LIB3156-010-Q1-K1-C4
acccttccgttaccgattccgtaagtccatggttctattgtgtgttggaaaatatgatttcgctcttcatgtattcttctttttttggatgccaatgaggcaatgatctatatgcaaaaggctggattactccacaggatgaataaaccattatttcacactcgtagcattcatcagttgatacttgataattctgtggtaggagtatgtctgtaatggaacgcttgatcatcgatggtgaattggcacaccatgtgatgcattgaaatccttcttttgtaccaaatnaaaaaaaaaataaaaaaaaaataaaaataaatttaatata

SEQ ID NO: 10807 - DNA, 361 bp, Zea mays
  Clone ID: LIB3156-010-Q1-K1-C5
cttccggggtttaaaggactcgtttgaaaagcttttattttgatttaccaaaaacctttcagggtgatgggcctcagcgacacatttttcagaggcttggactggtgatggtgtcttgtttactagattttacgtctttccaaactatgtttgaacactgttaggtcgaccatacttgaattgtgcttatatatttgactgtcatgtattctgaagatgcatctgcattctggtgccttggtttatgttgagattctgaccatcattgtaacggttgattactatgagtttgagaattggatcgattggatggttgcaatttccatgtgaccaggacagataaaatcttactgattcagtt

SEQ ID NO: 10808 - DNA, 328 bp, Zea mays
  Clone ID: LIB3156-010-Q1-K1-D1
ttcatgtaagtccgacaaattaaaaccaggattatttatttagttactacgactactatatgaaaactgcttcgttattactactagctatgaaattcatgaggaccacgtactgttttattagctgcgtagattgcagacaacagtgtacacttttgtaccatgtcgatcatgatcatatgaaagagatacacaggaggatacatatttgcagctatacgccctcgctcgcatgtatatacaccaagctatttatttctgttcacaaacactcagtttgtatgtatctatctactcgtatatattaatatatataaaaataaatgtt

SEQ ID NO: 10809 - DNA, 270 bp, Zea mays
  unsure (1)..(270): unsure at all n locations; Clone ID: LIB3156-010-Q1-K1-D2
cttccgcgaccccttggccgaccccttgggccatgttttgtcttttgttgaattcccatttttcttttgtatttgatcatttcctcgtaagagtccgacaccttctccaaggaaaaaagggaagtgttgagagtcattgttgtgtatgtaaaaccagacacttgaacttgtagtaccttattcgatttgttatttgttcctgtcttttggagtgagaataaagccatttgtttaatcaaaccgnnannanaaaaaaaaaaaaaaaaaata

SEQ ID NO: 10810 - DNA, 448 bp, Zea mays
  unsure (1)..(448): unsure at all n locations; Clone ID: LIB3156-010-Q1-K1-D3
gtgattatttttcagatgggttccaagtttttgaaatcactggtctcggagaacgtgagggagtcgctgcacagctggtgcaagagggttaaggacaggagccgacacaatccgctcttctcgcggaacgggaccctcacgaccagatccgtgtgctccctagacaccacctacgagacggatcacgagacgaacacggtgtgcacgctgtcgaggacggcgtcggcgacgtcgctggacgaccagttgaccgtggtcaccgtcgatgacgagccgtcctgcattgagaaggatgtctgacgcagttgctgattcgccaaaactacatactgcaccgacctgtgtgttaggaagtactctaggactgaaatgaatgtatatgtgcagtggttgcccctatcgtggcagtgaccatgtgtatatatagaactaanaaaactataatgtt

SEQ ID NO: 10811 - DNA, 427 bp, Zea mays
  Clone ID: LIB3156-010-Q1-K1-D4
cgaccccgtggttccgcttccaatgggagtttttcgccttcggccccgcagccagcacgagcttgtcgagatttcagctcgtttctccgccagaggtcgagcaggccagcttcccatgaccgaagctctgccaggttcgccagtccaggaactgctgctctcccggagccagagattcaaacaaacctctgcgttggggttctccggggttccttgcgctggagggaggtttcgttctcaacggccatggtttggctgagaagaagcagcagcagcagcatattgatgcgaaatctgtgagctttatgaagatcgccacccacctgcgccgcttctgcttactccactccttctcggtcgttttcctctactggttttatgtgatctcgtaacttgccctcctacggatccgccatttccccgtgcc

SEQ ID NO: 10812 - DNA, 399 bp, Zea mays
  Clone ID: LIB3156-010-Q1-K1-D5
ggtggacttcccgattttgtgccaagatgttttactccacctcgaaggaccgcatcaagtatgagctcgacgggttccactacgagatccaggcgaccgacccatccgaggcggacattgaggttctgcgggagcgggctcactgaagctggttcgccttcgaagaagaagggacctgtggagggctgtgaaccttttggtcagatgcaaattctattaccaatgatgaaagctcccgccttggtatttgttattaaattcctgtaagcatgtcgtttaggcgcgatgcgtgactctagctggtgaagcgttatcaaaactgtatctgtaaaagttttggttgtcgaacctgtaaacgaagcaaggtttgcgaacttgttatattgtggtattgatggt

SEQ ID NO: 10813 - DNA, 221 bp, Zea mays
  Clone ID: LIB3156-010-Q1-K1-D7
ctatcaggcaagagctctccaagctgaataaggcgtccactgcttaagtcccttttggtggatgacatgttagtttttggtttcatgttggatcaacaatttgttttgagtgttgtcaaagccagaattagtaatatgtttcctgtgtaccagtttcaaacttcatcaagaatgggtgtgctctggatattttgtcgggaatgatatggaacacttaagtt

SEQ ID NO: 10814 - DNA, 401 bp, Zea mays
  Clone ID: LIB3156-010-Q1-K1-E1
agccttccgacttaaatggaaggggaaggaaatggctgtctttatgctgaaagaagtgtttgacaggctgaaggccaaggagattaatctccaggtcacggagaagttccgagatagagttgttgacgaaggttataacccgagctatggtgccagacctttgcggcgtgctatcatgaggcttctggaggatagtctggcagagaagatgctggctggtgaggtgaaagaaggtgactctgccatcgttgatgtggattcagatggcaaggtgatagtcctgaatggtggtagcggtgttgctgagccactggaacctgctctcagtacctaaccgaggtcaaaatcatcattggtccgaaatatggccttctttacaagtcagctgggtttctcgtgat

SEQ ID NO: 10815 - DNA, 289 bp, Zea mays
  Clone ID: LIB3156-010-Q1-K1-E11
acgccggacaccgacttagtcatcaggaacttttaagaaatcccgtgcggtgaggctggggcggagtatgtcaaggagtccaccctcgtcttcactgacaaggacaaggctgctgcacatttcaagggtggtgccaagaaggttgttatctttgccccaagcaaagatgcacccatgtttgttgttggcgtcaatgaagacaagtacacctctgatgttaacattgttttcaattgctttctacaccacaaactgtcttgctccccttgctaaagacattcatgacaac

SEQ ID NO: 10816 - DNA, 440 bp, Zea mays
  unsure (1)..(440): unsure at all n locations; Clone ID: LIB3156-010-Q1-K1-E2
acccttccggttaaccagaaaggctccttctttacaaattcaaactggttcacatttgatggagagagaggcattgatgaccgatcatctgcctctgttccttcatcatcccccaattctgaggagacatcactaaagactgaggaagctgatgatggtaaagtcattggcactgaggatgaaatggaaacagtgtatcttggaaatggtagtgttgaggaggtaaaagatgtagcagaatgtactgaacagccaaattgttgtactgaggaagagcgattgaaaaatgaagaagggatggaatggcatccaaatgcttcaaataacgataccgangctgangctgccgcagagtcttcagccccatcaataaaagaagtggcagacattgattgaagcccatgttgatgtcaagacaaccgacaactacatgctgcgtt

SEQ ID NO: 10817 - DNA, 399 bp, Zea mays
  Clone ID: LIB3156-010-Q1-K1-E4
agccttccggggctaatgacggccttgtgaagggtctctttgaggctgccaaggccatcgagaagcacgccgctcagctttgcgtgcttgctgaggactgtgaccagccagattacgtcaagttggtgaaggcactctgcgctgagcacaatgttcacctggtcactgttcctgccgctaagactcttggcgagtgggccgggctttgcaagattgactctgagggcaaggcaaggaaggttgtaggctgctcctgcgtcgtcgtcaaggactacggtgaagaatctgagggccttaacatagtgcaggagtatgtcaagtcgcactagatgtgtgacatgtttcagtgatactcttgatttggacctgggcttaaaattatgcttttgcatctggggc

SEQ ID NO: 10818 - DNA, 452 bp, Zea mays
  Clone ID: LIB3156-010-Q1-K1-E5
acccttccggggttgtcctaccaactctttgtaagcttttttggtatcattgtctgcttgatcaccacgctttttgctactgatttctttgaagtcaaggctgtgaaagaaattgagcctgcacttaagaagcagctcatcatctccaccgttctgatgacttttggtattgctctaatcagctggttggcccttccagctaagttcaccatctacaacttcggtactcagaaggaggtttccaactggggtttgttcttctgtgtttcaattggtctgtgggctggtttgattattggttttgtcacagaatactacactagcaatgcatacagtcccgtgcaagatgttgcggattcgtgcagaactggtgctgccactaatgtcatttttggtcttgctcttggatacaagtcggttatcatcccgattttcgctattgctgttagcat

SEQ ID NO: 10819 - DNA, 449 bp, Zea mays
  Clone ID: LIB3156-010-Q1-K1-F1
aaactgttttttcctccggcgccctctctctctctcactcagactctcgttctccagtctctccatagaagaggcgtgccaggtttggcccaccgcgccatgggatcgggatcgtgctgctgcatagggtgcaacggcggcggcgacgacggcggagttgacgccggcggcggcctcgaccccaaggggttcctgctggcgatgatgattgccctggtgcttctaatgctctgccacgtacgcccgcctcgccggaactcgtacgtcgtgtaccgcagctactgatcgccgacgggtgccaagctgaaaggtctctccatccggccccttcgtcgttccgattcctccttggccgacatgctttggtaaactcactcgattctttgtccgtcgtctgcagtggcgcgcgcgcaattggctgggtttttaatatatatatatatatatat

SEQ ID NO: 10820 - DNA, 327 bp, Zea mays
  Clone ID: LIB3156-010-Q1-K1-F2
agccttccggaaggacaaaattgaggcggcatcaggacagacataggtggctgggatgggagttcttgcctatttctgtggccaggcaacaatgttaaataaaaggaatgtgttatattgtgctttcaagttgataaattgtggcaaccaggttttgattatgtaggcaatattttgacaagctactcttatccagcatgaatgacttcacgtttgtgaatgctgcaaatgttgtacttctttcatgcgattgagtagatgttttacttctgttgccatcaccagttcaacgctgtacttttaattgattcgatcacgtgctttctt

SEQ ID NO: 10821 - DNA, 434 bp, Zea mays
  Clone ID: LIB3156-010-Q1-K1-F4
ttcaaagccttgcgatctctcggctgcgcgcgcgcaagatggctgacccagaattggaagctatcaggaagagaaggatggaagaactaatggcaaaacacggtggcggtggggcaaatcaacaaaatgcaagccaacaaaaagctcaggaagacgcgaaacaggaagctgaggaacgccgacagatgatgcttgctcagatattatcttctgaagccagagaaaggatctcccgcatagctttggtcaaacctgacaaagcaagaggggtggaggatgttctgctgagagctgctcaaactggtggaatatctgaaaaggtgtccgaagaaagacttatctcccttctagagcaaattaacacccacacaagcaagcaaaccaaagttacgattcagaggcgtcgaagtgtccttgacgacgacgattagacg

SEQ ID NO: 10822 - DNA, 408 bp, Zea mays
  unsure (1)..(408): unsure at all n locations; Clone ID: LIB3156-010-Q1-K1-F5
ctgctactgtggctgctacctttgctggtgttattgctagggtcgaatacttaagttaactatgcgctgacagtctggactagcagtgttatgtgcgctgctggaccttgcgcgcaatgctgtggccgatttgttcgttaatgtcaagaattgtgttacagtgcgtgtnaaaaaaaaaaaaaaaaaaaaaaagggcggccgccatgtactgggagaccaccatcgcgtcggcggtgtcggactaccgcgccgtggacggcggcgtggccgtcgcgcacgcgggcacgtccacggcgcacctcgcccggttcggcgtgggcgtccgcgccgcgcgcgttgtcacgcggatggaggagtcgtggaccatcgacgacgtggcgttcaacgtgccggggctcggaccggacg

SEQ ID NO: 10823 - DNA, 296 bp, Zea mays
  Clone ID: LIB3156-010-Q1-K1-G1
cttccaagttctttgagtttgatgtcccgcacatatatcgtcattacaatgtcagatcaactgcatgatgaaaaatgtgtactttttgtttgttgaaatgtgctttccaattttcagtttcctcttcgtcatcacgatttgtggaatgaataggggtcgagtcttgttcaatgttacgtgcattggacaccaagttgaattgtagccaatgcttgaaatctgttgtcatgatgtgggtgggggacattggaaactctgtaaaatatttggtgtcatatatcaaattgttttgctct

SEQ ID NO: 10824 - DNA, 362 bp, Zea mays
  Clone ID: LIB3156-010-Q1-K1-G2
gccccttggaaaaataatggccgtcctgagccaggttcagcattggtaatgcacatcggtctctgaccccctatccatgaccccctcagaaagtgcagaaatctgtgttttgcggtagcaagaacatctggagagacgatccgccggatctcagaaggcagaaggaaataatcacgtgcctttgcttattagtgttcttctctgtttgcattttgatcgttcaagctctagctctagaccatacctgtaaaatattccgtggctcctctatctactgtatgattattgtggcgctgtcttttcttgtaggctgttttaacctgaatgacggcctctatataagcatgtcataaatcgacttt

SEQ ID NO: 10825 - DNA, 250 bp, Zea mays
  Clone ID: LIB3156-010-Q1-K1-G3
accccaactggtgccaaggtgaccaaggttgcaataaagaagaaatgatgcgtcctcgcggtgtgccctcgtttattttgtacttgtgcccgtatacttcgatctgttaaaatctattggttgtgtgccctgtgtctgttgtttgggtatctatactgatattttgagacatggttgacttgcatggtcatctggattgggttcgcatttctgagtcatttgtcttgacatgaaaatcttgctttttttt

SEQ ID NO: 10826 - DNA, 397 bp, Zea mays
  Clone ID: LIB3156-010-Q1-K1-H1
aattcgccgccgccgcctgctctctgctgccgtcgccatggggagaaggcctgcgagatgctatcgccagatcaagaacaagccataccccaagtccaggtactgccgtggtgtccctgaccccaagatcaggatctacgatgttggcatgaagagaaagggtgttgatgagttcccctactgtgtgcaccttgtctcttgggagaaggagaatgtctccagtgaggctcttgaagctgcccgtattgcctgcaacaagtacatgaccaagtctgcaagaaaggatgccttccaccttcgggtccgggttcaccccttccatgtccttcgtatcaacaagatgctttcgtgtgctggggctgataggctccagactggaatgaggggtgcctttggc

SEQ ID NO: 10827 - DNA, 312 bp, Zea mays
  Clone ID: LIB3156-010-Q1-K1-H10
ccgccgagtgccgccccccgcccgcccgccctccgccgcgcgtcggacggtgccgagggaagaggcaccatgaggttggagaagtgctggttctgctcctctaccatctaccccggccatggaatccagttcgtccgcaacgacgccaagatcttccgcttttgccggtcaaagtgccataaaaacttcaagatgaagaggaaccctcgtaaggttaagtggacaaaagcatacaggcatttgcatggcaaggacatgacccatgatacaacctttgagtttgagaggaagaggaacaggcccgagcgctac

SEQ ID NO: 10828 - DNA, 406 bp, Zea mays
  unsure (1)..(406): unsure at all n locations; Clone ID: LIB3156-010-Q1-K1-H2
caacttctcagtgttctactacgagatcctgaactcccctgatcgcgcctgcaaccttgcaaaacaggccttcgatgaggcgatctctgagctagacagcctgggagaggagtcctacaaggacagcactctgatcatgcagctcctgcgcgacaacttgaccctatggacttccgacaccaacgaggatggcggcgacgagatcaaggatgctgctgccccgaaagaatctgcggagggtcagtaagatggattcagtctcacgacctgctgctgctgatgttgaggagtgaccagaaccagaaccgtcgtcctcgattctgatagattatcttctagtataccttgtgttgtcgntgtcgtcggcgcgacgatcgtcgtcgtcgtcgcgccggtgtatgcgatg

SEQ ID NO: 10829 - DNA, 144 bp, Zea mays
  Clone ID: LIB3156-010-Q1-K1-H6
gcaggcgtaccagctttgcttataaggagtaggttaacaagaatggcgttatggaatataacatgtatgagtaaaaagcgggggccgttgaaaatttgacaatcttaccctgacatgaacaaatgaattttttttaagtggctt

SEQ ID NO: 10830 - DNA, 330 bp, Zea mays
  Clone ID: LIB3156-011-Q1-K1-A2
acggtcttacgtatgtcagaagtcgcagaaccttacatacgccgaagagctgtcagacatttggagaaaggaagagttgtcatatttgctgctggaacagggaacccattcttcacgactgatacagctgctgctctccgttgagccgaaatcaatgcataggtagtgctgaacgcaacaaatgttgatggtgtgtatgatgcggaccccatgcagaatacaaatgcccgccttctggagactgtgagctatcatgaagttacgacaagagatctctcagtaatggatatgactgctatgacactatgccaagacaacaacattcccatt

SEQ ID NO: 10831 - DNA, 120 bp, Zea mays
  Clone ID: LIB3156-011-Q1-K1-A6
aacgataaatatgaatgggaccaaaccttcgatgcttttgtgcacatggtctgcattatattaaggagtggcatttgtactcgaactagaatcatatgcatgtctgcacttgttgcaccc

SEQ ID NO: 10832 - DNA, 208 bp, Zea mays
  Clone ID: LIB3156-011-Q1-K1-A7
aacgatcgactagtggtagttaggctccgtcgttccttggttgtgctattaccatcaacagtgggttctgtttcttgctttgtgtatctagccatgtctaaagttgctggtagctgtaatgatgctataatgcgtgcttaactgctgacgaacctttttcctctaaaaaaaaaacataataaaagaaaataataggggtgcctacatt

SEQ ID NO: 10833 - DNA, 229 bp, Zea mays
  Clone ID: LIB3156-011-Q1-K1-A8
acgtaaaaatcttttatatccggcgcttttttttatttaaaacaataaaacaaaaaatgggaaggtttaaaacaaataaaaaataaaaaaattaattaaaaacaaaaatatttctttactatttggcatgcacccttgggagcccgcagatgcgctccccaactttcttcccccgactcttaccatcttcaagttctttaacctcaacccctgcccgaacctttagaaa

SEQ ID NO: 10834 - DNA, 284 bp, Zea mays
  Clone ID: LIB3156-011-Q1-K1-A9
acgctatgatccacagtcagagcacagagctgttggaggactgaatgttgttgggcagcgacgagagaagcttgcagaggactgtgaggtacggtttgagttcagggcagtggctgctaacatcgaagatttagacacctggaatgctaggtcgccgtcccggagaggccctcattgttaactttgcattcctgctgcaccaccttcctgatgaaagtgtctcaattatgaaccaaagggatcgggttctccgtatggtgaaaggtctccgaccaaaactagtg

SEQ ID NO: 10835 - DNA, 387 bp, Zea mays
  Clone ID: LIB3156-011-Q1-K1-B1
acgttctgaccgttttcacccctacctaagtgactttctttacaatagacctcatataggacgggtggtgccaagtgtcattgcagcactttcacaaagttaatccattaattgttgtcagcttttgactctactcctttgagatacagtacggaagtgccctaccaagttgatactgcattttcaatgtgctgatctaggtggctacattgctagaagttctgccaaatcgcttgacaactgatgtgttggaacaacttcgtctaaataaacaagcattggttgagctgggatcaccaacatgtgacctcaagcagatgcttatctatctcctagatgatcctcatgaaatcagacgaatatgcataatggggagaaattgcacac

SEQ ID NO: 10836 - DNA, 300 bp, Zea mays
  Clone ID: LIB3156-011-Q1-K1-B11
acgctgacacgttgtcgagcgcgcgggcgaaacctgtcattcatcctgttaatatccggtcagaggtgttgcccaggaatacagcttggaagccaacaaaaatttgtgactgtggtgcttctactgacattggttgttatgcttgccttggccatccttatatgggttggtgcgatgagacaatcctatcgattcttctctactgaaaaggcgttatttggatgtattttcagcagtaattattgtactcggtggtgctctggcatgttacggtgcattgttattctcgaagatgagcat

SEQ ID NO: 10837 - DNA, 211 bp, Zea mays
  Clone ID: LIB3156-011-Q1-K1-B4
acgctggaagcagtcacacaggccgcctcgcttttattcatatggaacaagctggagtcaggggctgctgtgccactcactgactaccttaagattattacctgtgttgttgtcctttgctccctagggctgataacataatgactcattagaaaatcatgcctcgatcttattgaggaacaacaaaaactgactccagcttgttccatat

SEQ ID NO: 10838 - DNA, 281 bp, Zea mays
  Clone ID: LIB3156-011-Q1-K1-B5
acgcggacgctgggctgttccgaatctttataacaaaatctgtacccctgaatgctgttgatgcctgaaatgctttcttgccatgtaaatggtaatagagtgtacattgtgacttggctccttttgtatccattatgaaacatcagtgaaagggcacgagagactggatgtggattctggctgagctgtttgtgaataatacatattgtgaatacagagaagatagggctgccaaagacaatctacatcatttgacttgatataggcaaagagcctttctt

SEQ ID NO: 10839 - DNA, 335 bp, Zea mays
  Clone ID: LIB3156-011-Q1-K1-C1
acgcggacgcgtggtcaaagagcacctacttttttttttttctaaattatcagttctcactcggatggtcgccgaggtctgcaacccacaggatacttccgggcctgtgccgatcaaggacgtcgacgacggcagggttccagaacaaactcctaatgaggagatcggcgacctccttggcgggctgtcaagcaagaagcagtccatcctggagctgctcctgtaccacagcttgttgctgcacggagcactggatgccggtgaccataatgtttcagcgccgattgacgccgagcctcgacgacgtgatcctcgcgagctaccccaagtgcggc

SEQ ID NO: 10840 - DNA, 322 bp, Zea mays
  Clone ID: LIB3156-011-Q1-K1-C3
acggaacagttcttgctagaaaccaagcaaattactgtacaggactgaagaatatgatgacttgatttgcatcgtaccgaaaacattgctggccgggaaattgagtctggattaggaaaactcaacataagctggtgaataacgcatgcggggaaagatagtagattttcatcaatacactaaccatgatgttgtcgggttggatgagaacggcatggaagacagtgaactattagaagactgcaacctcatctaagctgagaatgtgttgcccgtcgttgaagaaagtattgcagatgaacaacactatcctcctacccta

SEQ ID NO: 10841 - DNA, 328 bp, Zea mays
  Clone ID: LIB3156-011-Q1-K1-D1
acgcgccaaacggcggaacgagcaggcagctttgccccagggcattgtccccttcgtcttcgcaaaggagtacaacgtgcaccctgacattctcagcaccgcagacatttttggcatgctcatcgccctgccgatcacgctcgtctactacatactgctcggcctgtgaccgacccgtgggtgatggcatcgctgaaactgtaaagaccgctgctgacactttccgatcaagggaagcacgtgaagagactgtctgctacgacatttgcttggcgcttgaaaaatgagtggcttgcgtctctctctatctctgtctctctattctatc

SEQ ID NO: 10842 - DNA, 245 bp, Zea mays
  Clone ID: LIB3156-011-Q1-K1-D3
acgctgacacgtggtttagccgccgccgtcttttttttgctgccgacgacatggggagaaggcctgcgatatgctatcgccaaatcaagaacatgccataccccacgtacaggtactgacggggtgtccctgaccacaagattaggatctacgacattggcatgaagagaaaggttgtggataagttcccctactgcgtgcaccttgtttatgggaataagaaaatggcttcaaggaagcctttg

SEQ ID NO: 10843 - DNA, 235 bp, Zea mays
  Clone ID: LIB3156-011-Q1-K1-D6
acggtaggaacaaatggaacttacgcgttttatgaggtgcaaggaagtttgtgaagaccatgctactgacgagatggcatataacggtggcaggtatgcttccccaccgggccaatgtacatttgttggagacataagcataagcggaaggcttgatgaagatggcaagaatcaatgtgtgtgttcaaaataggaggcacatgctggactggactaggaaataaccaatgaaacg

SEQ ID NO: 10844 - DNA, 390 bp, Zea mays
  Clone ID: LIB3156-011-Q1-K1-E1
acggtttgatgactgcttgaaggatcagaatatcatgcctggcatcaaggttgacaagggtttggttccattgcctggatccaacaatgaatcatggtgccaaggtcttgatggtttggcttcaaggtgtgctgagtactataagcagggggcgcgcttcgcaaagtggaggactgttgttagcatcccttgtggtccatctgcattagcagtcaaagaagcagcatggggacttgctcgatatgctgctattgctcatgataatggtttagtgccaattgtggagccagagattcttcttgatggagaccatgggatcgaaggagctcttgatgtggcaaaaaaagtgtggtctgatgtgtttttttacttaaacgagaacaatgttct

SEQ ID NO: 10845 - DNA, 294 bp, Zea mays
  Clone ID: LIB3156-011-Q1-K1-E12
cgccctcgcaagccacttcatcaagaagccggactgggcgccaacgagagacgctccctctttccggtggaccggaacccgccacggcttatcgcccttaacaccatggcacggcggttccacatccccgaccccgttccacgggggcgggtgttgccaccctcctactgcatgctattgaggtacgctgcctttacgctgccacgggtggtgccgatgaagttgctcttcgacgatgacctgctccggaaccggctcgcaccgcgggtctacatccacatccggtgccagctc

SEQ ID NO: 10846 - DNA, 203 bp, Zea mays
  Clone ID: LIB3156-011-Q1-K1-F11
cgtccgaatcccgggcgcccatcgcgtccgcggcgcgttgttaccgtacaacatgtgtttcgtcccgtggagcgagcgagtgactctcaagtgtgttttcttgcatggtgattcgtcatactgttcctgcaaaactggatgacccttgtccatgcagacaaactctctcgtgagacacctagccgacaaaggaaaaataacat

SEQ ID NO: 10847 - DNA, 355 bp, Zea mays
  Clone ID: LIB3156-011-Q1-K1-F12
acggtccagtgatcgatacgtctgcgcgcacccagtcattatcccccggtgactctcatcctactgcacttctccatgggttctctcctttctctcgctcgcaagtgacatttgagtctacccacctgtcgcctacatgcatgctcgtccatatctctagttctctacacctctaaaccaaaaatcacaagaactatctccctcagctcctacatgctccggcaattctacattcctcatatatgcacctagcaacacctcgatccatgtcgtagcatcgtctctgctgcatgcctaccccccttttcttgattcgatgctgtgtcaattatagaggtcgcctctttagatgtta

SEQ ID NO: 10848 - DNA, 344 bp, Zea mays
  Clone ID: LIB3156-011-Q1-K1-F3
aacgccacgacgtccggtaaacagcctcgcggcaattttacctgcttgtattggcatgatgatacgtcggttacaagagtgcagtattcgatccgttagttcaagttctgcgtttggggtgttagatccaccagaattagatttgttcggcaagctacgctcgaatacgtttgctagcttctaatgaagttgacacctcacggcttgtttgtgttcggttgtgtctgcattgaaatggattgaatcccttactaatcaaaattgattagaaggggttttagccctctttctcttgcaactgaacaaggcttaaaggtgttgtggaatatgaaattttttgatct

SEQ ID NO: 10849 - DNA, 221 bp, Zea mays
  Clone ID: LIB3156-011-Q1-K1-F5
acgggtgcatggtcgaaaacagcgtcattcttttttacagacgagtaccttgctggaagttttggagggattgtccattccaggagtgcgacggcttgttgttattgaacaaagtaccacatttgtggaaggaatcatctcattgagagacgtatttacatttcttcttggatagcatgtgtagccattccatacatgaaaaagcttgctgtacttggttc

SEQ ID NO: 10850 - DNA, 117 bp, Zea mays
  Clone ID: LIB3156-011-Q1-K1-F9
ggacagcgttgtaaagacaaacgcccttttttttttttaaaaaaaaaaaaaaaaaaaaaaaggggggtttttaaaaaaaaaaaataaaaaaaaaacgggggcgtcgttctttataac

SEQ ID NO: 10851 - DNA, 295 bp, Zea mays
  Clone ID: LIB3156-011-Q1-K1-G2
acgaccaagtggtctacatctgccaacacaaatttatttttatcccacgtactagctttgtggggctgtggattgtgttaaacgccagtggccacaaccttcttataggttaaagaaactcttctatgcttattattgaggattgtcattgaactaacatatatttcaaacttataaactatttataacatttcaaagattatttctttgaatcaattttgtaacacactatcgataaatataatgtaaatttgctgtaacctataactatgtgtaataaagaaattcctctgct

SEQ ID NO: 10852 - DNA, 249 bp, Zea mays
  Clone ID: LIB3156-011-Q1-K1-H2
acgtgacagatcaagcttttatcaatgtccatgggacatgtgaccaaaatggtttgcaacacaatgatatttatataaaaaagggaagtacaattgtacaaacaggcatatgctaacaacatatcatgtacatttgtaattagattcggtcatatcatgtacatagagggtaagattagttgtatatactgaataaagtaggcacaaaccattgatacgatgtaaaataatggaaataaacggttgcat

SEQ ID NO: 10853 - DNA, 211 bp, Zea mays
  Clone ID: LIB3156-011-Q1-K1-H3
acctgatgttgtaagagttgctaattcccctgcattgctaccgagttattgagaataattatggctgtttacgttgttgcttcatctcggagatgctttacatttaccaccttgttcatcttttgtcatcagtaaaatcgagtcggcggatgattttcttgctaaaaaaatttaaatgtgcaaatagaacgtggacaaaccccacctgtat

SEQ ID NO: 10854 - DNA, 330 bp, Zea mays
  Clone ID: LIB3156-011-Q1-K1-H7
acgctgacgcgtggtgagacgacagacattatttacggaacgtcgtcggggggaggggcgttcgctgcatacagatgatccaaggcaaccgtcgactgcgaaaccatacgcaccgccgaacttgtctccccaagacctacccatcgactatgcacgcttactcgccgacgaattcggcgtccttagcgtaatgctccgctacaaagtgtgctcgatgatcgcaatcatcttatgcgctcagtcgctggcaaacatgaataactttgagaacgatctgaaacagctttgtatggccttcatgtttgctgctatggatctggtgacaaacta

SEQ ID NO: 10855 - DNA, 414 bp, Zea mays
  Clone ID: LIB3156-011-Q1-K1-H8
aacggttgaatgcacatgcacccagtcgactgtattttgacgacgactgatgatgtatgacacttattcggggatggagtaccagaatattgataatgaaggactacttgaaagagacgtgtctgcagcatgccaattgacttctggctttgacagacaagaatcatgggaatgtcatacagttgttacttagatgtgcaaaccattgggactgatgagactcgacatgtgccaaaaatcgacgaagtctgttaagagtgtccagatggaaaggctgctctggggcgcatccaaacttgaaccaattggatatggtatcaataagctgcaaatcatgatgaccatcgttgacgaccttgtctatgttgacactctcattgaggactatctgagcgctgaaccagagaacgagta

SEQ ID NO: 10856 - DNA, 257 bp, Zea mays
  Clone ID: LIB3156-011-Q1-K1-H9
acggtcgcaccttatagatcactacaccgtgtttttcttggtcatacacgggcttgtggcgctggaggtcttgaagaagggacctacgggtccctgtgacaggccgatcgccgggatctggcttaaccaggtaagcttccaagcctaacatctcggcggctgaactcctgttcctaccgatgtgcctgcactcggtagtgtacttatccaccggaatctgagcgccatgatccttactctcaaccgcctaatcacgc

SEQ ID NO: 10857 - DNA, 401 bp, Zea mays
  Clone ID: LIB3156-012-Q1-K1-A7
gcggcgatcaaatgtgcaaggctactttgcttggtctatgctggacaactttgaatggtttgccggcttcaccgaacgttatggcattgtctacgtcgaccgcaacaataactgcacgcgctacatgaaggagtctgccaagtggttgaaagagttcaacaccgcgaaaaagcccagcaagaagattcttacgccagcttaaaaatcgggggcctcatgatgtgggtgcagcccataaaaactgtgtggtttggaaccgaagattttctctttttttttctgccacgagaggttctctggaggcatactctccagcaccgtggctaataacgcgttgttccaattcaatctggccttgtcatgcatgcaataaataaagtgatgggtttccctgtttcaat

SEQ ID NO: 10858 - DNA, 320 bp, Zea mays
  Clone ID: LIB3156-012-Q1-K1-B8
acgctcgcttcgtggctatatgcaagtgttgttcggagtactaaactcatacgtggtaaaagatgaataaagacttaaacatttctttaacaaaaaaaaaaaaaaaaaaaaaaaaaaaaaaaaaaaaaaaaaaaaaaaaaaaaaaaaaaaaaaaaaaaaaaaaaaaaaaaaaaaaaaaaaataaaaaaaaaaaaaaaaaaaaaaaaaaaaaaaaaaaagggggggcctttttaaaatatcaaatttaaataacgcgggcatggaaggtaaaagtttttttttggggcccccaaaattaaatccactggccgtgttttaaa

SEQ ID NO: 10859 - DNA, 379 bp, Zea mays
  unsure (1)..(379): unsure at all n locations; Clone ID: LIB3156-012-Q1-K1-C2
cgctnncatttgctgcacttctcaacgtttctagcttacgactatccatcgacanccgnnagttaactgtgtgcatgaagtttctcgataggctttcgttttanttcccccgtctcggggccganngttttgttacgtctcggtaacacaaactcgggaannactctcctannacttaattgcannatcccttgtgcctttcctcaacttgactcggagcctgtgacantttgctnngacagccaaaaaaaaactccggcaaaaaagggtgccctggtgatacctgtacgtattnttccacgcgcgacttggcatttaaatcaatgcctagtgaaaatgtaataatcccgccccgttcccgttaagtcttacccttatg

SEQ ID NO: 10860 - DNA, 71 bp, Zea mays
  Clone ID: LIB3156-012-Q1-K1-D12
gtggtatgggagggtatgcgcgagaaagagattgcaagttcgaatcttaatatttataaaacatataattt

SEQ ID NO: 10861 - DNA, 347 bp, Zea mays
  unsure (1)..(347): unsure at all n locations; Clone ID: LIB3156-012-Q1-K1-F12
gtatacttcaccggtgagcacaccagcgagcactacaatggctatgtccatggagcctatctttcaggtatcgactccgctgaaattctcatcaactgcgcccagaaaaagatgtgcaagtaccatgtccagggaaagtatgactaggaagctacagcaaattgatttaaagctccagcaaattgagcagtgtggatgttgcatttctcagttcattttttccctgttttcaacaaagtatagatgacagccatgttccctcgcggcatatgccttttcattattccaataaagctagcggctggttcgatgaanaaaaaaaaaaaaaaaaaaaaaaaaaaataaaa

SEQ ID NO: 10862 - DNA, 322 bp, Zea mays
  unsure (1)..(322): unsure at all n locations; Clone ID: LIB3156-012-Q1-K1-F5
cgcccggaancccggtcgccacgcgtcggctgtgggagaagaggcttatggaaactgacacccgacttgatgccctngtgtggccaacaaaattggcatcatctaagttaataggcaactggattcgacatctatgtcctactagttctgagcataccaacaaatttttctatgttactagtaattttgtttgtcatattgggttgtttttttgcaactaagtcttgttcgcagtcgcagactacatatgcctgtattgagttcctggttgccaaattaaccatctttaactggcattattccactttacgtataatggctg

SEQ ID NO: 10863 - DNA, 261 bp, Zea mays
  Clone ID: LIB3156-012-Q1-K1-F8
aacgctgacacgttgtaaaaaaaaaaaaattttttttaaaaaaaaaaaaaaaaaaaagggttggggatatttataaaaaaaaaaattaaataataaaaaataaaaaataataaaatattctataatgtaaaataaattgaatttactttaaagtgtttttacaataatatgtcttgtaaaaccctttaaattaactaaattaatcgacttaaataaaattccattttctccatttaaaaaaatagcgaaaaaaaaaacatt

SEQ ID NO: 10864 - DNA, 424 bp, Zea mays
  unsure (1)..(424): unsure at all n locations; Clone ID: LIB3156-012-Q1-K1-G7
cggaccgcgtgggctcctagctggactattcttatctccgatcaagtanctgaatttgtgggaacatcgtgatccatcgttttaaaagttgtgacagtataatcttgagtgctattccgaacacatttttagccggtgaatgtattgtttgtttaaaaaaaaaaaaaaaaaaaaaaaaaaaaaaaaaaaaaaaaaaaaaaaaaaaaaaaaaaaaaaaaaaaaaaaaaaaaaccccaaaaaaaaaaaaataaaataaaaaaaaaaataaaaaaaaaaaaaaatatggggggggcctttttaaaggatcaaaattttttttcccgttgttggaagattaaatttttttttaggggccaccaaaattaaaataactggcccgttttttaaaaactgggtaattgggaaaacctctgggttttcccaa

SEQ ID NO: 10865 - DNA, 360 bp, Zea mays
  Clone ID: LIB3156-012-Q1-K1-G8
gagacgaggtgaggggtcggggttcgtgtggcgaacggcgtgttgagccacgcgcgcgcgctctgtgacgcccggaacgttcttggagagcgcgagcgaggtcttctctcttctcggtgcgggtcgctgactcgctgtgccctgtgatgtgatgtgacgctggatcgttttgggtccgaccaacgggagaagagcggcctgtggtcgccgccgtgtgtgggctggatgatggcctgctctcttgtgctcctcctatatgtcagatgtacttcctccgaggagcagggtttcgctaccttttcgtactcgctacagctacagctagtacgtactatactaataaaagctgcagtttcttcc

SEQ ID NO: 10866 - DNA, 395 bp, Zea mays
  Clone ID: LIB3156-012-Q1-K1-H6
ctcgcagccttggattgctagagatgacgaacaaggtcagaagatgtggagagtcaaccagcgtatagtgaagcttatagctgagcttatgaggaaccatgacagccctgaagcgttggtgatactcgctagtgcctccgaccttctacttcgtgctaccgatggaatgctcgtcgatggtgaagcttgtactttgccacagcttgagcttctggaagtgaccgctcgggctgtccatcttatcatcgaatggggagattcaggtttatcagttgcagatggtctttcaaatctgctgaaggcatgccccgtcttcatctgccttcgttctcactcattcaaacgccacccatgcatccttcgtaactcagcaggttaactgaatattgtgatct

SEQ ID NO: 10867 - DNA, 291 bp, Zea mays
  Clone ID: LIB3156-012-Q1-K1-H8
acgttcttgtgcgttgccaaaaaaaaaaaaatttaaaaaaaaaaaaaaaaaaaaaaaaaaaaaaaaaaaaaaaaaaaaaaaaaaaaaaaaaaaaaaaaaaaaaaaaaaaaaaaaaaaaaaaaaaaaaaaaaaaaaaaaaataaatattaaaaaaaacaaaataaaataaaattgaatgtaaaaaaaaaaaaaaaataaaaaaaaaaaaaaaaaaaaaaaaaaatttaatttaaataaaaaaataataaaattttgataaaataaagtataaaaaaaaaagtaattattttt

SEQ ID NO: 10868 - DNA, 272 bp, Zea mays
  Clone ID: LIB3156-013-Q1-K1-A3
gtattatatacatacatgtatactccagcgagcgattcattattgcattgcattgcatggtcgtcagtgcggcgcacccaccgacggctgttgctgacaagagttcatttcattgccggcctttttgtgattcgattgttaattatactgctacgatgtacttactacttgaattattagtgtatttgctgtcactgttgatcatccaataaatttatcattattattcttccaaaaaaaaaaaaaaaaggcgggcgcttcttcccgcgcgc

SEQ ID NO: 10869 - DNA, 335 bp, Zea mays
  Clone ID: LIB3156-013-Q1-K1-B1
ctgacgaggacgagcaagcggaggagagaggagaagaagaagaagaatgagaacaaagaggaggagaacggcggcgcacatggcggcaccacctacaaaggctacaccatcccgcacaacaagcgctggcacaccgtcgccggcaagggcctctgcgccgagatgaggttctgggttttctacagggctaagcaagatggagctacgctcttgggtttgcagtcatccttgggagggacatgatgaccactctcatggtcatggacacgggcatgaggcatcatcatcgtcatcttcacattaagttccttactggctgcggacgatgcttggca

SEQ ID NO: 10870 - DNA, 245 bp, Zea mays
  Clone ID: LIB3156-013-Q1-K1-B12
ttatatccttaggcttctttcagttctcgctcagatgctagatacaaaataatgtagcagtgttattggagaagttttcacatgttttggctccgccgagcacgatgagtatgatgagttgatgccaatctactcagcatgcttgctactatgttgctgaattgagctccgttgagtattttttttttaaattactgtacgaatcgaacaattatttgagttgggaacaatattcttctttgcgg

SEQ ID NO: 10871 - DNA, 90 bp, Zea mays
  Clone ID: LIB3156-013-Q1-K1-C11
aaaaaaaaaaaaaaaaaaaaaaaaaaaaattaaaaaaaaaaaaaaaaaggaaaaaaaaaaagaaaaattaaaaaaaaaaaaaaaaaaaaa

SEQ ID NO: 10872 - DNA, 307 bp, Zea mays
  Clone ID: LIB3156-013-Q1-K1-C2
gtacctgcacgagtacgcgcgcccggcgtgggtgctcatggacgtcagcagcggcagaggcagcttgccggagacgggccccgcgccaagctccagagcttcggcgccgcgagggccatcacgggcgccaccgccggagtcgacgagtattagggcgccgaggaagcgctattcacgatgacgagccgcatagaggggacgcgcgggtacatctctccggagtccctggagcacggcgtggtgtcgcctaaggccaacgtcttctcgctcggcgtcgtgctcctggagctcgttactggcatggaca

SEQ ID NO: 10873 - DNA, 275 bp, Zea mays
  Clone ID: LIB3156-013-Q1-K1-D1
gaaaaatcgttctggagagctttagtgctgacagctgacgtggtggtttctctgactgcgtataggtttctgggcatcaaagaaaggcatggaatttgagtacctgaggcctatcctgtcttcctcgcttactatcctcatcctaacttagcttcataagagatttcttcccactgggacccgtgtcaagtgggcttgttcgatagtctaagggctctggtcttcttatgctttattctgtacagacaccaagaacctgattcaagcgcctcacc

SEQ ID NO: 10874 - DNA, 316 bp, Zea mays
  Clone ID: LIB3156-013-Q1-K1-D10
atacagcccaatctacaacgaggatgactggtctcccaccggcgacgtgtacgtcggcggaaccactgggcttctgatctgggccgtcaccctcgctgggatcctcggcggcggcgccctcctagtctacaacaccagcgccctctccggctaaggatatccaatgcatgcgcttcttgcgattcgtcatgtaaaatcagggtgtctgtctataatctagcctccatggatgctcaaccttcgtcatgtaacaataatcagtgctactcttcattacataattttgatgctatatatatataccccatccctccct

SEQ ID NO: 10875 - DNA, 185 bp, Zea mays
  Clone ID: LIB3156-013-Q1-K1-D6
cttttaagacaaattttagacgtaaaagtcgatttaatacatagaaacgaaaggactagatggcagagtgatctaacaatcaatctaaaccagctggtaactaacaatgatagatcactctgccatgtaggcctttcgtatctatgtgtcaatgccaccattacgtccaaaatgaggcttatacg

SEQ ID NO: 10876 - DNA, 234 bp, Zea mays
  Clone ID: LIB3156-013-Q1-K1-E10
gggcatgtatatcgtcttgcgcatgtgccacgactagacgggagtatgccacggtggaggggtattatattaataattaatatagtatgtccacctttgtttgatactactaagggctatgtattgaggcacgcgtaccattgttttgttattataacacttgtgcgatggttgcagaccactatccctcgtttttttttaaaataatatataattagaaaccaagaaaataat

SEQ ID NO: 10877 - DNA, 304 bp, Zea mays
  Clone ID: LIB3156-013-Q1-K1-E5
gcaagattcaaggagatgtcttagctacactggtttatctattttattgctgcattttgtagtccgtttttaacagcatgcatttttttgtttgctcgtgtgttttttaaataaactgagccgctgaattgtgatttattatcctgaaaggggcactacatagttcgagacctggatgctttggttcccttgtgtgttagttttcttattaaaaaaaaataaaaattttattgtttttattaattactctaaatctttattttacttagcaatgtttttattataaatatttttatattaattg

SEQ ID NO: 10878 - DNA, 286 bp, Zea mays
  Clone ID: LIB3156-013-Q1-K1-E7
gttggatcctgagccttttagacatcgagtgtgatttggtgactgcaacaatgaggaagaagagaaagaatatgctgaactattaccagtctgagattgacacaatatacaaaaagctggaggcgcagaagaatgctgccagaactaagagaagagatgtgccctattcgatcatcagctgaaatcaaaggaaacgacaccgctgtaaatttcacattaatattgcgaagtaacaactcaaggctatgagtaaggaataaaatgtatattgtgcctttgcctatag

SEQ ID NO: 10879 - DNA, 191 bp, Zea mays
  Clone ID: LIB3156-013-Q1-K1-F1
gcgggtgatcctgtcaagcgatccaaccttaattctcaaaagtgcgttcagtttgcccgggtagggacgggtttcatgaaaaaaaaaataaaaagcactgggtgccttatttcctgaattttcgtgtaaaaatgtactccctgcgtcccaaaacagttgacgttataatatttatagttaaacttgtagct

SEQ ID NO: 10880 - DNA, 423 bp, Zea mays
  Clone ID: LIB3156-013-Q1-K1-F12
tctagatcgcgagcggtcgcccttttttttttttttttaacgtacaaaggaaagcacaagcatctttcattgactcacagaattaaccataagaaagatacagaagttagtaaagacaggaagatcgaatctcaaaataccatggccatgatacagcaagaaatgataagcgcatagagagagagagagaaaaatgtaaaatgtgcaagcaagcagttcggggggtgctattttcaggaaacgctgggtcagtcatcatctagtacacaacagcgatggaaatggctttcggtctcatctccacgcttcgatccgctcaactctggagtttatgcggctcacgatgctcgcacctcttgatttctcagctgcaggcgtggtgcgcgtgccagactggcccttgccctttctagtcctcctccg

SEQ ID NO: 10881 - DNA, 311 bp, Zea mays
  Clone ID: LIB3156-013-Q1-K1-F7
aacctatctgaaagcatgtggctctccagtgaggttattcccatgattcactaagggtcgattatgggaacaaacccctctgctcccctagacctcattgtaccagagaatgccttctgctatcttacataaattgggccttgctgataccatctggcataatttcgcaccttacgtgcaatgaaattatcaacttgtagtatcagacccttctacagacactctttctccccatcctagacttattaatgacgttccttttacccagaagggcaaaccttttcatgatactgatctgaaccactggtctt

SEQ ID NO: 10882 - DNA, 87 bp, Zea mays
  Clone ID: LIB3156-013-Q1-K1-G2
actaaagagtaaagatagggtttaattgttcttaaaagttctagggaaagaacatatgataacatggttacctcaccaatctatacc

SEQ ID NO: 10883 - DNA, 312 bp, Zea mays
  Clone ID: LIB3156-013-Q1-K1-H3
gccttccgaatttttctcacctctcgtttttctacaccccgatctgatttgggtctggctctcacgtgatccgcgtttgattttggggatctctgtcccgacaagacttatgttgtgggggggcattttttcgattcgttcttggtgggaagcgttttgttttaccggccaggcaatccgtcgatttcgcgagtttgttccaatttgctgcgcgagggttgtcatccggagttgctttccatgtacctggattttacgttcctgtgtcattgggatgttctccctttaactagagtagacatattggggggg

SEQ ID NO: 10884 - DNA, 194 bp, Zea mays
  Clone ID: LIB3156-013-Q1-K1-H8
tcgtagttccggaaagcagctaccaaaaaagcacctcacagctatggaagttttttgattgggtgcatttacaaaactcggagctactttagtcacctatccattgctagtcgtgaagtcatagttgcaggcaaaacaaaaaattggcagctatgtgatgtccacatacacaggttcaataaattccataataa

SEQ ID NO: 10885 - DNA, 397 bp, Zea mays
  Clone ID: LIB3156-014-Q1-K1-A5
gaaggccatcccttcccgcgaagaaggagggaaggtgatcatcattgagatactcctggggccggacatggggccggtcatgtacgaggcccagctgctgatggacatgctcatgatggtcaacaccaagggcaggcagcgcggcgaagacgactggcgccacatctttaccaaggctggcttctccgactacaaggttgtcaagaaaatcggagctcgtggtgtcatcgaggtctacccatgatccatgatcgatgtgatgtgagtgactgtgagaggacgatactgtacaattaaataaacggggtatctagctactcagcttttgtagtacctcgagatccatgcatgttaattgcttgcttccatctgttttcaaaatgcatctatgtaatgt

SEQ ID NO: 10886 - DNA, 377 bp, Zea mays
  Clone ID: LIB3156-014-Q1-K1-A7
gtgcaagcctataagggcaagcatgattgcttcatctattcagcaactgctcaaaggagggatgcctgaaagaagagataatcagaatcggccatcatttcttcgcagcctgctggttgggaagaatatattggtagtagatgataataaagtcaatcttagagtcgctgcagctgcactcaaaaagtacggtgctaatgttagctgtgttgagagtggcaaagatgctatcagtctacttcaacccccacattgctttgacgcatgttttatggatgttcagatgccacagatggatgggtttgaggcaacaagacaaataagacaaacagaaatgagagttaactacgaaaggaagaataaggttggtgttgatt

SEQ ID NO: 10887 - DNA, 291 bp, Zea mays
  Clone ID: LIB3156-014-Q1-K1-A8
gttctagatcgcgaggccgccctttttttttttttttttttttttttttttttttggttttttttttggagaacaacgaaaccaaacccatgttttatcaacaacaataataataatgctgttaaaccagcaaacactggattagaccctaacagctgtcgttgttaaaccagccttcactggagaagggtcacctagctcccggaactggcggcgccacttccacgcccggagccatgccgcccaagcttgacccgtcgcaggtgggggaggtgttcgtccgtgtgaccg

SEQ ID NO: 10888 - DNA, 114 bp, Zea mays
  Clone ID: LIB3156-014-Q1-K1-C7
tgatcggttactgtacattatatctagatagtagcttggcaacgactactccacatcagtgggtgtggctctactgacaatattccaccagtctagcctgaaattttgtggagt

SEQ ID NO: 10889 - DNA, 452 bp, Zea mays
  Clone ID: LIB3156-014-Q1-K1-D5
gtaaacatgcagcaattaaaaggaacctgttctagcatcggtgcttgcaggatgaagaacgagtgcacctcattcagaaatagatgtggagacgagaacgctgaaggttgtatgaggtccttccagaacctgaagagggagcatggagtcctcaggcagaagctggaatcctacttccaggtattcattcacgcccagctccatccctaccattcatcgccttgctaatctcgcctgtgtgcagctgctgcgacaagccggtcctgccgtgactgcaaccaggcctagaggcatgtaaggaacggctgttggcgtgcagggagcagtgcaagggacagacagcgtcatagcgatgctccactacgccattgttgaggctagctgtaacgatgggccacgaataagaagtttgcctatggcctgtgggggagttccctgcgggttttaaagtg

SEQ ID NO: 10890 - DNA, 436 bp, Zea mays
  Clone ID: LIB3156-014-Q1-K1-E11
atccaatttcctcaaagttcttcaactggcaagaggttgaaaagtaaaagctttgggggcgttcgcattgaaagtgatgtgtatgtgacggctcaaggatgccggaacctcacaaactgccctcgagaaacctgggagatcgaggctgtaatggctggcgcaccatggcctctgccggcttcaagttctatggtggtagcagcagagaatagcaatgacatatctaaagtgtcgtaattttctctatgctcaatccatatcccgagttgaaacaaattcgatctggattcttatattcaataaatagtgaggctgatgcgcaaaacattgttggattgatgactggaaaacatttcatacgctcacttattttgtaagctctctgttatgtgtttgaaaacgatcggaaaaaaaaaaaaaaaagggcggcctttct

SEQ ID NO: 10891 - DNA, 438 bp, Zea mays
  Clone ID: LIB3156-014-Q1-K1-E5
ctgctgtgttcttcaagaactccactggtggcagctgcacttcagctaaagagatgacggagcgctcggtgattcatgagatcattcccgagatggagatctgtgacttcgagtttgacccctgtgggtactcgatgaatggcgtcttcgggcctgcagcctccaccatccacgtgacacccgaggaaggtttcagctacgcaagctacgaagctatgaacttcgaccccagctcactggtctacagcgatgtgatcaggagggtcctggcaggcttctctccttcggacttctcggtcgcagttaccatctttggtggccgtgggttcgccaaatcatgggcgacgggtgcagacatcgattcctacatgtgcggtgatcctgtagagcaagagctttctggtggcggtctgctgatgtaccagagctttactgctg

SEQ ID NO: 10892 - DNA, 315 bp, Zea mays
  unsure (1)..(315): unsure at all n locations; Clone ID: LIB3156-014-Q1-K1-F1
agagtattaaagttctacactttacgatgtaatagtttgtagattcctctattcatattgtgggagtttaggtaattaactttatggatcatcttaagtcctcatggttggggagtatgtactaacaactaaagtcaagactaggcaaaatgaatcaaacaagtaaagcgtgtggctgcctgtagcttactgacaaataaaaacgaatcaagttggcaccattagtaanaaaaaaaaaaaaaaaaaaaaaaaaaaaaaaaaaaaaaaaaaaaaaaaaaaaaaaaaaaaaaaaaaaaaaaaaaaaaaaaaaataaa

SEQ ID NO: 10893 - DNA, 354 bp, Zea mays
  Clone ID: LIB3156-014-Q1-K1-F10
tcggttcagcttgttaagaatggcaagattattgctgccttcgtgccaaatgacggttgggcgagctacattgaagaaaatgatgacgtcttgattgctggatttggtcataaggggcacgctgtgggagatattcctggtgtccggttcaaggtcgtcaaggtttccggtgtgtctctgcttgcccttttcaaggagaagaaacacaagccaacgtcttatattgctcttgctaccaaaatcatcatgcatggagttgaaacgggatgtcattttatgattaagaaaaatcgttgcttgctatgtttgcagagcatttcagcaattgttaacttaacattttgttggtaaaaa

SEQ ID NO: 10894 - DNA, 421 bp, Zea mays
  Clone ID: LIB3156-014-Q1-K1-F2
ctctgggcctgggcaactgggtgaaggcgcaggagtgggcggccgtccccggcgggcacgccacgtacctgggcgccccggtgccgtggggcacgctgccgaccatcctggtgatcgagttcgtggccatcgccttcgccgagcaccagcgcaccatggagaaggaccccgagaagaagaagtaccccggcggcgccttcgacccgctcggcttctccaaggaccccgccaagttcgaggagtacaagctcaaggagatcaagaacggccgcctcgccatgctggccttcgtcggcttctgcgtgcagcagtcggcgtaccccggcaccggccctgtggagaacctcgccttctacctcgccgacccgtggcacaacaacatcggcgacatcatcattcccagatcaatttctcctttgag

SEQ ID NO: 10895 - DNA, 301 bp, Zea mays
  Clone ID: LIB3156-014-Q1-K1-F3
agccaagccaggctattgttatgaaaatttgtcgtctgtaagcatgtgaacttccgatgtggcgacatgctggatcagtctgaataagtaagtatgcagctctaggtggtcagctgcgtctaccacaatgagcatgtacgtatggagaaatatctgtgaacccattttgtttatgaataagatttgttttttttcgaacaaaaatacgcatacatgcaacgaaatatctattctatagagacactaaaaaaaaattaactggctcgagtataacaacgaataaaattggaaaaacccctgg

SEQ ID NO: 10896 - DNA, 343 bp, Zea mays
  Clone ID: LIB3156-014-Q1-K1-F5
gatcaattgaatatacttgataacctggtggtctgaaacacctgaggaacactaacaagtagggagctcggcatatgtaaaaagcggccaactggggctccctcttcgttcacttctgccactctgcgagctaacccaacggtgctcatactccagggacgcacctcttaaaataacactatagggtctgacaacctttacaggatcctttacaagaccttgaacgacatttaatggaaatgcgacgatctttatactcaacatgcttcttattagaacactagagaggaggaatggcaaactattttgtgcaccatcctttcaagcaaactattctgcatgt

SEQ ID NO: 10897 - DNA, 311 bp, Zea mays
  Clone ID: LIB3156-014-Q1-K1-F6
atttcatcgctacgttcgtggacgatcacattgcgcaccatgctcagtttctcaagagcgcgggactgttaatgtgtagcgtgaggaagacaaggaggcagcctatcatgggtgttttatctatgccgacagtgttgtctcgtgtggcagcttgaggagaggtgaacagcacaccccacatgcgaaataagatggaagatttgctgttcctgtccattgacattgacgagctcgaatgggactgatgttgcaccgaatgtagtttccctgtcattcgctatgcgcaaaataaaaaaaaaatataattcatc

SEQ ID NO: 10898 - DNA, 200 bp, Zea mays
  Clone ID: LIB3156-014-Q1-K1-G2
ggtttctattcctcaaatccaactaagcactctatggatggggcatttgctgcacgtctggggcggtcaacgcactaagattatatgagttgccacaaggccacaactaggtgtgaagttgaacaaggaatcacatgtattgccctaatgttaaagtgcacccagtcattgcttcaatatctttatcttatatattcttg

SEQ ID NO: 10899 - DNA, 433 bp, Zea mays
  Clone ID: LIB3156-014-Q1-K1-G5
cacgagctggctctccctgcttcggtggggggctgagacacgtgtggagcccaattaaaagggagccggctctgggttaaatggccaactttgtctcacagttattcacttggtccactattggactaacagaacggggcttacactcctgtgacgcaccttttaaaaaaaaaaaaaaagggcggccgccctttactttatccttttcaagaccttttatgacttttttttggaaattctctatttttaaacgcatcatgctttttatcataaccttatagaggaggaatggcaaactattttgtgcaccattctttcaagcaaactattcttgatgtaacggtgggcgcccaaaaaaaagcgctggtgctccaccatcgttgtatatgctgcggttagagttgcttgctgtagctgcagggaagttcattca

SEQ ID NO: 10900 - DNA, 120 bp, Zea mays
  Clone ID: LIB3156-015-Q1-K1-A10
aaaaaaaaaaaaaaaaaaaaaaaaaaaaaaaaaaaaaaaaaaaaaaaaaaaaaaaaaaaaaaaaaaaaaaaaaaaaaaaaaaaaaaaaaaaaaaaaaaaaaaaaaaaaaaaaaaaaaagg

SEQ ID NO: 10901 - DNA, 446 bp, Zea mays
  Clone ID: LIB3156-015-Q1-K1-A12
cggacgcgtgggttctgatcgagggccgccctttttttttttttttttagtcaaaacgcatcatcacttcattatggaactctgtaccaaccattgtagcaagcaagcaagcaaacaaacacatcgcacaagcacaatacacaagtcgtagtttatgcaacgcaacgcaacgcaacgcagtgtactgacgtacacgtcccgcgcctctgcatccccgctctgcaaaacagacagattcccgcataacagacagggcaaacggatcggctcagcttctgcgtgccttcactacacaacagctagcttacactctacaagctacagctgcacagttaaaccaagacgatacatagaatacagtaccacatcgtggggagagagagaggatcaggcacacgcacactggctggcacacaccctatgacactggaggttacagatcaaca

SEQ ID NO: 10902 - DNA, 130 bp, Zea mays
  Clone ID: LIB3156-015-Q1-K1-B3
ggggctggccactttaaggagcatggccccacgaaactctctgcatgcaaacactacatggctgcataagataatggccttgtggtacacaatcagtaagacattattggatgattaggaataagcatta

SEQ ID NO: 10903 - DNA, 412 bp, Zea mays
  unsure (1)..(412): unsure at all n locations; Clone ID: LIB3156-015-Q1-K1-B5
tcgggacgacatgtcatgagaggttttgtaggggtttctggcttcgctacacttgtattaagtgctaaacgccccttggctataaagggaccctngaactatatattttcaggggtttctccctttaaatttgtttgaactctaaatgctccggttaacacactatgccacaaagtgttttttttggctctatatatngacctaaaaaagaaataaacactaggaactttacatttttatgcatcaagtttactgtcgtggtgctttggttgtcacgggtgagctctaagtatcctttgttttgctgtctgtattcgtggttaaatccatggatccagtgttggcgttgccagtatatcgccaaagatgctgtctgtattcgtggttaaatgcatgcatccagtgttaacac

SEQ ID NO: 10904 - DNA, 341 bp, Zea mays
  Clone ID: LIB3156-015-Q1-K1-C2
ctctgtcgtgtggttcttgatctccattcttcccgagtcccttatcgacagcgtgcgcctgggcatgtgcattaagatccgcaagaaggggctggccaaggacgccaagaagaaggcgctgtgattgatgtttcagaatgcatgttcagattcgcacatttcctcatcacctgtagtagacacgtgccttgctgtagtcactttattagctaccattacctcctgagtctgttaagaatcgagaatgtcattgttccatccgcggttatgatgatgaaaaatacgattcttcaattcaaaatgtaacactaatacgagtaatgatgcatgaaattaacttg

SEQ ID NO: 10905 - DNA, 274 bp, Zea mays
  Clone ID: LIB3156-015-Q1-K1-C6
acatataaatggagaaatattatttatatatgtgcgtaatgcgtagcaacataggtgagagagagagagagacagagagaggaaaaaaaaagaaagaaaaaaaaaaaaaaaaaaaaaaaaaaaaaaagaaaaaaaaccaagagaaacaagaccggggaatgctgttccaaaaaaaaaccacccagccgaataaacccaggcttttgtttgtctccaaacgtaaatggttaaaatcaatagtggcggggaaaagaatgttgtccccggggggggg

SEQ ID NO: 10906 - DNA, 81 bp, Zea mays
  Clone ID: LIB3156-015-Q1-K1-C7
atgatttcttaaaaaaaaaaaacattttcattaaagtctcatgtaaatcaaaaaaaaggaggttttatatatattattaaa

SEQ ID NO: 10907 - DNA, 96 bp, Zea mays
  Clone ID: LIB3156-015-Q1-K1-D12
aacgcacataagtcgccttgtctgaaaaaataaaaaaaaaaaaaaaaaaaaaaaagggaaggatatttaaaaaaaaaaaaaaaaaaaacattaaaa

SEQ ID NO: 10908 - DNA, 136 bp, Zea mays
  Clone ID: LIB3156-015-Q1-K1-D7
acggttatcttttgtttaataaaccacttatattttatggggatcccctgcagaactggggaggctccgtttcacaggaacggatcccataacctttctctccgacgaaggcaaatgttttatgtaatttgcctga

SEQ ID NO: 10909 - DNA, 311 bp, Zea mays
  Clone ID: LIB3156-015-Q1-K1-E11
ccgggttcatggtcgcaggccagacattcaccgtagagccgacgctgtcgatggggagcacgcagtgcgtggtgtgggacgacgggtggacggccgtggcggcggacggcagcctcagcgcgcagttcgagcacaccgtgctggtcaccggcgacggcgcggaggtcctgaccgggttcccgtagctgcctgcacgcatcacgtgagcggtgagcctgggtgggccactgcgtcggcgagggacggaactgcaggagcaggcatgcagctatgcgcacgctgacaattttattaaaaatctatgttggacg

SEQ ID NO: 10910 - DNA, 149 bp, Zea mays
  Clone ID: LIB3156-015-Q1-K1-F8
tcgagcactacactgccaccctttcaatgctattggataggattttctttagacaggcatgaagccccttcagctggcggccggagagcgctattgagctcacgaggccaagcacgcccgttcgtagagaaactgcggcgctcctacgg

SEQ ID NO: 10911 - DNA, 305 bp, Zea mays
  Clone ID: LIB3156-015-Q1-K1-G12
acgggctaaccagtacaccgctgcactgtaccttatactgttacaggcactcataaggaggaggcttggaggatccaccgaccagaaagttgtggatgagaaccttgcgatgctgaagaacgtgctagaggtgtacgaggcgcgcctgatcaagtgcaagatccttgttggagacttcctcagcctagtcgacgtgaaccatgtgtctgtcactgtttgacagtctgctactatctacgcgtatatgctgaacgcctaccctcatgtgaaggctatgtaggatggtatgatggagaggccgattg

SEQ ID NO: 10912 - DNA, 301 bp, Zea mays
  Clone ID: LIB3156-015-Q1-K1-G9
acgaagcaacataccataacccccgtccttttcgtgagcaaaccgggccacgtcgcgggggagcttatgccacaccctttatttgatccgaagttattgtagcggatcgaaactttcttctatcacattgggaggcactacttgatacactggttcatgcaacggtcaatgaatttcatattttgcaaaaagctttccctctataaacactgactcttgcttgccagcaccaacaaatatggatgcatgaccgccccaaaaatggagagcatgcttgcagaaacaagcatcttcttcctta

SEQ ID NO: 10913 - DNA, 234 bp, Zea mays
  Clone ID: LIB3156-015-Q1-K1-H6
tcggtttagtttatactacctaacacagggccttcgtacacaaaaaaatgccctaggttcctagggcgcgcggattgtaacaaattcgctcccgaagtttcttagctccgatcaggcgcctaagggaattctgtgggccttcccataacaaaactggtataagtacgctcaggttgctcctttcttgccccttggatctttaacatgttctgttttcataactccgtcagattc

SEQ ID NO: 10914 - DNA, 219 bp, Zea mays
  Clone ID: LIB3156-016-Q1-K1-A4
ccccctgcttctcatggatggttgctgcttgtgtatgccgagaataaatgtggatggcgcgtgcctctgggtcgccaggttcatgcttagtctggacatgttttgcacttttgcttcccttcctgctaccatctgtgacagaaccgctcgctaatatgggacctgagattagctttttgctgctaaaaaaaaaaaaaaaaaaaaaaaataaaaaaatag

SEQ ID NO: 10915 - DNA, 240 bp, Zea mays
  Clone ID: LIB3156-016-Q1-K1-B6
tcgatggagagcatctggggaaaagactgctcttatttccggcctgagcggtggctctcggctgacgggacccggttcgagccggccaaagacgcgtaccgcttcgtggcgttcaacggatggccgcggacgtgcctgggcaaagacctggcgtacttgcagatgaagtctatcgctttcgctgtgctactgcgccactcggtggagctcgtccctggacacaatgtggagcaaaagatg

SEQ ID NO: 10916 - DNA, 261 bp, Zea mays
  Clone ID: LIB3156-016-Q1-K1-B9
gtacaagattacgcgctggaaggacccgttctgctctcggcggacggagacggtgatgattaccgcacatgaactactacacggcgtgcatgtaccacttcaacctacgccggacggcggtccgcaggcttgccaacaccattctcaacgacaagcttttccactgcggcatcatcgacattcaggtcaccagctgaccgtgcgatgtacacggaccagacgatcggtttccacatgtgtagagtaccagaaccccggcta

SEQ ID NO: 10917 - DNA, 302 bp, Zea mays
  Clone ID: LIB3156-016-Q1-K1-C7
cgttgctgtaatccagatccaatcccattttcatttgtaggcaaattttcagaggggtcgggtgcacattgtatctacagaattatcatcacttattggaggattgcgtgtgtgacatcaaaaacaatgtatcatctgtgtatttgctatgttgataagtgtgttactgcgttgtattttatgctactgtggcaagctcccatgtatgcataccacttttatagctgatatgggccttttaaaaaaaaatagatgattttattttgagaaaaaaaaaaaatcaattaaaactatattataaa

SEQ ID NO: 10918 - DNA, 309 bp, Zea mays
  Clone ID: LIB3156-016-Q1-K1-C9
acggcggcatgaaaactgatgacaaacattctctattcttaccgaggaatgggactttcggttggagggatgactgctggatgggatgaaacggaccctggactatactatgtagacagtgaagggggaaggttaaaaggaatgcgtttctctgttggatctggttcaccatatgcttatggtgtgctggataatggctatcggtatgatatgtctgttgaagaggctgcacagttggccagaagagctatttatcatgcgcacattacgagatggagacagtggtggtgatgccagcgttgactacgt

SEQ ID NO: 10919 - DNA, 242 bp, Zea mays
  Clone ID: LIB3156-016-Q1-K1-D2
tcgcgaccacatgctcagccttggattttcgaagtctctttcagaatggattggcagtaacttgaagaaggacaacgatcatgtgacctgggctttcaatcttcaggctgccatagacatgtttagttcttatagggaaagggactattggtcggtgctggaacacccacctaaggatttggagattgcaatagtgcaagcagagcacaatgatcgatgggtccctgatgaccttcaaaaac

SEQ ID NO: 10920 - DNA, 280 bp, Zea mays
  unsure (1)..(280): unsure at all n locations; Clone ID: LIB3156-016-Q1-K1-D3
gccaaatcaagacgggagctccttgccggtctgagcgcctggccaaatacaaccagctgctcaggatcgaggaggagctcggtgatgccgcggtctacgccggagcaaagttcagggcaccagtggagccctactaagaaaggaagaggatgaggatgttttcttgtggagctatactagctcgctgctgccttttgttacaatgtttgtacggtcgcaataaatgtatggtcgtgtttgctcgagagctnanaaaaaaaaaaaaaaaaaaaaaaataag

SEQ ID NO: 10921 - DNA, 448 bp, Zea mays
  Clone ID: LIB3156-016-Q1-K1-E9
acgcgtgctcatgacttaaaaccgcgtcagactcataccggagatcgacggcacgggattgctggtgatggtctgcatcggtgacctagctcgcacggaagttgtctagtacagagaagagcttttctggctcaaagacttcttagatgggcgctacgacgactgtttgtgcactaactatggcatgaaatcctttctgttaataggattggtctatgaaagaacgatgactcaccactctctaaatgtggcagatctattgcgctattgttggactatagaatataatgtcggcttggtttaccatagccttgaaattgctctgcatgatgaatggatcagctgtgctaagcatgtctacgctatacattagattgtgcgctaggagctttcatatttctaagcacatccatatcagatgtgcaacagactgactggataactatta

SEQ ID NO: 10922 - DNA, 230 bp, Zea mays
  Clone ID: LIB3156-016-Q1-K1-F5
tcgcaaaaaaaaaaaaaaaaaaaaaaaataaaattaaaaaaaaaaaaaaaaaaaaaaaaaggaagagaaaaaaaaaaaaaaaaaaaaaaaaaaaaattttaaacacaaaaaaggatggacgaaaaaaataaatctattattaagggcttccccttccaaaaaaaaaagagaggaccgacttaatggaaaaagacaaaaaccttctaaccaacatatactttttaattcca

SEQ ID NO: 10923 - DNA, 382 bp, Zea mays
  Clone ID: LIB3156-016-Q1-K1-F8
acggttgcctacacgaccattatggatctctatttctcgttctgttagcttacacccacgatgggagtgttagcaggttacccccgatttcaactccgctctctattatatagtgttgcacttgaaaacctatcatatgatttcgttgccaccagagcaacatcctccagtgattgagctacataatatactttcagctcctaaatataagcaactgacagctaacacagcaaaaatgctggttgagaatctgtcacatcacataattgctagttgatcactaatactaaactggaaatgatccttacattcgtttatgaaatcaccactcctcctgtaacctcgaatcattgtccgcattctgattccatcatgatccata

SEQ ID NO: 10924 - DNA, 333 bp, Zea mays
  unsure (1)..(333): unsure at all n locations; Clone ID: LIB3156-016-Q1-K1-F9
agcatataacagaggtgctaaatttgttcttaagcggaagccgaatatattgtccgtcgnggcgatcttcgaagaatgttcccaaggaatacggaactgacatgtaagagaggcatgacggagctgggccagccatccatcgggctcgcgtcgaagaagatcatatagccaccagcggtacactatgtgcagcataaaaacctatctatcatgcaggagcataggcaggagcgagagctagaatgactaaatcagtacaacggaacggcgcgctacaaaataggagacaaggcagcacaaggtctcgcctacgtacacgaagcatggagactg

SEQ ID NO: 10925 - DNA, 437 bp, Zea mays
  Clone ID: LIB3156-016-Q1-K1-G4
tcgcggacgcgtgggctgccatgttcaggaggaaggccttcttgcattggtacacgggtgagggcatggatgagatggagttcactgaggcagagagtaacatgaatgacctggtggccgagtaccatcagtaccaagacgccacagctgaggatgaggaggagtacgaggaggaagaagaggaagatcctgctgcctaagccatcatcccaagtgcttggtaaagatatgatgtcccttgtatcgctgctagtcagcactgagtcgattgaggtgctcgtggtgatgttaggtactagatgggggtattacttatgaatgcgatgttgctgtgacagaactgcatttccttttgtattatggttgtccaagttgtcattaccatgatgtgaggtagcttaactggttgttgctataccttatgcagcattttgctg

SEQ ID NO: 10926 - DNA, 237 bp, Zea mays
  unsure (1)..(237): unsure at all n locations; Clone ID: LIB3156-016-Q1-K1-G7
aatatttatgcatgtatgtatttatgtttatctccctgcatttacccttagtgcaacaggggggtagtggacggttgtagtattccaaatttttgtatcaaataaatgaggacactgtccttagggtgcaattgtgtatataatataataataaggagctactcgccatgatttaggatatnggatttaactgttgtaataatatgcagtgttttcccacgcgtccgctagatcaca

SEQ ID NO: 10927 - DNA, 100 bp, Zea mays
  Clone ID: LIB3156-017-Q1-K1-C12
ttaaaaaaaaaaataaaaaaaaaatatctttattaaaaaaaaaaaaaaaaaaaaaaacaaaccgtctaattattaaaaaataaaaaaaaaaaaccccccc

SEQ ID NO: 10928 - DNA, 262 bp, Zea mays
  Clone ID: LIB3156-017-Q1-K1-D9
acgaccacacttgctgccacgcactttatttattgctttatctcactcaaaaacgttagccgggcattttttttttaacaagttcatccacgagccaaaaaatcatatcctatacattcactctagcttgtctcaggaagaaacgctaactctcttcaagggtttctaggatgggcataaaataattcttgttgcaaccgatttggctggaaggtgaatttgacatttaaccaagttaacatttgtccttcaactacttaca

SEQ ID NO: 10929 - DNA, 182 bp, Zea mays
  Clone ID: LIB3156-017-Q1-K1-F11
acggacctgtcctcgccaacgagggtagtgggaggacgccgggtccaacaccacagacacgagggctcggatgttgtgaagttcggcggcttgagcgtggaaagcaccgacgtggtctacgtcaaggccagaggcggggatggccttaggaatcgccggggggtccttacgagcgaccggtg

SEQ ID NO: 10930 - DNA, 99 bp, Zea mays
  Clone ID: LIB3156-017-Q1-K1-F4
aaaaaaaaaaaaaaaaaaaaaaaaaaaaaaaaaaaaaaaaaaaaaaaaagcaggcagatcggcgcgtagcgtcccatacatacgccttcagtgcgcgcc

SEQ ID NO: 10931 - DNA, 366 bp, Zea mays
  Clone ID: LIB3156-017-Q1-K1-F6
acgccgtctcccgccttcctatcgccgcggtctccgccgcgcgtcgcgagtgtctctttgggggaagggtggtaggaggagtggtgagggcgcccccgagactttctaagcgcgggttgtgcgccagcgcagaggctgacgactcggccgtcacgggggaggccatggaatgggtcaagaaggacaggagacgcctgctccacgtcgtctaccgcgtcggagacctccacaagacgatcaagttttacactgagtgcctgggcatgaaactgctgaagaagagggacattcccgacgagaggtgtaccaatgcctttctggggtacgggcctgaggattcacaatttgatgcggagctcacttaca

SEQ ID NO: 10932 - DNA, 306 bp, Zea mays
  Clone ID: LIB3156-017-Q1-K1-G7
tcggcgcgtgcaaagggttgctcgaatgtatctatgtacgtttaggaatcacagcgtactatggttgacgaaggtgtatgttttcgcacctttggcagcgtcagttgatttgtttagcgctcaaaaatcggaacacacaaagggggttctccgttctttaaaaaactgggccagtcgtctacacacacatcattaatgtggctttgcttggtcattgtatccatggcccgggagtatgcatgtgctgtggctacagctggggggacacttgtcaggcccatctatttataagaaaagaaatataag

SEQ ID NO: 10933 - DNA, 138 bp, Zea mays
  Clone ID: LIB3156-017-Q1-K1-G8
acggttcgtcccggtgtacgccatgctgatgttcgacactgttgtcctgacctacgactttggggtctttgacgcgctcaccgtgaaagacctgatcaaccgcctgctcaacctgtgtttgatgatcgggttcgacga

SEQ ID NO: 10934 - DNA, 273 bp, Zea mays
  Clone ID: LIB3156-017-Q1-K1-H6
acgggcgcagccgcaggcatggacacaggccagtttggctactgcggtcgccgcggcacgctgtgcattaggaacgtgctgaccctccgcgggatccctgaaggtgccgttgtctgcaacgtccatcaccacctgagtgaccgccgtgtattcggcaagggctctggggactacgcgaatgtgatcagcccctaccctgacaacgggacatggaggattaagctggcctctggcgcccagaacagtgtccccaggagctggcctgctatgatt

SEQ ID NO: 10935 - DNA, 380 bp, Zea mays
  unsure (1)..(380): unsure at all n locations; Clone ID: LIB3156-019-Q1-K1-A2
ttttttttttttttttttttttttttttttttttttttttttttttttttttttttttttttggttttttttttttttttttttttttttttttttttttttttttttttnggaaaaaaaaaaaaaaaaaatttttcccaatttttttgaaaaaatttttttttttttaaaaaaaaaattcctttttttttaaagggaaaaaaaaaaacctttttctccaggggtattaataaaaaaaatcaaaaattttttttttttaaaaaaaccggttaaaaaccaaaaaaaaaaaaaaacccttcatttgtttttagttttaaaaaatttttttttaaaaaaaaaaaaacccccaaggggggggttttttttttttgagggtgggg

SEQ ID NO: 10936 - DNA, 331 bp, Zea mays
  unsure (1)..(331): unsure at all n locations; Clone ID: LIB3156-019-Q1-K1-A3
gcgggcgccctttnttttttttttttttttttttttttttttttttttttttttttttttttttttttttttttnggggaaagaaccgggggctttttttccagttttaaaattaaccaaaaatttcaacggccgcatttttggacaacgggttttacttaaaagcccttaaaaacaagggttcaaaggaaagcaaagcttttcttttaaaaatgcccccggattttggactttttaaccccaaaaaaattctgtactttacccccaaaaaaaaggtttttaagggggccacccctttctctccacctttggcaatcgggggggggggttt

SEQ ID NO: 10937 - DNA, 305 bp, Zea mays
  Clone ID: LIB3156-019-Q1-K1-A4
gcggccgcccttttttttttttttttttttttttttttttttttttttttttttttttttttttttgggccaaaacagagaatggcttttaacttagttcagtttttacacatacatgcttttcacttattccattcctatgaacaaaaatttagggcgggccctactgggcatcaattacatatgctttatccaactttttttttatcgacaaaggagccgaaaaatttaacggggagaacatgtcgtcatttttggatttgggagcaggcttgaacttttaggggccagccttggtcccccaa

SEQ ID NO: 10938 - DNA, 230 bp, Zea mays
  unsure (1)..(230): unsure at all n locations; Clone ID: LIB3156-019-Q1-K1-A5
gcggccgccctttttttttttttttttttttttttttttttttttttttttttttttttttttttttggttnnttgggggaaaaaaaaaaaatttttttgattttttcccttttaagcatgggttgggggcctaaaaacaaaaagtttagtcttttggtttaatcccgccggttaacaatctaagactcaatgggacttaaatagggggatttattttttgttccttaaa

SEQ ID NO: 10939 - DNA, 341 bp, Zea mays
  Clone ID: LIB3156-019-Q1-K1-A6
gcggccgccctttttttttttttttttgcaggaatatggccacatgctcatctgatcatgctaaaggtgtgtaacagacatgatttttttttacatttatttgtttcaacacgcaaggcagccaccgctgctcgtgtgaagctggtgcgcggctgcacgcgggcacagcggccgtcgcaccgccatgcaggcgagtgcgctggccacgccgccgcaagcaggcgcgggcttcgccgtaactgcttcaggcaagaagtaagagcactctggcacgcaagcacaactctgctgacgccgctccggcaccccggcatacagccgtcttagccccgctaccccgc

SEQ ID NO: 10940 - DNA, 247 bp, Zea mays
  unsure (1)..(247): unsure at all n locations; Clone ID: LIB3156-019-Q1-K1-A7
gccggccgccctttttttttttttttttttttttttttttttttttttttttttttttttnnaaaaaaaaccacctgggggaatttttcctttccagttttttcaaggccccctcgcccgaagtcattacccttggatttggggttgggccacaaacaaaaaccaaaccaggggaccctttcttcctttttacaaacttttatacgggaacctaaccccgttttttcattcccctggaacaaaccaa

SEQ ID NO: 10941 - DNA, 252 bp, Zea mays
  Clone ID: LIB3156-019-Q1-K1-A8
gcggccgccctttttttttttttttttttttttttttttttttgggtacatggaaacgaaatcatcgtcaccaaatagagggcaaccgaaggtacatgaccatccacaaaccaggcagcaaatctagctacactgccagtgtgcccagcaactaataaagtcatacgcggtaaacatcactgaacatgactgggaaacacaagacgcccccgtccatgcggttagtggggtacaaaaactatggcttcacca

SEQ ID NO: 10942 - DNA, 273 bp, Zea mays
  Clone ID: LIB3156-019-Q1-K1-B2
gcggccgccctttttttttttttttttttttttttgagaacattcaggatccatagagaacgcaaaaagtcgctacactgtatgttttttgcctcaaaacggtctcaaggtaagcaaagtacaaaactatccaggcacccatgaggctcgaaaagaacaagcctgaaaatttgagccaaccggatggaaacacctctgtcctttccatacaacactagcacctataaggttgtgggacaccttaatataggcatgccatcatttgcaaaacgt

SEQ ID NO: 10943 - DNA, 329 bp, Zea mays
  unsure (1)..(329): unsure at all n locations; Clone ID: LIB3156-019-Q1-K1-B3
gcggccgcccctttttttttttttttttttttttttttttttttttttttttttttttttnnntttttttttttttgggttttttgttttttttttttttttttttttttttttttttttggggggaggggatttcccctccaggttttcccccccttgggggtcccttggcccctttttccctgttcccccccccggttctccctccccgtttttccttttaaaacccccctcccccccccaggggggggccccccgaagcctgcctttcccttaaggggggttgccccccagnccaacccctctttttggccctcccctttttcccc

SEQ ID NO: 10944 - DNA, 331 bp, Zea mays
  unsure (1)..(331): unsure at all n locations; Clone ID: LIB3156-019-Q1-K1-B5
gcggccgcccctttttttttttttttttttttttttttttttttttttttttttttnnttnnnaaaagagaacaccgggccttttaaaatttttttttggcccccaaaaaacccggggcataaaccccaccctttttaatttaaaaaaaaaaaaaaaaatccttttttaaccttttaacttggaggttaaaacccgattttcaaaatgcctaaaccaaaaaaatttccccctttaaaaccggaaatcaaaaaaaaatttgccccgctataaacccctttttttaaccaaaaaaaaaaccagcccccccaaaaaagtccctttttttacccc

SEQ ID NO: 10945 - DNA, 411 bp, Zea mays
  Clone ID: LIB3156-019-Q1-K1-B6
gcggccgcccttttttttttttttttttttcaatataataacatatatatcgcaacaacattttcttttcttgaacaagcacaaaagcttcaatataacaatatcgcgagatccacaatgacagtcatgacagaaacatctctccaggcccagggtagaaaagaaaatctagtagggaagggggcatagaacaacaagtgatgccctggtacagcacccaacgcaatacgaccacgagtttaacacgattttgctgctcctgcaacaagttcgtcgatgagattagcagcatcttccacagttgcgattgactgcgcgctcgactcctctacagtgatcttgaaagcctcctcaaggcccataacaatctcaacagtgtccaacgaatcagcaccgaggtcttgaaactta

SEQ ID NO: 10946 - DNA, 83 bp, Zea mays
  Clone ID: LIB3156-019-Q1-K1-B8
gcggccgcccctttttttttttttttttttttttgattcggggtaaattccaaaccaccacaattttcaaccatgtgctagca

SEQ ID NO: 10947 - DNA, 271 bp, Zea mays
  Clone ID: LIB3156-019-Q1-K1-C2
gcggccgcccttttttttttttttttttttttttttttttttttttttttttttttttgagcggggacaaatacttggtccaaatgttaacgtcaagccataaacaaatgccatgcaaataagggtgaaccttgaaaacaaatgttaaaacaaaccagactgggccacaacttgaacagggaccgggcaattttttttcgaggcaattttttgacaaaacttcactttagggccgaggaattacaaaaaaatcacttcagggcccaagggg

SEQ ID NO: 10948 - DNA, 230 bp, Zea mays
  Clone ID: LIB3156-019-Q1-K1-C3
cggccgcccttttttttttttttttttaaacctattaaaaggttaaaacgtttaatttggaacaatacttttttcgtttcatttgaattggtcatcaagtcatttgttacactgacactgccacccatggtgatgcgggacacattattactcaatcatggccgctaaatgactcaactagctagctagccagcggctatactacaacacataaattcttcaatggggga

SEQ ID NO: 10949 - DNA, 234 bp, Zea mays
  Clone ID: LIB3156-019-Q1-K1-C4
gcggccgcccttttttttttttttttttttttttttttttttttttttttttttttttttttttttttttttttttgtttttttttttttttttttttttttttaaaaaaaaaaaagggtccctttttttttgggagggttctttaaccctgtttaacccggggggggcggggtttcccttaaggggggttttttgttcttttccccccccccttaacccccctttttttcccc

SEQ ID NO: 10950 - DNA, 313 bp, Zea mays
  Clone ID: LIB3156-019-Q1-K1-C5
gcggccgcccttttttttttttttttttttttttttttagggcaagatgattctgggattggtttgtgaaacaatagccggattacataaaaacaagatgggacgctggttcttaatccaaaaaatgggggccttccttcatggggggagacgggtaatacaaccctgggaaagggttatttttcgactggcaagggacaactggaaccggtgggtggatcaatcattttaaccattcattttcaaagaggggtgaaggctttcaaccattccaaaaccctggtggggggtttaaatacccattccccttttt

SEQ ID NO: 10951 - DNA, 359 bp, Zea mays
  Clone ID: LIB3156-019-Q1-K1-C6
gcggccgcccttttttttttttttttttttttttttttttttttttttgaacagaaaacgacacatcaattgcccaattctcaaaaggatacaactgatggttttaattaaattccaggttaccaacaagacataaaatacacttcggtaccaactgatggatctcctttgatcacagtcacacagaagtgagaactaagttcacagctaagactcttagcgatacaagagatgcatttgtcgccacaaactcaatcaccatcatcttactcctcggactcagcctggccactttttttgttgcccttccttgagtacctcaagttcctaataaactttgggtccatccccttggtgga

SEQ ID NO: 10952 - DNA, 428 bp, Zea mays
  Clone ID: LIB3156-019-Q1-K1-C7
gcggccgctcgtttggggtccatgagttgagctcaatagtacggccagtgtaggtcctcggacctccgatgacaatcaggcagtcaccgcaggcccggaaagcaaggccccaaccattcattgacacagaccgttcaggcagttttccaagggtgatccacctgttgttcttcttgtcatacttcttgaggtcattctcgctgtaatcagcggcgtagagctcgttgctgacaactgcaataaggggaggagcaccagtcactccgttgaggccttcagacatgttctcgattatcctccaggaacgcctcttcaagtcatactcctccccacaagtcagcaatttgttgttgttagccacaccacctatcacatagaacttgccatccatgaaaaccccagaacacatcttccttgccctattcata

SEQ ID NO: 10953 - DNA, 198 bp, Zea mays
  Clone ID: LIB3156-019-Q1-K1-C8
gcggccgcccctttttttttttttttttttaaccgaaatttccaattccactggagataggtgaacaattcccaatctggcctttcaaaaaggccagtaggtcaaaaataccccaaatgggggatggtttggatgggggaggattcatcaaggaaggggccttttaaaaaaacaaaaacattggtgacatctgcagac

SEQ ID NO: 10954 - DNA, 296 bp, Zea mays
  unsure (1)..(296): unsure at all n locations; Clone ID: LIB3156-019-Q1-K1-D1
gcggccgccctnnnntnnnnnttttttttttttttttttaacaaaaccatattcttcattactactcatcaactcaaatgctgctgtggggctttattagcaccagcagcgtcagtacttcggacacactctttggtgcacatgcaagccccgagcttgcagaacccgccggtattgccctcgctcttgcacacggtgatgcagttctcgctctggtggcaccaccctttgaaggtcctgctacgcgtgacgcaaaggtcggcctcagcacccaaggccaggaggagcaaaaacat

SEQ ID NO: 10955 - DNA, 118 bp, Zea mays
  Clone ID: LIB3156-019-Q1-K1-D3
gcggccgccctttttttttttttttttaaattagggacaacgtttccactccttaaaatgatgaaaatacatcgataaccaagtaaagggctccctttaacataataagggcaaaatt

SEQ ID NO: 10956 - DNA, 287 bp, Zea mays
  Clone ID: LIB3156-019-Q1-K1-D4
gcggccgccctttttttttttttttttttttttttttttttttttttttgcctaagcgactaaacttcagtaactaaaggaaccaaacagagccttaaccaccaacacaagcaaagagtttcaatgtcttatccaaaactaaaaatcaaacctccaaaggagtcaaactggcaagtttttatacggggttcattgcttgttatacaaccagaaatgcatgttttaactggggagtcaacccggaacccctaccctgtagaataccacattcagagatggcgattttt

SEQ ID NO: 10957 - DNA, 416 bp, Zea mays
  Clone ID: LIB3156-019-Q1-K1-D5
gcggccgcccttttttttttttttttttttttttgcaattagcaaggaaaatgcatggatgtactagataaaccgttccagatggcagcagggacaagaacattgcggatctacactaaacatgatctagtctaactgcacggccgctaatggtaatattgttctaagacaggagatcactctacgccttcttgggggacttggcggccttcttgggctccttggccgccttctcggccaccttcttggggaggagcacagtgtggatgttggggaggacgccgccgtgggcgatggtgacgccggccagcagcttgccgagctcctcgtcgttgcggatggcgaagagcacgtggcgcgggatgatgcccgtcttcttgttgtcccttgccgcgttgccggcgagctcgagcacc

SEQ ID NO: 10958 - DNA, 395 bp, Zea mays
  Clone ID: LIB3156-019-Q1-K1-D6
gcggccgccctttttttttttttttttttgatgaacatttatcactgatttgaacaacacacttctggggtgacagaataaattggggagatatgtaacagcaaaacgaaacaaaattacaggacccattctcaaatcacaaatactcctggccgccgccgtctcgcgaccatgtcgccgaccacctcatcgagcagtgagctcagtacgtggctctccacctgctcaccggcctcgaactcctccacccggaaatcgacccatgtgcccagcccgccgctcatgtccttgtcgacgagctcgtcctccgtccagtctcccatgctcttccagctggttacctcactgcagacttgggcctccatgcccagcgtcgctgctcctttgctccatgc

SEQ ID NO: 10959 - DNA, 362 bp, Zea mays
  Clone ID: LIB3156-019-Q1-K1-D7
gcggccgccctttttttttttttttgaaagaaatttggtccattgaaataagggtccaagatacagatcataatcttttcgaaaacattgctaaagcacaaatggggacatgcttcctctggctctcaagggttgatgggaaactttccatgtttacttctcgtaaatccaggggtgctggctgctctgccaatcaacaaggccctcggggaaccacagggcaatctccttattagcactctcaatgctgtcacttccatgaatgacattcctgccaatgtcgacagcaaagtcgccacggatggtgccgggctcagaagccagggggttggtggcgccaatgatcttgcggccagttgtga

SEQ ID NO: 10960 - DNA, 317 bp, Zea mays
  Clone ID: LIB3156-019-Q1-K1-D8
gcggccgcccttttttttttttttttttttttattcataaacgacaaataacttgagcaaatcgcttacaaatgatgatcagataagtagagtcaacaagacaaaactgtatctggcaacgcacatcgcctcaccccagccgactacaccattattcttcagcaaaagcaaacagctccttccctcccccctcagctcaagcgataaccataagaaaacctgctacgcgactgcgtatatgataatgcatatgcatgcaaaagataactgacaggccagtgtagcgaacttcatagcacacaacggcccgagtgagc

SEQ ID NO: 10961 - DNA, 242 bp, Zea mays
  unsure (1)..(242): unsure at all n locations; Clone ID: LIB3156-019-Q1-K1-E1
nnnnnnntntttttttttttttttttaaaaattttttttttttttttttttttttttttttttgggttttttgggttttttttttttttgaaggaacgaaacccttttttttttttttccaaagggttttttttttcaaaaaaagcttttttaatttggagaaacaaatttttttgggggggtttttaatttaaattgggccccccaaatttttttgccccccgggttaattttttgcaaaa

SEQ ID NO: 10962 - DNA, 230 bp, Zea mays
  Clone ID: LIB3156-019-Q1-K1-E2
gcggccgcccttttttttttttttttgcagcaccaagaagcaccatttttttccttaggatttaacttaaaataaagcctgacgggggtaacagcacccatcgatcccgaatccatgctggttgatgcatgggtctgctggagcccaggatgaacacaacacttacaactggcacaaaacgacctttaatcaaaaacacagatgggcaacaacaaacacgagacgaacga

SEQ ID NO: 10963 - DNA, 242 bp, Zea mays
  Clone ID: LIB3156-019-Q1-K1-E3
cggccgcccttttttttttttttttttttttttttttttttttttttttttttttttttttttttttttttttttgggtgtttggggggaaagtcctttttttaaaacccccttgttatgcggggttcgggtttcaattttttttttaaaaaaaccgggcttggggttgccacaaggaggccttttttttggcccctcaaacaaattgccgcggatgagatccattttgggcgcccctttta

SEQ ID NO: 10964 - DNA, 58 bp, Zea mays
  Clone ID: LIB3156-019-Q1-K1-E4
gcggccgccctttttttttttttttgcaaaaaatttcctccacatttttttccatttt

SEQ ID NO: 10965 - DNA, 129 bp, Zea mays
  unsure (1)..(129): unsure at all n locations; Clone ID: LIB3156-019-Q1-K1-E5
gcggccgccctttttttttttttttggttacatgagcatattccatttgtcaaatattatatcttatacatnnttcgaggacaaatgtactgttcataatcatataaattaaattttcaagcctgggga

SEQ ID NO: 10966 - DNA, 325 bp, Zea mays
  Clone ID: LIB3156-019-Q1-K1-E6
ttttttttttttttaaaaaaatttttttctattttttattttttatattttttaggtttttagaggtttttttattataaaatttttatatattttaaaatttttggggccccccaacccctttttttttttggttttacaaaaaaaaacaatttttaaaaggcacccccaaaaaaaaaaaaaagtttttccccccctccgggggggccccactaagggaaaaaaaaaaagggggaaatttttagacaaaaaaaaactttggggggggaaaaaaaaaaaaaaatttccaaaaccccaaaaaagaggaaagggccttttccccctt

SEQ ID NO: 10967 - DNA, 335 bp, Zea mays
  unsure (1)..(335): unsure at all n locations; Clone ID: LIB3156-019-Q1-K1-E7
aggagcggccagcccttttttttttttttttttttttttttttttttttttttttttttttttttttttttttttttttttggttttttttttttttttttttttttttttttttttttttttttttttttttttttttttttttggggggggggggaaaaaaaaaaaaatttaaaatttgttttgaaaaaatttaaaaaaagggggggggggaaaaaaaaattaaaaattggttgggaaaaaaaaaaaaaagggtttatatttttttnngggaaaaaaaaagggggaaaaaaagaggaaaaaatttttggttttggggggggaagttttttggg

SEQ ID NO: 10968 - DNA, 428 bp, Zea mays
  unsure (1)..(428): unsure at all n locations; Clone ID: LIB3156-019-Q1-K1-E8
gcggccgccttggtcaccttggcgccggttgggtccttcttctccacactcttgatgactccaacagcaaccgtctgcctcatgtcgcggacggcaaacctacccaggggaggatacgcggagaatgtctccaccaccataggcttggtgggaatcatcttcaccataccagcatcaccgttcttcaagaacttgggctccttctcgagctccttgccagatcgcctgtcgatcttggtaatgagctcagcaaacttgacggcgatgtgggaggtgtggcagtccagcactggggcatagccgttgccaatctgcccagggtggttcatgatgatgacctgngaggtgaagctggcagcctccttggcagggtcatccttggagttggaggccacgaacccacgcttgagatccttgacagcaacgtt

SEQ ID NO: 10969 - DNA, 138 bp, Zea mays
  unsure (1)..(138): unsure at all n locations; Clone ID: LIB3156-019-Q1-K1-F1
gcggccgccccttttttttttttttttttttttttttttttttttttttttttttttttnntgggaccccttggtgggggtttaagggtccaaacttaccttccctttcatgccaccccatttttttttttttggagg

SEQ ID NO: 10970 - DNA, 126 bp, Zea mays
  unsure (1)..(126): unsure at all n locations; Clone ID: LIB3156-019-Q1-K1-F3
gcggccgcccttttttttttttttttttttttttttttttttttntttttttnttaaccgttcctggcattatttttcaaattttcccctggccgggtcattttttaattacttgggccccccaac

SEQ ID NO: 10971 - DNA, 255 bp, Zea mays
  Clone ID: LIB3156-019-Q1-K1-F4
gcggccgccctttttttttttttttttttttttttttttttggccaaaacatgaactgcataaaatgaataatacatgcagcaagagatgtggagcatcgatttaatcgaactcatattcgttaccaagtgctcaaaaccagggcctcataaatccacccaaaaaagatagaatatttcttagcgcagatagttgaaacaagatgcaaaaggacctaagcggtcagcaggacggcgcctccggcagccttgatct

SEQ ID NO: 10972 - DNA, 309 bp, Zea mays
  Clone ID: LIB3156-019-Q1-K1-F5
gcggccgcccttttttttttttttttttttttttttttttttttttttttttttttttttttttttttggttttttggggggaacaaaacattttattcaaatccccggggggttttttttgttccaaatttccgaattccagtctctttccccacagcagggaggaagtaaaagctttttccacgactcattttacaaaacacgggggcgagcctttccccaaaaatccatgtgcgggggggtaaaccttatcctttcagggctaccccaagggccgaaacaagattacccccaaaggtggcagaacc

SEQ ID NO: 10973 - DNA, 320 bp, Zea mays
  Clone ID: LIB3156-019-Q1-K1-F6
gcggccgcccttttttttttttttttttagaggccaaagagtgaactgactggattaagaggctcacggcgacacatggacccgtcaaaatatgagccattaatgctcaaccaaccactatgattcacccaacattgtttcagacattccgaaggaaaaaaatgtattctcggaagcactcttcttcgggggggaagaagacaactcactcgtatcaccagaccttgagttcttcatgtcagttgagactgctcatgtggcggatcatgtccaccacgcgggtgctgtaataccactcgctggtgcaccatgacacgagc

SEQ ID NO: 10974 - DNA, 176 bp, Zea mays
  Clone ID: LIB3156-019-Q1-K1-F7
ttttttttttttttttttttttttttttttaattttttttttaaattttttttttgttttttggggtttttttaatttttaataaaaaaaaaaagctcataatttttataaaaaaaattttaaaaaaggggataaaaaaagaaaaaaatggataaaggaaaaaggggatttaaggg

SEQ ID NO: 10975 - DNA, 235 bp, Zea mays
  Clone ID: LIB3156-019-Q1-K1-F8
gcggccgcccttttttttttttttttttttttttttatttttggactttcttgatttagttttaaacggggacacagggacctataaaaactgagatacaaatcctcagccaaaaactaagtttcatacaacagagaggacgaattgccgcaggaaaacaaaagatttctaaaaccctcttctccacaaaggtatacaacaagcccctggtgtcacctgaccaagagttccccac

SEQ ID NO: 10976 - DNA, 191 bp, Zea mays
  Clone ID: LIB3156-019-Q1-K1-G1
gcggccgcccttttttttttttttttaccaaacaacatctcggccagacaaccaaaccagcatccaattaccatacttgtggtccttttgcccgcacatgttcaaaagaaaaaaaaggctcccttttttttgcaaaaaggtcttgaacccggatgaaccaaggcgagacgggctggccctaaacggggcat

SEQ ID NO: 10977 - DNA, 288 bp, Zea mays
  Clone ID: LIB3156-019-Q1-K1-G2
gcggccgccctttttttttttttttcgacctaacttattccatttatttaccggaccccgagaggcattttcgcgggccaaattggtccatcaaaaaaaggtggcccctaccccaggaaccagaaaagtttttaattccttaacctgggccaattaattggccagaagtggcccattccttttttccaggaaggaaggaaggaaaaggaccgggggccttacattccctgccaagcaagggctaatgggattattcgatggggggctatatatacgggggggttgggg

SEQ ID NO: 10978 - DNA, 291 bp, Zea mays
  Clone ID: LIB3156-019-Q1-K1-G3
gcggccgcccgtctttgacacactttgaggctgagcgatggctagactgcatgaaaactttgcttaaagctatacatggggctccattaaattacttgttacggtttaatgtaggagtgtcaatgcagaaattctcagcttcaaccctgcaaaagacaaaacaaacagttgatgaggttcgcgccccaatcactgaacttcaaaatgccattagagctttcagtccgttatctggtgcatcaacgggccactcccatgggtttgatgagaggaaaatagaaactcatgttg

SEQ ID NO: 10979 - DNA, 267 bp, Zea mays
  Clone ID: LIB3156-019-Q1-K1-G4
gcggccgccctttttttttttttttgatgataccagttcctggtatttactaccagacctctatttataattaatggatctgcacaagatatttactaccatagcataggaacagttcgctgtcctgatccatactggaagcaacatctaaaaaactggaggacatttgcgtcatgtgaaaagatgagctcacactaaaagagattgtctgctggatactggtgtcaggactagttacattggaaaatgtccattccacatactatg

SEQ ID NO: 10980 - DNA, 211 bp, Zea mays
  Clone ID: LIB3156-019-Q1-K1-G5
gcggccgcccttttttttttttttttttttttttttttgaaataaggtaacaatgtcataggttcggtatcaagaacaaaacatcaagttcaagaccaagtttgtaactagataatccatagttgctcaaaaaaatggatgggggggaaaatggcaagggtccaagcactcgagtctcctggaaattcttagcccaattggaaaatttaaa

SEQ ID NO: 10981 - DNA, 196 bp, Zea mays
  Clone ID: LIB3156-019-Q1-K1-G6
gcggccgcccttttttttttttttttttttttttttttttttttttttttttttttttttttttggtttttggtttttttttttttttttttttttttttttttttttttttttttttttttttttataattttttagtaatatgtatgtgttattatttggagtttttgggattttaaggataattggaaaattt

SEQ ID NO: 10982 - DNA, 148 bp, Zea mays
  unsure (1)..(148): unsure at all n locations; Clone ID: LIB3156-019-Q1-K1-G7
tttttttttttttttttttttttttttttttttttttttnnnnnnnnnatnnaggggggttacgcaantttgcaaaattacccggggggtttacaaaaccagcacaagttccccccttacatttaacaacaactactggaaccccccc

SEQ ID NO: 10983 - DNA, 267 bp, Zea mays
  Clone ID: LIB3156-019-Q1-K1-G8
ttttttttttttttttttttttttttttttttttttttttttttttttttttgggttttttggtaattttttttttttttttatttttataaaaatatatttttttttttttttttattttttttttttttttaaaaaaaaaaaaaaaaaaatttttatgtgattttaaaacaaaaaaaaattgtgaaaaaaaaactgtttttgtttggaaaattttttaaaaaaaaaaaaaagaatataaaatggttttaaaaaagggtttttttt

SEQ ID NO: 10984 - DNA, 172 bp, Zea mays
  Clone ID: LIB3156-019-Q1-K1-H2
gcggccgcccctttttttttttttttttttttttttttttttttttttttttttttttttttgggaaatttgggggggaccgcaagaaaatatctggtcccaaaaccacaatttccgaagggttgttttttttgccaaaagaacattttagttgggttggtttttttatttt

SEQ ID NO: 10985 - DNA, 217 bp, Zea mays
  Clone ID: LIB3156-019-Q1-K1-H3
gcggccgcccttttttttttttttttttttttttttttttttttttttttttttttttttttttttttttttttttggttttttttttttttttttttttttttttcttttttttatttttttttttttttttttttttttttactgtttttaacatttttttttaataaaaaaaactttttttgtttgctttttttgcgctttgatgcaaaaataa

SEQ ID NO: 10986 - DNA, 382 bp, Zea mays
  Clone ID: LIB3156-019-Q1-K1-H6
gcggccgccctttttttttttttttttttttttttttttttttttttttttttttttttttttttttggtttttcccaaaaaataatactggcgggttccaaaaaatatttctgacagatcaagagacccctgggacaggtcacacaacaaacccccttggttttgcaatactttgcatcacatagcatgttttcatccaagcgggttcattttaattttttttataaatattccgggatccaaacatccgggcattcttttaagaggggaatcataaaacatgctctggaacaagaggggcaatctaagcttggggggaatcagttcccctttggggcacccttttttgcagcctggggaggggttttttttgttttattt

SEQ ID NO: 10987 - DNA, 339 bp, Zea mays
  unsure (1)..(339): unsure at all n locations; Clone ID: LIB3156-019-Q1-K1-H7
gcggccgcccttttttttttttttttttttgacaactaaaacaaaataaaatattgaagtcgctgctattacagtagacgaattgatgattaaaccggcagatgaaacagtatcaccaacagccaaaaattttagagcttgtcctcaaactcagaaaagagggtcatctgttccttgagacccttcctcttgcggatatccagcaccagctgagcagcctgggagccggcctccaaaggatctgagcccatcatgtcccaatggtcaaagacacactgggggaacgcctgaccagaggttgcggccctcagntggctggagaaaccaaaggactcgatg

SEQ ID NO: 10988 - DNA, 232 bp, Zea mays
  Clone ID: LIB3156-019-Q1-K1-H8
gcggccgcccttttttttttttttttttttttttttttttttttttttttttttttttttttttgagccctcaatgggaatttttaacatcaacacttgcatagttaccacaggaaggacaagttattttattacccaaggcaaatgggggggtaatggtggactaaaactcggatcctaaaaatggatcggagaatgcccaaggaacaaaaaaacattcgtccccgataac

SEQ ID NO: 10989 - DNA, 294 bp, Zea mays
  Clone ID: LIB3156-020-Q1-K1-A10
cgcgagtggccgccctttttttttttttttttttttttttgttttttttttttcatcttcaaccaggctcaaattgattttttcaggtacaaagatgcatcggtcgccatgatcgcagatttgctgcactagcaattttatctctcaatggcagacaactgtttggccagccgattaaagtcaattgggcatatacaagtcctccgagggagggcacatcaggtcattttaatatttttgttggggatctttgcccggaagccactgatgctactttgtttgcatttttctctg

SEQ ID NO: 10990 - DNA, 295 bp, Zea mays
  unsure (1)..(295): unsure at all n locations; Clone ID: LIB3156-020-Q1-K1-E11
aggtcgagccgcggcgcaatggnctcctctgctgttcagggacatgaaggggctctcgtgctcgtcccaggcgtccacggcgacatgcccgagcctggagcggcacccgacgccccgcccacacaaggccagcgccggcgccagccccctgcctcccgttcctgctgccgagcccaggaccaggacgcaccggcttgacggcaagaaagggcagccgccgcagcacaaggctgccgtggtccccgcgaacgccggtggtggcctcgtcagccccgccggctcgtccaggtacctg

SEQ ID NO: 10991 - DNA, 382 bp, Zea mays
  Clone ID: LIB3156-020-Q1-K1-F1
cggacgcgtgggtctagatcgcgagggccgccctttttttttttttttggtcgagaggcgtagacttggttcgcttgatgattattacttgttgcgctcttccgtatttgatgctgggatgtgatggaagaatcattggtccgtgttttctgatcaatcattgatgtgtaaaacactccataattctgatccctgacagttgcgtaatctgactgttgtccgtttaatgtctgctactgtagtttcacatgatactgtctgtagaatctaagcatttgctatgaaagtgggtgaactgattcttgtttcatttgattgcagtggaagaagaagaggatgcggaggctcaagaggaagcgccggaaaatgaggcagagatcta

SEQ ID NO: 10992 - DNA, 52 bp, Zea mays
  Clone ID: LIB3156-020-Q1-K1-G5
ggccagcccttagttttttttttatttttcttactttcttctttctttcctt

SEQ ID NO: 10993 - DNA, 399 bp, Zea mays
  Clone ID: LIB3156-021-Q1-K1-A3
ccttcggcctcgccggcggcacagtgcagcgcagcgcttccactgttgggtgtggtggatttcctccgcccccgaacgatcgatcttttgcatggcagcagcggctagctccaaggggcgggcgatcgctgggagcttcgtcagccgcgtcctggccggcaaggccgcctccccgaggagggccgtgcacgcctcgtcgtacgacaagaacccggaggagcaggtgcgcccggcgttcgtgccggacgatgtgatcggcggcgcggggagccccgacaagtactggagcccccaccccaagaccggcgtgttcggcccggcggcggtggaccccaatcagctgggcgtcgccgctgacgctgccgccgcgaatgcagcagcagcaggaggcacggtgct

SEQ ID NO: 10994 - DNA, 286 bp, Zea mays
  Clone ID: LIB3156-021-Q1-K1-B10
atttgagaatttttttgtatttttttttgccgtggtggagtggaagtgaacaggagagaggttcagggcagcagggaatggctgtgtatagctttgactgattggatgagattgaaatgaaatgaaatggagaagatactgttccttgacaaaaaaaaaaaaaaaataaaaaaaaaaaaataaaaaattaaaaaaaaaaaaaaaaataataaaaataacataaaaaaaaaatgaaccgacaatatatcttaaaaaaaaataaaaaagggcggcctttttaaaggat

SEQ ID NO: 10995 - DNA, 457 bp, Zea mays
  Clone ID: LIB3156-021-Q1-K1-B5
tcgaacaccttaaaagggggtgggaccttttggttccttgtttccggagtccgcaatggatgggatcttctttgtcaagtcggacgtgttcagctatggagtactattgctggagatcgttagtggcaggaggaacaggggagtgtattccagttcaaacaaccaaagccttctaagccatgcatggagcttgtggaaccaaggagaagagcatagagctagcagatgagagaatgaacggacaattcaactcagacgaagtgcagaagtgcgtcaaggttgggctactgtgcgtgcaagagaatccagacgaccgtccgctgatgtctcaagtgcttctgatgttagctagtcctgatgccgcatcactgccgactcctaagcaacctggcttcgcagctaggagagttctaatggaaacagacacatcatcgaccaagcccgactgcagcgtgtt

SEQ ID NO: 10996 - DNA, 449 bp, Zea mays
  unsure (1)..(449): unsure at all n locations; Clone ID: LIB3156-021-Q1-K1-B6
cttccgcaaaggcggggcaggcgaggaagcaggacaagcagaggaaagcgcagcagcagctgctggagccgaggcagggccagggcgtggcgagtggcgccgcggccgaggaggaggacgacgacgacgaggcagccttggacgccagccttgatcagttggcgcggcaggacaacggcagccggagctccagtgcgcggcaccggcaatggcggccgtcgctgcagagcatcgacgaggccacgacctgagatgtcagctccatacagccgtagcgccgtaatcattgactaccggtgggcctgtactttcggtgatcacctggcctcggccagttcatcgcaagggttgctatttggcctactgctacgattgcacactgtggactgtggagtgagttgggagcttgacacccncggatgagagggcactgcttcngatgcagcatg

SEQ ID NO: 10997 - DNA, 416 bp, Zea mays
  unsure (1)..(416): unsure at all n locations; Clone ID: LIB3156-021-Q1-K1-C1
cttcgcagagacctttgacttaattggtcctggatgaacccaaaaatgtcctggtggagtttaatgccccatggtgtggtcactgcaagcatcttgctccgatttatgagaagctggcttcagttttcaagcaggacgacggtgttgtgattgccaatattgatgctgacaagcacactgacttggctgaaaaatatggtgtttctggtttccctacattgaagttcttccctaagggaaacaaagccggggaagattatgatggttggccgggacttggatgactntgtcaagttcattaatgagaagtgtggcaccagccgggatccanagggccacctgaatcaagaagctgggcttgtgccaagcttgaatcctcttgtgaaggagtttctcaatgctgctgatgacaagcg

SEQ ID NO: 10998 - DNA, 419 bp, Zea mays
  unsure (1)..(419): unsure at all n locations; Clone ID: LIB3156-021-Q1-K1-C3
gaaaacagggggagaacgaagcagcagcagcagcgccatccgctcgcttccttccccccacgggcagcgtcgactctccgtgtgcgcgccccgccgggggtggcgtcactgcacccttgggcagcgggcgcgtacctacctacgtgcggngggagccacacgcctccctctcgcctcttggcatggacgccggcggagagaagtgcggcgactcggcggcggaaggcggggagggtggcggagacctctacgcggttctcgggctcaagaaggagtgctccgacgccgagcttaaggtcgcttaccggaagctcgccaagaaatggcacccggacaaatgctcgtnctccagcaacgtgaagcacatggaggaagccaatgagaagttccaagagatccagggcgcctatttcgtactc

SEQ ID NO: 10999 - DNA, 185 bp, Zea mays
  Clone ID: LIB3156-021-Q1-K1-C4
cccttccgcggccccgtgggttgaaaatgtgtttttttgagccacagatgcgtccaagaactcgtctgatgttttgaggtttgttaagactgggtgtctgagcctttgcggtttgttaagacagcgatgtgtcatgtatttcagaaattgggatttttatgagatgtacctgctagagccctgtc

SEQ ID NO: 11000 - DNA, 389 bp, Zea mays
  Clone ID: LIB3156-021-Q1-K1-C5
aaaaaaattaaagggaggaatgtgctgccaacaatgctctccgcttggacgatcctgctctggagtccgggtcaggtcagcttagcagagacaaccggtggcgcattcagggagtatatcgacacgtttgacggctacaccttcctgtacccgaagaattggatccaggtccgtggagctggcgcggacatattcttcagagaccccatggtcctcgacgagaacatgtcagtggagatatcgtcgccttcgtcgtccaggtacacgagcgtcgaggacctcggaccaccggaaaaagctgcagagaatgtcctcggtcagtacctgacggagttcatgttcaccaagcttggcggttcggcgtgaatccaacgtcttatcggcgtcat

SEQ ID NO: 11001 - DNA, 438 bp, Zea mays
  Clone ID: LIB3156-021-Q1-K1-C6
cttcgatgccatcaccaaaacctttggtggaacctttggggatgactttcttctctgtgttggacgtgcctgtcttctggcctatactcctctgctactgggttgttctctttgtccttacaatgaagcgccagattgtgcatatgatcaaaatacaaatatgtgcctttcagtatcgggaaacagaaatacggtgtgaagaagagtgtcgcaagcaccagttcctcgaaagactgattatgagtctacctcagtaggaacttggcaggggaacaaggtacggtggatgatgatgtgctaaatacctaagtgtaatactccattcatatctagatgtagacggatattcgctcctgtttcttactctgggctcactgtttaattcgatattgtgcttagattgctccctcctatgcttgtatagcgaattccgcatct

SEQ ID NO: 11002 - DNA, 317 bp, Zea mays
  Clone ID: LIB3156-021-Q1-K1-D12
gtgttgggctatatgtatatcgatcgatgggcggaggatatgtacgtatcttgttttgatacccgcggccggggccctcctagaggcgtactgtatgattgattatgcgggccttctacaactactactggtgttgagatatatatatatctctacaccggtcgcagttgtaaatggaaatcgatcgatgggcggaggatatgtacgtatcttgttttgatacccgcggccggggccctcctagaggcgtactgtatgattgattatgcgggccttctacaactactactggtgttgggctatatgtatatctctac

SEQ ID NO: 11003 - DNA, 321 bp, Zea mays
  unsure (1)..(321): unsure at all n locations; Clone ID: LIB3156-021-Q1-K1-D3
cttcggcacttgacaaaaggggtgggggaggcgttctttgcttcgtctcccttggttggcgtgcgtgcgtgtgtgtgtgaaagtgagaaggtgagcttactttagacatggattagccatggtgcgtgtgttgtttgttaacctggactgctgctccgtggagtggagtagattgcctaagggggtgtttggtttctagggactaatgtttagtcccttcattttattcctttttagtgtataaattgctaaatatagaaactaaaataaagttttagtttctatatttggtacgagtnanananannnnnnnnnnnnnna

SEQ ID NO: 11004 - DNA, 274 bp, Zea mays
  Clone ID: LIB3156-021-Q1-K1-D4
cttccgctggcccgaccggacttgaccgcccttaagtccaggggctgtgctggcgcgtcaaagccgtagtgttcagtgttccatagataataagataaatccatgaataagtgtccctacccttgatcatgtgacagggacagggacagtttcctgtacttgtggggtgaatttgtacgtgtgatacggtaactgggtccgtgtactgtttatgctacgttttccttcctaaaagtacgtatatatatacagcacttgcgagtggctttacttg

SEQ ID NO: 11005 - DNA, 440 bp, Zea mays
  Clone ID: LIB3156-021-Q1-K1-D5
agccttccgagaattggaaccgctttggttccggatttcgtaaagttagaagaaaatgaaaagtacgccgaacgagaggatgagtttgacttgaatccacgtgaagaacaggctgagaaagtagtgatagatgaggatgctgatgttgatatcgagacatctgagaagaatacagtgttcagtgatgtggaggattctgtggatgagatctcctacttaccagcaattccttacccagattctcctgatgagcagccagagaaatgccttggaagttcaaagttggaggatagcaaccattctggttccccatcctcaatggatgctgtacagaatggacaagccattcctccagcatcaagcccaatggaagttgacaactctactgctgaagacccagaagaagggccaaactcaaagcggaagcggcggctgtcagt

SEQ ID NO: 11006 - DNA, 454 bp, Zea mays
  Clone ID: LIB3156-021-Q1-K1-D6
cccgtccggagaactccggcggtcgaccaggaggcagccgccgaggaggaggctgctgctgctcctcctgctggtgccgaggagcccgccgcggccgagcctgtcgccgaggcagaggctgctgctcccgaggagctcgccgcggacgagccggaggctcctgctcctgctcctgctggtccccaggagccggccgccgaggcggaggctgctgctcctgaggagcccgagaaggccagcgagtgaggccgtgcgcacgcagcggcggcggccagggcccaggccccaggggatcggcgtgcgcgcgtggcggggtagtctctcgcgcgcgtacatggcagtatgacacgggattttgctgttcagtacgctacggttactggcgtctctctgtgtgtgtgtgtgtgtgtgtcgtacgtagcccggtacgtagctagcagtgactgtcgcgtgg

SEQ ID NO: 11007 - DNA, 398 bp, Zea mays
  Clone ID: LIB3156-021-Q1-K1-E1
gagaactttcttaacggaaaacttgaaacccttaccaactgaccttacagaagatggtgctggggacggccatcaagcctggtgaggcaaagcatgtggctgactatgacttcacggaaaaacgcatgtggtgaccctccacagaatcttatgctttatacacacaaagatgcagctgatcatcgctatcattcgtacttaatttatgtgccctgactagtttttgtatatttacaggctggtagtgttcgaattaatttcccagcaagtgaaactgtcgaaggaaaactacaaggctgacagtcgaacgcgtgggagatagcttaattgtgccttatgataagcaggcatgctttcctggtttatttcatacagctactagtagtttcagctgcaac

SEQ ID NO: 11008 - DNA, 437 bp, Zea mays
  Clone ID: LIB3156-021-Q1-K1-E3
cccttccgttcgcttggattcggctttcccacacccctctgccccaacccagaaaaaccctcgaaaagcggcggcggcgcgacatggcggaggtcgaggctccagctgctgcggttgcggcggcgacccctgaggtggcgacggtgaccgagggcggagccgctacggaggcgaagggtccgcataagctgcaccgccagtggaccttctggtacgacatccagtccaagcccaagcccggcgctgcgtggggcacctccctcaaaaaggcgtacaccttcgacaccgtcgaggagttttggggcttgtatgatcatgttttccgtccaagcaagttgcctggaactgctgattttcacctattcaaggctggagtagagccaaaatgggaagacccagagtgtgcaaatggtggtaaatggactgtcccatgcaac

SEQ ID NO: 11009 - DNA, 396 bp, Zea mays
  unsure (1)..(396): unsure at all n locations; Clone ID: LIB3156-021-Q1-K1-E4
cttcggcttggccgaacccgggtcgggttttgtatcggtgatgagccgacaagctggagcacttaatgtttttttatgctgtctagtttttgaacttgcgttgagtcgagaaaacaaaatagaacttttgtagccgaggggtgacctttttcccttgtggccattcttttccctgtcgtggtgggtggtgggctgtggctgatgcttctttctgcacactttttttttttgcttgggctgggggcgttggtgtaatctggtgaataagcgagtgcgtccagtgcaatgggagctcangactcttttgttcaaatccgccttgtttcgtcgttgtctgttctgtgttctatatgaatattgtcgtgtgggaaatacatgcgtggctcatgattcatg

SEQ ID NO: 11010 - DNA, 451 bp, Zea mays
  Clone ID: LIB3156-021-Q1-K1-E5
acccttccggttaacgttattggcctaatgaatgagtttgcatctcagccgaatgacttcttcgcagacgccacttcacagattaatgcctatgtgcaaggtgctaaggtggacgggatcatcactgatttccctgggactgctcacagatacaaattgaactcctgcacgagcatgggaaacagcgcaccacaatttatgcagcctccgcaaccaggtagcctccttttaaccatggccccagatgcacagccaccagcagcggcgccaatgccgctcttgacggacgatgacgttgcagaaccagccctacctccagtcagtaacaccaccacagctgcatctccttcgcatgccgccctcagaatgcgaaccgatgtctcgatcctcatcgcaatgctgatgctatgtgcttccctcatctgaaggtagtcctgcacaacatcatatg

SEQ ID NO: 11011 - DNA, 446 bp, Zea mays
  Clone ID: LIB3156-021-Q1-K1-E6
gcctgacgtccgtctccaactcgactactatactaccgccgcgctctgctcctgcaccagccgggtcagctgaactgagcatcatatcatggagggaggagccgttcccaagccatcggagaagagggtggccctcgtcacgggcgggaaccggggcatggggttcgagatatgccggcagctggcgtccagcggcctcaccgtcgtcctcaccgcgcggagcgagacgcggggcgccgaggcggcccgcgagcttcacggcttcggcctgcctgacgtcgtgtcccaccagctggacgtcacggagcccaccagcgctgctcgtctggctgatttcgtcaggaccaagttcggcaagctcgatgtgttggtcaacaacgcgggaatcatgggggtgacgatggaggttggcgacgacgaggcagccgtcaaagaaatgatggtag

SEQ ID NO: 11012 - DNA, 413 bp, Zea mays
  unsure (1)..(413): unsure at all n locations; Clone ID: LIB3156-021-Q1-K1-F1
cgtcggtttggttccggccgaaaaaccagctgtccccgccaccgtttcccctaccgccgaagaagcaggagcaccatcacccgccaccgcctctgcccacacttccgccgaagaagcggctggcgtcaccgcctctgctgcctggaagcgagaagcagtgggtcatctcctccccgtcggagccgcggttcgtgccgctgccggtgtgggctctgatgtccggctccgggaagcgcaagaagcggtcaggctgcggcgggcgcgtncccgcccttcacaccccagccgccgncgaggagaccgggcgcgcctgagaggccgagacgatagacgacaccctccctgttactggtatccatcccctgctccttgatcatgccaatctgatgaccgctcagtcgatcgatgctaat

SEQ ID NO: 11013 - DNA, 420 bp, Zea mays
  Clone ID: LIB3156-021-Q1-K1-F10
tcgaatccgcaaactaaccccaaaccccaatccgggccatcccctcctcatccactccgggcggccatggcctgctccttctccgccgccatcaccgtctcttccgcccctaccccggccgccagacccctcgctgctgccacgcagtccgtctgcatcgctcgctccgcggtcgccaccactgccaggccgctccgcctcgccgcctcaaggtccgcgcgggctaccagactcgttgcccgcgccagcgtagtcgatgacttgccgctggtcgggaacaaggcgccagacttcgaagccgaggctgtgttcgaccaggagttcatcaacgtgaagctctctgattacattgggaagaagtacgtcattctgttcttctaccccttggatttcaccttcgtctgcccgaccgagattact

SEQ ID NO: 11014 - DNA, 388 bp, Zea mays
  unsure (1)..(388): unsure at all n locations; Clone ID: LIB3156-021-Q1-K1-F6
ttccaattgaccaaaaatgcactaaccttttgataattccatctgaatgcagtgcaagatctgcatgcagaccttcatctgcaccacctccgaggccaagtgcaaagaacatgcggaggcgaggcatcccaagaacgacctctaccagtgcttcccccacctcaagaactagtaagcagcagaagcatatgctctgctcagctaaaagacaagtactacatatatatatatacgctgtgtgtcaattaatgggttctaggctgctgctgatgcagctgcttcattcgtgttgccccgtctgattatgtactgtaacccttggctgtcagcctgctgtgctaaaaaccattggttctgtgtggattcatgctnaccaaaaaaacaaatt

SEQ ID NO: 11015 - DNA, 143 bp, Zea mays
  Clone ID: LIB3156-021-Q1-K1-G12
aagaccagcacgcatgcatgggcatactctatatatatatatgtatagcccgtgcccgtgccccgcctttgtaccaatacaagccaaaccaagtggatgtgtattattattgcgctatcacatacatgtacccctgctacctg

SEQ ID NO: 11016 - DNA, 362 bp, Zea mays
  Clone ID: LIB3156-021-Q1-K1-G2
aaaaaaaaaaaaggaaaaaagataaaacttttttgatattgccgaggccattacgatagtcgggggggtctatagataagctgtaaaagaacattgtcctaaatgactcgctgtccgatatgctgactgacattttgacatcttcgccgcctccaaggccacggagtcgatatacgtgcaggccgccgagatcaggtcgcggttggccgatgccgtgcgtgggatactctcggagttcgagaacgccgtgctccgcgacccatccaagactccagtgcccggcggcaccatccacccgctcactcgctatgttatgaattacatcagccttatttcggactacaaggccaccctttttgagc

SEQ ID NO: 11017 - DNA, 123 bp, Zea mays
  Clone ID: LIB3156-021-Q1-K1-G5
agccttccggtgggaacccgtaattaatggggtcggttaaatgttagaatttgcttgtagtttgtaagcgtgatacatgtactctgagccgcttgatgcaatgatgctgtttcattttctgtg

SEQ ID NO: 11018 - DNA, 142 bp, Zea mays
  Clone ID: LIB3156-001-F3-F1B
tttaatttttttatttttttcttcttttttttttttttgtttttttttttttttttttttttttgttttttttattttttgcgaaagcgtggggagacccggggaatcagggacggaaccaggagggggaagaccgggaccg

SEQ ID NO: 11019 - DNA, 498 bp, Zea mays
  Clone ID: LIB3156-002-A12-F1B
aaaacccattggggaaaattttaaaaaaagggggcggggggggaggggggtttaaggggttggggcccaaatttaaaaaagggcccgggttaaagcccccccgggggggggcccaacaagggggaaataaacccctttccccggaagggggagggggggggggaaaaaaaggaaaagccacggccaaacaaaaagggggttcccccaaaaaaaaaaccccccccccctttttttacccccccccccaaacccggaaaggcggggggggcccaggggcccacccccctggggcaaaaaaaaagcaaaggggccgggcagaaaaaccccccaaaggggggggggtaaaaaccccaggaaaaaaaaggcagggggggggccaaaaatcttttccttcccgggggggaaaggcttcggggggcaggaaaggggggcatagggggttcaagggggggcccccgggtcccggcttgccagaggggggggaaaaacccgggcccc

SEQ ID NO: 11020 - DNA, 503 bp, Zea mays
  Clone ID: LIB3156-013-H7-F1B
gcaggcgaccttctcgatctataacctcgtttgatctttctctacatgttcctgctggattacatgatctggtagcaagggagagagaaaaaaaatcttttgcatgcatgatcgatgatcgatggcgagaagaagaaactgcttgatgggcagacctggacctggacttcgatctactgaagctatgtacaccgttgctctgcagggctagctgacgagtgacgagaccgctacgaacgaactcgtattggcccggccagttacgtgtgcttggaacccgagtgacccccggccgcttgtgatcatcgtacgtcactcgctgagggactccaactcccaccattgcgagccgctgcaggtctgctccgccgacgacgacggccagcagcagccggagtggaactggaacggctggtgctccggcggccccgacgacgtgagtaagccagcagtcggctgcggagacgacggcggccgaaaaggggctgctcccacgtcgtcgt

SEQ ID NO: 11021 - DNA, 592 bp, Zea mays
  Clone ID: LIB3156-013-H7-R1B
tggaagtccaagcagctggagcgcgagtactcggcgctgcgcgacgactaccacgcgctcctctgcagctacgagtccctcaaggacgacaagcgcgcgctcctcaagcagctggagaagctggccgagatgctgcacgagccgccgcagggcaagtactacggcggcaatgcggacgacgtgcgctcgggcggcgtcggcggcacgaaggaggaggaggagtccacagacgcctgcgccggggccgcgctctactcgtccgagtgcgctggcggtggcaggttcatcgcgcacttcttggcggacgacgacgtgggagcagccctcttccggccgccgtcgtctccgcagccgaccgctggcttactcacgtcgtcggggccgccggagcaccagccgttccagttccactccggctgctgctggccgtcgtcgtcggcggacagacctgcagcggctcgcaatggtgggagttggagtccctcagcgagtgacgtacgatgatcacaagcggccgggggtcactcggttccaagcacacgtaactggccgggccaatacgagttcgttcgtagcggtctcgtcactcgtc

SEQ ID NO: 11022 - DNA, 121 bp, Zea mays
  Clone ID: LIB3156-001-F3-F2B
aggggattgggggtgaaacgggaaacaggggcgggggccggaaggggaaccacggaaccggaaagggaagcgaataaaagtagggggaagaaaggggaagaaaagggtcgggggggaaagg

SEQ ID NO: 11023 - DNA, 523 bp, Zea mays
  Clone ID: LIB3156-002-A12-F2B
ggttccgtgccttcgccgggggggggggttgcccaacggggggccccgggggggggggtgttttgggggttgcgccccctttttacaaaggggccccgggggggggccccctgggggggggcctcccacgggggaagagccccccttctctcggggggggggggggggggggctttcttggagacgcgccccgcccccccttccgggggggccccccgtattggctcccccccccctttttttcccccttcccccccccctcggggggggggggggggccctgggcgcaccccctttgccaccaaaaggccgcccggggcggggggaagggggccctccccgtgggggggggggaaccccctcgggaccccgcggggggggggggggggcccccgttttttttctcccgggggggccgggctttgggggccccgcgcgggggcccctccgggggtcccccggggggggggggggggggggttttggcctcgggtcgggcgggccggcaattattttggggggg

SEQ ID NO: 11024 - DNA, 698 bp, Zea mays
  Clone ID: LIB3156-002-A12-F3A
gcggggagagatatatatataggagaaacaactgtatagtttggctgtagcttttctatatatacacacacgcactaccctttcagtagaaagtggttaatttacctatgttagagcatctccaagagaggctctaaacatggtcctattttaaatatagggctcaaaaccataaaacatccttccaacagcggccctattttataaaatttcatcaaatggttataaaaaaaaaaaaaaaaaaaaaaaaaaaaaaaaaaaaaaaaaaaaaaaaaaaaaaaaaaaaaaaaaaaaaaaaaaaaaaaaaaaaaaaaaaaaaaaaaaaaaaaaaaaaggggggggcctttttaaggaaccaaattttacttcccggggctggcaaaataaaaattttttttaggggcccccaaattaaaattccggggcggtggttaaaaaacttggagcggggaaaacccctgggttacccaaaataatgcccttggggcaaatcccccttttgccaggtggggaaattaaaaaaaaggcccccccgatccccctttcaaaaaagtgccccaccctaatgggaaaagggaccccccctttaccggggcaataaaccgcggggggtgggggggtttccccccaggtggccccttacattggacggcgcctaagcccccgttcttttggttttttttccttttttttttttg

SEQ ID NO: 11025 - DNA, 563 bp, Zea mays
  Clone ID: LIB3156-013-H7-R2B
tggaagtccaagcagctggagcgcgagtactcggcgctgcgcgacgactaccacgcgctcctctgcagctacgagtccctcaaggacgacaagcgcgcgctcctcaagcagctggagaagctggccgagatgctgcacgagccgccgcagggcaagtactacggcggcaatgcggacgacgtgcgctcgggcggcgtcggcggcacgaaggaggaggaggagtccacagacgcctgcgccggggccgcgctctactcgtccgagtgcgctggcggtggcaggttcatcgcgcacttcttggcggacgacgacgtgggagcagccctcttccggccgccgtcgtctccgcagccgaccgctggcttactcacgtcgtcggggccgccggagcaccagccgttccagttccactccggctgctgctggccgtcgtcgtcggcggagcagacctgcagcggctcgcaatggtgggagttggagtccctcagcgagtgacgtacgatgatcacaagcggccgggggtcactcggttccaagcacacgtaactggccgggccaatacg

SEQ ID NO: 11026 - DNA, 363 bp, Zea mays
  Clone ID: LIB3156-001-Q1-K1-H9-F2B
gatacgaaaacaatattttactcagcatcacgtcaattcaggaacaggggtaccaatatgtcagatactactgctccatttaagtttcaacctcagacagatctacatgagatacagttcgagtaaccaacagctggatgctcgatagggtaggcggataaagcaaatcggggcaagcaattacgccttctggttgtagacataggtgaggccgcacttgccgcagtagtggcggtcgaagtggttggccatgaagacgcccgcgccgcactctgagttggggcactccttgcggaggcgggtcaccttgctaggggtgtcgtccaccttatagaactgcagcacgggagagcttcacctttt

SEQ ID NO: 11027 - DNA, 363 bp, Zea mays
  Clone ID: LIB3156-001-Q1-K1-H9-R2B
agaaggtgaagctctccgtgctttagttctataaggtggacgacacgcggtagcattgtgacccgcctccgcgaggagcgccccaactcagagtgcggcgcgggcgcttcatggccaaccacttcgaccgccactactgcggcaagtgcggcctcacctatgtctacaaccagaaggcgtaattgcttgccccgatttgctttatccgcctaccctatcgagcatccagctgttggttactcgaactgtatctcatgtagatctgtctgaggttgaaacttaaatggagcagtagtatctgacatattggtacccctgttactgaattgacgtgaagctgagcttaattttggtcttcgagcc

SEQ ID NO: 11028 - DNA, 556 bp, Zea mays
  unsure (1)..(556): unsure at all n locations; Clone ID: LIB3156-013-H7-F2B
gcaggcgacctgctcgatctataacctcgtttgatctttctctacatgttcctgctggattacatgatctggtagcaagggagagagaaaaaaaatcttttgcatgcatgatcgatgatcgatggcgagaagaagaaactgcttgatgggcagacctggacctggacttcgatctactgaagctatgtacaccgttgctctgcagggctagctgacgagtgacgagaccgctacgaacgaactcgtattggcccggccagttacgtgtgcttggaaccgagtgacccccggccgcttgtgatcatcgtacgtcactcgctgagggactccaactcccaccattgcgagccgctgcaggtctgctccgccgacgacgacggccagcagcagccggagtggaactggaacggctggtgctccggcggccccgacgacgtgagtaagccagcggtcggctgcggagacgacggcggccggaagagggctgctcccacgtcgtcgtccgccaagaagtgcgcgatgaacctgccaccgncagcgcactcggacgagtaga

SEQ ID NO: 11029 - DNA, 205 bp, Zea mays
  Clone ID: LIB3156-013-H7-R3A
ctatggaatttttggcgtcatagctctagtagatcgaagtccaggtccaggtctgcccatcaagcagtttcttcttctcgccatcgatcatcgatcatgcatgcaaaagattttttggctctctcccttgctaccagatcatgtaatccagcaggaacatgtagagaaagatcaaacgaggttatagatcgagaaggtcgcctgc

SEQ ID NO: 11030 - DNA, 343 bp, Zea mays
  Clone ID: LIB3156-001-Q1-K1-H12.F1
ataataagtccggttttagtatatatatatagtatcaaatcatatcatcgtggaccaattaatatatggttacagcagacgcaatcggatcaaccaacatgcatgtagacacacgtacatgagcacaaagactgacgccaaacatgcagagagagatagcaaactgaagaactctgtttctctctctctcacacacacaccacacaatacctatgtatggcagccagctcggcctcgcttattattgttcaaccaccaccacaagctagatagataataatcatatccatggtcgtcgatcgatgtgatcagcagttgcaggggtcgcatttgcagccgctag

SEQ ID NO: 11031 - DNA, 523 bp, Zea mays
  unsure (1)..(523): unsure at all n locations; Clone ID: LIB3156-001-Q1-K1-H12.F2
ataantaagtccggttttagtatatatatatagtatcaaatcatatcatcgtggaccaattaatatatggttacagcagacgcaatcggatcaaccaacatgcatgtagacacacgtacatgagcacaaagactgacgccaaacatgcagagagagatagcaaactgaagaactctgtttctctctctctcacacacacaccacacaatacctatgtatggcagccagctcggcctcgcttattattgttcaaccaccaccacaagctagatagataataatcatatccatggtcgtcgatcgatgtgatcagcagttgcaggggtcgcacttgcagccgctaccgcagctgcagccgtgggcggcctcgccggactccgccgcggcctcgacgaactcgggcgcggccttcttctccggggccaccccgaggacgacggtgggctgcgcggcggtgctcgtctcctccaggtcagggtacttcttgccgcacttgcagcttgagccgcaaccgcagcttgat

SEQ ID NO: 11032 - DNA, 539 bp, Zea mays
  Clone ID: LIB3156-001-Q1-K1-H12.R2
atgtcttgcagctgcggatcaagctgcggctgcggctcaagctgcaagtgcggcaagaagtaccctgacctggaggagacgagcaccgccgcgcagcccaccgtcgtcctcggggtggccccggagaagaaggccgcgcccgagttcgtcgaggccgcggcggagtccggcgaggccgcccacggctgcagctgcggtagcggctgcaagtgcgacccctgcaactgctgatcacatcgatcgacgaccatggatatgattattatctatctagcttgtggtggtggttgaacaataataagcgaggccgagctggctgccatacataggtattgtgtggtgtgtgtgtgagagagagagaaacagagttcttcagtttgctatctctctctgcatgtttggcgtcagtctttgtgctcatgtacgtgtgtctacatgcatgttggttgatccgattgcgtctgctgtaaccatatattaattggtccacgatgatatgatttgatactatatatatatacttaaaccggacttattat

SEQ ID NO: 11033 - DNA, 492 bp, Zea mays
  Clone ID: LIB3156-002-Q1-K1-B7.F1
agttacagttcgattttcccagcaaaaaaaagagagagacgtgcataacggagaaaaatagctactagtccctagtggagtcccaacgagaaggcagcaggatatttacagcgagtcacatcacatcacagggcggcagacacctattgtaaactgtaacacaaaatgatccatctattggactattccgtgctccgcgagatcacctcggcaaacttcatgaagagctcggcgtcggacgcgctcgacgagttggtgcaggagagggcgctgccgcgccgccgcctcgtaggccgacgtactcgctgacatagctcggcgccgtggtggacgggttctccgacgcctgtgcctgtgcctgtgcctgcgcctgcttcggcggcgggcctgctgggcagacgaggctggtccaggacgcgcgcgacctcgtgcatggtcggtcgattcgaaggctgcctcttgctgcaaaggagcgccactggaaacaccttt

SEQ ID NO: 11034 - DNA, 521 bp, Zea mays
  Clone ID: LIB3156-002-Q1-K1-B7.F2
agttacagttcgattttcccagcaaaaaaaagagagagacgtgcataacgggaaaaaaatagctactagtccctagtggagtcccaacgagaaggcagcaggatatttacagcgagtcacatcacatcacagggcggcagacacctattgtaaactgtaacacaaaatgatccatctattggactattccgtgctccgcgagatcacctcgccaaacttcatgaaaagctcggcgtcggacgcgctcgacgagttggtgcaggagagggcgctgccgccgccgccgccttgtaggccgacgtactcgctgacatagctcggcgccgtggtggacggcttctccgacgcctgtgcctgtgcctgtgcctgcgcctgcttcggcggcgggcctgctgggcagacgaggctgtccaggacgcgcgcgacctcgtgcatggtcggtcgatccgacggctgcctcttgctgcaaaggagcgccagctggaacaccttcttgacctcgccgaggtccttgcacgtgt

SEQ ID NO: 11035 - DNA, 348 bp, Zea mays
  Clone ID: LIB3156-002-Q1-K1-B7.R1
cttggagactgcttggaagcatcaaacaccggaatcttgtaagccttcaggggtactccctgtctccatctgggaatctccttttctatgattacatggaaaatggcagcctctgggacattttacatgcagcttcatcgaaaaaaagaaactcgattgggaggctcgcctcaagattgccctcggtgctgctcaaggcctggcttaggcggaccatgagtgcagtccacggataatccacagggatgtgaggtcaaagaatatcctcctagacaaagactacgagggtcatcttggggactttggtattgggaagagctgggggggggcgggcaagcggggggggga

SEQ ID NO: 11036 - DNA, 519 bp, Zea mays
  Clone ID: LIB3156-002-Q1-K1-B7.R2
cttgagactgttggaagcatcaaacaccggaatcttgtaagccttcaggggtactccctgtctccatctgggaatctccttttctatgattacatggaaaatggcagcctctgggacattttacatgcagcttcatcgaagaaaaagaaactcgattgggaggctcgcctcaagattgccctcggtgctgctcaaggcctggcttatcttcaccatgagtgcagtccacgaataatccacagggatgtgaagtcaaagaatatcctcctagacaaagactacgaggctcatcttgctgactttggtattgccaagagcttgtgtgtgtcgaagacgcacacatcaacgtacgtgatgggcaccattggctacattgaccctgagtatgcacggacatcccggatcaacgagaaatcggatgtatacagctacggcattgtcttgctggagttgcttaccggcaaaaaacctgtcgacgacgagtgcaaccttcaccacttggatcctatccaaagccgt

SEQ ID NO: 11037 - DNA, 536 bp, Zea mays
  unsure (1)..(536): unsure at all n locations; Clone ID: LIB3156-005-Q1-K1-B3.F1
gagaaaagcagctgatgtagcaatgataatattttggtttggacaatgtaaacggatggtaaaacagcatggtgaactccccaccaaacacccatctgtctgcaatcactgggaaacagatgtttttatttctaaatcaagcaggcaactactcagatacccttctccagcatcgcccggacccgtgtcggtaggccgtacagcctgatgaacccctcggcgtcacttggttgtagatctccccgttctcaaacgaggagatatcttccctgtacaggctgtaggggctcttccgggacgcgacgttcacggaaccctntgtacagcttcagggtcactgaaccagtggtcgtcgcggtaaccttctccatgaaggcatcaaaggactgccggagcgggtcaaaccagcggccagcatagaccagctcggcgtacttgagggcaatgatgtccttccactgcatggtctccctgtccagggtcagggactccaactcgcgtaccgcgctgccatgatggtgcaccgggggtctcat

SEQ ID NO: 11038 - DNA, 539 bp, Zea mays
  unsure (1)..(539): unsure at all n locations; Clone ID: LIB3156-005-Q1-K1-B3.F2
gagaaaagcagctgatgtagcaatgataatattttggtttggacaatgtaaacggatggtaaaacagcatggtgaactccccaccaaacacccatctgtctgcaatcactgggaaacagatgtttttatttctaaatcaagcaggcaactactcagatacccttctccagcatcgcccggacccgtgtcggtaggccgtacagcctgatgaacccctcggcgtcagcttggttgtagatctccccgttctcaaacgaggagatatcttccctgtacaggctgtaggggctcttccgggacgcgacgttcacggaacccttgtacagcttcagggtcactgaaccagtggtcgtcgcggtaaccttctccatgaaggcatcaaaggactgccggagcgggtcaaaccagcggccagcatagaccagctcggcgtacttgagggcaatgatgtccttccactgcatggtctccctgtccagggtcagggactccaactcgcgtaccgcggctgccatgatggtgccaccgggnggtctcat

SEQ ID NO: 11039 - DNA, 384 bp, Zea mays
  Clone ID: LIB3156-005-Q1-K1-B3.R1
ttatttttacctcttgttttttattattcatttgtatttttttttattttttttttatttttttttttttttttttatttatttttttttttttttttttttttattttttttttttattttatttttttattttttttttattttttttttttttttttttttttttttttttttttttattttttttttttttgttttttttttttttatttttttttttttttttttatttttttttatttttttttttattttttttttattttttttttttttatttttttttttttttgtttttttttttttttttttttcttttttctttttttatttttttctttttttttttttttttttttttttttttttttatttttttttt

SEQ ID NO: 11040 - DNA, 558 bp, Zea mays
  unsure (1)..(558): unsure at all n locations; Clone ID: LIB3156-005-Q1-K1-B3.R2
ccagcaaatgagccaaaggaagatatgtatatgatgtcgattgctccagaaaatgcgccctcgaaacctgagtatttggagattggtatcattgctggtgttcctgtttcaatcaatggccgagacctctcaccagcatccctcctcgcggagctcaatgaaatcggtggaaagcatgggattgggcgtatcgacatggtggaaaacaggctggtcggcatgaagtcacgtggggtctatgagacccccggtggcaccatcatggcagccgcggtacgcgagttggagtccctgaccctggacagggagaccatgcagtggaaggacatcattgccctcaagtacgccgagctggtctatgctggccgctggtttgacccgctccggcagtcctttgatgccttcatggagaaggttaccgcgacgaccactggttcagtgaccctgaagctgtacaagggttccgtgaacgtcgcgtcccggaagagcccctacagcctgtacagggaagatatctcctcgtttgagaacggngagatctacaaccaagctgacgcc

SEQ ID NO: 11041 - DNA, 537 bp, Zea mays
  unsure (1)..(537): unsure at all n locations; Clone ID: LIB3156-021-Q1-K1-C5.F1
aaagtgtaaaatccctttggagacatgaatggaaacatgtgcgctctgcagaagaaacaagtgatatgaacatttctgcgggtacaaaagaaacaaacaagcaaacaaaaacaaaacatgtgcactctactatcgacaaactacgccgccttgatgaccctgaaggagtccatgactcttctgaggtcctcctcttcctgcatgaacacctgctcgggcgtctgcagccggagctcgtacagncanttgttctcgacgccgagcactgacaggtatcggcggtcccactccaagctctgcaccctgtcctgtggcatcaccgccagctcgttgttgctcgcataggattttatgttcacctcaacctcgtagtagagcttgccatcgtcagcgaccttggatgacgccgataagacgttggattcacgccgaacgcccagcctggtggacatgaactccgtcagtactgagnnaggaccttctctgcagccttctccggtgggccgaggtcctcgacgctcgtgtacctggacgacg

SEQ ID NO: 11042 - DNA, 540 bp, Zea mays
  Clone ID: LIB3156-021-Q1-K1-C5.F2
aaagtgtaaacatccctttggagacatgaatggaaacatgtgcgctctgcagaagaaacaagtgatatgaacatttctgcgggtacaaaagaaacaaacaagcaaacaaaaacaaaacatgtgcactctactatcgacaaactacgccgccttgatgaccctgaaggagtccatgactcttctgaggtcctcctcttcctgcatgaacacctgctcgggcgtctgcagccggagctcgtagagccgcttgttctcgacgccgagcactgacaggtatcggcggtcccactccaagctctgcaccctgtcctgtggcatcaccgccagctcgttgttgctcgcataggattttatgttcacctcaacctcgtagtagagcttgccatcgtcagcgaccttggatgacgccgataagacgttggattcacgccgaacgcccagcctggtggacatgaactccgtcaggtactgaccgaggaccttctctgcagccttctccggtgggccgaggtcctcgacgctcgtgtacctggacgacga

SEQ ID NO: 11043 - DNA, 540 bp, Zea mays
  Clone ID: LIB3156-021-Q1-K1-C5.R1
aaagaattcaaaggaggaatgtgctgtcgacaatgctctccgcttggacgatcctgctcttgagtccgggtcaggtcagcttagcagagacaaccggtggcgcattcagggagtatatcgacacgtttgacggctacaccttcctgtacccgaagaattggatccaggtccgtggagctggcgcggacatattcttcagagaccccatggtcctcgacgagaacatgtcagtggagatatcgtcgccttcgtcgtccaggtacacgagcgtcgaggacctcggcccaccggagaaggctgcagagaaggtcctcggtcagtactgaggattcatgtccaccaggctgggcgttcggcgtgaatccaacgtcttatcggcgtcatccaaggtcgctgacgatggcaagctctactacgaggttgaggtgaacataaaatcctatgcgagcaacaacgagctggcggtgatgcacaggacagggtgcagagcttggagtgggaccgccgatacctgtcagtgctcggcgtcgagaacaagcg

SEQ ID NO: 11044 - DNA, 550 bp, Zea mays
  Clone ID: LIB3156-021-Q1-K1-C5.R2
aaagaattcaaaggaggaatgtgctgtcgacaatgctctccgcttggacgatcctgctcttgagtccgggtcaggtcagcttagcagagacaaccggtggcgcattcagggagtatatcgacacgtttgacggctacaccttcctgtacccgaagaattggatccaggtccgtggagctggcgcggacatattcttcagagaccccatggtcctcgacgagaacatgtcagtggagatatcgtcgccttcgtcgtccaggtacacgagcgtcgaggacctcggcccaccggagaaggctgcagagaaggtcctcggtcagtacctgacggagttcatgtccaccaggctgggcgttcggcgtgaatccaacgtcttatcggcgtcatccaaggtcgctgacgatggcaagctctactacgaggttgaggtgaacataaaatcctatgcgagcaacaacgagctggcggtgatgccacaggacagggtgcagagcttggagtgggaccgccgatacctgtcagtgctcggcgtcgagaacaagcggctcta

SEQ ID NO: 11045 - DNA, 524 bp, Zea mays
  Clone ID: LIB3156-001-Q1-K1-D9.R2
cacagcgacaaggccgcggatatcctggtcaacttctttgacaaatgcaaggcagatccgagctactgggacaagatctcacagggtggcctgcagagaatttatgagaagtacacctggaagctctactccgagaggctgatgaccctgaccggcgtgtacgggttctggaagtacgtgagcaacctggagaggcgcgagacccgccgctacatcgaaatgttctacgccctgaagtaccgtagcctggcaagccaggttccgctgtccttcgattagtacggggaaagaagaagcccaggccggagaaccatcgcctgcatttcgatctgtttcaccgcaattcgcattgttagtcgtgtgttggagttatgtgtacttggtttccaagagctttggttccttcttgtttttttttcctttcttgtttgagcgtttttgggcagcgctggcctggttcctagtatggtgggaattggctgcaccttttgcttcgaataaaaatgcctgctcgttcacctgtc

SEQ ID NO: 11046 - DNA, 963 bp, Zea mays
  Clone ID: LIB3156-001-F6_FLI
gccgcgctgcgcgggaggctcgccgtggagctgggccccgacgacgtgccgccgttcgtggcggcgcccgagtggtacccggcgttcaccgagtccgcgctgagccagttcgacgggctggagcacgccgacgacgtgctcgtcaactcgttccgtgacctggagccaatggaagcggattacctggagtcgacgtggcgcgcgaagaccgtcggcccgacactgccgtcgttctacctcgacgacggccgcttgccatgcgacaagacatacggcgtggacctcttctcgagcaccgactccgaggcggcgccgtgcatgacgtggcttgacaagcaggagccctgctccgtcgtcctcgcgtcgtacgggaccgtcgccaacctcaacaaggagcagctggacgagctcggcaacggactgtgcgattccgtcaagcctttcgtttgggtgctgaggtccaacgaggcagagaagctgtctcgacagctcggtggcaggtgcaaggagaggggcctcattgtccccttctgtcctcagctcgaggtgctggcacacaaggccacaggttgcttcctgacgcactgcgggtggaactcgacgattgaatccatcgctagtggtgttccaatggtggcgatgccgcagtgggcggaccagccgacgacggccaagtatgtggagagcgcgtgggggattggggtgcgcatgcggaagggttccttggtgaggaaggaggtggagaggtgcataagggaggtgatgggcggggagaggaagcatgtgtacgggaggaatgccgctcgttggatgcacaaggccaaggaggccatgcaggaaggaggaagctctgacaagaacattgcagaattcgcagccaagtatttaccaaagtagatttccgattatgttctcctcggataatgagttttttgggcaataaagtttcttgtctttagggct

SEQ ID NO: 11047 - DNA, 706 bp, Zea mays
  Clone ID: LIB3156-001-G4_FLI
aggaatccccatgaatcaagttactccatcacagggcagcgacgaggcaaagccattagaagctacagtggttgatgcagctcccaccacttcagaaggcactgcagctcccgcagctgcagaaggcacagcagctcccagcagtgaggaagctaaagcagcacctggcagtgagggaggcacatcgcatccaatcaacgaggaagccacagcagttgcagtttcagatgcaccaggcagccctgatgctgcggctgcggctgctcttgctcctgcagctgataccagtagctcggatgcacctgctgttactcccagtgaagtaaccgtctctcccccttcaaccgacgcacccgagttgaccgataagccatcaccaacagaggcatcgttgccgcctccacctagtgtttctggtgtatagaacatttcagattatttttgcagtgtgccatttttttttgtatgctgccgcgttcgttccactgtaatttttaacccatacatactggtataggcatttgctgccccatggttcaggtatcgcagacgccaggcagtatgtgagtagccctgtacatctgctgtctgcgtctcgcgagaacttgctgccattgtgtcagttgtgtgggcatagcttatgttgtttgtgatcaatccgtaggaccacagtttaattttttgcttgatcagctgcatcaccgat

SEQ ID NO: 11048 - DNA, 612 bp, Zea mays
  Clone ID: LIB3156-002-A12_FLI
ccgaaagctgcaagaactcgttccaaatatggacaagcaaaccaacacatctgacatgctggatttggctgtcgactacatcaaggatctccagaagcaggttaaggtgctaaaggagagccaagataattgcacctgctcagcaagcaagaaccagcagcactcctgctgaaaccgtaatgctcactgtacatgacctcgaaagcatgtccactcgggaaagaaaaagatgtaagacagctctcatgcatgttgtttcatgaggttttgaactgcagcagttgagaggctttatctaccaggcactgtagcttttgtatgagcgaagagggatggagcaatggcatcaccaagcattcaagtgattgggagaagggtaaaaaaaagtggggagagatatatatataggagaaacaactgtatagtttggctgtagcttttctatatatacacacacgcactaccctttcagtagaaagtggttaatttacctatgttagagcatctccaagagaggctctaaacatggtcctattttaaatatagggctcaaaaccataaaacatccttccaacagcggccctattttataaaatttcatcaaatggttat

SEQ ID NO: 11049 - DNA, 804 bp, Zea mays
  Clone ID: LIB3156-013-H7_FLI
gaagtccaagcagctggagcgcgagtactcggcgctgcgcgacgactaccacgcgctcctctgcagctacgagtccctcaaggacgacaagcgcgcgctcctcaagcagctggagaagctggccgagatgctgcacgagccgccgcagggcaagtactacggcggcaatgcggacgacgtgcgctcgggcggcgtcggcggcacgaaggaggaggaggagtccacagacgcctgcgccggggccgcgctctactcgtccgagtgcgctggcggtggcaggttcatcgcgcacttcttggcggacgacgacgtgggagcagccctcttccggccgccgtcgtctccgcagccgaccgctggcttactcacgtcgtcggggccgccggagcaccagccgttccagttccactccggctgctgctggccgtcgtcgtcggcggagcagacctgcagcggctcgcaatggtgggagttggagtccctcagcgagtgacgtacgatgatcacaagcggccgggggtcactcggttccaagcacacgtaactggccgggccaatacgagttcgttcgtagcggtctcgtcactcgtcagctagccctgcagagcaacggtgtacatagcttcagtagatcgaagtccaggtccaggtctgcccatcaagcagtttcttcttctcgccatcgatcatcgatcatgcatgcaaaagattttttttctctctcccttgctaccagatcatgtaatccagcaggaacatgtagagaaagatcaaacgaggttatagatcgagaaggtcgcctgc

SEQ ID NO: 11050 - DNA, 352 bp, Zea mays
  Clone ID: LIB3156-001-Q1-K1-D9.F2
gacgggggaacgagcaggcatttttattcgaagcaaaaggggcagccaattcccaccatactaggaaccaggccagcgctgcccaaaaacgctcaaacaagaaaggaaaaaaaaacaagaaggaaccaaagctcttggaaaccaagtacacataactccaacacacgactaacaatgcgaattgcggtgaaacagatcgaaatgcaggcgatggttctccggcctgggcttcttctttccccgtactaatcgaaggacagcggaacctggcttgccaggctacggtacttcagggcgtagaacatttcgatgtagcggcgggtctcgcgcctctccaggttgctcacgtact

SEQ ID NO: 11051 - DNA, 473 bp, Zea mays
  Clone ID: LIB3156-003-Q1-K1-C1.F2
aaaaaggctatttgtattcattagtgcagttacagtactatccgtaaaattagtccgtctgaatcgtaaatcacacgactgctttagcacgcttcagtttctgtcaagaagctcaatgagcagctctacaacagctataccaataccacacgctaatccccccaggcttcaaacaccacctgggggtttctacatagatggacttctgtaggatctagcacgaagagggaagaaagacaacacagttcagtggcgcaactggaagaagaatctgaagccgtgaaccatgtgaaatgctatgatacaattgtacccgctgggacaaaaggctaatgccgggtgtgaatacctggtgtagggggggggctgtcagggggccaccaaattgtgtgacgggttggtaagagagagaagtggggtgctttaatgcttgggcccatgggcgttgggttgggtgatctttagcgctggaa

SEQ ID NO: 11052 - DNA, 90 bp, Zea mays
  Clone ID: LIB3156-003-Q1-K1-C1.R2
gcagttaccaaacgggacagttcaaactgcaacatactggtgctggtggtgcagcgacagataaatgaaatacaactaagacggaaggct

SEQ ID NO: 11053 - DNA, 690 bp, Zea mays
  unsure (1)..(690): unsure at all n locations; Clone ID: LIB3156-003-Q1-K1-C1.R6
agaagannatctgtagccgtcaaccatgtcaaatcctatgatacaattttaccccctcggacaaaagtctaataccgtatatgaatacctctttagttgtcgtcctatcaggttaccaccaaattatatcagcagtcagaaagagagagaagtttcagcctttaatccttgtaccaatttccatttgatttctcatcctcgagcgctttaagcttctcatgtaaagatgtattttctgaggtcaagccatcacacttctcctgaagttgtttcaattcttctttaagtgaactattttcctgctttagcaaaactgcacgattggctacttcctcccattcagcctgcttgcgcaatcttgagcgtcgagctgattccctatttgattgcttccgtttttgtctcttcagttctctcccatcctgtatagtcggatcactgagaacaatatcacgtgaatttgacgaaggagctgatgtcggtgctgcaataactttaccatgcatgggtacagaagcaggagtaccccagtaatccactcccatattcagagtagttgctgggccagccatgggagggggcacaggccaaaatggcatcatagggttaagcacaacagaccctgaagatggttgtgtgggctcaacgacagagcttttgagtacattttactcctagcatcattaccct

SEQ ID NO: 11054 - DNA, 375 bp, Zea mays
  Clone ID: LIB3156-010-Q1-K1-H2.F2
gggggggccaaggattaaatcccggaacccaaccaaaaaaagggaaaaaaccccaaaaaacaccccccccttaacccaagggtggggaaaagtccaaccggggaaaaaacccccgggggccaaaaaggcccaaaaacccttttttttgggaacccccccccccaggtttaacccccaccccggggtttttcccccccggaaaaaggccggccagccccaaacagtttcaccaaagggcggggggaaaaaaaaaaaaccctcccccccccccccccccaaaaaaaaaccccccccctttccccagaccccccatttccttggcccccccccccaaggaaaaaaggggggacaaatccgcccccccttggggccccc

SEQ ID NO: 11055 - DNA, 537 bp, Zea mays
  Clone ID: LIB3156-010-Q1-K1-H2.F7
aaaagaagcttttcggcactttgagaaccaagtatctctccccagttgaaactttcagcaaaccttggatcaaggacgggttgtctgtcgagtaattagacatattatagattgaattcagaatataaatcattgaccaacaaaaaaaaaaaaaaaaaaaaaaaaaaaaaaaaaaaaaaaaaaaaaaaaaaaaaaaaaaaaaaaaaaaaaaaaaaaaaaaaaaaaaaaaaaaaaaaaaaaaaaaggggggggcccttttaaaaaaaaaaaatttaactcccgggggatggaaaaaaaaaatttttttaaaggggaaaaaaaaataaaataagggggcgggttttaaaaaagggggaaaggaaaaaaaccgggggtaaacaaaaaaaaatggtttgaaaaaaaacccctttttccaaagggggaaaaaaaaaaaaaagccccaaacaaatcccttttaaaaaaattggccaacctaaaagggaaaaggaaccccccctttaaggggaaaaaaaaccgggggggggggggggttacccc

SEQ ID NO: 11056 - DNA, 445 bp, Zea mays
  Clone ID: LIB3156-010-Q1-K1-H2.R2
cgaggtacagggagaacgggtgaatgtctgacgttacgtattataaagtgatgtgcaatgatgactacaaactaaaaatatcagtggatgaccatagcaggaagcatcaaaggtgtgacagattgctacccatttgttcccttggttcgtggcacaatgcaaatgcggcatcagtacaacagcgtacgcaatccttcgcacgcgcgcggtgcagcatggttttacgttttacacgctgcctttagtgaaaactgtatggagctgtcagtacttgtacaggtagtgaagaaccaaggcatgaagtcaaaacctgcatgcacagctaccagaaacagaagctgtgcggcactttgagcaaccaaggtatctgtgcccaggtgaaactgtgaggagaccttggatcaaggacggtttgtctgtttagcaattacacatattatggatg

SEQ ID NO: 11057 - DNA, 326 bp, Zea mays
  Clone ID: LIB3156-011-Q1-K1-A9.F2
aagaacctccttttcttttattaacattgcacaggctttggggatttcacgtccctgtgagaaagatcatcttaccagttttcttatatgtgtatacatgcatcttatcatggtttctattctatcaaatcactcaaggcgatattgattacatgtaaataagccaataaaacatggcaatgaaaccaagggtatcaataaccaagagtgaagagccaaagtggccatagagccctactgcaatgcctgtgccatggttgcgcgatgagagagttgttgctcatacagggatctgaatatctgatatttcgcatcgtggtatttct

SEQ ID NO: 11058 - DNA, 359 bp, Zea mays
  unsure (1)..(359): unsure at all n locations; Clone ID: LIB3156-011-Q1-K1-A9.R2
agaaataccacgatgcgaaatatcagatattcagatccctgtatgagcaacaactctctcatcgcgcaaccatggcacaggcattgcagtagggctctatggccactttggctcttcactcttggttattgatacccttggtttcattgccatgttttattggcttatttacatgtaatcaatatcgccttgagtgatttgatagaatagaaaccatgataagatgcatgtatacacatataagaaaactggtaagatgatctttctcacagggacgtgaaatgcccaaagcctgtgcaatgttaattaaagaaaaggaggttcttganaaaaaaaataattaaaaaaaaaaaatataa

SEQ ID NO: 11059 - DNA, 245 bp, Zea mays
  Clone ID: LIB3156-012-Q1-K1-D11.R2
cacgcatctgcgtgtgcatggcgtggctactcgatcgatcacgtactgagtgtgcgcgcgcaccataataagtattgtgtgtgtacgtatatatacgtatctgcagtgtttgcgctatatataaaataatcgggtgcgcgcgctatataatatctatagaactggaataagtttacataaaaaaaaaaaaaaaaaaaaaaaaaaaaaaaaaaataaaaaataaataaaaaataaaaacaaattaa

SEQ ID NO: 11060 - DNA, 389 bp, Zea mays
  Clone ID: 49LIB3156-002-Q1-K1-B2-R1
ctcgacgcgccgccgccgtctcgccgctgcccacccagattgacggctccaattggcgcccatggcggaagaaaccaacataaaaaaggaggaagaggagttcagcaccggtcctctctcggtgctcatgatgagcgtcaagaataatacccaggttcttatcaactgccggaacaacaagaagttgcttggtcgcgtgcgagccttcgatcggcactgcaacatggttcttgagaacgttagggagatgtggaccgaggtaccgaagaccggtaaaggcaagaagaaggctctcccggtgaacaaggacaggttcataagcaagatgttcctccgcggggattcggtcatcatcgtcctcaggaagccgaaatgagtagcctgtacac

SEQ ID NO: 11061 - DNA, 179 bp, Zea mays
  Clone ID: LIB3156-021-Q1-K1-C5.F2B
aaagtgtaaacatccctttggagacatgaatggaaacatgtgcgctgtgcagaagaaacaagtgatgtgaacatttctgcatgtgcaaaagaaacaaacaagcaaacaaaaacaaaacatgtgcactgtactatggacaaactacgccggcttggtgaccctgaaggagggcatgactc

SEQ ID NO: 11062 - DNA, 298 bp, Zea mays
  Clone ID: LIB3156-001-Q1-K1-D9.15U0
ctggcttctcttttccgtactaatcgaaggacagcggaacctggcttgccaggctacggtacttcagggcgtagaacatttcgatgtagcggcgggtctcgcgcctctccaggttgctcacgtacttccagaacccgtacacgccggacagggtcatcagcctctcggagtaaagcttccaggtgtacttgtcataaattctctgcaggccaccctgtgagatcttgtcccagtagctcggatctgccttgcatttgtcaaagaaggtgaccagtatatacgtggacttgtcactgtg

SEQ ID NO: 11063 - DNA, 89 bp, Zea mays
  Clone ID: LIB3156-011-Q1-K1-A9.15C0
aaagaaaaggaggttcttaaaaaaaaaaaaaaaaaaaaaaaaaaaaaaaaaaaaagggcgagtcgtatctagaggagtccaagtcttac

SEQ ID NO: 11064 - DNA, 373 bp, Zea mays
  Clone ID: LIB3156-003-Q1-K1-C1.F11
atggcatcataggagttaagcacaacataccctgaaggatggttgtgtgggctcaacgacaggacctttgagtacatatactcctagcataattaccctgtccttgctcattaattatccttgacccttgaacacactcttctgaactttgtactgcttccttcagaagaacttcctctttcactcttactttgtgaaaaaccttcattggaggaagaagttgaaggctttgccggtgacttcttattttttactgcaacaacatccacactacctaagcttccttatgatcccttgagggaagccttccgctcatctccatctgattcatgtgacgctgcaccaccatcaccagatgatgatgaacttactg

SEQ ID NO: 11065 - DNA, 341 bp, Zea mays
  Clone ID: LIB3156-003-Q1-K1-C1.F12
tacctacaagcgctgggacccagcgataccgctgtccgaggtggcctacattatgtccagacataatcggtcccatgaaagcgcgctttagtgcgccgctaactatacgcgcacgcctgctatatggaatcgaacgtctcactgactgctgtggtcgcttcaccacggaaatcactcactcaaggtttaccggagtcagataccagagaatcgacaaaggcagacctgcgctcaaacatacctgcatgtacaagcaagtatgactcggggatgcgaactcatcagcaacaccggtacatggattaaaggctgatccatgacccatgatttgactgccggaa

SEQ ID NO: 11066 - DNA, 375 bp, Zea mays
  Clone ID: LIB3156-003-Q1-K1-C1.R1
gcagttaccaaacgggacagttcaaactccaacatctggtgctggtggtacagcgacagataaatcaaataaaaataagcggaaggcttccctcaagggatcaaaaggaagcttaggtagtctggatgttgttgcagtaaaaaataacaagtcaccggcaaagccttcaacttcttcctccaatgaaggttcttcacaaagtgacagtggaagcggtagttcttctgaaggaagcagtacaaattcaaaaagtggttcaagggtgaaggataattttgagcaaggacagggtagtgatgctaggagtaaatgtacacaaagctctgtcattgagcccacacagccgttttgaggtattgttgtgcttaaccctat

SEQ ID NO: 11067 - DNA, 342 bp, Zea mays
  unsure (1)..(342): unsure at all n locations; Clone ID: LIB3156-005-Q1-K1-B4.R2B
gccacgccagggcgtgcgcacgagtcaaccattttcctatggacaatacgagagccagcacaccaatatccaaagatgactgcgggcacaagatagctttgactcgtgtgccatctcattctcgctgtaaaaggagagtcgcagaatccaccagattaagcatgcgaggagaaaatncggtgcttcggagcgctggaactcctcgtattcatgtgttgcttttcttttctgggtaatttgttccagaatggatgtggcgaattttggagcaaaaatctttctgggttctccatgtgctaccataacgatttgtcagttaattctgcaaattggtgtggggtt

SEQ ID NO: 11068 - DNA, 377 bp, Zea mays
  Clone ID: LIB3156-007-Q1-K1-F8.F2B
agggggggcgggctcccgatttattaatccattcaacctcatcacaatctgttcctttctactggcacttgggataattaactaaaaagaccccccccgaccgcggggtaattgggtacataacctcaatgggatacacaacatgccgccgcaaagcaaaacacgtggcaaatcccctttttttctaactccgcccctctgtctccctctgggcccgcaaaaactaggcgttggaggcacgttagcgccaggttttcctcccatgcttacccagccacagccgtccacaccttggatgctcacagctcgtccttgacgggctcggcggcggctgccttctcggatgccggtggccccctggtggtggtggtggtggc

SEQ ID NO: 11069 - DNA, 468 bp, Zea mays
  unsure (1)..(468): unsure at all n locations; Clone ID: LIB3156-007-Q1-K1-F8.R2B
gcgaccgaatttacaaacttcatggggggggcagagaagctgaggtgtgactaccactttggccacactttgcatgccaaccacctcccacgtggggatgcagcagtggaacgggcattgggcaggctgctgaagccattagtgatgaggcttgtggtggacagcgaggattttgatgtcgctgcactgatgaagtttattgaggctagcaccatccctagaggtgtcacttttgacaagaaccctgacaaccacccatacctcatgaaattcttccaaagctcancccccaaggcgatgcgggttttgaacttctccaccggaccttttgattctttcaaggctgcctactctgcgtgggcggaggaattcaaggacagggaaatcaagttccttattggtgacatcgaagccaggcagggtgccttccagtactttggcctgaaagaggaccaaacacccccttat

SEQ ID NO: 11070 - DNA, 219 bp, Zea mays
  Clone ID: LIB3156-010-Q1-K1-B3.R2B
gcggagacggtagaccatatacataggagtgctgggtagtatacaagagcggtgtatacagggcaggggagatgatgctgggaaagagatctgggcgcccctccccggcggcgcgggagcacatgcggcggaccacgagcatgacggagtttccgcgcggcaccgcacgtgctggtagacgtcccggaggaggaggaggaccaggagctgcatctggtc

SEQ ID NO: 11071 - DNA, 323 bp, Zea mays
  Clone ID: LIB3156-011-Q1-K1-B4.F2B
agtatcagaacattgtggatgtcttcctcaattaacttcagtttctgagcaaactcagacgttacagataacagcactgtgcaattagacttaatgctaacgctctgctgacacacattaccaagagaatacaagctgacagcctcgtgtctacaggtcacacaacagaaccttagccttgaagcatctcaactgaactgcgggcggacatacatgttacaaacctaggaacttaaatagctgggcacgtataccatgtagacaatcactgaacacctacagctttgtttaccaacaacacgctccttgagacatcaacctac

SEQ ID NO: 11072 - DNA, 329 bp, Zea mays
  Clone ID: LIB3156-011-Q1-K1-B4.R2B
gcggtggggggatgtctcaaggggcgtgttgttggtaaacaaagctgtgggtgtgcagtgattgtgtacatgggatacgtgaccagctatttaagttcctaggtgtgtaacatgtgtgtccgcctgcagttcagttgagatggcgttcagagctaaggtgctgttgtgtgacctgtacacacgaggctgtcagcttgtgttctcttggtaatgtgtgtcagcagagcgttagcattaagtctaattgaacagtgctgttatctgtgacgtgtgagtttgatcagaaactgaagttaattgaggaagacatcaacaatgtgtctgatact

SEQ ID NO: 11073 - DNA, 146 bp, Zea mays
  Clone ID: LIB3156-012-Q1-K1-E3.R2B
gcgatcatattgacacctatggcgagaaggggtgggttgagattaacaagcactacgccctgttccatgagaggggtctgagcaaagtgccaaggggtccctcgaaagacaagaagcgctacaaaaagtgattcgaggggtggctc

SEQ ID NO: 11074 - DNA, 429 bp, Zea mays
  Clone ID: LIB3156-014-Q1-K1-D4.F2B
gcttggtttttttttttttccaatcaggattatccttaattgatgtgaataataagccacagtatacaaggaccagcaatcatgtctacattgacaaatcattcaggggatcacaatttggaatgaaactttattacgtgtcagcaagaatatagccaacatggggaaactttgttgttgacagagaggtagcatcaacagcaccaactctaactcactgagaagagaagtcccaagttccgctcaagcatctgcttcgacaagaacaaaaactggcctgtccccaagtttgtctcggcccttcagttctgccaattcaatgacgcaagcacactcaacaacctttgctccaacacgttcaataagtttgacagctgcacagagtgttccaccggtggcaataagatcatcgactacaagagcccgatc

SEQ ID NO: 11075 - DNA, 432 bp, Zea mays
  unsure (1)..(432): unsure at all n locations; Clone ID: LIB3156-014-Q1-K1-D4.R2B
ctataggggaaganctggtacgccctctcaggtgagccctgcccgtaattccctggtgccacgccacgcgtgcggggttccctgacaccatccacgtgttccttgagcgggacaagggcgcaaggatcaccgtatttgctggtgtggaagctacagggggcatttttgggcctcctatcgctctagccatcagtgcgaaatttgtgcctttgggaggagagcctaagaaggtgccaggcgaggggatctccgaagaatattctctgggatacgggactgacaacatagagatgcgtgtgggagctgtacaggccaacgatcgggctcttgtgntcaatgatcttattggcaccggtggaacactctgggcagctgtcaaacttattgaacgtgttagagcaaagggtgttgaggtgtgcttgcgtcattgaa

SEQ ID NO: 11076 - DNA, 231 bp, Zea mays
  unsure (1)..(231): unsure at all n locations; Clone ID: LIB3156-014-Q1-K1-F3.R2B
gcgagccaagccaggctattgtgatgaaaatttgtggtgtgtgagcgtgtgaacttccgatgtggccacatgctggatcagtctgaataagtaagtgtgcagctctaggggggcaggtgcgtctaccacaatgagcatgtgcgtgtggagagaaatatntgtgaacccattttgtgtatgaataagatttgttttttttcggaaaaaaaaaaccggacccaaggctaaaaa

SEQ ID NO: 11077 - DNA, 407 bp, Zea mays
  Clone ID: LIB3156-021-Q1-K1-F6.R2B
cccgggggcgaacgccacgcgtgcgctgcccattggagccaaaatgcgctaaccttttgataattccatctgagatgcagtgcaagatctgcgtgcataccttcatctgcgccacctccgggggccaagtgcaaaaaacatgcgggggcgaggcatcccaagaacgtaccctctaccagtgcttcccccacctcaagaactagtaagcagcaaaagcatatgctctgcgcagctaaaagacaaggactacatatatatatatacgctgtgtgtcaattactgggttctaggctgctgctgatgcggctgcttccttcgtgtggccccctctgattatgtgctggaacccttggctgtcagcctgcgtgtgctaaaaaccatggggtctgtgtggattcatgctcccc

SEQ ID NO: 11078 - DNA, 371 bp, Zea mays
  Clone ID: LIB3157-001-Q1-K1-C12
cggacgcgtgggtgtcaatctgctcactgctcacggacccaaaccctgatgagcctcttgtccctgagattgctcacatgtacaagaccgacagggccaagtatgagtccaccgcacgctcctggacacagaagtatgccatgggctagaagcaaggctaaaagctggccaaactggtgaatgtgccggaccccaaatcgttatcacctaaataaccagtcaagtcacaagtatgaatggacttttgaggaccattgtgccctgttgaactcatgtattaccttgtgaagtccgttgtgtctggtttctacctgaccgcttccttatctgatgctgcttctttaatatctgatgctgcttcattaaccatt

SEQ ID NO: 11079 - DNA, 213 bp, Zea mays
  Clone ID: LIB3157-001-Q1-K1-D10
tcgtaataatgaaatggctaccctttcacatcattatttgctatagtcagttatgcgtgccacatttaccttggcttcttttatggtttaaatttatttttactactatgctgtgacctgacaaatccttatattgatagagcgtttgcgcaggcgctgtcagtggatccacatatatgtgtatgatacgatgcatccttatgcccggttgaa

SEQ ID NO: 11080 - DNA, 236 bp, Zea mays
  Clone ID: LIB3157-001-Q1-K1-E10
tcgcttcatccgcgcgcgcgtcagagactcagtttccatgcatatacgtgcgccttcgtcagcgcgcatcgacgtcacccgagcgcgctacactccccatcgttcacagttcactgctcgcgcgtcgtgcagacaccacaccatggcacctgccgcccctgctgccacgggcgctgtgagccccgccgtcaccaatggcggcgtcatggttgcagcacgctccgtcaggctgggcc

SEQ ID NO: 11081 - DNA, 278 bp, Zea mays
  unsure (1)..(278): unsure at all n locations; Clone ID: LIB3157-001-Q1-K1-F10
ctttgactggctntaaaaaataatataatttttaaaaaaaataaaaaaaaaaaatggttttgtataaattatataaaaaaaaaataaaataattaaaattgggcttcccctttaaaagattccaaactttcctcccctttctttcaacttcataactcttttattattttctcctaaatttaattccctgtccctctttttacaacctttttattgtaaaaaccctttcttttcccaactttaatctcctttaaacacattccccttttcccctcttg

SEQ ID NO: 11082 - DNA, 317 bp, Zea mays
  Clone ID: LIB3157-001-Q1-K1-F11
cctcaaatcgctccctgtctctggtcaccttgttttcgctcccggctccccttgtgccacccagacatcgtccgttcgctcgccaagagacaggaccggtgaccatggtggaccagctcaccgacgaccacatcgccgagttcaaggaggccttcagcctcttcgacaaggacggcgacggttgcatcacaaccaaagagctcggaactgtcatgccatcactgggtcagaacccaaccgaggctgagcttcaggacatgatcaacgaggtcgattcggacggaaacgggacccatttactttctggagttccttaa

SEQ ID NO: 11083 - DNA, 404 bp, Zea mays
  Clone ID: LIB3157-001-Q1-K1-F12
ggaagagagccttcaagtgttgacctcgtgcctgaattcctccagcacggacgcgtccctcgccttcatcggcttcgcggcgaacttgggccagtgggagctggtggaggccgccatcagaagcgtggcgcatctgtaccccaggctgcgagactccggtcggttggagcagctcgatgaggacgtgctcaacatgctgcggacagagcatgtcaggtatttgcagcaccgcagtgcaagtaactgaatccttaatgtcatggagggctttttttccccgtccactggtggtcgcatagcggtcctgtttgtggtggtgtatgcacagctgttgcgttaaaaaaaaactgtacagccacttccgttgaagcttatggcgtcatgaacggggctcatcttccgtt

SEQ ID NO: 11084 - DNA, 451 bp, Zea mays
  Clone ID: LIB3157-001-Q1-K1-G9
tctttcttaaaaaaaaaaaaaaaataatatataaaaatttattaaaaaaaaaaaaaaaaaaaagataaaaattaaaaaaataaaaaaaatattaataataaaataaacaattataatttaaataaaaaatgtcccgcccccttttaaaaatccaaccttacttccccttttttcctacataattatctttttattattctccacaaaataaaatttatttaccttctatttacaatctctatatttaaaaaaccttctcttttcccaacttattcccctttaataatattccccctttcaccatttattttaaaatttataaaatctttaacacttatcccttttaaaaattattcaccccataattataattttatcctcctcctttatctatccttttaatcacctatctatttttttttttattcctcatatttatacttttattttt

SEQ ID NO: 11085 - DNA, 131 bp, Zea mays
  Clone ID: LIB3157-002-Q1-K1-A1
ctccgttgaaaccccattttttttttgtttccttattgactctgaagcccgttgaaaccggccattattaaccgtgtaccgtgtaatgttacttaggccctgtgttacttaggccctgtttgtttctgatt

SEQ ID NO: 11086 - DNA, 176 bp, Zea mays
  Clone ID: LIB3157-002-Q1-K1-A10
attaaaaaaattaaaaaaaaaaaaaaaaaatttcaataaaaaaaaaaaaaaaatagaagatggttaaatcatacttaacttcatatcctttccccccctccacctttttatttctttcctttcactcccttccattccccttcctttctttttccactccctttccttaattttca

SEQ ID NO: 11087 - DNA, 381 bp, Zea mays
  Clone ID: LIB3157-002-Q1-K1-A3
ggtcgatttgctgttcgtgacatgaggcaaacggtggctgtcggagtcatcaagagtgtggagaagaaggacccaactggagccaaggtgacgaaggctgctgccaagaagaaatgatctatctggctggtgctgtgcttgcttgttggttacctcgtggaagcttaaaatatctcgtcttgttgacatccttgcagttgtcgcgtgaacaagtaatctatgatggcaatgtttgcctggtcatgaagtattattactttcgttgaaaccgtgatgctattaagacttaacttttttatggaacatcgaatgtaaggcatacatggttatgagttttgtactaccctttgtgcagggtgttcctgtttacctattgtgctg

SEQ ID NO: 11088 - DNA, 306 bp, Zea mays
  Clone ID: LIB3157-002-Q1-K1-A5
ggaaactatgaaattgcttacagaattgcggacagtcggagaagatggcagggttacgttatgatatactttcatgtttgtatgctggttgaaaatgtaaggaaactcttgttttcactagaaaggaacccctggagggggggagtaacggtgtagaaggtttatgttgtcacagttggcatgcattcatataggaatagctagctgatggcaccgttatgccaacacagttataacaaatatcaattgtaaattttatgattggttatcgactaagcaaaacaattttataagaaattgttgtgc

SEQ ID NO: 11089 - DNA, 363 bp, Zea mays
  Clone ID: LIB3157-002-Q1-K1-A6
gctgctcgcagtgctatactgccgatgctccaagcagaagaggatgaaagatgtgtcaaagagtggaagaagtatcttgaggaggaggcgaggatcatgaaagatgttccagggtggaaggtcggcgagagcgtgtacaactctgggaaatggatgcccccggctactggtgagctccgccctgaggtttggtaagggcctgttgcaggcactgaatgccatcatgtcacggtggcacggataaagcttcatttttcattaaggatcagctgtttaaagacctgtatttgttgtacttgaaatctggctggttaataattggacatgtaaagccgccgtttacatttatgtaacgtgttcttg

SEQ ID NO: 11090 - DNA, 364 bp, Zea mays
  Clone ID: LIB3157-002-Q1-K1-A7
cggacgcgtggggaaaaacatcaggtcagactaactttctccgggcatgggcggtacccttgacttgccgcctccttattcaattgttattcaggaatctgaagatggaagctggcatgtaccaacaacaacaggcgatgatattgaaaagccacggcagtggttgtgcactactagaaaatctttgaggtagatgtgatttaattttggcccagtcaagttgacacagaatggtgccaaccttggtgggaactgggaagggtggtggcgtgacgaaccctgaaaccagcaaagcttaaatgcagcaacttgttggcccgaacgaaagaaagctgattggagtacacgtgatgaatatgagcag

SEQ ID NO: 11091 - DNA, 377 bp, Zea mays
  Clone ID: LIB3157-002-Q1-K1-A8
ggcggcgtccgttcttttccttgtcacgctctcggcgcgtggcggtgaagaagtagaaggccggtcgccgaggggggccaccacgcatcggatgcctgcgcttttgaccgttgtcatgtgctgtggttgtggggccaggacgccgcggcctgcgtcaagaggaacggatcaaggcccatcatgcgcttctaggcccacacaatgttgtaactcacaaagaagcttgtgtatatagagcacatccatgttaagtaaccctagttagggttatgtgggcaaatacctgctttatccttagaagtatcacatctatatataagtaatttgtacaccccctcataatacagagaagagaaagagtcgagaggtccaaccct

SEQ ID NO: 11092 - DNA, 349 bp, Zea mays
  unsure (1)..(349): unsure at all n locations; Clone ID: LIB3157-002-Q1-K1-A9
cggacgcgtggggaagaagcaggacgctagcatcccccgcgtcggcagtgctggcgactggtccaaccagttctgaccatcttcttgccatccattgtcccggctagtacgaggtgcagagctgtgtatctgatgaatccatgagacgatttctgctacgtttcttgcacgcttgtcgaacactgtgagactcacatcgcgctcatctacgctacgtgtaactgatactaatgatacggagtgttccaggtggtggtagatgtactgcagaatctatctcccatgtttcaataaacctgaataaggtgctcggtttggatctatgcatttctgattctagtnnnnaaaa

SEQ ID NO: 11093 - DNA, 304 bp, Zea mays
  Clone ID: LIB3157-002-Q1-K1-B1
cttgagtaccgagttttttccggtgaaagattgatgggcgatgccacagcctgaagacggagaggatgtaaagaaaaaactcgccaactaagggcttggtcgggtattcctattccatatggattggatgaaaatggaaaaaaatgggaaagaattttacttggttgggaatggaaaccattccaatccaacccaatcacattggttgagaagcaaaccaaccaaccctctaaaatggtggaggttgtagtacaaattccaggccttcggttgattttctaagagttagttgggttaattttct

SEQ ID NO: 11094 - DNA, 315 bp, Zea mays
  Clone ID: LIB3157-002-Q1-K1-B2
ggaaactatgaaattgcttacagaattgcggacagtcggagaagatggcagtgttacgtgatgatatagtttcatgtttgtatgctggttgaaaatgtagggaaactcttgttttcactagaaaggaacccctggagggggggagtaacggtgtagaaggtttatgttgtcacagttggcatgcattcatataggaatagctagctgatggcaccgttatgccaacacagttataacaaatatcaattgtaaattttatgattggttatcgactaagcaaaacaattttataagaaattgttgtgcggcaattta

SEQ ID NO: 11095 - DNA, 305 bp, Zea mays
  unsure (1)..(305): unsure at all n locations; Clone ID: LIB3157-002-Q1-K1-B3
tcgnaaaaaaaaaaaaaaaaaaaaaaaaaaaattaaaaaaataaaaaaaaaaaaaaaaaaaaaaggaaaaagaaaaaaaaaaaaaaaaaaaaaaaaaaaaaaaaaaaaaaaaaaaaaaaaaaaaaaaaaaaaaaaaaaggggggggccgttttaaaggatcaaattttacttacccttgcttgcaacgtaatattttttttttaggggaacctaaataaaattaattggcccccttttaaaaacgcgttgattggaaaaaccttgggtttcccaaattaaatttctttgaaaaaaatcccctttt

SEQ ID NO: 11096 - DNA, 311 bp, Zea mays
  Clone ID: LIB3157-002-Q1-K1-B4
caaaaaaaaaaaaaaaaaaaaaaaaaaaatttaaaaaatttaaaaaggaaaaaaaaaaaaaagaaaaaagtataaataaaaaaaaaaaaaaaaaaaaaaaaaaaaaaaataaaaaaaataaaaaaaaaaaaaaaaaaaaaatataaaaataaaaaaaaaaaataaaattaaaaaaaaagggggggcgtcttttaaaagtttcaaattttccccccctgtttttgaaaaaaattattttttttttgtttcaaataaataaaaattaattgccccttttttaaaaaataggattttgaaaaaccctttttttt

SEQ ID NO: 11097 - DNA, 254 bp, Zea mays
  Clone ID: LIB3157-002-Q1-K1-B5
cttttcactggattcgactttgaagcccgttgaggcaattagcagagtcgggatgttaattttggtcgcccaaaaaaaaaaaaaaaaaaaaaaaaaaaaaaaaaaaaaaaaaaaaaaaaaaaaaaaaaaaaaaaaaaaaaaaaaaaaaaaaaaaaaaaaaaaaagggagtaaaaaaaaaaaaaataaaaaaattaaaaaataaaataaaataatattgtaaaatgtttttaaaaaaattatgtaaatttaaaaa

SEQ ID NO: 11098 - DNA, 417 bp, Zea mays
  Clone ID: LIB3157-002-Q1-K1-B6
ggcgtctgacctcaacaagcaacaaagcatatggcaggcggcagggttgcacatgccaccctcaagggcccgagtgtggtgaaggacatcttcattggactgaccctgggtctgatcgcgggaggcatgtggaagatgcaccactggaacgagcagaggaagactaggtccttctatgacatgcttgacaagggccacatcagcgttgtcgtcgaggagtaaaaagttcttcccagttattttcaaagaactctctcgagagcatgacaaagtgattgcttgctgtggagatttgtcctggaaataagcacaaccatttgagaacaccacattttgtcgaattttcctttccttttgatgaatatttgagcacgtccatgtcaataccaaacatctggccttttcttttctgttttt

SEQ ID NO: 11099 - DNA, 437 bp, Zea mays
  Clone ID: LIB3157-002-Q1-K1-B9
ggcgtctgacctcaacaagcaacaaagcaaatggcaggcggcagggttgcacatgccaccctcaagggcccgagtgtggtgaaggacatcttcattggactgaccctgggtctgatcgcgggaggcatgtggaagatgcaccactggaacgagcagaggaagactaggtccttctatgacatgcttgacaagggccacatcagcgttgtcgtcgaggagtaaaaagttcttcccagttattttcaaagaactctctcgagagcatgacaaagtgattgcttgctgtggagatttgtcctggaaataagcacaaccatttgagaacaccagattttgtcgaattttcctttccttttgatgaatatttgagcacgtccatgtcaataccaaacatctggccttttctctctctgcttttttttacatatgtttatgtg

SEQ ID NO: 11100 - DNA, 366 bp, Zea mays
  Clone ID: LIB3157-002-Q1-K1-C1
ggcgccgccgtccatgtggcaactccacacccagcaaaaggcaagaccattgtaaacaatgacaaatcggtcaagtctccaaaatctgcgccaaaatctggtgtcccttgcaaatcgtgcagcaagtcattcatcagtgagacggcacttcaggctcactcgaaggcgaagcatgggggcaagtgagtcgcaggtccaatagagtcaacaacaaatgcgaaacatgggagaggagggtaagcgagagtctcgaaagagtgtcggtggaagtaggcctaaccttattttgtttagagacgggctatgcgttcgatgtagcaaaacaaggctgtgggttgggtaccttaatatttggggtggggggtt

SEQ ID NO: 11101 - DNA, 337 bp, Zea mays
  unsure (1)..(337): unsure at all n locations; Clone ID: LIB3157-002-Q1-K1-C3
ntccgcggacgccgtgggtcagtcattggacctgaagtatggtacactgtccaacgatccggcattatgtgaggattgcaaggcaatactgtacatattataccttgaaaacaacagatgaagctgtggaattaaagaaaagaaatcaagtccaccgaatggttggtggtgtcattgttttttttattcccatttggcagggtatcatgtcctcaattactgtatttatcgatatcgagggtttgacgatagagtggcttgtgcatggcatgcctaccacgcctataaaagaatgaaaagtgaaagtgtctaagcgtctagctcctagttgagtttt

SEQ ID NO: 11102 - DNA, 305 bp, Zea mays
  Clone ID: LIB3157-002-Q1-K1-C5
catcaatcttgtaatggcttaatctccacaatcatcatgtaatttattgcatgcttcattcaccgaggactcaataatctctcttgctctaaaatcgacgtattcgtttttcttgtgattttgtacatgcacataaatttctctctggaaacattgcttgtgcttacaacacatagtgtaaagaaaaatctaaaaaaatcaacaacatattctaaacataaaaaatgaactataaaaaaaaattttaaaatgaaagaccaaaaatattaaacaaaaaattatggggggccgttttatagaaacca

SEQ ID NO: 11103 - DNA, 456 bp, Zea mays
  Clone ID: LIB3157-002-Q1-K1-C6
tcgaaataaaaaaaaaaaaaaaaattttaaaatttaaaaataaataaaaataaaaagagaaagtgaaaaataaaaaaaaaatattataataaataaaaaaataataaatattaaattataattattatttaacatttatttctttaattattaatatatttattattttttgttgttttttttaattatccatcttttttttcctttctttattatattatatttttttttattttttcttaatattctttttttttccctcttttttatatatcttattttatttaaaaatacttgtttttttccaatatattttaccctattttatgaaattactttttttcttacttttgtgttttaattttataaataggtccttttaatttttttttttttaaaaatattttcctctatatttttttttttttttgtttctccttttttttttttattttt

SEQ ID NO: 11104 - DNA, 55 bp, Zea mays
  Clone ID: LIB3157-002-Q1-K1-C7
aaaaagaaaaaagaaaagggaatgagaaattgactaaagctggtcatttttgctc

SEQ ID NO: 11105 - DNA, 274 bp, Zea mays
  Clone ID: LIB3157-002-Q1-K1-C8
tcgtaaaaaaaaaaaaaaaaaaaaattaaaaatttttaaaaaaaaaaaaatatatggggaaaaaggaaaaataaaaaaatatattttaaaaatattattaaaaaaaaattttaattaattaaataataattaattatatttttggttgttcttttttattatttattttttctttctctattttttcaaccctttattttttatttttttgtttataattttttttttcttttttgtattttattatattttcaatattttaaaattttttttt

SEQ ID NO: 11106 - DNA, 396 bp, Zea mays
  Clone ID: LIB3157-002-Q1-K1-C9
cccagcgcggcgtgctgcagtaggctcaaggagcagcagccgtgcctgtgcacgtgcgcgcgcgaccccaatcttcagcgctacgtcaactcgcccaacggcaagaaggccatggccgcgtgcaaggtgcccgtgccgtcgtgctagttaacttctgtttgcgccgccgccgcgtacgtgttgtgtcgtgcctgtgtcagtagcagcatggcccactggacagggacagagtatggcgtcactttctgttttcgtacatacgtacctggatcgtgccgtactgccgcgtatgcgtgttctctggtggtactccatccgctgcctgttgtgtctaccgagctctttggacagctacgcgtgcgtatgaataaatgatataccagatcgcttggcttt

SEQ ID NO: 11107 - DNA, 308 bp, Zea mays
  Clone ID: LIB3157-002-Q1-K1-D1
gttctagatcgcgagcgccgcccttttttttttttttttttcatccagattaagtgcccagatatcttaagaggtattgtattacgagctgaacttacagtccagcacagtagttcagtacagaacatagataatccagatttaaaacatcggtgccagaaacgtctcgagaggcaaggctgcctgaaaaggtacataaaagagctacggctataatacttcgacaaaatggcctcgatcagcatgctgatatacttcactgcttccttgctgcgacaatgttgtcagcctctttcttcctagatcgc

SEQ ID NO: 11108 - DNA, 262 bp, Zea mays
  Clone ID: LIB3157-002-Q1-K1-D2
aaaataaatcaaaaacaacaaaccataattttttatttttttaataaaaaataaaaaacccagatatcttaaaaaagaattgtattacgagcattaacttacaatccaacacacgtcgttcagtacataacatatatattccaaatttaaaacatctttgccagaaacgtttcttgaggcaatggctgccttgtttggtacataaaatatcttctgcttttatacttcgacaaattggcctccttcagtatgctgttatact

SEQ ID NO: 11109 - DNA, 373 bp, Zea mays
  Clone ID: LIB3157-002-Q1-K1-D3
ggaggagggggagttctccgaggcacgcgaggacctggccgccctggagaaggactacgaggaggtcgccgcagagggcggcagtgatgacggtgacgaggaggaggaatactgatctgcttgcatgaatctgtttggctgtcgagccaggttgtggtgttgaaaaacctttgtttgtgtcctggcccccctgggtaatgtttgggtgtttccttccatcatcacttgctgaactgctctagtatttgcatttgtaattgaagtctgtcgctttaagcactcttgggtctaaagaactttgtgctcttgggggggtgttttgcattggcccacattccaaaaaaaaaaaaaaaaaaaaaaaaggggggccgtt

SEQ ID NO: 11110 - DNA, 377 bp, Zea mays
  Clone ID: LIB3157-002-Q1-K1-D4
ctgtccgtgacatgaggcaaacggtggctgtcggagtcatcaagagtgtggagaagaaggatccaactggagccaaggtgaccaaggctgccgcaaagaagaaatgatgtgtctggctggttctgtgtttgcttgagggaaacctagtggaaacataaaatatctcgtcttgttcacgtcattgtctgaactatgctcgcaacgtttgcctggtcgatttagaatggttattttcgttaaaaccagagtgttatttaagacttatccgaacatctggtgagccatatatggttactagttttgttactacccttgttggtgttgcgtgcttctttagcaaatgtgctgcttctaaattgctcattatttgctcgtcc

SEQ ID NO: 11111 - DNA, 113 bp, Zea mays
  Clone ID: LIB3157-002-Q1-K1-D5
acggctgatggcccctcagtaaagcttcctgcagcttcgttgttactttgttcgggcgaagcggcggcttcttttgtttgctcatcaataacatctttcattaaatttttttt

SEQ ID NO: 11112 - DNA, 378 bp, Zea mays
  Clone ID: LIB3157-002-Q1-K1-D6
gagaaatcgatgctgatgactccgatgtggagcctaaaagcgatgacgagagcgatgaagatgatgatgacgacgacactgaagctctaatggcagagcttgagaggattaagaaagaaagagccgaggagaagcttataaaggagcggcaacaagcagaagaggaggcgaagatgaaggaggctgaactgatgcggggaaacccgttgattaatatcaataatgctggctccttcagtgttaagagaaggtgggacgacgacgtggtattcaagaatcaagcacgaggagagaccaagacaccgaaacggttcattaacgacaccatcaggagtgattttcaccgtaaacttctttagaggtacatgaagtgacgct

SEQ ID NO: 11113 - DNA, 267 bp, Zea mays
  Clone ID: LIB3157-002-Q1-K1-D7
ctacggtctaccgcaggctgtgtgggaaagatgtggtctttgagtaccctatgaccgaaaatgcataaacatgacgccccggatatccccatttcatttcgttgaatctggatgtttctttggggtctcaactagactgctccgtatgtacttcaaaaaccatagttttgatgccaaagttgttgcctaggaatttggtactcgggaattggcagcggacgtgaacaatgttaagtcttgagcatttaaatttacctttgccatgat

SEQ ID NO: 11114 - DNA, 426 bp, Zea mays
  Clone ID: LIB3157-002-Q1-K1-D9
tgattagtctgcaaaatggatgtcctgtggaaacatggtacataatatgacaccgtttgataacactgaggcattacagaagaaccctatttccgttcagtttttgcttcgtgctggcaatatcagaatccaggcctcatctttcagtgatggttctgtctgcaatatggactatgtatccaaatccaagtccccgcttcagggaaaacctccttggagaaacatcatctaatatgatatgaattctgatagacagatacagatatatctatgcattattgtatcattttttctagtttcaaggaatcataattattttctatttagaaatctttggtttgcatttgcccaatttaagctcaaattctggcttgtgcacttaataagttgcttctgaatcttgcagaagcatatcttcagagagga

SEQ ID NO: 11115 - DNA, 355 bp, Zea mays
  unsure (1)..(355): unsure at all n locations; Clone ID: LIB3157-002-Q1-K1-E2
cgaagagagcagaagcgaagagcagcggcgcaaaggaaagggagccatgctcgcctcgccggcgctcgccggcgcccactccttcgcggcgtccgtgtatggaaacatcctcgtcccctcgcctcccgtccccgcgccggcacgtcgcgcggcgctgtccgtcgtcgccaaggtcaaggtggccacgccccaggacgaccgcatcgcccgccacgtccgcctgcgcaagaaggtaagtggcaccactgagaggccgaggttgagtgttttccgctcaaacaaacatctgtacgctcaagtcatcgacgacacanagcaatgtactctggcttcagcttcaaccatgcacaaaatc

SEQ ID NO: 11116 - DNA, 272 bp, Zea mays
  Clone ID: LIB3157-002-Q1-K1-E3
gctggatgggacgttgaatcttcagcaaagggagaaagttataaaggagttctcagaggacaaaggcattttggttctgcttatgtctctgaaggctggaggtgttggaatcaatcttactgccgcttctaatgcatttgtcatggacccttggtggaatcctgctgtggaagaacaagctgtcatgcgcatccatcgaattggtcaaacgaagactgtttctatcagaagattcatcgtgaagggcactgtcgaagaacgaatggaggctg

SEQ ID NO: 11117 - DNA, 357 bp, Zea mays
  Clone ID: LIB3157-002-Q1-K1-E4
tgagactgggacaggatatggagcatggctccatggggaggctgtcgcagctggaacagttatggcaactgacatgtctcaccgcctggggtggatagatgactccatcagaaaacgtgtggttgacatactaaagcaagccaaacttcccattgcacctcctgagaccatgaccgtagagaagtttaaaaacatcatggctgttgacaagaaggttgctgatggtctgttgagactcatccttctgaaaggaccgctagggtgctgtgtatttacgggggattatgacgggaatgcactcgatgaaaccctacatgcattctgcgacaactgagacatccccagtttggacattac

SEQ ID NO: 11118 - DNA, 321 bp, Zea mays
  Clone ID: LIB3157-002-Q1-K1-E5
cgacccacgcgttctgttgagtttatctcttgattatttcacttatttttgctagaactgtttctagggctagagaagaaattaatgcgtgctttcttttgagcttttattgttttaaaaaaaaattatacttttttttattaattaatttaattataaacccctatttttatttactaattattaaaaaagggcggccgttttaaattatccaaattttctaacccaatatatgctatttataaaattattttatttggtaaggtaaattcaataaactttccgtctctttttaacgttttaaatggtaaaacctttttt

SEQ ID NO: 11119 - DNA, 265 bp, Zea mays
  Clone ID: LIB3157-002-Q1-K1-E6
agcccattgaagatgtgcttaaaattttgatcgagtgacatgtatggaaacttagggggtgtttgggaacaaagtttttctgcagttttggaagaatactgcagtattctcaaatactgcagtattatatacataatggtgtttggcaagctgggtaaaatctctgttttcaaaaaaaaaaaaaaaaaaaaaaaaaaaaaaaaaaaaatatatataaaataaaaaattaatataaatcaattaaaaagtaataaattaatttatt

SEQ ID NO: 11120 - DNA, 130 bp, Zea mays
  Clone ID: LIB3157-002-Q1-K1-E7
aaaaaaaaaaaaaaaaaaaattaaaaaaataaaaaaaaaaataaattcttttggtaaaaattacaacttacatacactttctttcaaaaataatatatatttcttaaaaaaactctaaattctttttaat

SEQ ID NO: 11121 - DNA, 313 bp, Zea mays
  Clone ID: LIB3157-002-Q1-K1-E9
cacaacttctgggacgccaagaagagcgacaccgagaagttcgggaggttctagcgtggcatgctggaggagggcgtgtacttcgctccctcgcagttcgaggcggcgttcaccagcttggcgcacacctcccaggacatcgagaagaccgttgaggccgctgagaacgttctgaagcggttataggtggtccgtttcaagcaagcatgcagagagcattttcttgtatctacagtcttgtactcttagttctatatgcccaccgacgttttttattgtgcattaataggaccagcttttgtaagtttcctct

SEQ ID NO: 11122 - DNA, 181 bp, Zea mays
  Clone ID: LIB3157-002-Q1-K1-F2
acctgactcgctcgttttgatgcctataattggtaataaagggaaaaaaaaaaaaaaaaaaaagggcggcgtctaaggacacttacgacctgctgcacgcatacttttatggactaaacaatatggcgcgttacaacgcggactggaaaacctgcgtacccaacttaatgctgagacatcc

SEQ ID NO: 11123 - DNA, 372 bp, Zea mays
  Clone ID: LIB3157-002-Q1-K1-F3
gtacgccgacaggaaccccagcttcgtcggctgcgccgagcacgccctcggcatccgcgggtggctcgagtcgcagggccaccagtacgtcgtcaccgacgacaaggacggccccaactgcgagctggagaagcacatcgcggacgcgcacgtgctcatcaccacgccgttccacccggcgtacgtgaccgcggaccgcatcgcgcgggccaagaacctggagctgctcctcacggcggggatcggctccgaccacgtggacctggccgccgccgccgccgcggggctcacggtcgccgaggtcacgggcagcaacacggtgtctgtggcggaagaccagctcatgcgcgttctcgttctcacgcgcaactt

SEQ ID NO: 11124 - DNA, 120 bp, Zea mays
  Clone ID: LIB3157-002-Q1-K1-F4
cggacgcgtgggcggacgcgtgggcggtcacatcttgtatcaagctgacaatgacatggcggtgagaacactcatggatgagtctgggagatatgtccatcgtccgtcccggtggctgac

SEQ ID NO: 11125 - DNA, 334 bp, Zea mays
  Clone ID: LIB3157-002-Q1-K1-F5
ggccgaccacgcgtccggaattattttacaaggccagttcctgcttaatctggattccacttcttcagtcgttttgtgtgtccaaaattcagaatagattatgatcccgtttgtggcagtgcacattttgatctaacaccttactgttgtgggaagcttgggaaacacaaactgatatcctttcaagcatacaataacattggaatactcttcctggagttagaagctacacgcatgataatgcgaatttatggataagcggtcagtgtgatgactggcaccctcttagcataacccatggtcaatgaacatactatgtctctactttagtttg

SEQ ID NO: 11126 - DNA, 296 bp, Zea mays
  Clone ID: LIB3157-002-Q1-K1-F6
agggcttctaaaagttcgtcatgttctgttttggtcatttgggcaccaaagggtgcgcgtcatttggttctgtaatccgtgagctcgtgcatgtacttggcgtattgcatgcagtgaataatttagcttgggtttgtttgttgggggcagtgttggggacggatttggattggggtttatgcttggcatcgcgtcgtatcgaaactcagctgctgtttcgctgagtaatgtacatttccctggtaatggtacttgtggactctgatgcttttatgggaacgagtgcattttactgc

SEQ ID NO: 11127 - DNA, 62 bp, Zea mays
  Clone ID: LIB3157-002-Q1-K1-F7
aaaaaaaaaaaaaaaaaaaaatataaaaaaaaaaaaaaaaaaaaaaaaaaaagggggggcgg

SEQ ID NO: 11128 - DNA, 257 bp, Zea mays
  Clone ID: LIB3157-002-Q1-K1-F8
gttattgtcgatatgataatgcaaataaaaaatgtaccttcggtttgaaggaaagcaagggtacaagcgtgatgcaaaaagcgaatgccaaatcagcgtgaacagtacgaggatactgttcacctatttataggcacgggatgcagcccatgtaaaattacacccatgccctttacatttgctaataactctatagtaattcttcgaggtctaatttgccttttcatctttaagtcggttcccgttctagatcgcga

SEQ ID NO: 11129 - DNA, 155 bp, Zea mays
  Clone ID: LIB3157-002-Q1-K1-G2
gtcgctctgtgtcagttgttagtgctgtgttcatcctcggctccagcagacccatgcatgaaacaggatggactgcggatcgatggatgctgttacccccgtcaggctttattctaagttaatcttaaggaaaaaatggtgcttcttggtgctgc

SEQ ID NO: 11130 - DNA, 236 bp, Zea mays
  Clone ID: LIB3157-002-Q1-K1-G3
tcgcggacgcgtgggcggacacttgggtgtaattttaggccgctgctttataggagtaggttgaacaaaactattaaacctttatataaatataaaaaatatatattaataaaaaataataaattttaaaaaaaaataatataatatattatctttattatttaaaattttaatattaaaaaaatatattaatttgtatacaaataaatgggtttctttcttttttaaatcaaaaa

SEQ ID NO: 11131 - DNA, 254 bp, Zea mays
  Clone ID: LIB3157-002-Q1-K1-G5
gtgaataatatattaacagaaattcaacttttggttatggaagccacttttggggcgagggctgatgttccatagaacatccatctggttgattgaacatgtggaattcaatgcaaaatgaaaagtatgagccacttttagcatgatcaatggcatctttcatacataagcctttttgaataagataagcctaataccaagtcgcgaattgcaatgaatatatgagctttgtgcaatgcttgtaagaataattt

SEQ ID NO: 11132 - DNA, 112 bp, Zea mays
  Clone ID: LIB3157-002-Q1-K1-G6
aaaaaaaaaaaataaaaaaaaaaaaaaaattaaaaaaaaaaaaaaaaaaaaaggaaaaagggaaaaaataaaaaaaaaaaaaaaaataatataatataaggggcggtctttt

SEQ ID NO: 11133 - DNA, 222 bp, Zea mays
  Clone ID: LIB3157-002-Q1-K1-G7
tcgacgtcaccaacttcgtgcccggcaagtgtaggggtcggaggggccaccgcggggcgtcaggggtctccgatgtcgatatctatgtgttcggatgcacgttagcgcgcactggttccagattgaaccatgatgtaaattacttaccgttccagggttcaatcggcaaggaataattgttgtgttcacttgtctctggcttttcaacattttgtaatatta

SEQ ID NO: 11134 - DNA, 371 bp, Zea mays
  Clone ID: LIB3157-002-Q1-K1-G8
ggctgaagcaggttctatctacaagataatcgaacaattagagagaaatctgtgccatgctttctcaactactttgctgcacacgtgcgaaacactattgaagatatatctggaattacaagattggtggactgcattgacatactgtagattgacaattcctgtttatgaaagagtttatccaccttttcatccgatgattggattacaattctatacttgtggaaagcttgaatggttgcttgagttcacagaggatgcactaaaatctttaaccagagcagcagatatacttaaagttacacatggcgttaaatcccagttcatgaaagagctctttggcaagttataggaagcaagagctgaagttt

SEQ ID NO: 11135 - DNA, 302 bp, Zea mays
  Clone ID: LIB3157-002-Q1-K1-H1
ctcgccttcgcccaaaaaaaaaaaaaaaaaaaaaaaaataaaaacaaaaaaaaatacaaaggggagagtgagaaaaaaaaaaagacaaaaaaagaaacaaagtatgtaattttttttattgagagtttggaaaaaattattttcgctcgccgtgttgtttgattatagtgtgttgtataaaatttttctgattgacaggggtgttactttattgtacacccctttgacatttttatttctctgagaaaaaaatgtcttttttgtgttctcattatttttttttattatgtgtcccgggtttt

SEQ ID NO: 11136 - DNA, 171 bp, Zea mays
  Clone ID: LIB3157-002-Q1-K1-H11
cttggattgatcagtttgtgctatcaatttactgcacggggcagcttctcttagtttctttttcatcgagaataatatactatctagtaggaccgaaactatctggcagatcagcatccgaaagtatcagctcatgtccatcctttcgtgtcggcgtcttttttcctttgc

SEQ ID NO: 11137 - DNA, 201 bp, Zea mays
  Clone ID: LIB3157-002-Q1-K1-H12
tcttacactttggagccgccctttttaaattattgtctctctcttcttctcttggtttttttatcatccacattttcccacaatataaaaataccttttctttccgacataccaacatccatcttaatttatcctatttttctccttataatttacttttttattttttttcaccttcaaatcaatactcctttcttttat

SEQ ID NO: 11138 - DNA, 325 bp, Zea mays
  unsure (1)..(325): unsure at all n locations; Clone ID: LIB3157-002-Q1-K1-H2
cggacgcgtggggtgatgctgatatccgcaagtaccaggtgtttgcccagacattgcagcagtcccgggggtttggcagtgagttccgcttctcggatcagccggcgacagctggtgctgctgctgcagccgatccgtttgcttctgcgggtgctgcggctgatgacgaccatctatacagctagttgggttgttcaatatcagtcccgtcactcatctgtttaaaactgatcatactaaacacgcatgtcatgcaatgatatttatttgccgtacatttggacgtcgctgagatgatgcactctcggccttcggttaccttntc

SEQ ID NO: 11139 - DNA, 289 bp, Zea mays
  Clone ID: LIB3157-002-Q1-K1-H3
gttcgtgtgtgtgtgtgtgtgatcggccggatgctaattggcgttggtgtgctcccgtagcgatcgatgctgccaatctgacgaggcttcgcgtgtgtttgctttgctattttcggttctcgggagagatggtgcaggcgtggtgtgttgatgttgatgggtggagtagaagctcaggggagtggcagcggactaatgaaacgtccacctctgcgacgtagaattccactgaaaaaaaaatgctccagtgtaccataagctgcttcagatttgatcgtgttttctctcc

SEQ ID NO: 11140 - DNA, 359 bp, Zea mays
  Clone ID: LIB3157-002-Q1-K1-H4
gtccgtgaaggagagtatgtctttggtgtcgctcacatctttgcatccttcaatgacaccttcattcatatcactgatttgtctgggagggaaactctggttcggatcaccggtggcatgaaggtgaaggctgaccgtgacgagtcgtcaccttacgctgctatgcttgctgctcaagacgtcgcacagcgctgcaaggagcttggcattactgcactgcacattaagcttcgtgccaccggaggcaacaagaccaagacccccggacctggtgcccagtctgccctcagggcgcttgctcgttctgggatgaaaatcggacgcattgaggacgttaccccggtccccacggacagcac

SEQ ID NO: 11141 - DNA, 332 bp, Zea mays
  Clone ID: LIB3157-002-Q1-K1-H5
tcagtatgccaaggttaaatgacttataccagagcgctgtagggatgacttctgtgggttcagggatggcaccgaccaaaaaggagccacgcaagaatatattaagaaagagagtgtaaatggcatattagcttagccttaggggtcgagaaatgagacatgacaaattgagcaatttcaacagtggaataacttatggtttccccctcgggtaattatgccgactaaaaggaatgccagttttgttgtacgatagcactatgcacagtttttgaagccttatattgtgccgttttggagttgatggtcatgaatgaactttctcaccctta

SEQ ID NO: 11142 - DNA, 397 bp, Zea mays
  Clone ID: LIB3157-002-Q1-K1-H6
caaaagttcgaggatcctgccgaaggtgaagaagctttggtcggcaaatttgagaaactgtatgatgacctcaccactggtttccgcaatctcgaagacgaggcacggtgaactagtgtagattctgtgtaaacaaggactgccaaatgttttataagatacataaattgtagattgagatcatctgtaagaattattcccaccgttgcaccatctcttcgccaccactgttttagtcatcggtgcctgatgggcaccctgtttatttcatgtatcatttattgctgtcattgtaataagcgatgggcatgattgtagttgaataagtacaatgttcatgtattcagacaccagtatcgtgcttatttgtttgttaaaaaaactatgttgccctttt

SEQ ID NO: 11143 - DNA, 313 bp, Zea mays
  Clone ID: LIB3157-002-Q1-K1-H8
aaaaaaaaaaaaaataaaaaaaaataaattaaaaaaataaaaaaaaaaaaaaaaaaaaaaggaaaaaaaaaaaaaaataataaaaaaataattttataaaaaataacaataaaaattaaaataaaataatttacttaataattgggttcccttttttttaaaattctaatttctataggcgtgccttttttataaaaatctttttttttttccccctttttaaaattaaatttttttttttttttccccccttttatcttttaaacccctctctttttaccaaatttttttttttttaaaattttttttcttt

SEQ ID NO: 11144 - DNA, 174 bp, Zea mays
  Clone ID: LIB3157-001-Q1-K1-C10
acccacgcgtccgcggacgcgtgggtttttttatgagggtgcgtttggataagcaaatagcttggtggcttggcgttcgattgttatattgagtgacaactgagatttgaaggcatcttcgagacacttttttgaaggcagtcaaggctgatgaatgacaagctatttgttgtt

SEQ ID NO: 11145 - DNA, 423 bp, Zea mays
  Clone ID: LIB3157-001-Q1-K1-A12
ctcttcttgatctactcccctgagttttacaaccttttgccgattctttactgggagttgcaattccaccatgtgccacatcctttgtccactcttcacccatttagtgctgtgaaaaaaaaggttcaagtagctgtagcatggtataacaggtgtgtgtgtgtgggaattccatattagctcttagatttagtgtttccttcgtcattgacatgctgtggaacggagagccagaattacaggactggctgccagctgggtgcccgtcacttgttgcttgcttcagttatctttgggaaaagatactctgaaagaattaggagttgtccctcgccttttttttcccttgctggataacttgtaccttatcctctgtaattaccatggctcttaggaacatatgtgccatttggtggttcacat

SEQ ID NO: 11146 - DNA, 320 bp, Zea mays
  unsure (1)..(320): unsure at all n locations; Clone ID: LIB3157-001-Q1-K1-B10
ctctctctttgttgttggccacctttatctcgtgatgtttgtgtgcatgtggtgggctctactgctaccgctacgacgatcggtgtccatcaccggatcaagcaagacgaaaggcatcgaaacatggtagataaataaggacttggccctgcgttgtgtggtggtaagaaattcttctgcctgtgttcttgtagagcctactcgtacgttctcgcccaccctgtccgtacgtacgtgtacgtagttttgccgnccggccgctggttcgtgtttcgtcgtggtttccgggtctgtattaatacttcggcccttccccaatt

SEQ ID NO: 11147 - DNA, 313 bp, Zea mays
  Clone ID: LIB3157-002-Q1-K1-A2
ggagccatcgcttcggcatccggaagaaatggccaagtcgaagaaccacacggcgcgcggccagtcgttcaaggcgcacaagaacggcattaagaaacccaagcgccaccgccagacctccaccaaggggatggaccccaagttcctgaggaacctgaggtattctaggaagggcaacaaaaagagtggtgaggctgaagctgaggagtaggaaggaaagcatggctttgcttcctctgtttttagctcagttccacctttaggacctgtggttttgctaaagatggaacttaagttggtgttactgcatgat

SEQ ID NO: 11148 - DNA, 179 bp, Zea mays
  Clone ID: LIB3157-002-Q1-K1-C11
ccggatctaggttagctaggaatgggaatttgttgattcgttggaggccttccgagcacgcgcgcacggcacggtactcgtacagacaggccgctgccgctgccgcctgtgtggaaaggccctataccgtatatatagtgtgacaaagtcaataaagctgaaaagatcgcgttatttcc

SEQ ID NO: 11149 - DNA, 310 bp, Zea mays
  Clone ID: LIB3157-003-Q1-K1-A2
cggacgcgtgggtggatttgcaggccatggatcgatgccaccggatcgggcaaacacgcccagtgcatgtgtataggctggctacgtcacactccgttgaggggcggatgatcaagagagcctttgggaagctgaagctggagcacgtggtgatcggcaagggacagttcgagcaagacagagctaagccgagcgccttagatgaaggtgagctgctggcgcttctcaaggacgagcacaccgaggaggacaggatcgttcataccgacatcagcgacgaggacctccaaaggctgatggaccggagcga

SEQ ID NO: 11150 - DNA, 109 bp, Zea mays
  Clone ID: LIB3157-003-Q1-K1-A6
cggacgcgtgggcggacgcgtgggttgcattgcataggcaagtcgagatgatgagttggcgttgtacactaagatgaaccatgtttgtgcaatagtggtggtttttgtt

SEQ ID NO: 11151 - DNA, 275 bp, Zea mays
  Clone ID: LIB3157-003-Q1-K1-A9
gagcagttgaagatgcttccgacatgatctaaactagttgtatcgtcaagttaattctgctgaatcggtggacaaacttctacgttgtggcactggccgatcccagtgacttgccctaaaatttacgttctgtctttacatgggcatcctagtgttgtgctcatcacattattgatattgtttctgtgatgcttcctttggtcgtcttattataaaatttatttatataatttattatttaaattttaaatttatatttagtttaattttttaat

SEQ ID NO: 11152 - DNA, 58 bp, Zea mays
  Clone ID: LIB3157-003-Q1-K1-B1
atgatctttgtgtgaaccattcaatcctgtgacattattcacctatgggtttttctta

SEQ ID NO: 11153 - DNA, 313 bp, Zea mays
  unsure (1)..(313): unsure at all n locations; Clone ID: LIB3157-003-Q1-K1-B2
cggacgcgtgggtccacgggctgtcatcactggccaacatcatgtcgtttggcagcttggccatgcactcctggtacctggccagcaagctagagctgtgaagaaggggagacaagacgacacctttctccgccttgttgtgaatcttgtcagttgtcacgatggtgttgcttgctgctctcaaaccagtttcaaaattggaataactagaaaatggccagacacatacagacagggttttgtaaaatcacactatctccgatctcgaatattttgcaaaaccgctntttataaaaaaaaataatataaattt

SEQ ID NO: 11154 - DNA, 214 bp, Zea mays
  Clone ID: LIB3157-003-Q1-K1-B3
ctctgcacctccctgttattttggtcgcgtatgcttggtagcagccgtgtcttgtgtacaggtgtgttttgctattgttgatcgatgaagctgtaggtgtacatgttatgatgcccattatattattctgttgtcggcctgctgtattttagcataaacagtggatacatttgcatccatgggaaatgaaatgttctagtcattgtttcccatc

SEQ ID NO: 11155 - DNA, 394 bp, Zea mays
  Clone ID: LIB3157-003-Q1-K1-B6
cgaagctgaagaaactgcacgatgatttggaatagcagccacattcttggctcttaaaactcgacggtccattccttttttaaaaggaaccgcacataataaagctagttcctggcagtctcatgcaaaaatcaccaagcaggatggtcattctttttgttctgactggcggctgcagagaaaattgtatcctcctgttgaaagatattcatttatacagttaagtcccagcacaaccgatcgttaggttaggaattctgtccgaaatggcaacttgcatttcaaacgtctgccatgaaaatgagaataaattcggcgggctctacagatttttcatctattgtctgaacaaaaatataagcatcaaataaagtatctgggtaagtttatacta

SEQ ID NO: 11156 - DNA, 216 bp, Zea mays
  Clone ID: LIB3157-003-Q1-K1-B9
taaaaaaaaaataaaaaaaattttttttttaaaaaaaaaaaaaaaaaaaataaaattaaaaaaattaaaataaaataaaaaataaatggggggtcgttttaatgatcaaattttacaacgctcttgcaaggtataactttttttttttgtcccctaaataaataacgggccgtcgtttaacaactcctttactggaaaaaccctttgtttcccaat

SEQ ID NO: 11157 - DNA, 330 bp, Zea mays
  Clone ID: LIB3157-003-Q1-K1-C1
gttatagatcagaccatctggcgctaggctgtgttgtgcaattacatgacttgtttctttcatgttgtgaactccctggcctgcgagttctataatgcccctttttatgcgcgttgagattgcatatgtaccccatcgacagtccgaataagatggcatacttgtttacttcataaaaaaaaaaaaaaaaaaaaaaaaaaaaaaaaataaaaaaaataaaaaattggcgggccgtttataagaatcaaacttacattaatcttgtatgcaacggaaaaagtttatatattgttgtacctaaatttaaaatttactgtaccctatattttt

SEQ ID NO: 11158 - DNA, 58 bp, Zea mays
  Clone ID: LIB3157-003-Q1-K1-C12
tattaaaaaaaaaaataaaaaaaattttttattataaataacaaaaaaattagggcgg

SEQ ID NO: 11159 - DNA, 395 bp, Zea mays
  Clone ID: LIB3157-003-Q1-K1-C2
gttaacgaggcccagtcccgcggcggccgtggaggcggcggtggcggatacggtggcgggcgccgtgatggaggcggctacggcggtggcggtggaggctacggcggtggtcgtggaggctacggcggcggtgggggatacggtggtgcaaaccgcggcggcggctacggcaacaacgacgggaactggaggaactgagcggtggggtccgctgaggcctagttatcttgttcgcttctgctaccgtgttcaccctagtctagagggggtttatcttcgtctgtggtcgtctcgtgtccgtatgtttcgtttcgtgttcgttgttgttgttgcccatctgtgtttttgtaaaaaaaaaattttttttaaatatattaatttaaataattttaata

SEQ ID NO: 11160 - DNA, 368 bp, Zea mays
  Clone ID: LIB3157-003-Q1-K1-C3
gcgcaacggctggataccctgcctcgagttcagcaagctcgggttcgtgtaccgcgagaactccacctccccgtgctactacgacggccgctactggaccatgtggaagctgcccatgttcggctgcaccgacgccacgcaggtgtacaaggagctgcaggaggccatcgccgcgtacccggacgccttccaccgcgtcatcggcttcgacaacgtcaggcagacgcagtgcgtcagcttcatcgcctacaagccccccggcagcgagtagagaccgtggctagatcgacccatggccatgcctctgcctgttgatcggatcaccttcttgcattgggtcctctctctctctccctcctttttttttc

SEQ ID NO: 11161 - DNA, 260 bp, Zea mays
  Clone ID: LIB3157-003-Q1-K1-C4
cgaactaccaaactggactcgccaaaatgcgcaccctatgcgccgaacttggcgttccaattgaggtctatggaccagaggcgaccatgactgggatctgcaaagaagccattgattgcatcatggccgcgtaaatcacaaatgtggttggtccatttgaagtcacattcgttttgtactagacgttccttgtacgtgattgctctggtaaaacagagaacgatcattgtcattgagtaactcggccttttgtacacagt

SEQ ID NO: 11162 - DNA, 104 bp, Zea mays
  Clone ID: LIB3157-003-Q1-K1-C5
ggggcaaaaagggaagcgaaatgcatccggactaagtatatgaagctgtgttgtttcattcattatacagcttaataagatatatgcagagggtggatttgtat

SEQ ID NO: 11163 - DNA, 124 bp, Zea mays
  Clone ID: LIB3157-003-Q1-K1-C7
atcaaagatgattagtgcacttattttgttgcataaaaaataaataaaaaataatggaggaaaaaaattaaataaaaagataaaaaaaaaaaaaaaaaaaaataataaaatattaataaaaatt

SEQ ID NO: 11164 - DNA, 329 bp, Zea mays
  Clone ID: LIB3157-003-Q1-K1-C8
cttgaggaactggagaagagaagggtgctttattttgcaggagatgaataatgctggctccacagaatccttgagcagttcgcttacggaggtgatatcggcaatcgaaactgtcacggagaaggtcatcatggaagaagagaagttcaagaagtggaagatggagaacattcggaggaaacataactacatccctttcttgttcaacttgctgaagatgcttgcagagaagcagcagctaaaacctctggtcgagaaggccaaacagcataagtcagcatgcccgagcacgagttgttggtgaaaagtcaatagactggttacttttg

SEQ ID NO: 11165 - DNA, 327 bp, Zea mays
  Clone ID: LIB3157-003-Q1-K1-C9
gaaattgttatgtgtgacttgcctttgtgtttaaaaaaaaaaaaaaaaaaaaaaaaaaaaaaaggaaaaaaaaaaaaaaaaaaaaaaaaaaaaaaaaaaaaaaaaaaaaaaaaaaaaaaaaaaaaaaaaaaaaaaaaaaaaaaataaaaaaataaaaaaaaaatattaaaaataaaaattgggggcgccccttttaaagtacccatctttccttccccgtccttccaactaaaaatttttttttttgggccccctaatttaattcctcggccccggttttaaaacctttttaattgaaaaacccttggtttacccaaatttatttcc

SEQ ID NO: 11166 - DNA, 342 bp, Zea mays
  Clone ID: LIB3157-003-Q1-K1-D1
gattaaacgcgcctacaaaaagctggcgttgcagtggcatccagataaaaacgtggattaccgggagaaagcagaaaacatgtttcgagaaattgctgctgcttatgaggtgcttggtgatgaagacaaacgtgtaaggtatgaccgtggagaggatgtggaggagatgaatatgggaggcgggggtggcttcaatccttttgggggaggcggccagcagtacacgtttcaatacgacggtggcttccccggctgcggctttcctggaggtggcggctttcagttcaactttggataaactgtgccatgcaccatgacatttttttgccactggaattgttt

SEQ ID NO: 11167 - DNA, 83 bp, Zea mays
  Clone ID: LIB3157-003-Q1-K1-D2
cggattcaacagcgcattcggtttctttatgttgtggactaacctaagatatgatctcattgcatacttgtcttactattact

SEQ ID NO: 11168 - DNA, 327 bp, Zea mays
  Clone ID: LIB3157-003-Q1-K1-D3
agaacattagcttcactgtctgggatgtcgtgggtcaggacacgatcagacctctttggaggcattacttccagaacacccagggtcttatttttgttgtggacagcaatgaccgtgaccgtgttgttgaagccagatattagctccacaggatgctgaacgaggatgagctacgtgatgctgtgctgcttgtttttgccaacaagcaagatcttcccaatgccatgaatgctgctgagattactgactagcttggattacactccctgcgccagcgacactggtacatccagagcacttgtgccacaactggcgatggtctgtatg

SEQ ID NO: 11169 - DNA, 178 bp, Zea mays
  Clone ID: LIB3157-003-Q1-K1-D4
ctgaacaaggaggaaggatcttttgccctttttataaaaattaataaaataccatataaatggatggatattaatcacctctccatcaacaatttcatattcaaaacatctaatttccatctttatatcttgtaaaatcaatggggcggcccctctaaatgacccaactttccttacc

SEQ ID NO: 11170 - DNA, 281 bp, Zea mays
  Clone ID: LIB3157-003-Q1-K1-D5
agaacattagcttcactgtctgggatgtctgttttaggacaagatcagacctctttggaggcattacttccagaacacccagggccttatttttgttgtggacagcaatgaccgtgaccgtgttgttgaagccagatatgatctccacaggatgctgaacgaggatgagctacgtgatgctgtgcttgttgtttttgccaacaagcaagatcttcccaatgccatgaatgctgctgagattactgtcaagcttggattacactccctgcgccagcgacact

SEQ ID NO: 11171 - DNA, 414 bp, Zea mays
  Clone ID: LIB3157-003-Q1-K1-D6
gagctctgttatcaaaaaaaaaaaaaaaatttttataaataaaataaaaaaaaaaaataaaaaaaaaaataaaataattaataaaataaaaatattataattaataaaaaattaaataataaaatttattggggcgtccctctttataaatcaaatctttcttccccttgcttcctacataaatactttttttatgggtcaccaaaaattatttaattggccgctgttttaaataattttaactggaaaaaccttgtcttttcccaatttatattgtctttgtaatcaaaatcccctcttttacccagcttggttttaataacaaaaaaaaggcccccttctcctttatctcttttttactaaaaatttttccccacttctttatattgtatattggtaaccccccccttttta

SEQ ID NO: 11172 - DNA, 391 bp, Zea mays
  Clone ID: LIB3157-003-Q1-K1-E1
attcggcaagggtggtggtcttggcggtggcgatggccttggcggtggaagtgggcatggcatgggtgccggattcggcaagggtggtggtcttggtggcggcggcggcggaggtggtggcggcggcggcggtgggtttggcaaaggatttggctttgggtttggcaaaggcagcgggttctgtggtgggggcggcggtgggggcggcggcgggggcggcggcggcatctgtgatcaccattgatacgtcagcatgcagcatacgtctcctctggttctatcacttacttttgtattcgttcatgcttcgtaccttgtcatgtctatgggtgatggcgacatccttcatagtagtattatgtacgtactccatgtaatgctcgctctctaa

SEQ ID NO: 11173 - DNA, 184 bp, Zea mays
  Clone ID: LIB3157-003-Q1-K1-E10
ccggtttgactccacgcgttacgccttgattggtaaataatgtctatttttttttggccttattgcaaacaaagtgtgagaagcttttccgggtgattcgtgatgaatgaacgccgcctgctttgtttaccacccgggagtgtatcctgttgcacattgtaacagacgtgcatctattgaacta

SEQ ID NO: 11174 - DNA, 71 bp, Zea mays
  unsure (1)..(71): unsure at all n locations; Clone ID: LIB3157-003-Q1-K1-E11
ccacgcgnccggaaaaaaagaaaaaaaaaaaagaaaaaaaaaaaaaaaaaaaaaaaagaaaaaaagggggg

SEQ ID NO: 11175 - DNA, 228 bp, Zea mays
  Clone ID: LIB3157-003-Q1-K1-E3
cccacgcgtccgcaatttctcttgagctatcttcatccaaacgggaacagtgaacagagtattaatcagtattctgaacattcagggcgtgcctattccttttgaactccaaaaaaaaaaaaaaaaaaaaaaaaaaaaaaaaaaaaaaaaaaaaaaaaaaaaaaaaaaaaaaaaataaaaaaaaaaaaaataaaaaaaatttatttatttggtataatataaatttat

SEQ ID NO: 11176 - DNA, 122 bp, Zea mays
  Clone ID: LIB3157-003-Q1-K1-E4
cgacatttatatttattgaaatcttgcagtatcgcttgacgatgtaaaaaaaaaaaataaaaaatatttaaatatatattaataaaaaaaaaaatattatatatattaaaaatttaaatata

SEQ ID NO: 11177 - DNA, 200 bp, Zea mays
  Clone ID: LIB3157-003-Q1-K1-E5
tctggttcgacccacgcgttcgcacaaatattcaaatagttagctatacaattcttaaaaaaatgggtcctgttgttttgtgcctcccatttcctagtccagaatttatttgacgattttttactaaaactggttggatcatagacctggaaaaaaaaggaaaatgacatctacagctgtgtgttttttttctaagaagg

SEQ ID NO: 11178 - DNA, 304 bp, Zea mays
  unsure (1)..(304): unsure at all n locations; Clone ID: LIB3157-003-Q1-K1-E6
ggcttttgctattcacctgttgattagcatatagttcagtgtctgctagactcatttatattctaatcctgtgagaatgagcaaaaaggatccaggagaaaagaatcctcactggcgtttcggcttttattggatgtgtgccagaattatccgtggccccacgcaacttctaagaaaatttggttatgcaagacctgtgctgtatgagaaatagaacttacatgattcaatgtgtagaatggtgatagaactatgatatgaaattctatgctcggattacatgctttcaaaanaaaaaaatata

SEQ ID NO: 11179 - DNA, 346 bp, Zea mays
  Clone ID: LIB3157-003-Q1-K1-F1
cgtccagatcccgccaccaaccgatccggcgccctccagcatggcgggggcgggggcgaaggcggcgggagccctggctctggcgctcgtgctcgcgctcgcgggggccaactccgagggcgacgcgctctcggcgctgcgccggagcctcagggaccccggcggcgttctgcagagctgggaccccacgctcgtcaacccctgcacctggttccacgtcacctgcgaccgcgacaaccgcgtcacccgcctagatcttggtaatttgaacttatctggtcatctggtgcctgagcttgggaaactggagcatcttcagtatctggaactttataagaataacatt

SEQ ID NO: 11180 - DNA, 305 bp, Zea mays
  Clone ID: LIB3157-003-Q1-K1-F11
gatctcttcgtcaacgactcttgtgctgttcaaaggcaaagacaaggccgagatcgccatggctaacaaccgtagtaggcggataatcatggaggttgtcgagggatcggttccgagccccggcatcggccaccacaattagctcaccgtgtaccttcttactgtctctcatatatatacgcataaacaaaaatgacatgcaagctagctttggtatagacgatgctagctagatctacacatgtttatgatgtatacatacagcagatcgagtgatatatttcctctgttgctagtacttgatt

SEQ ID NO: 11181 - DNA, 400 bp, Zea mays
  Clone ID: LIB3157-003-Q1-K1-F3
cggacgcgtgggttcctcccatctcccaagacctcctcagacccgagaagcgcagctgcggccatggacgccaccggcactggagctggagggaaggcgaagaagggagcggccggtcgcaaggccggcgggccgaggaagaagtcggtgacgaggtccgtgaaggccgggctccagttccccgtcggccgcatcgggcgctacctcaagaagggccgctacgcgcagcgcgtcggcagcggtgcccccgtctacctcgcggccgtcctggagtacctcgccgctgaggtcctggagctcgccggcaacgctgccaaggacaacaagaagacgcgcatcgttccgcgccacgtgctgctggcgatccgcaacgacgaggagctcgggaagctgctggctg

SEQ ID NO: 11182 - DNA, 66 bp, Zea mays
  Clone ID: LIB3157-003-Q1-K1-F5
aaaaaaaaaaaataaaaaaaaaaaaaaaaattatattataaaaaaaaaaaaaaaaaaataataatg

SEQ ID NO: 11183 - DNA, 378 bp, Zea mays
  Clone ID: LIB3157-003-Q1-K1-F7
gcattgctcataaaaggaattgtagcatcatatggaagaatgacatcactaccaagagttcaagaaaaatttgatgtgcaccttcctcccaatccagccaaaaataaactgataacaacagctgctcaatctccctctacagtcatgtctagactttccacggcggactcaccaagtgtgagtcgaaagctaacctattctccagcaaaggataaacctgagacaaaccctcttgatgctgataaaaatagagctcctgcaacaacatttgaatcacctacaaaaaggatcaaacaagaccctaagaatcaacaagagtagacgttgggtgcaacacagtaaggaatacttctgaacatcacgcccaaacttcaacaa

SEQ ID NO: 11184 - DNA, 213 bp, Zea mays
  Clone ID: LIB3157-003-Q1-K1-G1
aaaaaaaaaaaaaaaaataaaataaaaaattttatataagaaataaaaaataaaaaaaaaaaaaatattaatactcttgcatgtcaattcttaaacccttaaatatgtcgtacccatatatggttccactgtgcgtggttttacattattctgtactggttatacccgggctgttattgggggggggcccccttggataacatcctttttttt

SEQ ID NO: 11185 - DNA, 284 bp, Zea mays
  Clone ID: LIB3157-003-Q1-K1-G2
cgacacttttgttgccatgaaatgaatcgagtaattctgggttggtgtaactatggtgaagtaaccctgaagggcgggccgcacgacctccaaatcatattttgggcctggcgagtattctatccaaaactcgtcagaaaatgcctattatttttggtggacttcgtagaagtccaaggcaagtgcctgtgattttgggggtttttgtaggttgcaaccttgtggtcattgcttttgaaattttctgctttgacttgatgcattatatataaagtgagcctctc

SEQ ID NO: 11186 - DNA, 397 bp, Zea mays
  Clone ID: LIB3157-003-Q1-K1-G8
gtgctgctccacgtcagggtggacggtcgtgtcaagtggaaggtcggcagctgggtctggggcagctaccacctcttcgtcaactgccccgcgctgctcgccaccagcggcagctccggcgccgccggcggaggcgttttcgccgccagcgccgcgtccggggtggtccccgccggagtcaacactactgtctccctcaagttcacgcacccggccgactgcaccgtcgacgtgtgagtcgtcgctgcgccacgtacgacgaccggcgcgcgcttcgttcgatcgttttcgttcgtactggctagtgcaatgcgggggatcaacgtctccccctcgctcgcgcggttatcgagcagttagtttttcttgtagcatatgttcgttcccatatattttc

SEQ ID NO: 11187 - DNA, 398 bp, Zea mays
  Clone ID: LIB3157-003-Q1-K1-G9
ctggaacatacagatggatggcacctgaggttataaaccatcaaccctatgataacaaagcagatgttttcagctttgctattgtcatctgggagctgataacgtctaagatcccgtatgaaagcatgacccctctccaagcggctgtaggtgtgagacagggattgcgcccaggacttccaaagaagacgcatccaaaggtattggacttgatgcagagatgctgggaagcagacccatctgcccggcctgctttcccagacattttagccgaactggaggatcttttggcacaggttcagggaacaccgggaaagacggcccatgctccatcaaataactcgaacacgaaagattaacccccatgcacacatacctgacgtttttctgaattcagt

SEQ ID NO: 11188 - DNA, 181 bp, Zea mays
  Clone ID: LIB3157-003-Q1-K1-H1
gggctctgcgtctccggtcttgtttgccactgctaccctgtgatctgccctgagtggctcctatcgtgttatgtttctgccggtccttatctatctgtcgttgtgtggtttacaacttacgttgtaagactttattcccccgctttgctactgggttattaagtttggcgttattgttctc

SEQ ID NO: 11189 - DNA, 377 bp, Zea mays
  Clone ID: LIB3157-003-Q1-K1-H2
ctcgcgcgctgcgccgtgaacgccatagcctgcgagggagccggccgtgcgcaccatactcggagctacaagcagtggcaggccaggagccggcgggcagggctgcggcagctgcctctggacggtgacgttgtccggacgctcagggacaaggtgagcagggaataccacgagggtttcgtgatcaccgaggatcagcagtggcttctccagggatggaaagggagggtgctctacgccatttccacgtggacggcagacgatggattggcagggaattgacgatctttgtttgtgcattgcgcttgtcataaaatattaatttatgttcctgatgtactcactctgttcaaaattttaaactgttctggattttt

SEQ ID NO: 11190 - DNA, 177 bp, Zea mays
  Clone ID: LIB3157-003-Q1-K1-H4
cggacgcgtgggcggacgcgtgggttgcattctgatgttaggacgctgtcttggtagtcaaaactgccgtaatgtataattcaacggcttaaggagtatgagtgtgcaacctcttattggtgaatgtaatgtgttgacggtggttgttttccttgctctattcggatggctggacca

SEQ ID NO: 11191 - DNA, 374 bp, Zea mays
  Clone ID: LIB3157-003-Q1-K1-H5
atcagcgtgccgatcgagggtccctacaagcctgcccactaccggtactaggcagccagcacacggcttgcagctcactcgggccgttgtgtgctatgaagttcgctacactggcctgtcagttatcttttgcatgcatatgcattatcatatacgcagtcgcgtagcaggtttccttatggttatcgcttgagctgagggggagggaaggagctgtttgcttttgctgaaaaataatggtgtaaatcggctggggtgaggcgatgtgcgttgccagatacaatttttgtcttggttaactctaccttatcttgatattcatttggtaaacgattttgctcaaaattatttgcacgtttaaaaaaaacttgctt

SEQ ID NO: 11192 - DNA, 256 bp, Zea mays
  Clone ID: LIB3157-003-Q1-K1-H8
caagacccagtaggggtttttcccccctgcttctcatggatggttgctgcttgtgtatgccgagaataaatgtggatggcgcgtgcctctgggtcgccaggttcatgctgagtctggacatgttttgcacttttgtttcccttcctgctaccatctgtgacagatccgctcgctaatatgggacctgagattagctttttaaaaaaaaaataataatatatatttaataattaaattatatgttattttattaaaa

SEQ ID NO: 11193 - DNA, 324 bp, Zea mays
  Clone ID: LIB3157-003-Q1-K1-H9
acggtggtgactgccagaaagaaggtttctgtgctgagccagatagttcatcctcagaacacgaggggatcaaagacgttgaggatgagccctcaaacaaacgccaaaaaaccagcgacggcgaaccagcaagcgaaccttgatttgtgctgtgcctgtgctttgcttgtttgtaggtggccgatggttatttatcttgcctgttggattttcatcgaacaaattggggcaggttttttgtaaactattgttgcttgtgtgatgctccttctattctcatgaggaaaagacctatttaagcattatttatatttatgctttttg

SEQ ID NO: 11194 - DNA, 302 bp, Zea mays
  Clone ID: LIB3157-004-Q1-K1-A1
cggacgcgtgggtggacggcatcatcgacacggtgtcggcgtggcacccgatcacgccgctgctggcgctgctgaagccgctggggcagatggtgatcgtgggcgcgccgagcaagccgctcgagctgccggcctacgccatcgtgccgggcgggaagggcgtggctgggaacaatgtcggcagcgtcagggactgccaggccatgctcgagttcgcggggaagcacggcatcggggccgaggtcgaggtcatcaagatggactacgtcaacacggccatggagcggttcgagaagaacgac

SEQ ID NO: 11195 - DNA, 250 bp, Zea mays
  Clone ID: LIB3157-004-Q1-K1-A12
aaagaaagctacttatacataaactgaaatattaaggagttcgtagcttctaggaagaaaaaaagaaaaatttaaaaaaaaaaggggcgtacgaataaatgggcggcacgatataaaagatccatgtttacctactcgtgcgtgcgatggtttagctatcctatattgtcacctcaattcaattcacattgtcgtgttttacaaattccggactgtgaaaacctctggcgtggctgaaaaaaatcccctt

SEQ ID NO: 11196 - DNA, 324 bp, Zea mays
  Clone ID: LIB3157-004-Q1-K1-A2
cacggacacgagcgcgcagcagctcgcctacgcgacgcgcagcagcaacacccgctacgtgcacaccccagcggacctgcccctggaggggatccacgccaccgtggccccgccggcctccgtcgacctcgtcaccgtcgcgcaggccttccactggctgaacttcccggcctttaacccccaggccccttccgtgctgggccccggcaacggggtgctcgccgcctggtgctacaccgagccacgcgtcgacgccgccgtcgacgccgtgttctggcgcctgtaccacgggtcccagggattctgggcgcccaaccgccggat

SEQ ID NO: 11197 - DNA, 295 bp, Zea mays
  unsure (1)..(295): unsure at all n locations; Clone ID: LIB3157-004-Q1-K1-A4
naaaaaaaaaaaaaaaaaaaaaaaaaaaaattaataaaaaaaaaaaaaaaaaaaaaaaaaaaaacaaaaaaaaaaaaaaataaataaaaaataaaaaaatattttataaaaaaaaaaaaaaaaaaagggggggccctttttagggatccaagtttatttccgcttactttcaacgtattaatttttttttgggttgccttaattttacttctgggccggtggttttaaaccgttgaggttggaaaaaccttggctttcccaaatttattctctttgaatgaattccccttttccc

SEQ ID NO: 11198 - DNA, 359 bp, Zea mays
  Clone ID: LIB3157-004-Q1-K1-A5
gcagcccgccgccgttaggctccggttgccgcctgctcgcgccgcggacacttcgtcctcccagtcgccggcgcgcctgacggcggtgctggagcaggtggaccagttgctaagccaggggaacgacatggccgcgctctccctcgtgcgcagtacgcaggggggtgacggcgggctccgggcctttggcgccgccaggcaggtatattttggtggtggggtgagaaacttggttcttgatacaattggtcactatctcagccagaagtatcacaacagagttatccagcatgaagctggtcacttcttgatagcttacttgcttggagtgcttccaaaaggatacacaatcacaagct

SEQ ID NO: 11199 - DNA, 233 bp, Zea mays
  Clone ID: LIB3157-004-Q1-K1-A6
cggacgcgtgggcggacgcgtgggcgtatctcttttatgtaccttttcaggctggtaccgataccgtggatctggatttgctatgttttgtactgtgctcgagtgtaaggtcagttcgtaatacaatcaatctgcgtggaacaatttaaaaaataaaaataaaaaactaaaacaaacaaaaaaaaaaaaatactaaaacccagacaaagaatagctaaacaactggagctaca

SEQ ID NO: 11200 - DNA, 93 bp, Zea mays
  Clone ID: LIB3157-004-Q1-K1-A8
gtctcaagttcagagcgttatgccatgttttcagacctgattagtacactgttttcaaaaagcgattgagctctagtccaatgtattgataat

SEQ ID NO: 11201 - DNA, 270 bp, Zea mays
  Clone ID: LIB3157-004-Q1-K1-B1
gagacggctcgtaattacagtgctttcagttgtgcccaaaaaaaaaaaaaaagggggggtttgtattgaaaaaaaaaaagatacaaaatattaaaataaatgataaaaacaataaaacaatatttaaaaaaataaaaaataaataaaaaaatatatcaataaaaaaagggggggggggttttaaaaaaacaaaatttatatcaccgggctttcaaaagaaaaattttttttttggggcccctaaatttattttagggggggccggtttaa

SEQ ID NO: 11202 - DNA, 342 bp, Zea mays
  Clone ID: LIB3157-004-Q1-K1-B12
gctacggcgccgccgtgccgcccgagtgcgcccgcgaccgcgacgtctgatgatgatgcgttgggccggcaagctgcttgatcgagagcagcctgtaatgtatgtatggtatggtattgttgtgtgtcaggttcgtcgtcgtgggtctgcagagacacagagagagtccgatccggcgcgtacgtgtgcccgcgtgggcacatgcatacgtacatgcttgtgttgtactgtacgctcgtatctcctcacaccgaaatgaattgcgattaagtatcgaaatttcggcagcttatccatcatgtaatgagttcctctgcagtacttaaaactctcatattctct

SEQ ID NO: 11203 - DNA, 255 bp, Zea mays
  Clone ID: LIB3157-004-Q1-K1-B3
cggacgcgtgggcgcgccgccgccgcgtctcctcctgtacaggtaagaaggagaggaagagggcgaaatggtgaagcacaacaacgtcatccccaacgggcacttaaagaagcactggcagaactatgtcaagacatggttcaaccagcccgcccgcaagcagagacgccgcattgttgtcaaaaaaaaggttggaaaatttttcccccgcccacttgttgttcttttccccccaatggttaatggccgactttt

SEQ ID NO: 11204 - DNA, 86 bp, Zea mays
  Clone ID: LIB3157-004-Q1-K1-B4
cattagtgcaaaaagttgtattttagtttagatttagagtacacttatgtatgccttgtttgacaatacttatttatgatatattg

SEQ ID NO: 11205 - DNA, 320 bp, Zea mays
  unsure (1)..(320): unsure at all n locations; Clone ID: LIB3157-004-Q1-K1-B5
ggacctgctcgtggcgctcgcctcctcctctggtcccagtcccgccgtctgctcctccagcttcaagttgaagcagagccgccgtcatcttcagctgtctgtcaggacgggcgaacaccactgaacgcagacagagcaggcgaatgcatgtgtgcgactgatttcattttgtgtggaaacttcaaaagagggggagggtggactcgtgggcattcctggcaatgggtggactcactgcctggctggtcggttggccgtccttatcacgggaagaaattcgaagttactaagggccggnnnaaaaaaaagaaggaataaaa

SEQ ID NO: 11206 - DNA, 175 bp, Zea mays
  Clone ID: LIB3157-004-Q1-K1-B6
caattttccactgttcttttctttttttttctaaaagaagttgtgatatatgtatattttttttcttttctagagggtttaggtgaatacatacataatacccccttgaagtgcctctcaacaaggatgtaatggaaagaaaggcaagctaaagaccagcttaacaatgatggtg

SEQ ID NO: 11207 - DNA, 110 bp, Zea mays
  Clone ID: LIB3157-004-Q1-K1-B7
aaaaaccggctcgacccaagcgtgcggtaatactgtactcgcttcgttttctctttatgcgtctataattgtgttcaataataagtgagatcggtgtgatgtgtggctcc

SEQ ID NO: 11208 - DNA, 412 bp, Zea mays
  Clone ID: LIB3157-004-Q1-K1-B9
cggctcttcagagtttatccctgcacgacaacccaatcacaatggaccagttccaacaaatggatggatttggagagtttgaggcgcgcagaaggaagaaattcgacaagcagattgattcaggggtcatgatggcctcaacggttctggatgaaggggttatttccaattattttaaaacttgaatggcttccattctttcttagtggtcaagaattaagaccgattgtggatttgtagatattaatcttacaacctacaaagcaaggttcaccaaaccggttgtgaagtgaaaaccggcgcccacagaaaactggggaaaaccggccgcaatctaaatcaccccactttttaattttgaacgcgtttgaacccgttaaaaaaaaaaaaaaaattttattaaaatataaat

SEQ ID NO: 11209 - DNA, 319 bp, Zea mays
  Clone ID: LIB3157-004-Q1-K1-C1
tttttaaaaaaaaaaaaaaaaaaaaaaatttatttttataaaaaaaaaaaaaaaaaaaaaaaaggaaaaaaaaaaaaaaaaaaaaaacataataaaaaaaaaaaaaataaaaaaaaaactaaaaaaaaaaattataaaaaaaaataaaaaaatggggggccccttttagggatcccaatttttttcccccttgattgcagcggaaaaatttttttttggggcctcctaattccattatacggcccgtgttttaccaccctttatagtggaaaaaccgggggttcccccacttaatttgtcttattaaaaatcccttttt

SEQ ID NO: 11210 - DNA, 363 bp, Zea mays
  Clone ID: LIB3157-004-Q1-K1-C10
ctgccgcgcacctgcgttgtcacaccccctctactgcgtggtgtcatgtatgtatccaggcaccgtaggatgcgcttttctacccggcgcttcttcctcctcttgatggcgcagtggattcttcctgttcttggctttgctatctgactctgcttgtagtcttgagaatctggcggcacacagacatagttttctttagtttcttgtgtttgatttactccgtgtttaattgcacagtttatttacatgtaagaacgttgaccttgaccagcttccctacaagtttatctttccttctttcttggtgtcttgggtcacgtatgcggtatgcgtctcccaaatcccaatcaagtcagtttacgt

SEQ ID NO: 11211 - DNA, 406 bp, Zea mays
  Clone ID: LIB3157-004-Q1-K1-C11
gccaaagcaattgagaagcatgctgctcagctttgcgtgcttgcggaggactgtgaccagcctgattatgtcaagctggtgaaggctctttgctctgagcacaacgttcacctggttactgtgcctagcgctaaaactcttggcgaatggtctgggctttgcaagattgattctgagggcaaggcgaggaaggttgtgggttgctcctgtgttgtcgtcaaggactatggcgaagaatctgagggccttaacatagttcaggagtacgtcaagtcacactagatacagtgcatcggtatctggaacttgtgctctacactagctttaagacctgaatttaaatttgtgctggttcttgggcttttctaagaaattatctcaattcttgtttaagtgatgtcatctg

SEQ ID NO: 11212 - DNA, 263 bp, Zea mays
  Clone ID: LIB3157-004-Q1-K1-C12
cggacgcgtgggcggacgcgtgggctgctcggtaaccatggaagacttgagaagcgtgctcctgggaaggctttcctcgaggccgttgcttaagtccaatctacagttggaatgcgaatccagacgttttggtttagcctatcttattttgctttgtgcaacatgaattttaagtgtatggggtattacagtgccttgtgtgaacctgcttatctcgtgctgaacatcgttatgcatggaagtacttatcttttgttctgctt

SEQ ID NO: 11213 - DNA, 162 bp, Zea mays
  Clone ID: LIB3157-004-Q1-K1-C2
ggtgtgtttgtgtgtggtcacacttgccagccagcagaggcgcctgcttgtacctagattactgtttccattgtcgtcatcatcggctaacattgtcataatgtcagtttgggtaatgttagattaagtaattattgtgttctgtattcttgtttgttgccc

SEQ ID NO: 11214 - DNA, 69 bp, Zea mays
  Clone ID: LIB3157-004-Q1-K1-C3
gctttattcaatttatggagttgttcatgttcgcttttttttcctttttaaaggtcccacgagtgaact

SEQ ID NO: 11215 - DNA, 312 bp, Zea mays
  Clone ID: LIB3157-004-Q1-K1-C4
cgtgtatatatatcggcgatcatgggggtgtgagatcatttttgttctttacgtgcaggtgtagtgggacatagtcaccggtatcttacagcatgtgtttttgatggagtgatatggttagtaagcaatggtgaaggatacaggcatacgggcactggggcatataccatacttttggactagacgggctagaaactgattttggagtccgttatgtttccattttccgttctcttggttttctctgtcgtcaatgtattataatcatgatgatgaatggatggagaaatgagatgaaatttttttgacttc

SEQ ID NO: 11216 - DNA, 351 bp, Zea mays
  Clone ID: LIB3157-004-Q1-K1-C9
gccagttataatccgttaggtgagcagattgtttgcttgggttaccagatcttggtagccagtgggtgcggttccaggtcttctgttgatgacttatcacaagatgtgcttgtgattcccgtgtatgaggaattgcgacatcgtagaggcgtaggctatgttcagtagatcgtgccttgcctcgtgtataataatactgttttgtatcgtagacaatattgtttacagagatgatgatgagtaagctgctggacatagccagtgccttataaaaaaaaaaaaaaaataaatataattattttatatatttttttttattatataataattatattattaattaattaattt

SEQ ID NO: 11217 - DNA, 66 bp, Zea mays
  Clone ID: LIB3157-004-Q1-K1-D10
cccgcgggtgtcgccatgtacttttaccgcactacattttggttctatagagagaggatttgtgtc

SEQ ID NO: 11218 - DNA, 415 bp, Zea mays
  Clone ID: LIB3157-004-Q1-K1-D2
caagaaacggtgaaaaagagtccaagcccaatgaagggaaagaaagtggggctgaaggtggaaccagggaagcaaaggtctccctctgtgctgaaggaggtgagggcaacgccgccgactccacagcggtttctatccccatcgccaaaccgcattaagaatgttaaacctggagggatgtccacagcaggctcgccactcaaaaagggaccaaaggagaaggggacacctagtaaggacctggagagcaaaaaagatgctgtgaggcaaccctttggtcttaaggatatgaacaatacaagagcatgtgatgcagaaaggagctccagcagcatgttttggttcttgaagccctgcactttccttgtggagtagcgtcataacactacaattttttaacgagcaacacttgata

SEQ ID NO: 11219 - DNA, 344 bp, Zea mays
  unsure (1)..(344): unsure at all n locations; Clone ID: LIB3157-004-Q1-K1-D6
agctgccattccttcaagcgtcgtggttttgacttcagagacctttgactcaattgtccttgatgaaaccaaagatgtccttgttgagttttatgccccatggtgtggtcactgcaagcatcttgctccgatttatgagaagctggcttcagttttcaagcaggacgacggtgttgtgattgccaatattgatgctgacaagcacactgacttggctgaaaaatatggtgtttctggtttccctacattgaagttcttccctaagggaaacaaagccggtgaagattatgatggtggccgggacttggatgactntgtcaagttcattaatgagaagtgtggca

SEQ ID NO: 11220 - DNA, 438 bp, Zea mays
  Clone ID: LIB3157-004-Q1-K1-E10
gcagaacggatcaagaagtgcaggggcagagtatttgctctgcaggacgaaccggaggtgccgcgggtctggctgccgttcgatgacgcgccaggcctggcaatggcccgggcctttggggacttctgcctcaaggattatggtgtcatttcggttccagagttcttccactggtcgctcacagagaaggatcagtttgtcatccttgcatcagatggggtgtgggatgtcctcagcaaccaggaggccgttgacatagtgtcgtcgtccccaagccgatcaaaggccgcaagatccctcgtcgaggccgcgacccgtgaatggaaaaccaagtacccgacatcgaagatcgatgactgcgcagtggtctgcctatatctggacggcaaaatggaccacgaacgtgactcgacggcctccatggacaacatgagcctc

SEQ ID NO: 11221 - DNA, 276 bp, Zea mays
  Clone ID: LIB3157-004-Q1-K1-E11
aaaaaaaaaaaaaaaaaaaaaaaaaaaaaaataaaaaaattaaaaaaaaaaaaaaaaaaaaggaataaataaaatgataaaattagggggggatatagatagagataaatatatgtagggttcttgtcatggaattacattttatttggttgggaaaagaaaagaatttttttattgtgggtgctttttgcatataattcgggtttccctttttggcattttaggtatgatggattttttggatttcccttcttaatagttgttgtatcaatatgt

SEQ ID NO: 11222 - DNA, 390 bp, Zea mays
  Clone ID: LIB3157-004-Q1-K1-E2
agaaggaatttgatgaagcaaagcttcgatttgctgctgctgagggagatcatgtaacattcctgaatatctacaaaggatttcaccagtctggaaaatctagccaatggtgttacaagaactttttgaattaccaagcactgaagaaagttgtcgacattaggggacaacttctcaggatagtgaagagttttggtatacaactgaaatcatgtgacagagatatgcaggcagttagaaaggccattattgctggttcatttactaatgcatgtcatctggaggataaacgatgctccataaatcatgaagcagatgcccccgccacctaaagatttggagattgctatagtgtaagtagagtgcaatgatcaagtagagtgtagtgat

SEQ ID NO: 11223 - DNA, 337 bp, Zea mays
  Clone ID: LIB3157-004-Q1-K1-E3
gtgactatcgctcacggcggtgtgctccttaatatcaaccctgttctgctgcccaagaagacggcggagaaggcgtccagtggcgggagcaaggaggcaaagtcgtccaagaaggccgccaagtcccctaagaaggcatatactgactgtccggagtgatctgatgtttagcagtaccttgttaccagtatgcggggatgcgttggctgcatatgggacaaatgtgcttgaatgtgtatatgtcctgctgcaagtttttcttttgctatttagaatgggaagaagaaatgccttgtttttcaaataaaaaaataaatggttggtcccttttttagga

SEQ ID NO: 11224 - DNA, 192 bp, Zea mays
  Clone ID: LIB3157-004-Q1-K1-E9
cggacgcgtgggatcgaaattctggtcttttctgagcagtttgcaattcggaacccccataaacccttgactattgtacctagagataaagtgaacgggtatcaagatataaatgcattaatgtttttgtgaaaaaaaaaaaaaaaaaaaataaaaattaaataaataaaaaaaataaaattaaatctaata

SEQ ID NO: 11225 - DNA, 377 bp, Zea mays
  Clone ID: LIB3157-004-Q1-K1-F1
ggcgctttcaaactccctcgcaaaggtggaaaaggaaaacagatctttgggagtgtcacggcacaggatgttgttgacataataaagtcacaacttaatagggatgtcgacaagaagctggtgacggttccagaaatccgtgaaatcggagagtatgttgcagagatcaagcttcacccagacgtgacagcgcgagtaaggctgaatgtctatgcgaaatgagctcagcagttacagaacctcgagtaatggactttggagaagcctgatgtttgccagagattttgctgcaagtgccaggtgctgcggtagacatgatgcctggtctggccgtgacttgcctggttttatacacaattactggtcactggcatcta

SEQ ID NO: 11226 - DNA, 373 bp, Zea mays
  Clone ID: LIB3157-004-Q1-K1-F12
atggacataaacttctactgaccggtcatcgtctcgacggggaggacggggccagccgccagccaagagttgcagacagacattcctcgctacctgatgagtggcagggcaggccttctgacgaccgactgactgggggttcgtttctcccaaggttccgttccatcggtcggaaatcggaatgtttggtagctagcaggtgactcctttcgccatgcgtttctgtgcacctggcgcctggactcttgctgctgctgtcctgcatgccattgacgcccccaactcctacgccgtgccgtcttcagcgtgcaaaataaatactcgaggagatcaatgctttccgagcgtgagattgttgctaggaacatttgca

SEQ ID NO: 11227 - DNA, 93 bp, Zea mays
  Clone ID: LIB3157-004-Q1-K1-F4
cggacgcgtgggaaaatttaattgttttatattttggaaaaaaaaaaaaaaaaaaaaaagaaaataaaaaaaaaaaagggaaaacaagggcgg

SEQ ID NO: 11228 - DNA, 405 bp, Zea mays
  unsure (1)..(405): unsure at all n locations; Clone ID: LIB3157-004-Q1-K1-F5
gtacactatacctgttctgtatgagaaatatgaggacaaggttgatgcttttggtgagaaggctatgatcgaactgaagaagtattatgccatcttcgatgagaagtgcctatcgaagattccaaagggcctcaaggataagaagcactagattggtagtaaggtacttgatatgaatcaacacccacgttaagtcacaccttccttgaaggatggtgcttggtcctggtctctagttgatagtatataatctgtatgggcaactctggtgtgactgacactttgatctgctgaaaattgttgatcttgtttttgtttcaactttcagcatacttgcctggaaagcttgaacctnnnnnaaaaaaaaaaaaaactatttattaactattatataaaatatttcta

SEQ ID NO: 11229 - DNA, 130 bp, Zea mays
  unsure (1)..(130): unsure at all n locations; Clone ID: LIB3157-004-Q1-K1-F6
naaaaaaaaaaaaaaaaaaaaaatatatattttaaagaaaagacaaaaataaaataaaacaggcgtacttacacatgaatgcaaaaggaataactctattttagtggagccagaaatttaatgcactggc

SEQ ID NO: 11230 - DNA, 264 bp, Zea mays
  unsure (1)..(264): unsure at all n locations; Clone ID: LIB3157-004-Q1-K1-F7
gcctgatgttatagcaacttcgcacgtacggtattgccgatcctgatgtatgcaggaggcaggcttagatagcagaggcgtcaatagtctgaaataacatccgttgcactagtatccgaataaagtgacagtgaattgattttttattttcattgaaaaaaaaaaaaaaaaaaaaaaaaaaaaaaaaaaaaaaaaaaaaaaaaaaaaaaaaaaaaaaaaaaaaaaaaaaaaaaaaaaaaaaaangggggcggccgttttaaagg

SEQ ID NO: 11231 - DNA, 381 bp, Zea mays
  Clone ID: LIB3157-004-Q1-K1-F9
cggacgcgtgggggagaccctaaggtactggcagctcggtccagagaagactacttacagctgaaacaaagattacagtggttcactttaggcattggtggcgttggtgtaatctctgcttatatttcatacactcctgaaattgctgtcagctttggtgcagggttgattggatcattggtgtatctccgcatgcttggaaccagtatagattccctagcaggtggaactggagaaactgtcaagagtgctgctgcacaaccaaggttgcttattccagtggtacttgtgatgatgtataacagatggaatcagatattagttccggattatggtttcatgcagcttgagttaataccaatgcttggtgggtttttacct

SEQ ID NO: 11232 - DNA, 296 bp, Zea mays
  unsure (1)..(296): unsure at all n locations; Clone ID: LIB3157-004-Q1-K1-G1
aggaggccgacaagctgcagacctccgacggctgggccaagttcaccgggggattcttcttcggcggcatctccggcgtgctctgggcctactttctcctatacgtgctcgacctcccctacttcttcaagtagatatcatcaaagatgcgtatatatagctcctgccgatcctcctctctagctgcatggtatgtagagtcgtgtggtccttgtttcatttcactccagcggtgatcagcaccgtgtataaatgtaattcctctgctctgcnnnnaaaaaaaaacaaaccaaaaa

SEQ ID NO: 11233 - DNA, 313 bp, Zea mays
  Clone ID: LIB3157-004-Q1-K1-G11
aattatgtttactgctggttcgacatagtgtttgccgatgttttctaccgctgagcataagaggagtttggtaattaaacaccgtgcttcatgcaagcatgagaaagttgtgtggttggtaacagttaccgttcttaagattgatcaactatggtggtactagttctgttgaaagctgcctttagaaaactaagcctcatggtgatgcctataaatgctcggactctggttgtggccattgttggactgtctaatccaaggtacaggttgcttattacatcatgcgatgagacaggctattactaatcttata

SEQ ID NO: 11234 - DNA, 411 bp, Zea mays
  Clone ID: LIB3157-004-Q1-K1-G2
ggagagggggatttcttagaccaacctgtggaggatgaaatgcctcacgccattagtgttacaccagaggagcaggaggccattggacggcttgagtccatggggttcgacagagcacgcgttatcgaagcattcttagcctgcgataggaacgaggagctagcagcaaactatctccttgagcatgctggtgaggaagattaagcgggagtagttttcatacggtgagaactctgctatcctctggttggttaccctccttaacatatatggcaagtggctcactgtggggtgatttcctttttttttcttcttttgaaccttgtctctcgtcgacatctgaccgacattgatcaagattttttttagtaccgagtgacgaagagttgatatggagctgacgatcatttg

SEQ ID NO: 11235 - DNA, 72 bp, Zea mays
  Clone ID: LIB3157-004-Q1-K1-G3
gtgaaaataaaatagtttttccattgtgattgtaaaagttggaaagcaagaaaatttcgcgtgcaatttgtc

SEQ ID NO: 11236 - DNA, 98 bp, Zea mays
  Clone ID: LIB3157-004-Q1-K1-G5
aaaaaaaaaaaaaaaaaaaaaaaaaatataataaaaaagaaaacccaaaaaaaaaaaagggggcggtctttactaaaatataccgaaacaaaaaacta

SEQ ID NO: 11237 - DNA, 371 bp, Zea mays
  Clone ID: LIB3157-004-Q1-K1-G8
cgctctgcaagttgcagcgaaatgcagaacacgaggcacccactgatgatgatggagatggagggcactgttccagagaaggaagcttctggtgcgggggtgtgtgtgtgtgtgtctatctactgctgagcttgccgtcagtgctgctgcagcaagatctgatgaaaagcctggaattcttcaggctagttgccattgccagtcccagtcccagtcccagtcaccttctcatctctgatgtctttcagtccacatgattcagttcagttcagtgaacaaccgccgagacgatgttttcatcatcattattgtcgtttcgtcgccggaatagaagtaacttctgttctaaaaaataatttccttactttaaa

SEQ ID NO: 11238 - DNA, 268 bp, Zea mays
  Clone ID: LIB3157-004-Q1-K1-G9
gttcgtgcttgtatctagtagtttcaggtttacaagtttagtgccttttgtagcccacgtcatagagaggctcctagatagtgggaatagtatactcggatgcgtgattactagtcttaagtaattatagatatatggtcgtacgtagttcttcaatgttgtgattgaagaacacacgcgatgtcttctctaatcttctgtgtacctatatcttgtaagttatttattgtcaaagagatgtcaattctcttatgcgtacgcatgctgc

SEQ ID NO: 11239 - DNA, 428 bp, Zea mays
  Clone ID: LIB3157-004-Q1-K1-H12
cggacgcgtgggcggaacgcgtgggtggcttctcacgattctgccttaaaaaaaataaatataaaaaattttaaaatttataaatatttttattttttttaaaattatatattttaaaattaatattaataaaaaaaagtcccccccttttaaagattccaattttccttccccttccttccaccttattactttttttttagtgccccctaatttcatttccttgcccgtctttttccaccttctttccttgtaaacccttgccttcccccactttattccctttccaccccttccccttttccccacttgccttaataccaaaaagcccccccccttctccctttcccaccatttccccccctttattttccatttcacccccccttttcccctcccttttaacccctcttttttttttttttccc

SEQ ID NO: 11240 - DNA, 150 bp, Zea mays
  Clone ID: LIB3157-004-Q1-K1-H2
gtcccagcagtgctgggaaatcgagatcaagatgtatctttctttgcagtaatgaaatgttaaaatcgagatcaagatgtatctttctttgcagtaaagaaactttgctattgcgcccactgttaggctaatcacaatggaggtttcatg

SEQ ID NO: 11241 - DNA, 307 bp, Zea mays
  unsure (1)..(307): unsure at all n locations; Clone ID: LIB3157-004-Q1-K1-H3
caagaaagcaggcggcagcgaccagcggaaccgggtcggtgacagtggaagggcgctttccaagaatgacgatgcaggcagctctggccacaggtcgccgagcaaggaccgggccgactcccccagagagcagttcccgggggctgcgaacaggggccaggacagggagcgaatggtggccgaggcaaagatgtggggcgagaactggcgggagaagcggcgagctgctcangggagcctggattctccgaccggaggcgggtagcgtcagtcaccaaagactgtttcgcccgtgcgtgctctgtct

SEQ ID NO: 11242 - DNA, 338 bp, Zea mays
  Clone ID: LIB3157-004-Q1-K1-H4
caagaaagcaggcggcagcgaccagcggttccgtttcggtgacagtggaagggcgcttgccaagaatgacgatgcaggcagctctggccacaggtcgccgagcaaggaccgggccgactcccccagagagcaattcccgggggctgcgaacaggggccaggacagggagcgaatggtggccgaggcaaagatgtggggcgagaactggcgggagaagcggcgagctgctcaggggagcctggattctccgaccggaggcgggtagcgtcagtcaccaaagactgtttcgcccgtgcgtgctctgtctcagactgttttttgcctttgtgtggtgagga

SEQ ID NO: 11243 - DNA, 262 bp, Zea mays
  Clone ID: LIB3157-004-Q1-K1-H5
gcgcaggcactggcgccgcaccaagctcggcttctgagcgtcgggattggccggctgctgcgtcggaaggctagggtctaagagctatcttccttctgttttatcaatgtgtcagtttttctgtaagctagcaagtgttgctatgacgcttttattaagattctggtgagcggtgatgttaagagaaaattggcactactgtggtgtaccccaagattccttgcagcattgctatgctaagtaaagaaccctgtatcttatt

SEQ ID NO: 11244 - DNA, 332 bp, Zea mays
  Clone ID: LIB3157-004-Q1-K1-H6
cggacgcgtgggtcctgaatgagttagttgagaaacgggcgacttggtaccaggacgggataagccagccaccctgcattgccagagacgtaggtgttgagagctgtctctgtggccttcacaagtagcgagccttttgctttgcaagcgggttcattcttgagtcgagttaaaagtgttatgttgtactgtgttcattcttgagttgagttaaaaagtgttatgttgtactgtgttcgagcgttctgcttctgtgtttctccacagtgtagcttatttgttgccatgggaataaaattccttctattaaattgattgatggaagttgcatc

SEQ ID NO: 11245 - DNA, 260 bp, Zea mays
  Clone ID: LIB3157-004-Q1-K1-H8
cgactaatctcaactaccttggaggtcgagtatcaaagtaggtatggtatcatagagaaggaaataaatggtgttctactgctaaaaaaaaaaaaaaaaaaaaaaaaaaaaaaaaaaaaaaaaaaaaaaaaaaaaaaaaaaaaaaaaaaaaaaaaaaaaaaaaaaaaaaaaaaaaaaaaaaaaaaaaaaaggggggccaatttaaaaaaacacaaaattacaaacgcgggaatcaaaaaaaaaaactttggtgtggcgcc

SEQ ID NO: 11246 - DNA, 69 bp, Zea mays
  Clone ID: LIB3157-004-Q1-K1-H9
ccgatttgttcgttaatgtcaagaattgtgttacagtgcgtgtatatatgtgtgtcgccgcatttttat

SEQ ID NO: 11247 - DNA, 422 bp, Zea mays
  Clone ID: LIB3157-005-Q1-K1-A1
cgcctccgcctccctagggttttgctctcggctcgtcggatccagttcgggggatcctccatggcgtcgcgtccgtcgctgaagtcgaagcccaagggcaagggcgggaagaaggccaccgccgacgacgaggacgccaccgcggcggcgaccacggtgcggctcatgaaggagtggaccacgtggacgatgaagaaggcgaaggtggtggcgcactacggcttcatccccctcgtcatcgtcatcggcatgaactccgagcccaagccctccgtgttccagctcctctcccccgtctgatcggatctccccgacagggcccggatgaggtcggtccgtagtagtttgtagctggtacttcatttgcttacatatgtccgagatcgagttgaagaaggtggatcatgctttctgggcgaatt

SEQ ID NO: 11248 - DNA, 361 bp, Zea mays
  Clone ID: LIB3157-005-Q1-K1-A10
gcgacccacgcgaccgacgacacctgggcggactcgtgggcggacgcttgggcatttatttgtgttggatggagacttggatctttgaacactcgtaactatcctactaggtggtgacatcagtccctaaaaacgtttatggtcatagagtctgcccttcgtttgtcagtcgggcaattattcttgcatacaatgccttcggttaagtatcaaattaataatataaatttgtctgcatctcttgtttttttttcttcttttgtaaaaatcactattaaatagggggcggtcgctttataggaaccatgtttacttccgcgtgcatgcaaaggattaccttttcttttgggttacctaaaat

SEQ ID NO: 11249 - DNA, 424 bp, Zea mays
  unsure (1)..(424): unsure at all n locations; Clone ID: LIB3157-005-Q1-K1-A11
ggtaaacaaaacccacaaattttgcggttgtttcaggaaaatcaagctgagtttctccgcttggtgaatgaatctcctgagggtggtcctggagggaacatactaggtcaactggcagctgctgtgccacaaacgctgacagttaccccagaggaacgggaggctatccagcggctcgagggaatggggttcaaccgtgagcttgtgctagaagttttctttgcatgcaacaaggacgaagagcttacagccaactaccttctggatcacggccatgagtttgacgagcagcagcaatagacgtggggtggatggaggaaaccgaggcagttgcagaacagcgagtgtcgttcttatgctatgctgctgactatcttttatttccatatatatntgttcggaatgctttctaagtacatattaa

SEQ ID NO: 11250 - DNA, 406 bp, Zea mays
  Clone ID: LIB3157-005-Q1-K1-A4
cggacgcgtgggtgcattattattttttgctctattgggactatcgggttgcttcataacctgttatgaccgacgagtacgaaatgatttggctcatccttgtcgagaattatgtctttgttgctgtcaaccagggatgtgtgcagattgccatctacctggcacgctatgcatgtggactgactgcaccacctgcttcgaaagttgtgctaccacaactggcgagtgtggtggatgcttgggaggtgctggggaagctgggctaccgctgcttctcatcatgggggttattgtgcttgggcttttcacagtcatcggcatattctacagtgtcctggtcgcgacaatggttggccagcggatctggcagcggcattatcacattcttgcaaaacgaatgctaacc

SEQ ID NO: 11251 - DNA, 151 bp, Zea mays
  Clone ID: LIB3157-005-Q1-K1-A5
aaaaaaaataataaattaaaaaaatactttccgccaaaaaaaaagcaaccaactacacatgtaacaaaatgaccatacctccctcgactgaccatctttcggacaccggggggggccctctcctgacgtgttcaggattctcagctgcatt

SEQ ID NO: 11252 - DNA, 395 bp, Zea mays
  Clone ID: LIB3157-005-Q1-K1-A8
gggagctatgcattagtaataatcaattttcagaaaataaagagtattttccctatttttataaaaaaaaaaaaaaaaaaaaaaaaaaaaaaaaaaaaaaaaaaaaaaaaaaaaaaaaaaaaaaaaaaaaaaaaaaaaaaaaaaaaaaaaaaaaaaaaaataaaacataaaagataaaaaaaaggggggggggtttaggaggtttaaaatattattaacgtgtaaattagaggggggggcttctttaatagggtcccgaaatttaacaccgtgggccgggttttaaaacgggggtataggggaaaaagtggggttcaccaaaataatttttttaaaaaaaatgccatttgaaacaagcggggtctataaaaaaaaagccagaattttgagccttt

SEQ ID NO: 11253 - DNA, 388 bp, Zea mays
  unsure (1)..(388): unsure at all n locations; Clone ID: LIB3157-005-Q1-K1-A9
cccgacgcgtccgaacaatgggttggctgctcctccccctccggttcgggttcgggttcgtgaggttctccggggttcggtttcgtgggtgagcggatcgagatggcggcgtcggatgttgagtaccgctgcttcgtcgggggcctcgcctgggccacggacgaccacttccttcacaacgccttcagcacctacggcgagggcctcgagttcaagattattctcgatcgggagacgcagaggtcccgcggcttcggcttcgtcaccttctccacggaggaggcgatgcggaacgccatcgagggcatgaacggcaaggagctggacggccgcaacatcaccgtcaacgaagcccantcccgccgcggccttagaagcggcggcggcg

SEQ ID NO: 11254 - DNA, 406 bp, Zea mays
  Clone ID: LIB3157-005-Q1-K1-B1
cgacactctttacatcgacagtctcattggacctgacacggtcaacacgatgcccgaccaagctttgcacgcattcatagaccacggcactgtctcgaggacagttgatgcgaatgtgtccgaggcggaaggtgtatacagcgccttggagaagcttggcattgactggggcgaggtcggaaagcagcttgagctggaaggagtggactccttcaagaagagctttgacagcctactcgtgagcctacaggagaagggcaacagcctcaagacggcaactgtgtaaaactgagaagattgggtaccggcgggtgaacgattttactaaataaaatgctagcttgctggctctcttagtttttacgatgtacctttgctctccattttctgaatcgggattgtattc

SEQ ID NO: 11255 - DNA, 399 bp, Zea mays
  Clone ID: LIB3157-005-Q1-K1-B10
cgctatctctatctcacgcaggttcacaggcttaggaggcgagtggtagtcaccagccgctccggcacggacgcatctgacgcgccatgcgcggcggggatccagcgcaggtaccgctcgcacctccatctatgtggatccagcgcaggtaccgctcgcacctccatttatggtgcctggcccgggctccgtcgtggaggccacgccgccgaggagcaaggctggggccgcgcccgcgcccgcgcccacgccatgtcagggtcgtacccacgccggtggggagcagctggccatggcgtcagcggacgtcttcgagacaagtgggagatccaatgtcgcatgaccgacgaggcaccagcaaggcagcgatgcagcctggatattcgacctgtatcctgg

SEQ ID NO: 11256 - DNA, 351 bp, Zea mays
  Clone ID: LIB3157-005-Q1-K1-B11
ctctatttataattgacgcatgttcacaggtgtacgaggccagtggctactacggagccgctggggcactgacacatctgacgcgccatgcgcgggcgggatccagcgcaggaaccgatcacacctccatgtatgtggatccagcgcatgtgcccctcgcacctacatttatggtgcctggcccggcctcccacttaacgccacaccgacgaggagcaaggatggggccgcgcacgagcgcgtgcacataccatgtcaggatcaaactcactccgggtgagagcaggtggccatggctgtaacggtcgttttttaaacacatgtgaaaaccaatgttggatgaccgactag

SEQ ID NO: 11257 - DNA, 413 bp, Zea mays
  Clone ID: LIB3157-005-Q1-K1-B12
aaaaaaaaaaaaaaaaaaaaaaataaaaaattttaaaaagaaaaaaaaaaaaaaaaaaaaaatgggaaaaaaaaaacataagacgctaccatgcgcagcggggatcacaacacaagtaccgatcagacactacatttatatagatccaactcaaagtcatgggggggcccctctttatggtcccatgtttcttgctccgtcttggaggcttctccttttttttttggtggccgtaaattcacttttgggcgcgcggttttcacgccgggggggggggaaaacccgtggggagcccctttttattgcctttgcagacttctccttttcacctgggtggtttaatgtaaaatggcccaccagggatctcttttccaaaaatgcggcctgcattttggacatgtgtaccccccttt

SEQ ID NO: 11258 - DNA, 326 bp, Zea mays
  Clone ID: LIB3157-005-Q1-K1-B2
gagctggagtgtattctagagatgctccgtatttctgaagggattcaagttcaaacctgaaattattgtatttcttctaccaaaaaaaaaaaaataaaaaacaaaaaaaaaaaataaaaaaaaaaaaaaaaagaaaatacaaaaaataaaaaaaaaattaacattaactagaacaaaagacaaaaaaaaaattagagctgaaaagtatgaactacttgggggggcgcttttaaaaaactaatctttagcctacaggaaataaaaaacaatcttttttattttaactgcctaaaactaaaaaaattgggcaccgtttaaaacaacga

SEQ ID NO: 11259 - DNA, 131 bp, Zea mays
  Clone ID: LIB3157-005-Q1-K1-B4
aaaaataaataataaaaaagaaaagaaaattttttttaaaaaaaaaaaaaaataaaagatgggaaaaatagtaaaatttaaaaacgaagaaaaaagtattcatttttgttggtaaatctttttttctattg

SEQ ID NO: 11260 - DNA, 414 bp, Zea mays
  Clone ID: LIB3157-005-Q1-K1-B5
tccagaggaaatttatgcgaagcttgtagctgcaaagaatttccgtgctggcaccttgagcctgcgtcagatacgatttgccagtgtagatatggagcttcatacaagttatgaccccaatggctcagtgtccatatatgatgtggaccaaagagttgcagaacggacacaagttcttgctcctctgccggaggacagattcctgtgcagctttagccatatttttgcaggtggctatgctgctggatactacagttacaagtgggctgaagtactgtcagctgatgcattctcagcttttgaagacgctggtttggatgatgagaaggcaatcgaggaaactggcagacgattcagagacactgttcttgcgcttggaggtggaaagtctccgcttgaggtgttcgtttcatt

SEQ ID NO: 11261 - DNA, 103 bp, Zea mays
  Clone ID: LIB3157-005-Q1-K1-B6
cgtgtgtactgtctgatggagtgtgagaagtactgtgtgtatttggtatggatccgatcggcctgatgtatgaaaaggatgtttacgtactatatatagatgg

SEQ ID NO: 11262 - DNA, 313 bp, Zea mays
  Clone ID: LIB3157-005-Q1-K1-C11
agacacatgaacaatatgttttcctcttcttacacagaaaacgagataacttgataaaaaagtgaaagtttaataaagacgacataaaaaaaaaaaaacttttatactaaagtaaaaaaaaattagggggggtcgcttaaattaaacaaactttaccgccggttaaaaccaaggggattcctattttattggcgtcccaaatataattcttttgccagctttttcaattttcgagagggggaaaaccatggggtttcccaactaatttcccttttaaaaaaaccattttaccctgcttggcgaatgagaaaaa

SEQ ID NO: 11263 - DNA, 382 bp, Zea mays
  Clone ID: LIB3157-005-Q1-K1-C2
cggacgcgtgggcggacgcgtgggggaggtacctttagcttcgggccgtcaaggacgaatgagtggagatcagctcttttttggcgttgagtccttaccctgaaacaaaatacacaattttacttgccgggggaggcagggggacaacctcgccggcccgtacctgtactccacggtgttcacgttatcacgtacgtagaaatcatgagcatgactgacggtttctacagattgaaaaccaaaacgttttacatgcgctggaaacctgccgctcactgtttacgttgggagtttttacaagtattttcagttcataacactatgctacatttggttgggggacaagtagtacaatgaacgcctcttttatctttccaatttt

SEQ ID NO: 11264 - DNA, 293 bp, Zea mays
  Clone ID: LIB3157-005-Q1-K1-C3
ttatgatatagctactgagaaacgtgcagaatttgagaaggcgatgattgaatataacaagaaaaaggaaagctgaacatttgtctgttccaaattcccgatggttcactgtaactggatgaatcaatcagctgtatattacagaactttgatttctagtggaatttatagataccactattggaaccgtcagctcacgcagatatgtatcttctgtagtcgacttgcatattttgatgacaccgagtcttttactggtggttttcatctggatataatttgtgtttcgtgct

SEQ ID NO: 11265 - DNA, 170 bp, Zea mays
  Clone ID: LIB3157-005-Q1-K1-C4
cggacgcgtgggcggacgcgtgggggatgatacctcgagcttcgggccgtcaaggacgaatgagtggagatcagctcttttttggcggtgagtccttaccctgaaacaaaattcacaattttacttgccgggggaggcagggggacaaccttgccgggccggacctgttc

SEQ ID NO: 11266 - DNA, 226 bp, Zea mays
  Clone ID: LIB3157-005-Q1-K1-C8
gaaaataggccatattgaggatgttacttttttccccacagacagcacacgcaagaaagggtggttgaaaaagaaagtggctgttatttccagtcctggcgtggtgccctgtcacatgtttccgttcaagtctgtctgcatctaatatactgagttattagagctttagtatcaaattgaagtgtccgagtgtactcatgattgcttaccaaaactcattcttgtc

SEQ ID NO: 11267 - DNA, 351 bp, Zea mays
  Clone ID: LIB3157-005-Q1-K1-C9
cggacgcgtgggtggccaggagcatactgtgtgcagaccagcgctgggtgctgcaagccgaccaccggtgtctcgccggcgcgcgacttctacataacgggcttcaccgtccttaacgcgaccaccgacgctgcagtgacgggatgcagcaacaaagttccttacgaccctaacctgattaccggcatccaaggcctgaatcagtactggagcaacatcaggtgccccagcaacaacgggcagagcagctggaagaacgcctggaagaaggccggcgcctgctccggccttagcgagaaagactacttcgagactgccctctccttccgtagccggatcaacccactcgtt

SEQ ID NO: 11268 - DNA, 231 bp, Zea mays
  Clone ID: LIB3157-005-Q1-K1-D2
ggcatgaagataggccgtattgaggatgttactccagtccccacagacagcacacgcagaaagggtggtagaagaggaaggaggctgtaatttcgagtcctgacgtggtgccctgtcagatgtagcagttcaagtctgtctgcatctaatatactgagttattaggttttgtatcgattgaagttttgagtgaactcttgaatgcttaccaatactcattcttgacatggc

SEQ ID NO: 11269 - DNA, 169 bp, Zea mays
  Clone ID: LIB3157-005-Q1-K1-D6
gagcttctgttcaagtgatgcatgtttcaaggcatccatccatggatgctttatgtttatgcgtattaattagccgtgtgtcagggaaccgggcagaagggggtgctgttttatttacgtcttctggtgatcaaataaaggggaaatacatgttggatgtgtgcaatgc

SEQ ID NO: 11270 - DNA, 268 bp, Zea mays
  Clone ID: LIB3157-005-Q1-K1-D8
gaggctaagtactaacggaagcctttctttctctggtaagcccggatgtgctcctgcggctcgctgtcagcctgttagctaatcaaacgcctcctctcgtgcgaccaggtctccttggcgctcaccaacaccattgactctagtggatcccccatcgccgtccaccaagtaggaaggttctcaatcgccgtaacacttattgcccttccttatcatcgtgctgttctactaccgatgcctctctctttggtagaactgagttgacaac

SEQ ID NO: 11271 - DNA, 358 bp, Zea mays
  Clone ID: LIB3157-005-Q1-K1-D9
gctccatgtaaaagatgtttatacgagctgttaattctcaaatctcacggtctgagcgggtctgttcgcccattggcaacactttcaggtttagtcaggtggcaataagctgtgtcctttggggagcacaggtctgtacaggattacttgtgttcgtgatcagttctactgctacctgaatttcatcgttgtgaaaaaaaaaaaaaaattaaaaaaaaaaaaaaaaaaaaaataataaaaaaataaaaaaaaaatataaagaatatgctttataataaataattcatactttctaactggtacaatttttatatgtttattttctaatttttctaatataaatgggggggctggtttt

SEQ ID NO: 11272 - DNA, 200 bp, Zea mays
  Clone ID: LIB3157-005-Q1-K1-E1
agaaatagtggttgttatagccataacacaaagctatgttgtatccatatccatgatgagaataatgatgaatttctactcacaataaaaaaaaaaaaattaaataaaaaaaaaaaaagaataacagcggaatgactaaataaaaccccataataaactaactacaatatacaataatataatttctttatcgacaacta

SEQ ID NO: 11273 - DNA, 152 bp, Zea mays
  Clone ID: LIB3157-005-Q1-K1-E10
ggaaaacacgggccgacccacgcatccggatactgtaatatgaagatgacctttaagatttctgggacgaacacagggaggctgggtttgtggctattttacaggcactctgcaaggctttcgatcggctctgacacgttaatgaaggttga

SEQ ID NO: 11274 - DNA, 428 bp, Zea mays
  Clone ID: LIB3157-005-Q1-K1-E12
gaagctggagaggaagatgacctgtaggatttacggggaggaagaaagggaggcttggttagctaccatctcattggctatctgcaaggcttttgatcttctcgacatgttaaagaaggaagaagaaatgcttctagctgtaaaggaaaggaaggcaaaggacgggaatgcatttgctcgtgaaatgctcgacgaacggacaaagaaggctgaagcatggcaccacaaagctgccagtcgtgtggcgtattccaaaccagccgatccgatcacctgtgcaacatttgctcaggatgtcattgaacggacagcgagcgtttcacatgcccacgagcacaaacaccagcccctgatatttggacctgcaagccttgttggcggcggtctgaccagtgaaagggaaagaatggcagcgcatgtttttcagc

SEQ ID NO: 11275 - DNA, 296 bp, Zea mays
  Clone ID: LIB3157-005-Q1-K1-E2
cccaccccctctaggtttactggcggctcggctgcagcgagttctcatctctttgtcgaggcattgagcgatatgtttgtttcattttcctccttcctgccttgtgattatctggtgtgtgtgtgtgtgtgactgacgaagtcgcggcgattaggtaactcgcttagaaggtatttcccgtgtttgagcaaaagaaagtatccctgttatctctgttccataagttagacatgatgtaatcgtactaagtttatttttacttatttcacttgaatggaaaagtatgcttcccattt

SEQ ID NO: 11276 - DNA, 418 bp, Zea mays
  Clone ID: LIB3157-005-Q1-K1-E3
gtacacaccggcaggacctaaggtttatcctatgtcgcatcactatgcagttcttggtcttgacagatcacgagcgacaccatatacagatgcagaagtgaagactgcttttagaacaaaagcaatggaagtgcatcctgaccaaaatcaaaatgatagagatgctgcagaagagaagttcaaggaggttgtcaagtcctacgaagcaattaaaacggagagaaaaaacggtgtaagttgatgcaaacttccagtgtggtcggatcatgtggtaaagactgcgaccggatcatgcgggaatcagtcgtgccttgtatatgtaatcaattgttgccggcagcttgataaaatggttcttctgttgctgttgaggacctgtagcacgagttccatttatgaacttgggcgatgtagattt

SEQ ID NO: 11277 - DNA, 323 bp, Zea mays
  Clone ID: LIB3157-005-Q1-K1-E4
cgcacttcaaggaggccaacaacttcctctggccgttcaagctgaaggcacccctcggcggcctcaagaagaagaggaaccactacgtagagggcggtgacgccggaaaccgtgagaactacatcaacgagctcatcaagaggatgaactaggttctctcttgtatcctgtgagaatgcttttctgtgtcagcgtggttgtttttgctctagtaagttgacggataatgatggatatgcaattttttttggtgttcattggctctaatacagccagacttcactaggaactgtgtcgctgtttatgttggcagtagcttctgg

SEQ ID NO: 11278 - DNA, 291 bp, Zea mays
  Clone ID: LIB3157-005-Q1-K1-E5
ggaccgtacagcatttcattccgtggctttaggcacaatgatcttcgccatcctccttagtcggatccactagtaatgtgttttattcacaagaacgaacaagtgccaccatccatggtattccacatgggggatttcaatagtgaatatatgtgcttgcttatgaagaaaatatacctgttggggctgactgattctatgattcaaacatactttatcgtacttgcgacgttatttcctttttataacgccactttaaaaacagtgactgacacgtgtgttacaaacagt

SEQ ID NO: 11279 - DNA, 417 bp, Zea mays
  Clone ID: LIB3157-005-Q1-K1-E7
gccaagaaggacctgctggtggagagccacgacgcggtgttccaggtgaggaagggcgagatgctgttcggctaccagccgtgcgccaccaaggacccccgcgtgttcggcgacaccgccggggacttcgtgcccgaccgcttcctcggcgaggagggcagcaagctgctgcagtacgtgtactggtccaacggccgtgagaccgagaaccccagcgtcgacaacaagcagtgccccgggaagaacttcgtggtgctggtcggcaggctcctcctcgtcgagctcttcctccgctacgacacattcaccgccgaggtcggcaaggagctgctcggcaccagcgtcatcttcaccggtgtcacgaaagctacctccggtccgggcagcgagtaaaccgcccggccggcgcgcgtcgtt

SEQ ID NO: 11280 - DNA, 311 bp, Zea mays
  Clone ID: LIB3157-005-Q1-K1-E8
gccaagaaggacctgctggtggattgcctttactcggtgttccaggtgaggaagggcgagatgctgttcggctaccagccgtgcgccaccaaggacccccgcgtgttcggtgacaccgccggggacttcgtgcccgaccgctttctctgggaggagggcggcctgctgatgcatttcttgtactggtccaacgggcgtgtaaccgatatccctagcttcgactacaagcagtgccccgggatgaacttcgtggtgctggtcgataggctcctcctcgtctagctgttgctgctctacgacacatttacctg

SEQ ID NO: 11281 - DNA, 342 bp, Zea mays
  Clone ID: LIB3157-005-Q1-K1-F10
cctccagcagctcgctctggtacgagctcgtctacacggaggcgcatggccgcgtgcgccgcggccaccgtgcgtggcagatcgccttcggctcagggtacaagtgcaacagcgccgtgtggcgggcgctgagcaccatcgaccctgccaaggagaatcccgtcggtgggaacccgtgggtggacgagatccacaacttccccgatgaggtgcccaaggtggatagcgtactcatgtcctgacagtgacacccacggaggaccactctgattcgctctctattctctggtggcaactactatatatatgctggtgatggtaggagtgcgtggagtgtaaggc

SEQ ID NO: 11282 - DNA, 166 bp, Zea mays
  Clone ID: LIB3157-005-Q1-K1-F12
cggacgcgtgggaaaaaaaaaatgatgtgtttatactaggctccagcagacccatgcgggccgcagcattgactggtgcaaagatacatgccgctgcctgcgacaggcataattctttattaaggcaccaagaaaaaatggaacggccgggggtttacaaacaaaa

SEQ ID NO: 11283 - DNA, 377 bp, Zea mays
  Clone ID: LIB3157-005-Q1-K1-F3
gccggttacctcgtcgcccgcatgatgctggaggacccatcgacactgatgatgatctccatggaggaggaccgccctgtgaagccgaccatgcggcggtcagcatcatggaatgcctgaatgcgtggatagttgtttctgaaccaaggaaattcagaatcagctgttatacggatttgtgatttgtttggaccacaagagtgcagcctgcagcgttggtgtgatttgttgggaccacaaagttcaacattgattatagttggactctgtcaattaggacagagtttgtataccatagaggatcataggagttgcacaagattttgccatgcccttttggtttgtttcagaacaatactcaggatactgttcagttg

SEQ ID NO: 11284 - DNA, 246 bp, Zea mays
  Clone ID: LIB3157-005-Q1-K1-F4
gccgaccaagaaccgtcacgtcctacgctacggcgcgtaggcatatatacgctctggtccagttgcattgcagcacgtgcacctacgtatattcctatgccgtgtcgtgtcgataggcaggcggcaccgctacttggtgggccttgtgtttgctggtgcagatcgaaaaatctgacaataagatgtacttaatgccaccttgatataataatgtatgatgacgaaactctgaaaactggtttacgc

SEQ ID NO: 11285 - DNA, 260 bp, Zea mays
  Clone ID: LIB3157-005-Q1-K1-F5
gttaactgttctagaaaggtgctatatttttacgtgaaactacgcttatattcctgtgggttaaagggcgtccaatgaactcgtctacacgccttggacggaggttttaagcctgaaggattctgtcgtctggacagcaacagagtaaatattgattttacctgattcagattagaaaaatgtttggaccacatacctgcattctgtgtaagtaggtgagattgagggggaccacaaatgttaaccaatgattggcggtg

SEQ ID NO: 11286 - DNA, 295 bp, Zea mays
  Clone ID: LIB3157-005-Q1-K1-F6
ctgttcttcttcttcctcaagctgtagcctgtgggaggagaggccggagaggcctcccatggagttcccccactcatcacttcttgttggtcccctgctagctgttcgttcctctcagcaggtagctagagatgatcttgctttaattttgtgctgatctcttactcgtcgtgtacgctcatatatatgcatggggcgacggatttgtctctgatcgttcccatgccgcctcttgtatcttgacttggatctatatatcaatgcaaataaatcatcgatgggtgacaatcgatcc

SEQ ID NO: 11287 - DNA, 377 bp, Zea mays
  Clone ID: LIB3157-005-Q1-K1-F7
ctgttcttcttcttgctcaagctgtttcttttggtaagagcggccgtttaggcctacggaggaggtaccgcactgagtactcgttcatgctgccgtgatcgctgtggattgcctgaatgagggggttgtagattctgtaccaaggaaattaagattctgtcgtaataccgatttgcgatcagataggtccacaagactgcagcctgcacctgtgagcgtgatccagtcgggaccacaaagtttatacattgattatatggtggacttgtgtaattaagacagaggtgtgataccttagacgatcatatgagttgcacaagattttgccttgcccttttggtctgttttataacaatactcaggatactgttctattg

SEQ ID NO: 11288 - DNA, 419 bp, Zea mays
  Clone ID: LIB3157-005-Q1-K1-G1
ggaaaggtatgcagttcagaaagatgagagcttatcagaaataaagacgcagctccttcagattgaaaatcagcaaagcagtttactggatcttctccagaaatttatggggaagtccgagaacggtatgcattctttggagacaagagtgcatgggctggagatggctttggatgagatctctcgcgatttggccttctcttcaggaaggatgtcaagcagagagcctgatgcaaagacgtgctgcattccgagcccaaaattctggagaaggcacaatggtggtaggtcttcctcaaggttttctgtctcagacgcagcaaacagctcagatgggagcagaacttcttacaagtgggagaggcagaggtttgggcttcaaggtgggtttgtcacaaacccattagccgagccgaaca

SEQ ID NO: 11289 - DNA, 432 bp, Zea mays
  Clone ID: LIB3157-005-Q1-K1-G10
cctgggcattccatcagaagtcgtctccagcatgcggaccaagatgatcgagggctcgtcgggcagcccgtcggcgcacgacgacatcaactcgttcctgctagacgatgacttcagcataccgttctccgtggatgacttcacgaagctgatagtgcacgtcgacgtagcggacatggacctgccaccgctcattcaggagagcggcggcggcggcggcggcggctccaaactgggacattgaggagtgacaatatgcacgccttttttttgtgtgtgtgttgcggtgatgtgcatagtgcgtgtgacatatttctctgagaccagggttttgtttttttctttgttgactggtcttccatttttctcccacgagtgagcgcctgtttgggtttgcgtgtgtatgattgtacagaactgagctgtggcata

SEQ ID NO: 11290 - DNA, 308 bp, Zea mays
  Clone ID: LIB3157-005-Q1-K1-G12
cggacgcgtgggcggacgcgtggggctgacttagaaacaggacgatttgcccagacttggtgtttttggtgctgttgaaatctccgatccctttggggtgtgacccactggacatggccaatttgtcacaatttattattttgacccatgtcatgtgaaactcctttcgttgaagtctggtatctagattgacttgtaccagatctgtggtttacgcagactggattctggagtactggactgtgtgtgtttttataaaaaaattttttttgtatgaattgttcatttatttatatatttcttgtgtt

SEQ ID NO: 11291 - DNA, 325 bp, Zea mays
  Clone ID: LIB3157-005-Q1-K1-G7
aagccactcaacaaggaagtgaagcgcatggtgaagaggaagaacccactcaagaacatggctgctgtgctcaaactcaacccctacctcggcactgcccggaagatggccacccttgctgaggctgctcgtgtgaaggccaagaaggcgaagctcgactccaagaggaccaaacttaccccggagactgccaaggttaaagctgctggcaaggcatggtacaagaccatggtctcggacagcgactacaccgagtttgagaacttttcaaaaaagctcggcgtgactcaatgagcggcaagggtaattaaattttgagtagctc

SEQ ID NO: 11292 - DNA, 70 bp, Zea mays
  Clone ID: LIB3157-005-Q1-K1-G8
gaccttggggacccaaaatatgttactgctgcctaatggacagccctgcagaagcactggtactccgcat

SEQ ID NO: 11293 - DNA, 420 bp, Zea mays
  Clone ID: LIB3157-005-Q1-K1-H10
gtttacacttaaaaaaaaaaaattaaaaaattaaaaaaaaaaaaaaaaaaaaaaaaaaaaaaaaaaaaaaaaaaaaaaaaaaaaaaaaaaaaaaaaagaaaaataaaattaaaaaataaaaaaaaaataaatatgggggggggtgtttaaaggatttttttttttttttcatgtttttctcatttttttattttttttttgtggcacctttatttggttttattgcgggattttttacactgttgcatttgttaaactttggtcttttcccattttaatgttttagtaaaatacccttttttcatgtggtttgttaatagaaaggactcctgtatttttcttgtttccaccttttccttattttttttggttagtgggcctccctttttacccttcccttaaaccgctggtggtttgggg

SEQ ID NO: 11294 - DNA, 419 bp, Zea mays
  Clone ID: LIB3157-005-Q1-K1-H3
aaaagatgatactcagtcagatcgtgaggaggatgccagtcaacaagaggaggatgatgatgatgatattggtactgctctcatgtctcgcaagcagagaggcctttataaggctatgaagatgggcaaagaaaagaaaaaggagaaagttgtgctactcaagaagagaaaaaagaacgcggattctggcgcttcttccaagaagcggcactgatgtgtcacaaatcttcatcgcattggtgtgtcatctctagtagaaatgttaccatgatcagctctgcgtgccaatcccccatgatgggtgggttgccttttgatatctgctatgtatgcttaagatgagttcaaggatatgtaacatgaaacttgaatagaaaagttttgatctgtcttacgaagcatttagactcgttattatt

SEQ ID NO: 11295 - DNA, 254 bp, Zea mays
  Clone ID: LIB3157-005-Q1-K1-H5
ataataaatgtcaggtgcacaaaatttttttttagtcctatgacaatgtgcggggcaagaaaacctcgaatctacacctaggtcagtgaaggatgacaacccaatatatggcttcaatgtctgctgcaggcacctcaagcgatacagctttttggggctgcctgagtgtgatgatatcagcgatttaggtgccttgttcaaaagaactacctccttttgatcctagactgttactacatcagggtttggtccat

SEQ ID NO: 11296 - DNA, 336 bp, Zea mays
  Clone ID: LIB3157-005-Q1-K1-H6
ggcgagcgggcggtacctctggcgcaccctcgctgcccaagcccagccttccaagtcggcgcggtgaaagtgaaagtgaaaccatctcgtcctgccgatgcagtggagactggtacagtcagtcatgttgttgtaatgctgttacgtattggtatatattcaagtaaatttgcaaaaacaaaaactattcttgtgctgagctgagccttgtgttgtgtgtaaagctggaaagtggtgctgtcctgcaagtgtatactttggccatgagatttgggtccaagtttcgtcggttacgaacattgtttgcattgcaagaaccagtttcgtttttttgtg

SEQ ID NO: 11297 - DNA, 133 bp, Zea mays
  Clone ID: LIB3157-005-Q1-K1-H8
aaactctgtaatctgaaactttgcacacccagaataaaagttttcgatttcaaagaagaaagcgaagataatgaaattgaaacccatctcggaggaaaaagccttagaagaatacaacataccatacatttta

SEQ ID NO: 11298 - DNA, 308 bp, Zea mays
  Clone ID: LIB3157-006-Q1-K1-A1
atttgccctgggttaccgttctgaatctgacaagtgatcttcggtccggggcaatttactcatttatggactgaccactggtttctctgagagggttttcttgaacaaaacgaggttcaagcaaactgttccggtccgcctatctattggtccaatgttcttgacccttgcgttccttgaaatataccttggtgaaaagcaccttttgatgcaaattgtccgaacttttaaacattatgacctaagacaacgatttgaatacacaactcatttcattgggtattctttctcgtacgcccgattaaaga

SEQ ID NO: 11299 - DNA, 205 bp, Zea mays
  Clone ID: LIB3157-006-Q1-K1-A11
tagaaatcgggggcctcatgatgtgggtgcagcccataaaaaactggtgtgtagtttggaaccgaaaattttctctgtttttgcgccacgagaggttctggaaggcatactctccagcaccgtggctaataacgcattgttccaattcagtctggccttgtcatgcatccataaattaaggggtggggttccctggttcaatatt

SEQ ID NO: 11300 - DNA, 61 bp, Zea mays
  Clone ID: LIB3157-006-Q1-K1-A2
cggacgcgtgggcaccgattcatgtatctctggttatggctcaagaaaaccgctcatgatc

SEQ ID NO: 11301 - DNA, 372 bp, Zea mays
  Clone ID: LIB3157-006-Q1-K1-A3
cggacgcgtgggtttctgaagaatacattctcggtaactaccattaccgtgttcaacattttgatgaatgaagctgtgactcaggatgtaagagccgcagccaatgggatagctgtaacactaatgtccatctctaaagcggttgctccagctgttgcaggaatcatattttcgtgggcccagaggcgtcaaacagctgcatttcttccaggcgaccacttggtgttcttcatactgaacatcttcacgttcatcggtttcgtcttcaccttcagaccgtttttcgttcgaggcagtgccaagcactgaaacatggatgaagcggacgacgacccatgggtatcctatccaggggcaatcgaatatagattt

SEQ ID NO: 11302 - DNA, 382 bp, Zea mays
  unsure (1)..(382): unsure at all n locations; Clone ID: LIB3157-006-Q1-K1-A4
cgaggagtttagacttgtaatagctatcggcagagaagtgcctgatccacacangataaaaaaaaaaaaaaaacaaaaacaaaaaaaaaaaaaaaccaaaaacacaccaaacaaaaaaaacaaaaccaacccaacaaaaaaacacaaacacacaacaaaaacaaaaaaaaaaaagggcccccccccccaaaaggccccaaccttccccccccgcccggccaccacaaaaccttttttatgcggcccccaaaacccaatccccggccccccgtttccccccctccggccgggaaaaccccggccgtcccccacctaaatccccttgcaacccaccccccttcccccagctggcctaaacccaaaaagcccccccccgaccccc

SEQ ID NO: 11303 - DNA, 409 bp, Zea mays
  unsure (1)..(409): unsure at all n locations; Clone ID: LIB3157-006-Q1-K1-A5
tcaagggctcattctctttccggcgctgtgtgcctgcgggctggggcattttactcatttctggtctgaccactgttttctctgagagggttttcttgaacaaaacgaggttcaagcagactgttcccattcacatagcgattggcatcatgtgcttgagcatcgcgttacttgagatataccgtggcgaaaagcagttcttgatgcaaataatcagaactttgaagcataatgacaaaagccagtgatttgaagacacagcgcatttcatagcgtattctctctggaacgcctgatgaaagagagctggtagtatagtgggtgggtaatttggtgtgtatgcangagatcgggagttaacataagaggggggattaatcggtcagatagataaatcggttgcgtatgg

SEQ ID NO: 11304 - DNA, 395 bp, Zea mays
  Clone ID: LIB3157-006-Q1-K1-A6
gacaaaaccagaccatcaaacaagtgccagcgccctctcgcagtcgccgcaatggagagcaccttcatcatgatcaagcctgacggcgtccagaggggcctcattggtgagatcatcagccgttttgagaagaagggcttctacctcaaggccttgaagcttgtgaacgtggagaggtcgtttgctgagaagcactacgccgatctcgcctccaagcccttcttccagggcctcgtggactacatcatctctggccctgtggtggccatggtctgggagggcaagagcgtcgtcacaactggccgcaagatcattggcgccaccaaccccctggcttctgagcccggcaccatccgtggcgactttgctgtcgacattggcaggaatgtcattca

SEQ ID NO: 11305 - DNA, 413 bp, Zea mays
  Clone ID: LIB3157-006-Q1-K1-A8
cggacgcgtgggcgcgctcggcacacaggcggcggcgctcgggctctcagcgacggcgtcagcggcttaccctcgcgccctcgcctccggtcctccgcacaccggccggtgaccctgcgacaacattgcatctgaactgcattggatcctaagagatgatggatgagtcttttcttgataggatggtttcccaacttcggtcaacatgcaagtactacactggatatcccaaggacttagggcgatcaagaattataccattcacatctgagcgtcagtttgtgcagctattacatgaaggcaggcctgtagtcgttgcctttactattaagtgcacatatacacagcatcttgataaagttctggaagaggccgcagctaaattttatccacatatcaagtttgtccgagtt

SEQ ID NO: 11306 - DNA, 411 bp, Zea mays
  Clone ID: LIB3157-006-Q1-K1-A9
gtggggatgacgatgaatccatcgttcatcacactgccagtgttggtgatgaagagggtctcaagaaagcactagatggtggagccgacaaggatgaagaagactctgagggaagaagggccttacattttgcatgtgggtacggtgagttgaagtgtgcccagatccttcttgaagctggtgctgcagtggacgctcttgacaagaacaagaacaccccgttgcattacgctgctggctacggccgcaaggagtgtgtggatcttcttttgaagcacggtgctgctgtaacgctccaaaacctggacgggaagacacctatcgatgtcgccaagctgaataaccaggacgaggttctgaagttgctcgagaaggatgccttcctttgaataccatgcctttcatatacac

SEQ ID NO: 11307 - DNA, 407 bp, Zea mays
  Clone ID: LIB3157-006-Q1-K1-B10
attaaatttacaggatgaagctctacttacagattggaagcagcagttggatcgtgatgttgaaacccttaaagccaaatcaaacattggtagcattcgcacggactgagattgatggatattgtgaaggtgaactaatcaaggtacctttggtaaggccttctattatattatctgagattgatggatatggtgaatcaaatgaacttcaaaacattggcctttagttaagagatgcctactcactgcctgaaaatcggtgtgcagatcttttagggagtcagcggccttgcaatcccctctgcaaccataagaatttttgtgtgctacagatttagtaccggtgagtatttggtttatagatttgatggattttctgatagatgattacattggtggaacattca

SEQ ID NO: 11308 - DNA, 394 bp, Zea mays
  Clone ID: LIB3157-006-Q1-K1-B12
aaaaaaaaaaaaaaaaaaaaaaaaaaaaaataaatttaaaaaaacaaaaaaaaaaaaaaaataaggagacatacaaccataaaaaaaagaaacatatcttttaaaaaatacatttattcctatcctaataggggccgctttcttttgcggttcctgttttcatccccttgtttcccacctctttccctttttttagctccccctttttccctttctttgcccctttttttaaaacccccttcctgggaactccttggctttcccccattttttctcttttctgcctttccccctttcccccctcttttttttcacatagagtcccgcctgttccccccttcccaccatttctccactcttatttgtaaagggcccccccccttttttttccttt

SEQ ID NO: 11309 - DNA, 332 bp, Zea mays
  unsure (1)..(332): unsure at all n locations; Clone ID: LIB3157-006-Q1-K1-B3
tgccttgcgggtgaatgttgcagaggagcggccacggcgaggtttctaatgaggttgtatcgggtggactgcacgcttgttccatgggttgggagcatcatagcatgttctgatactggtttagaccttccattctctttccttgtgttgctgagcttctatcatcgtgtcttattgtgaagagggaactcttcactaatgttttgttatgtacttgttgtgttcaaaagttcttgtactgntcaaaaaaaaaaaaaaataaatacacctcacatcaattcattggcctccggtacacaacgttcaaaactcaaaaaactggtgggtaacac

SEQ ID NO: 11310 - DNA, 408 bp, Zea mays
  Clone ID: LIB3157-006-Q1-K1-B5
cggtgcctgtactgggaggggaagctgatcctgcccttcggcgaccagttctggttcaggttcctgctgggctggctgatgccaccgaaggtgtccctgctgaaggcgacccagggcgaggctatcaggaactactaccacgacaaccatgtgatccaggacatgctggtgccgctgtacaaggttggggatgcgctggagttcgtgcaccgcgagatggaggtgtatcctctgtggctgtgccctcaccggctgtacaagctgccggtgaagacgatggtgtacccggagcctgggttcgagcaccagcacaggcagggcgacacgagctacgcgcagatgttcacggacgtgggcgtgtactacgcccccggggcggtgcttgagggggaggagttcaacggcgcg

SEQ ID NO: 11311 - DNA, 405 bp, Zea mays
  Clone ID: LIB3157-006-Q1-K1-B7
gggcgccggcatggcggacggcagctacaccatcatgcacctggacctggcctccctcgacagcgtgcggcagttcgtggacagcttccggcgcgccggcatgccgctcgactcgctcgtctgcaacgccgccatctaccggcccacggcaaggacgccgacgttcacggcggacgggtacgagatgagcgtcggcgtcaaccacctgggccacttcctcctggcgcgcctgctcctggacgacatgcagaagtccgactacccgtcccgccgcctcgtcatcctcggctccatcaccggcaacaccaacacgctggccgggaacatcccgcccaaagccgggctgggcgacctcccgggcctcgcggcggggctgcgcggccagaacggctctgccatgatcga

SEQ ID NO: 11312 - DNA, 224 bp, Zea mays
  Clone ID: LIB3157-006-Q1-K1-B8
agttcaagcagcagcgggagaaccagtggtgcgtcaaaggagaaggaacccgttctcgttcctgtggcctttccgctcatcaagtagttctcgctagattagcctctggtaatctttgctcaggttcgaaatactgtttgtttttttgggtcaaatacgctggtctaatgggctttaatgtggtgggatctcaatctgtactgtatggtttgttaatgatcgcc

SEQ ID NO: 11313 - DNA, 406 bp, Zea mays
  Clone ID: LIB3157-006-Q1-K1-C1
actggctttaagtgcggcattaactaccagcctccaagtgtggtgcctggtggtgacctggccaaggtgcagcgcgctgtgtgcatgatctccaactccaccagtgttgtggaggtgttctcccgcatcgaccacaagttcgacctcatgtacgccaagcgtgccttcgtgcactggtatgtcggtgagggtatggaggagggcgagttctctgaggcccgtgaggatctggcagcgctcgagaaggactacgaggaggttggtgctgagtttgatgagggtgaggaaggtgatgatggtgatgagtactagaagtatcctgatgcggtcatcgtcaggcttgtgtgctgctcttgtccccgttgtggtttgcaacacctgatgttgtaagactttctggttatgt

SEQ ID NO: 11314 - DNA, 408 bp, Zea mays
  Clone ID: LIB3157-006-Q1-K1-C10
caatttttcaccactcgtttttcagcaactttttggtagtttctgttttgggtcattgcttcccttccaggcgctgaataaaaggaaacatgtctaaaaaaaatattttatcctcatcaaaaaaaaaaaaaaaaaaaaaaaaaaaaaaaaaaaaaaaaaaaaaaaaaaaaaaaaaaaaaaaaaaaaaaaaaaaaaaaaaaaaaaaaaaaaaaaaaaaacaaaacaaaaagaaaagactaaattagatattgaaactaaaaaaaaaaaactgtacagttggggatgaaaaaaaaattcaatgggggggggatgtctaatttgcaactttgggtgcagcctgggggaaaaacaaaaaaaaacgtgtttttagcgcaaaacaaaaaaaatactcaacgccaatttataaaa

SEQ ID NO: 11315 - DNA, 277 bp, Zea mays
  Clone ID: LIB3157-006-Q1-K1-C12
cggacgcgtgggcggacgcgtgggcaaaagtatagcggctcaagacagcgtttcaagatcgtttatttacaaccagactagcagaagatgctctctatatctaccgtcgccttgtattattagtagctgaagtaagttcatgtgaatgttgtcgtgttcccgcagctgcgacgccatggcgtgcgacgtgcgcgttcttggctgtcgcagctgctgaaacttttgatggtttttaacctgtaagctgggggggatgaagtaaattattttgttctac

SEQ ID NO: 11316 - DNA, 392 bp, Zea mays
  Clone ID: LIB3157-006-Q1-K1-C2
gaattattatgatttgaatctttatctcggggtaaaagcatactgtttttgtttttggtgtatcgcctggccaatctaacaacacatgttttatgttacagacgcagttatcacagatggaaaatatttaatactacgactgctacagaggaaacaagatacctgtactgatggaatatgattcgtgtattattccttgggaacttgaacttatcatatggagttgtaaatttttttgtcatttcgacttatgttcacttcatcattgcctttatgatcatgtaattcagagaccgcagagcaaaggtgggctggggcttaaggcgtatttggaaacaaagtattttaaaactatagttttggaataatataagtttaaagatgtatgacat

SEQ ID NO: 11317 - DNA, 254 bp, Zea mays
  Clone ID: LIB3157-006-Q1-K1-C3
gttcttttggaagtacagtaccaaattgtgccaaatgctaggaggtacgtggttaaaataagtgctgcacttgcagcaagttagcacgttgtttacaatgactgttcatgagtgtagaaaataaggaattcaatggatttccatggaattagtgcttgtagttgtagctatggaatatacgtgagaaaatgtcaaggtatccaacaaactcatactgtaaacctagtatttgtaacttttgcggtttgtatgat

SEQ ID NO: 11318 - DNA, 280 bp, Zea mays
  Clone ID: LIB3157-006-Q1-K1-C4
gaaaaaaaaaaaataaaaaaaaaaaaaagtgaaaaaaaaaaaaaagaaaaaagattaaagggagtgaaaatggatgaactatgtatacactgtggtgtgtttctactcgggtttttctgttagaggataatgatctggtggtactgtttgttttactgtgagctagtattcttgtactgctgggtgtatgttttgagtttgtcttggttgcgaacttgctcttactgtatgccgttgttaattttttctgcattttgattttttatgagttgctcattgt

SEQ ID NO: 11319 - DNA, 144 bp, Zea mays
  Clone ID: LIB3157-006-Q1-K1-C6
ttctgtttcagtacgtacgtacttggatcgcggaagcccgtgtatgcgtgttccgttgtggtgttgctgtactcgatctgctgcatgtgtgtatctaccgagctcttcggacagatacgcgtgcgtatgaataaatgatgtaat

SEQ ID NO: 11320 - DNA, 325 bp, Zea mays
  Clone ID: LIB3157-006-Q1-K1-C9
ccgcaacgacgaggagctcggcaagctgctgtccggcgtcaccatcgcccacggcggcgtcctccccaacatcaacccggtgctcctgcccaagaagaccgcggagaaggcggcggccaaggaggccaagtcgcccaagaaggccgccaagtcccccaagaaggcatagaggggcgcctttaccgctgtgatgttgaatgctcgtgttcagtagatctttacgtctgtagtgtcgtcgttgttattggaactgggtagtagatctgtgcattgtggttgaaatgtgattccctgatttcagaaatcaaatttgcaatttgggtgc

SEQ ID NO: 11321 - DNA, 402 bp, Zea mays
  Clone ID: LIB3157-006-Q1-K1-D1
ggactttatggccctcctggcttatgaagagcctgagaagtcacctatgtttcatctactaagcccagagcacaggcacaatgttgcagagggcttgaatcgggctgtccttgcccatgctaatcttccggcatattcatcgttggagagggtggtccagcaagcgactgtggttagacaatacctacagcaggaagttggcaaggattcttacccaccattttctttgaaggcctttctgagcaagtaaaatgtgcaaatggtcacttcttgagaacagggtaccacctctccaggccatcatgtacatgtacccttgtggagtgcatacacgatgaagtagtttatacagttcaggtgttgttgacaccacttatacagttgcaatggtgttgtactttg

SEQ ID NO: 11322 - DNA, 332 bp, Zea mays
  Clone ID: LIB3157-006-Q1-K1-D10
gcggtcctcttatatcaactttgttgacttgggttctatcagatccatgttccttgcatgagggggaaatatgtgggccgagtttgaacacattggtggcagcgacagccaatccatgcagaatttgtgtgtctagagaggtcctgctatggttctgagccgttcctttattcagcccccccttttctgttgcgcttatttatgaacaattggactcttgtattaatccttcattgtttgccctattttcatacccacaattgggaaaatttaagtagcgaaaatgtctcatctagattgtaaggtttcttttatttggtactacttctttt

SEQ ID NO: 11323 - DNA, 281 bp, Zea mays
  Clone ID: LIB3157-006-Q1-K1-D2
ccttcccagtcgagatggaataatgtcaggcgcacgtacagacgtgttattacgatatttctcccctacaaataaaaactcgatctgtggggttaaaaaaaaaaaaaaaaaaaaaaaaaaaaaaaaaaaaaaaaaaaaaaaaaaaaaaaaaaaaaaaaaaaaaaaaaaaaaaaaaaaaaaaaaaaaaaaaaaaaaaaaaaaaaggggggggccgttttaaaggaccaaagtttacttccgcgtgcatgcaaagaaaaagtttttttatggggccacctaaa

SEQ ID NO: 11324 - DNA, 203 bp, Zea mays
  unsure (1)..(203): unsure at all n locations; Clone ID: LIB3157-006-Q1-K1-D4
caagaacaactagctagtcatccttgccgacgacgatccatgtctctgtatctgtgtctgttcatatgcctgatgccgacttgtgctgtatgtagttgcttgaattcagtcgtgttcctgttttgctaccgtacccaccccatgcatcatctgtcaccgcgacgcaataatcatagtaataacaagttcagataatcgnnttc

SEQ ID NO: 11325 - DNA, 258 bp, Zea mays
  Clone ID: LIB3157-006-Q1-K1-D6
gggttctgctccttggtgaaatctgccaccagccagtcaagaactgggttgttttcataatatatgcttttgctacgcagcctctgctgttgtaaggaattgcattgttatcttatatcactgtatggtgatgtttaactagtttgttgatgtgccaaaaaaaaaaaaaaaagaataacaaattcaaataaaaaaagggggggccgtattaaagaataaaaatttatttccctgcgtttgcaaattaattgctttttt

SEQ ID NO: 11326 - DNA, 224 bp, Zea mays
  Clone ID: LIB3157-006-Q1-K1-E1
gaattattcagtttcactccacatcgtgatgttttatttttacttttgtcgtgctataacggatagcgctcctcgttggcgccactggcgggtggttctgcctctggtctggtgtgtttgtgtgtggtcacacttgccagccagcagaggcgcctgcttgtacctagattactgtttccattgtcgtcatcatcggctaacattgtcataatgtcagtttgggt

SEQ ID NO: 11327 - DNA, 145 bp, Zea mays
  Clone ID: LIB3157-006-Q1-K1-E12
gagagcccgcggacggcagaccggcccgagctcgccggttccgacaggcccagccaccgtgccaccaccgagtgcacgccgtcacacccgatcaagacctgataacgtgtacaaggaaaactaagaaccatgcctccttttcttg

SEQ ID NO: 11328 - DNA, 275 bp, Zea mays
  unsure (1)..(275): unsure at all n locations; Clone ID: LIB3157-006-Q1-K1-E3
cagggccatcccgttcaagagcaggtcttaagctgccgcgggtgtgctgagacatgcatgccagttcggaaggacgagcgtcttcctgtggggagtgtcttgtctgcccacgcctagtttctctgctgaatctccatctctcttcccttcaagactgctcactgctgcactgctctgttatctgaacccagaactttgtgtactcctgtaccgagctgtgtgtatgtttttttttcttcnngaaaaaactgaatggaaaatggaacacaccctgt

SEQ ID NO: 11329 - DNA, 107 bp, Zea mays
  Clone ID: LIB3157-006-Q1-K1-E5
ctcccagtcaacttttgggttgctgcaccgttgtctccttataatgtaattatttatttattttgtatagaactcctgttatatagtaaagatgtgacattcgatcc

SEQ ID NO: 11330 - DNA, 402 bp, Zea mays
  Clone ID: LIB3157-006-Q1-K1-E7
gcaggggcaagcctgacaaattctgcaaagacctcccattactgccagtttcatgtggcatccctgctcgtaccacttatttgttcttgttacgacctggacttgtactttacgcgggataggaacgaagtacagacctagtgtaagaaggcggtactttttaccctcgtactgcttgtaaattgtaatgtgtagcatatattagagcatgatatcacttctgctgcatatattcgtcagtgtgaccacacaaggaagttgtgcagtagaattttgtcatgtcgatgtttaagttgaaggatcacattgcttgtaaaatttggcagcatgttgtcttatcctcggatgagtatgttgttgtagaaacttgcatttggcctttgatctgcacactcttgtatg

SEQ ID NO: 11331 - DNA, 382 bp, Zea mays
  Clone ID: LIB3157-006-Q1-K1-E8
ggaattaattgcaattgctcgagttaccaagggaaagaagccattcaagatcgacctcactccgttccaggagtgatctgctttggttgatagaaagcacaatgccaccatccatggaattccacagggtggatttcaatatgaattgagtacttgctattgttgggagtatacctgcagtggatgacttagactatctctagcagattctttatctcattccgtattttatttcctttttcaaactccactctgcaaacagtgttaaacagtgttgtcatctacagtttcgcattccctgttttaccctatctactcgagacagtcttatcaccgaacaaactattgtgttgaaacctgccggattggtttgtgttatttc

SEQ ID NO: 11332 - DNA, 124 bp, Zea mays
  Clone ID: LIB3157-006-Q1-K1-E9
tgaagaaaccgtactagctgtagctgctgaacgtttgagtccctctgctgccacccttatctccattgtgccgtcgaacctccttgcttcccctgtgtgaatctgtacggattttcgtgttctg

SEQ ID NO: 11333 - DNA, 118 bp, Zea mays
  unsure (1)..(118): unsure at all n locations; Clone ID: LIB3157-006-Q1-K1-F1
naaaaaaaaaaaaaaaaaaaaaaaaaaaaaaaaaaaaaaaaaaaaaaaaaaaaaaaaaaaaaaaaaaaaaaaaaaaaaaaaaaaaaaaaaaaaaaaaaaaaaaaagaaaaaaaaaaaa

SEQ ID NO: 11334 - DNA, 408 bp, Zea mays
  Clone ID: LIB3157-006-Q1-K1-F10
atttcttgtgcctgcttattgctgggctagccgccggtctcttgctctgatagcttgctccaggacgtacgtacgtacgtagatcgatccatcgatcgctagctagctgacgaccatggcgtccctctcctctgccgccatcaccgccccttccttcacggccgcgcccgctcgcgcagtggtcagcaggaggtccttcaccgtgcgtgcctctctccgcaaggccactgccaccgccgccgtggccgttgccgccagcgtcctgcttgccggcggcggcgccatggcccaggaggtgctgctgggcgcaggcgacggcgggctcgtcttcgagcccagccagttcaccgtcaaggccggcgacaccatcaccttcaagaacaacgccggcttcccgcacaacgtcgt

SEQ ID NO: 11335 - DNA, 331 bp, Zea mays
  Clone ID: LIB3157-006-Q1-K1-F11
cggacgcgtgggtttagaatggagtgtgaataactatagctagcataaggctatctccagcagattagccatcctcacatctaacagtacagtctatagtgcaaaatattgtaaaacagtgttttagttgaccatacggtgaattgttggaaaaaaaaaaaaaaaaaaaaaaaaaaaaaaaaaaaaaaaaaaaaaaaggtcaacaatcttgggggtcccggtttggcgactcctaccttccgacggctgcgatgccacaatgtgttctcttagattgaattagcggcctgaattataaggcgctggggctgggaaaacccggggggtaacc

SEQ ID NO: 11336 - DNA, 402 bp, Zea mays
  unsure (1)..(402): unsure at all n locations; Clone ID: LIB3157-006-Q1-K1-F12
gagtcttcatttttttttgtcttagcgatcttcttttttctctttttggttgttgacacatataaatttgtgaatcggcaagcataccagcaaagttgtaagtttgtataggtgttacggcagatggatcactgacgtnaaaaaaaaaaaaaaaaaaaaaaaaaaaaaaaaaaaaaaaaaaaaaaaaaaaaaaaaaaaaaaaaaaaaaaaaaaaaaaaaaaaaaaaaaaaaaaaaaaaaaaaaaaaaaaaaaaaaaaaaaaaaaggggggggcggttttaaaggatcaaagtttacttccggtggtttgggaagaaatagtttttttttggggcccccaaaatcaaatcaatgggccgtgtttttaaaacgtgggaactggaaaaaccttggggttcccaaa

SEQ ID NO: 11337 - DNA, 375 bp, Zea mays
  Clone ID: LIB3157-006-Q1-K1-F2
caccaatgcagatcgtcgtgagctctacaaacagaaactacaggccaataatagcttgatttttagagtacaaaaatctgttatttgcctgatagtttatctggagcagtttcattttacatatgactgtaatttgtgagaatgtacatcttacgatttttgttgaccagtattcataggtttttagttagcaatgtgttgttggcccgttgctagtccttgtaatacaagcccacctgtttttttgcgcatggcaagacttaacctggcaacattttgtagtacattttattttgtatcacctgctctatacactagttttcttggaacatcggaaataataatgccctccagtatcttgcgaccaaaaaaaaa

SEQ ID NO: 11338 - DNA, 334 bp, Zea mays
  Clone ID: LIB3157-006-Q1-K1-F4
gtcggccacgctgtgctacacgggggagacatgcaaatacattggctgcctcactcctgcttgctcctgcaactatagtgatcgtctatgctacatcatatttactcctgttgcttgaggccattccgcgaagccacaactctcacatgcatgcgacgacgctgcctcgtgagcttctgttcaagtgatgcatgtttcaaggcatccatccatggatgctttatgtttatgcgtattaattagccgtgtgtcagggaaccgggcagaagggggcgctgttttatttacgtcttctggtgatcaaataaaagggaaatacatgttggatgtgtgc

SEQ ID NO: 11339 - DNA, 408 bp, Zea mays
  Clone ID: LIB3157-006-Q1-K1-F5
gtcgaagaggctgcaccgcttcataactttcaagatggacgacaagttcaaggagatagttgtggaccaggtcggggatcgcgctaccagctacgatgacttcacaaacagcctccctgagaatgactgccgatacgcgatctatgatttcgactttgttactgcagaggatgtccagaagagcaggatcttctatatcctatggtccccatcctccgccaaggtgaagagcaagatgctttatgcaagctcaaaccagaaattcaagagtggcctcaatggcattcaggttgaactccaggccacagatgcgagtgaaatcagcctcgatgagatcaaggatcgggcacgctaggcgcaccgccatcgcgagtttcatgatcacgcatcatggactcgcctactact

SEQ ID NO: 11340 - DNA, 369 bp, Zea mays
  Clone ID: LIB3157-006-Q1-K1-F7
gctgtactatattgcgacccccattgagatgctttattttatatatttattttattgccgttgtttgtatggtaaaaaaaaaaaaaaaaaaaaaaaaaaaaaaaaaaaaaaaaaaaaaaaaaaaaaaaaaaaaaaaaaaaaaaaaaaaaaaaaaaaaaaaaaaaaaaaaaaaaaaaaaaaaaaaaaaaaaaaaaaaaaaaaaaaaaaataaaaaaatatatggggggggaaaatttaaaagtaaaaaaacttggctcccgggaaatgaaatttcatatttttttatattgcacaaaaaaaaaaaactaatgagccaatttttaaaacctaaaggatggaaaaaacattggggtaccaaaattaaagttt

SEQ ID NO: 11341 - DNA, 168 bp, Zea mays
  Clone ID: LIB3157-006-Q1-K1-F8
cttaactgttctagaaggatgctagatctttaggtgaaactacgcttatatgcctgtgggttaaatggtgtacaatgagctcgtctacatgccttcgtcggaggttttcagtttcgtgtattctgtcatctggacagcgacagttcaaatattgattttacctgattc

SEQ ID NO: 11342 - DNA, 231 bp, Zea mays
  unsure (1)..(231): unsure at all n locations; Clone ID: LIB3157-006-Q1-K1-F9
cacgcgnncgcccacgcgtccgcccacgcgtccgcccacgcgtccggtcgttgtttatctgtctactgtgctttagattgttaaaggacatgtgtttcagaacggatgtgttgttgcctcgtactatggtgaaacattgtctcagtttttgtggtcgctgccaggattttgcattatgcctaaagatgtttactttggatatttttgtgttaaaatggtactgtattggat

SEQ ID NO: 11343 - DNA, 327 bp, Zea mays
  Clone ID: LIB3157-006-Q1-K1-G10
ggcaaagaccgccgcaatgccggcagcggtggcggtgatcgctctccttcttattacgactctacccgtcgggcgcggcgaggagaggcccaccgcggcgcacccgcacgggctccccttcgagagcccgctcgcgctgtctccggccgcttacgacttcttccaccccagcgcgcgcgcccgtcgagctcgcggcgtcgcgccggcgccggcgccggcgctcgcgcctcgcgggcagcagcagctgagagagtccgcggtccgaggaggaacatcgtcggcaagcgtggccaaggccgaccgggaagaagggggcgtggctttttt

SEQ ID NO: 11344 - DNA, 56 bp, Zea mays
  Clone ID: LIB3157-006-Q1-K1-G2
cacgattcaaaacttgtgaatttggccgcgtgaggttttacaagtaagttttgttt

SEQ ID NO: 11345 - DNA, 376 bp, Zea mays
  Clone ID: LIB3157-006-Q1-K1-G3
gcttgtagtcgctcacaaaaaaaaaaaaattaataaaaaaaaaaaaaaaaaaaacaaaaaatataaaaaatataaaaataaaatacaattacatacaaaaaataaaagggtcctttattataaaaggggccggccttttttggggttccatgtttacttccgcttcttttctacgccttgctttttctattgtgccgcccaattttattcaattgcccgtcttttaacaccctgttgactggtaaatccttttcttttcccaacttattccttttgccgagcttccttttttcgagaggtgccgttttttcctatgctcccaaccctttcgctttttcaataatttgcgcagccttcttgtcaattgggacccccc

SEQ ID NO: 11346 - DNA, 266 bp, Zea mays
  Clone ID: LIB3157-006-Q1-K1-G4
ggcggttgctgaccagtgaatatgtgcatttcagacagaaccagcctgtacactggctagaccgatgggtctatcacggtttggaagatctacaggtactgggtcgcacgctatatataaaaataacattggtactcgcgagtgttcagtggaaaacatggtaacgctcgccaaggtaaaaatgtcgggagctatattgacaattcgataattggcggacgcctgaccattaccaacttactatggatgaaactagtgttgcacat

SEQ ID NO: 11347 - DNA, 212 bp, Zea mays
  Clone ID: LIB3157-006-Q1-K1-G5
cggacgcgtggggaagttagaagaacccatgctggtggtctctcgttcagtggcgtatgtgttgttgtgatggttgtcgttgttgttttttttctcttcttccagtccaaaagtttgttgattcgttttgccagatagtacctttgttggagggataatcatgctcacatatatattctctaaagcaagcagttatatatgattataccatc

SEQ ID NO: 11348 - DNA, 165 bp, Zea mays
  Clone ID: LIB3157-006-Q1-K1-G6
cgacgagttctaggtgtgggttagcggcaacccccagtcggctgcctgtgaaggccgcgttatctacgtttcttttccgcactttgatttattgtaagaactatatggacgtctcagacgtatgatgtaatcgactatttcccttattaatactattttgagcac

SEQ ID NO: 11349 - DNA, 262 bp, Zea mays
  Clone ID: LIB3157-006-Q1-K1-G9
cggacgcgtggggaaccactgaaagccatctctgatgaggttgagaaaaattactcatcgaaatggagtacctgagtagttcggatcttagaccatgttcacgttcactcattcatatgatttggacacacgcatcaaaggcagttgtcagttgaacaaatgaaacagatgtagtatgcaattgctgaggtcagtcagttcctgtggtttggtagatcttcatggtgtgctataatataataccccctctattccaatttat

SEQ ID NO: 11350 - DNA, 193 bp, Zea mays
  Clone ID: LIB3157-006-Q1-K1-H1
ctcggtacaactccatcacgatccaggcatacaacactagatacagttacaatgccgaacctgagccttgtgaatagatactcctttactgacatacaggttgattgtataccatgtcctatttgttcattgttatattctttatttatacagttacatattattaatcttcatcagttcattattcagttca

SEQ ID NO: 11351 - DNA, 283 bp, Zea mays
  Clone ID: LIB3157-006-Q1-K1-H10
cacgcgtcgtcattgcccaaaccggcgtggacaaataactttcaaggacatgtagttattcacgtaaactgcggctaatgctgccacctgccgagaggaggctagcttctatgcgaggatttcacgagcgcggaaagtttatcggttttatgaccacttggcttatgctggactaccttgtggcatgctgatgccatacaaggacgaaagataaaaaatgacggctcttacaacagtacgatcaaatcgagattgactggtgctcagcttcgggaatattttt

SEQ ID NO: 11352 - DNA, 337 bp, Zea mays
  Clone ID: LIB3157-006-Q1-K1-H12
ggatggagatcataccatgatctttgtagggttgatagaggagtccacgcttgaatattgttgtcatgtatgttattcttggttaataataaagttcgtcagctcatttcttaaaaaaaaaaaaaaaaaaaaaaaaaaaaaaaaaaaaaaaacaaaaaaaaaaaaatacaaagaaggacaacacgcaaagatttaatacaacaatcttatgaatgaccactcttaacttatgctcaaaaaccaccattttaactgacactgggctggaaaaccactggccggggcccagcttaatccttcctaagaatattcccatttcttcacctaagcctttttc

SEQ ID NO: 11353 - DNA, 417 bp, Zea mays
  unsure (1)..(417): unsure at all n locations; Clone ID: LIB3157-006-Q1-K1-H2
ggaacttctacaggctggagaatgaacacttgaacaacgctggaaaggtcaaagcagtgaagactggcccgttaccattccgggggcttggaactgactggtgaaaaccgggcttcatggtgaacaacaaggatttaagggggagaattccaagaatggattcccttgccccttgcagaaccggtggttaaaggggtataaaaccaaatcgaaaagcgtaactgcccagaaccaaaaccctgaaaatttaaggatggatggaataagctctggcgggtgcgccagggtacaacatgaggcgttctggtcaggagagatgatgtgcatttaactagctactggtcgattgagaatngntgcatgtcaatcgactaacangatcttaattttgtcgatcgtttaagtngtgaatgtatt

SEQ ID NO: 11354 - DNA, 124 bp, Zea mays
  Clone ID: LIB3157-006-Q1-K1-H3
cgtggattttggtgcaaggagatgccggcttgctttccttggcacaaatgctggtggtagaacattggcccgaatcattggaattttaacctccaaaccccagggggaccagggcagggaaaaa

SEQ ID NO: 11355 - DNA, 119 bp, Zea mays
  Clone ID: LIB3157-006-Q1-K1-H4
tgcagaaggacgtgggaacgtctgggatgcaaaaggcgaccatgaaaaaaatggtgcatttggccccccatattcattggttcaaggaacacttgaaggtgatggtgtgccctttaaga

SEQ ID NO: 11356 - DNA, 269 bp, Zea mays
  Clone ID: LIB3157-006-Q1-K1-H5
gcgacaatcaagcctagagggccagatctgattctggcttccccatattggttggttctcgatacattcatgatattgctaccattgtcacttacatgtgagagaagtgttttttgttagcttgcattgtgatataagagttcatcttgagaaagacgttatgtttacatctagcgttttttttttgcaatcaaaaatcagtattgcattgtggaccatgggctactgaaggcacctgttttgtttacacaaatgaaatagaattctgg

SEQ ID NO: 11357 - DNA, 65 bp, Zea mays
  Clone ID: LIB3157-006-Q1-K1-H6
ctcagagcagccgcatccacaacctgccttttttgtcccctggcggcgtccgcggcaagattgcc

SEQ ID NO: 11358 - DNA, 410 bp, Zea mays
  Clone ID: LIB3157-006-Q1-K1-H7
agcagcctcaggacggagaaccaacgaatgaaatggcgaggagcatggtgtatagcttcccgtgtagctcgtctgatggtttattgaacctcgacatgaaaatggctgatgacgtgcgtggttatctctcgccgctgagctttgataattgctttggcgcgtttgacgacttcactcgccctggatttgacatctctgagaaccccttctccttcccgccttcaggatcttgcggttatgggcagcagaacggtgatagctgatggatgccgccatcgatgatgactacaccgcggcactgtcaacctttatgtatgttgttgcatgatgctagtttggttcatcctctgctcaagagccattttaggctatgcctttaactttcttaagtgtacctccgtttgtggtca

SEQ ID NO: 11359 - DNA, 165 bp, Zea mays
  Clone ID: LIB3157-006-Q1-K1-H9
cggacgcgtgggtgaacttccgatgttgccacatgctggatcagtctgaataagtaagtatgcagctctaggtggtcagctgcgtctaccacaatgagcatgaacgtatggagaaatatctgtgaacccattttgtttatgaataagatttgtttttttcgagtt

SEQ ID NO: 11360 - DNA, 219 bp, Zea mays
  Clone ID: LIB3157-007-Q1-K1-A10
atgtcgcgtggggaaaaatagacaatcccttgcattactgaacttggaggcaagctcagggttctttaatataaattctttatttgaggatacggtggaattacttgcctcaaccggaggagaaatacaacctttgtactgtgtactgaaagataactatactgccttactttaaattgggaaatcctatagaaattataccaagatttttatcatgat

SEQ ID NO: 11361 - DNA, 406 bp, Zea mays
  Clone ID: LIB3157-007-Q1-K1-A12
cggacgcgtgggctgccacagctgaacatggagaagataccgatttccagttctcggtggatatgctaggagaatacagtgatgtagtgcgatcaccaaggttcaatggctcaggttccaaagtgtccagtttcagaagccctttgtctaagctcgtcgagagcgtcgacgagggcagtgatggccatgaagatcaaaacgagtctgatcgagtcttgtatgctggatggaatacatctagcgttcctagcaaagctatgggccatagtggcaatgcctcaaaaagtgcaatgaacaggagtgccgatgaacaacttccatcaagtatgtgttttgtcaggctgtcggatatgagtgcagatgagtgggatgtattcctcgaaaaattccaggagctgctgaaaga

SEQ ID NO: 11362 - DNA, 65 bp, Zea mays
  Clone ID: LIB3157-007-Q1-K1-A5
cggacgcgtgggatattatttgccaagactgtttggacagaggagcatatgatctctaggctttg

SEQ ID NO: 11363 - DNA, 368 bp, Zea mays
  Clone ID: LIB3157-007-Q1-K1-A6
caacttgaccctatggacttccgacaccaacgaggacgccggagatgagatcaaggaagcagctgctgcccccaaagaatccgcccccgagggccagtaagacggatccgatctcccgacctgatgcgtgtctgctgatgtcggggagtttaccaggactgtgccgttcttgatttctgatagcttatcttctagtacacctcgtgttgttctcttcgtcacggcgccggtgcgtgtgcgctgaagctgcctgccattgccattgccgctgtttttaattaagcacacactctagatgttatgcccgcatgctatgtttcgattctcaaagttgataaatgatggctggatgctggttttcgtgctcc

SEQ ID NO: 11364 - DNA, 201 bp, Zea mays
  Clone ID: LIB3157-007-Q1-K1-A9
agattagttactttactaatgggggtgtttttctctttactgttcgccgactagtaatggatctgcttttaagaatttcgcgacacatcggctcttaaaagaatactttacaaaaccgaggataataacacaattgttcaattaaatctgggcttgcgatgcatgcgataaataaaaagatgggtttccttgttcttatat

SEQ ID NO: 11365 - DNA, 159 bp, Zea mays
  Clone ID: LIB3157-007-Q1-K1-B12
attcaccactggttcctctaccaaatttttttaggactctgtttgcggcaataacttgcgtggcagcccctccaataaaaagaaacatgtccaaacaaaatattctatctctcctcaaaaaaaaaaaacagatgccacagacgaaaacgctcaaagtgc

SEQ ID NO: 11366 - DNA, 246 bp, Zea mays
  Clone ID: LIB3157-007-Q1-K1-B2
actacgaggaggtcggtgctgagtttgacgagggtgaggacggcgacgagggtgacgagtactagacgctctactggcgcggcgtcgtcgggcttgtgtgccactgctatcctgtgatctgccctgagtggctcctatcgtgttatgtttctgtcggttcttatctatctgtcgttgtgtggtttacaacttacgttgtaagactttattcccccgctttgctactgggttattaagtttggcgtt

SEQ ID NO: 11367 - DNA, 236 bp, Zea mays
  Clone ID: LIB3157-007-Q1-K1-B3
atgatggattacttattcaaacgacgaacaacatcgtctcaacaccttggttggcgggaagaagaaatagaaagtgtttttttttttttgcctttcccttacttcatttcatttttcccactgtaatgatcttcgtctgctaaggctgaacctaagaaaaatattgttctgtgctgatcatggcatatagatgtacactttgagcaccccattgttttataatttcattgtttttc

SEQ ID NO: 11368 - DNA, 374 bp, Zea mays
  unsure (1)..(374): unsure at all n locations; Clone ID: LIB3157-007-Q1-K1-B5
caactatgtcacttgctgataataaaacataggagaacaagtatctccttgatatgctggagagctatgaatcagcgattggtgagccgaacaccaaagctccatgtcgcattgctcaattcccacctcctttccaagcagttccatgcaatcctattgtgcttgatatggcttacaactcagttgagttcccaaaccttgagaaccgtatgaaaaaagaaaagaagggtcttctgagcaggttctggggttgaaagatggcatatgcctaggattttggtacattgtcccatcatttgatatgctttgtgcatgaacggtgtaaaactagaatgtcctgataatacctctctgatgggtgaaagatcttcngt

SEQ ID NO: 11369 - DNA, 297 bp, Zea mays
  Clone ID: LIB3157-007-Q1-K1-B8
ggagctggatttacaccttatgttattactgttcaagctggggaggacgtgtcatgaaggatcatgtcgttttctcagcacggaccgcgtgcagtctgtgttctctcagcaaacggtgccatatcaaatgtgacgcttcgtcagactgctacatcaggcggaactgtaacatatgagggtcggttcgagatactgtcactgtcggggtcattcctcttggtggaagatggtggtcaacgcagtctaactggagggctcaatgtgtcgtttgctggtcccgacagtctagtgctgggc

SEQ ID NO: 11370 - DNA, 341 bp, Zea mays
  Clone ID: LIB3157-007-Q1-K1-B9
gttgaagcatcaaaaaaaaaaaaaaaaataataaaaaaaaaaaaaaaaaaaaaaaaaaaaggaaaaataaaaaaaaaaaaaaaaaaaaaaaaaaaaaaaaaaaaaaaaaaaaaaaaaaaaaaaaaaaaaaaaaaaaataaaaaaaaaaaaaataaaaaaaccggggccgccctttttataaatccaatttttttttacctttcctttcaaagtttttttttttttttatgttacccaaattttttttccctgcccaatttttttaaaactcgtggatttgaaaaaccctttgctttccaaaatttattttttttccaaacatttccttttttccaacatgg

SEQ ID NO: 11371 - DNA, 395 bp, Zea mays
  Clone ID: LIB3157-007-Q1-K1-C10
agacgctgttgctacctcgcccaaatctgttttccactgctttgacggcgagaacgtggagagtgctcctcctcctatgaagaaggactacaagctggctaatcttctctgctgggaggaggaagcggatgccatggaggagaaggcgagagtgcttgatgagtaagacgggcttctggggtcgatttgcttctgagttgtttattttatatcgacgcaatttcgtggttgtcgtttggttattctgtgaagcagccaagccaagctattgttatgaaaatttgtcgtctgtaagcatgtgaacttccgacgttgccacatgctggatcagtctgaataagtaagtatgcagctctaggtggtcagctgcgtctaccacaatgagcatgtacgta

SEQ ID NO: 11372 - DNA, 424 bp, Zea mays
  Clone ID: LIB3157-007-Q1-K1-C5
cggtcgcgtgggtaaaaaaaaaatttatttttttaaaaaaaaaaaaaaaaaaaaaaaaagtgatttttattaaatataaatataatttataataattataaaataaataaatttttttatatataggggcgcccgtttttaaggaaccgggtttccttcctcttgcttcctttttaatacctttttttttgtgtcccttatttttatttttttgtccttttttttccacctttttttctgtttattcccttgttttttccacttttttcttttttaaccccttccttttttttctgtttttttttttactaaattggcctctttctttttttttttttatcagtttgtccccctttttgttcttttttcccccctttttgccgttgtttttgctcttgggtttttttttttactcccacttttt

SEQ ID NO: 11373 - DNA, 228 bp, Zea mays
  Clone ID: LIB3157-007-Q1-K1-C6
ggaggcgcgactttgctgcccaggctgcttccaaggcataagttctctgaatgtgctgcttggagctttttgctatgtctagtttaatttttatctgcaaggatatagagctaccttcccaagactttatcatcatgttttgttgcttttggttcttgaacagcgtttgcagcttagctgtaatgctttaattcgactttctatatattgttgaaccgtgttgtcgac

SEQ ID NO: 11374 - DNA, 412 bp, Zea mays
  Clone ID: LIB3157-007-Q1-K1-C7
gcgccgcagcgggacgtgctggcgcacgcttccgtgggcggcttcgtgacgcactgcgggtggaactcggtcctggaggcggtgatggcgggcgtgccgatggtggcgtggccgctctacgcggagcagcggctcaaccgggtgtttctggagaaggagatgcagctggccgtggccgtggaagggtacgacagcgacgagggcctcgtggcggccgaggaggttgctgccaaggtgcgatggctcatggagtccgatggcgggaggatgctccggaagcgcacgctggcggccatgcggcaagccaaggacgcgctgcgtgagggcggtgagtcggaagccacactgaccggattggtggacgagtggaaactcatttgacgcggtatgtggggattgggaacgtgtgacg

SEQ ID NO: 11375 - DNA, 245 bp, Zea mays
  Clone ID: LIB3157-007-Q1-K1-C9
gacccagcgtgcgggtttaataggttggttaaataattatttttatattggatgatggggggggtgggggggaaaaaacacagggcgtggtccatgtctctggtcttggggagtgggtgtgagcctctgagatccttggaaggtcattgattgcatgggtcaagagggagatttgaaacctgtgtatccacttccaacttgttttccacaaatctttttagtttgggagcctgtgaataatctat

SEQ ID NO: 11376 - DNA, 117 bp, Zea mays
  Clone ID: LIB3157-007-Q1-K1-D1
ggacgcgtgggcggcagtttttgagctctgctatatattctcacagttaaattgtttgatgtgatttgggccttgagatgtttctgaaccaaacagctaaaagagttcagttgagtt

SEQ ID NO: 11377 - DNA, 118 bp, Zea mays
  Clone ID: LIB3157-007-Q1-K1-D10
cggacgcgtgggattttttgtgatttggagtactaaattaacttgattgggtattagtgggaacctgaatactaaattatctatctggatacataaatggagatgttttctcttgatt

SEQ ID NO: 11378 - DNA, 420 bp, Zea mays
  Clone ID: LIB3157-007-Q1-K1-D2
ctctagcactgggtatcgacaccaaatggccatacccatgatggtccagcatcaggaaggggggaggccaagaaagagcaggcagcactagtaactggctcgcagagtaaatcatctgtaccaagtcttgacgctagcagccatgttaccggggcagcgagcgcccttgtcgcactatcaaccctgcgggagaagggcgggcgttagaggagcagcaacagcagcagtgtagttcccgttggatcagatcctttttctctactgtacatgtttctatgtacaggaatcatccccgtcgactctgatccccagtgcgtacggttgctgttggtggccactcccctatatgttgcttggcaacaaatgttttggttaataattagtttttataaaaagaatattcacccttgttatgttctt

SEQ ID NO: 11379 - DNA, 274 bp, Zea mays
  Clone ID: LIB3157-007-Q1-K1-D4
atggttttcaccagcttctacttattcgaatttttttggattctgatatggaacacaagaagaagcggttgccccatcttaccagccctttttgtttgccctagtttccccttgtgaaaagggtgttttgttttataaactctacttgcaataagcagagcctttttttaattatgtcagggtgcatttgatacgatcgaataatcatcaatccataattgtagcaatttttttaaaaaaagaatagtcaattgagtttttgttccagtggtgg

SEQ ID NO: 11380 - DNA, 312 bp, Zea mays
  unsure (1)..(312): unsure at all n locations; Clone ID: LIB3157-007-Q1-K1-D6
ngggcttcgagaagcatatcctgagattctgtaccggccccaagccgataaagggccggagggtcaccgttcactgcaccggctacgggaaggatcgtgatctgtccaagaaattttggagcaccaaggaccctgcgcagcatccattcagtttcagcattggtcaaggttcattgatcaaaggatgggacgagggagttatgaccatgcaagtgggtgaagttggtcgtatccagtgcacgcctgattatgcttattgagcctgcgggtttccaacctgaggaatttaaccaaacttagagcttgtgttct

SEQ ID NO: 11381 - DNA, 302 bp, Zea mays
  Clone ID: LIB3157-007-Q1-K1-D7
ggcatatattagacgaattggtggctttgatctcgtgatcggtggaagcccatgcaacaatctcgctgggagcaaccgccaccacagagatggcttggagggcgaacattcttccttgttctaccattattttaggatcttggactccgtcaagtccatcatggagcgcctgtagtttttagaatcttttgatgttctggttcgtagaattgtagctgtctttccctgtgatcaaacttgtgaatgatttgaaggtcgactggtgtaatattcatgtcactctaatttaggctactttcgtt

SEQ ID NO: 11382 - DNA, 291 bp, Zea mays
  unsure (1)..(291): unsure at all n locations; Clone ID: LIB3157-007-Q1-K1-D8
ttcatacattaaatatatcggccgctcngagcacgcgagcggggaaagcttatgcaacaatctcgcccctagcaaccgccaccacatatatagctgaaaaggcgaacatgctcccttgacctaccattattttagcatctccgactccatcaaatccatcatggagcgcctgtcgatcttataattattagatcatcaggttcgtaaaaattgttaaaaaatactctgtaatcaaacttttgaatcaattgaaggtctactgctcttatgttcagtcttacttataatatc

SEQ ID NO: 11383 - DNA, 404 bp, Zea mays
  Clone ID: LIB3157-007-Q1-K1-D9
atttaccagaagttaacgtcaggaatgtatttatgtgaaattgtaaggagggtgctcctgaaaatatcattgcagtccgccatttttggtgatattgaccacactaagcttcaaacccatttccttctgcggactccacatatttcagcaatgcaccatgacgaaacatctgatctgaagattgcggccgaaaattttgaagaaaacctagagattacaggcacatccttggaggctcgtaagctggtcgttgaaatctgtgacattgtggcgacaagagcagcccggctggctgctgctgggcttgcagggatcctcatgaagatcgggagagatcacagcgtcgaggaccaacggtcagtcatcgccatcgacggaggactgttcgagcactacaccaaatt

SEQ ID NO: 11384 - DNA, 264 bp, Zea mays
  unsure (1)..(264): unsure at all n locations; Clone ID: LIB3157-007-Q1-K1-E1
gagccngacatnagaattcagtcaagtttaatttagacagttagtgtaacttggtctgtgtggttttagctttattaaaccattaagagaataatgatgatggcaatttagcagtacaatggtagtattatgtgggcagcttggttccaataaaatcataagcctatacacatcttgtgcccgcaatgttgtttgctattttgatcacgaaatcaatattgagcttgaattcagttttgaggcttagtaaaaaaattgataatt

SEQ ID NO: 11385 - DNA, 365 bp, Zea mays
  Clone ID: LIB3157-007-Q1-K1-E10
caaactcggattctgagcggtggaagaatttctggctaaagacgcctagagggtatagggctctgcaagctaggaagctcttgtttaattttttctgcttgtgttattagtcattgtattaccatgttttgtctgatggttaaagaaccgtctttatgctatggtgaatttaaaataaaaaaaaaaaaaaagatgactataaaagaacaaattttaataaataaattataccaactcatatgttttatttaaaaaaaaatataattttttttctgggaatcaattaaaaaaaaagtgctgctgtgtataaaaatacaatacgtcttctttttttttgcttactaaaatatttaacattttttgtt

SEQ ID NO: 11386 - DNA, 283 bp, Zea mays
  Clone ID: LIB3157-007-Q1-K1-E11
ggcttctggtgtcgatttgcttctgagttgtttattttatatcgtcgcaatttcgtggttgtcgtttggttattctgtgaagcagccaagccaggctattgttatgaaaatttgtcgtctgtaagcatgtgaacttccgatgttgccacatgctggatcagtctgaataagtaagtatgcagctctaggtggtcagctgcgtctaccacaatgagcatgtacgtatggagaaatatctgtgaacccattttgtttatgaataagattcgttttttttcgagtt

SEQ ID NO: 11387 - DNA, 393 bp, Zea mays
  Clone ID: LIB3157-007-Q1-K1-E12
aaacgatctgtgatggcttcccggtgtatagtttccatggttcatttgtgtgcttgtcccatgtttgcctggggacgatgacgttttacaattttggcccccatcgcgcgcactcgtctgtttctctcatggaagccgtgtgaacctgtgcgtgtgtgtgacgaatgaacggaactttatatggaccagtgcttaagagtctttgcaacataattatgaaggtttgtttgcaaaaaaaaaaaaaatataaaaaaaaaaaaaataaaataaaataagaccattataaaaaaaagttatattgaaaaaaaaaaaaaggaagacatctttttttactcaaacaaaatacccttttagccggctagaccattaactgggggggcccttttagggttt

SEQ ID NO: 11388 - DNA, 397 bp, Zea mays
  unsure (1)..(397): unsure at all n locations; Clone ID: LIB3157-007-Q1-K1-E2
cgggcccgacccacgccgtccgtgccctccgttcctntgtgatgaggnaaatattctttttgnttcgttctccgtgggcgttgtgtcctacagaattcacatttgcttnntctgtctctcttctctttatatacacactgtatanaaacanagaanncagctgtttattcatctcttncttatattaaccttttgaacacctctgnaaaaaaaaaaaaaaaaaaaaaaaaaaaaaaaaaaaaaaaaaaaaaaaaaaaaaaaaaaaaaaaaaaaaaaaaaaaaaaaataaaaaaaaaaaaaaaaaaaaaaaaaaaaaaaaaaggggggggcccttttaaaggatccaagtttacttccccttgcttgcaaggatataaattttttttttggggcccca

SEQ ID NO: 11389 - DNA, 226 bp, Zea mays
  Clone ID: LIB3157-007-Q1-K1-E4
cggacgcgtgggttcatttttcatcaaggatcagctgtttaaagacctgtatttgttggctggttaataattggacatgtagagccgacgtttacattgatgtaacgtgttcttgtctgctattgcttcccagcctctgttgtttcttcctgtaagtcattccgaacatgaatccttgttattgaagaaagtatgaaatatacgcgcggtggcggcgcctcctgtc

SEQ ID NO: 11390 - DNA, 379 bp, Zea mays
  unsure (1)..(379): unsure at all n locations; Clone ID: LIB3157-007-Q1-K1-F1
atactcctgtctgcgacggaggccgcagagatgatcatcagggtcgatgagatcataagctgtgccccgcgcagaagagaggataggatgtgattagaaaccctgtttctcggtgtagtggggatgcttgttaccctagttttgatggtggttctggggcgtccaagttggtcacatttcaggtgttttttttggctcctaagaacctagtaattgttatttcgttgaaacaaccaaccataggcttttttttctagattctcatgatgtaccactgggtgagtgactgtgcgttgcaacgggaatatataacaatataataatttatatacaaaatgtgtcttatattgtttnaaaaaaaaaaaaataaataataaaa

SEQ ID NO: 11391 - DNA, 335 bp, Zea mays
  Clone ID: LIB3157-007-Q1-K1-F10
ttttaataataataaaaataaaaaaaaatatctatactaataaaaaaaaaaaaaacaaagggagaatttttaaaaaaaaaggtattctccccccaaacgattaacttttttttgtcccttccctttattttcctctctctccttcacgtcccctttatttttttcccctccctttcggtccccctttttttttttgtggttcccccttcgtacctctctttctttgctccctctctccttccccttttttcatttttttttttttcctgtttttttcctccaggtgccttttttcttacgtgcttcccacctatttttcctttttcctttctttt

SEQ ID NO: 11392 - DNA, 385 bp, Zea mays
  Clone ID: LIB3157-007-Q1-K1-F11
cttgtttttttctctctcccttacgagagagtttggctgttaattgattcgataatagaaagatggaggatgtacaaaaaaaaaaaaaaaaaaaaaaaaaaaaaaaaaaaaaaaaaaaaaaaaaaaaaaaaaaaaaaaaaaaaaaaaaaaaaaaaaaaaaaaaaaaaaaaaaaaaaaaaaaaaaaaaaaaaaagggggggcccttttaaaggataaaattttacgtccgcgggattacaaaataaaaccttttttttagggtaacaaaaataaaataaaagggccgccgttttaaaagatccaaactggaaaaaccctgcctttaacaaaataaatcttttttaaaaaaaccccaatttaacaaactggccaaatatcaaaaagg

SEQ ID NO: 11393 - DNA, 338 bp, Zea mays
  unsure (1)..(338): unsure at all n locations; Clone ID: LIB3157-007-Q1-K1-F12
cacgcgnncgggcaaagaccgccgcattgccggcagcggtggcggtgatcgctctccttcttattacgactctacccgtcgggcgcggcgaggagaggcccaccgcggggcacccgcacgggctccccttcgagagcccgctcgcgctgtctccggccgcttacgacttctttcaccccagcgcgcgcgcccgtctagctcgcggcgtcgcgccggcgccggcgccggcgctcgcgcctcgcgggcagcagcagctgagagagtccgcggtccgaggaggaacatcttcggcaagcgtggccaatgccgaccgggaagaagggggcgtggtttttttt

SEQ ID NO: 11394 - DNA, 319 bp, Zea mays
  unsure (1)..(319): unsure at all n locations; Clone ID: LIB3157-007-Q1-K1-F2
cttgaattgtgggaccctttgttcgttttcctagactctgatgctgtatgcaactgaaacgagtaaatctatgatcttaaggctgcaaaaaaaaaaaaaaaaaaaaaaaaaaaaaaaaaaaaaaaaaaaaaaaaaaaaaaaaaaaaaaaaaaaaaaaaaaaaaaaaaaaaaaaaaaaaaaaaaaaaaaaaaaaaaaagggggggganaatttaaagaaaccaagnttagntacgagtgcttgcaaaaaaaaaaaatattggttggggcccctaaaataaaataaattgcccggcgttttaaaaccagggaaatggaaaa

SEQ ID NO: 11395 - DNA, 235 bp, Zea mays
  Clone ID: LIB3157-007-Q1-K1-F4
gttcctttgcgtttggtcatgcgggtatgggtgctataggaattttaggtgcgcgagatgtttaggtgaggttgggaggttgataatgatgatgattgcaatcatttgatcttggtatgtatccaaggctccaagccgttggtgttctgattggtttgtaattgtatcggattccattatctttgtgctcagtccctgatttgctcctgctgaaggattctgtttcgtctggtgc

SEQ ID NO: 11396 - DNA, 177 bp, Zea mays
  unsure (1)..(177): unsure at all n locations; Clone ID: LIB3157-007-Q1-K1-F6
gaaaaaaaggcacgagagggggggggaggtaagtaggttgtaaattaaaaaaaaagaaaaaaatgatttggtaagtatgaagaaagaagaagtggagtatgataggatagaaaagatnggaagaattaaaaatgtgtaagaaatgattgattatgtgaaagaaaaagtttgattgag

SEQ ID NO: 11397 - DNA, 408 bp, Zea mays
  Clone ID: LIB3157-007-Q1-K1-F8
ctgtcgcgtggggaactataattattttttatccagatttttagctcagaaccaggggggtgtatcttcttatgtgcagattccgcaacaacccataaactcgcatgttataaatggtcactgggacgggtggagtgatttgagacatgggaataacgctcctatgtcagacatgtccagtatattatatccaagagaagtgaacaagtagcatatgctgggttcaaatgatgtccataacaaagcctttggaatgtgatcgtctcctgtgataatgtgcgactttgagctgacatgttcaacttggtgcgttttgtgcaagtaactggttgctcaacacatagtatacctgatgtggttaatggtgttgtgctcatgatcttgcacaccactttttattgcttgtag

SEQ ID NO: 11398 - DNA, 267 bp, Zea mays
  Clone ID: LIB3157-007-Q1-K1-G12
ggaagggccggcccgacccacgcgttcgttgtaaacaaaaacggacgaaggaacgaatttaaaaatatgtaaaaagggaacatgttaagggtcatttcaactgcttaaactgtcgtgcttaaggttgggcttgaccaccttgccgatgaagagtgcgttaagcttctgggtccatgccggaaggcgattccttcatcgaagggcggggggaaaattattatcggtgatattattattgaccactctgggcttattgttgaaacttac

SEQ ID NO: 11399 - DNA, 375 bp, Zea mays
  Clone ID: LIB3157-007-Q1-K1-G2
aaaaaaaaaaaaaaaaaaaaaaaaaaaaattttttttaaaaaaaaaaaaaaaaaaaaaaagaagggtattataaaaaaaaaaaataattctttaattttatataaataataaaatctaaatatcatttattattatttttttattttttttttttttcattttttataatcattgtggtgcttttttttttgttttcttatttttttacctttttctctttcccttctttttttttttttttttccctttttttttttttttccccccctttttttttactctttcttttctttgtcacctccttttttttcccctttttttatttttgtttaattttttctcttcttttttattcttgtatttttttttaatat

SEQ ID NO: 11400 - DNA, 428 bp, Zea mays
  Clone ID: LIB3157-007-Q1-K1-G4
gaccacgcgtccggcgcgtggaaggagagtctggggatcgggtacgaggtgctgctcctgtcggacggcaacggcgagctggcgcgcgccatgggcgtcgagctcgacctctccgacaagcccgtggggctcggcgtccggtcccgccgctacgcgctgctcgcggaggacggcgtggtcaaggtgctcaacctcgaggagggcggcgcgttcaccaacagcagcgccgaggacatgctcaacgcgctctgaactcgcgacgccatggttggttcgtctctttcggcaagagttggtttcttttccctgaaaataatcgtgacggcaacggtggcttgtgttactgccgccactgttgtgaccggcgctgtcactagtgcactgctgaaatgcaagtttcttgcgaacatggcttttgtggtctagct

SEQ ID NO: 11401 - DNA, 412 bp, Zea mays
  Clone ID: LIB3157-007-Q1-K1-G8
agaagtttggttgctcgttggagtttgtgaccaacaagtctcaggagggatcccagttgtgtagaggatttggtggcattggtggcatgttgcgctaccagctggatatccgttcttttgatgagctttctgatgatgacgatgtgtatgaagactctgactagcaatcagccaatctcatgcctgtgctggcccatggaaggacgcaacagctcgacctcaccatacctacgcaggagcacacgaaaagcaactatccaaggattaatgggcatgggccagcgtcgtcctcttcaagaggagcttaagactaagatgattttgagtcacaatcatgggagtaacgtgacaagaagataccctactatatcacaattattccagtaatgcgtcgagaagataccgttgttta

SEQ ID NO: 11402 - DNA, 182 bp, Zea mays
  Clone ID: LIB3157-007-Q1-K1-G9
aaaaaaaaaaaaaaaaaaaaaacaaacatatataaaaaaaaaaaaaataaaaaaaacaaggggggtgcttccctcctttcgtgtccttccctcctttgcctttggatacaccctccttgttgtatactactgcgtccctttcggtcctttattttgctccaaaaatacaaaaaaaaggctgg

SEQ ID NO: 11403 - DNA, 407 bp, Zea mays
  unsure (1)..(407): unsure at all n locations; Clone ID: LIB3157-007-Q1-K1-H1
cagcagccgaagttgtttgttggcatgatccttatccttatttttgctgaagcgcttgccctgtatggtctcatcgtcggcattatcctctcgtctcgtgccggccagtcccgcgcagattagaggcacgtttcagatgtcaacaccgtgccgccgacagttgcctggtcgtagctgggtcatgttctatattcatgagacaagaagctggagcactttgactctttgagaggcttacttttatgctgtctagttttccatcttctgttgagtcgagaaaacaagaaaggctgtgtagccaaaggatgacttttacccttgtgccattctttttcctgtcgtggtggggggtggggtgcggctgatgcttatttatgcacagttnttgcttgggtcggggctggggc

SEQ ID NO: 11404 - DNA, 143 bp, Zea mays
  Clone ID: LIB3157-007-Q1-K1-H10
gcccgacccacgcgttcgtttgccgggaacccgtcgaccgcatgatgtctaaattttgcccacgaggacggggtgggggcatttccatctgtttgaacggcctccactcaaccctgtctctggtctcacctgcctgattatga

SEQ ID NO: 11405 - DNA, 357 bp, Zea mays
  Clone ID: LIB3157-007-Q1-K1-H2
gatgaaggagatcaccaaggcttcagaaggctttttctacctggtgagcgtgaacggagtgacaggtcctcgcgcaaacgtgaacccacgagtggagtcactcatccaggaggttaagaaggtgactaacaagcccgttgctgttggcttcggcatatccaaaccccagcacctgaagcaaattgcgcaatggggcgctgacggggtgatcatcggcagcgccatggtgaggcagctgggcgaagcggcttctcccaagcaaggcctgaagaggctggaggagtattccaagggcattaaaaacccgctggcattagttcatgacaaagttaaacgttcagagacacttgataatat

SEQ ID NO: 11406 - DNA, 417 bp, Zea mays
  Clone ID: LIB3157-007-Q1-K1-H3
atccttgtggacgttgcccacaaagccattaaaaccgacccgaggatcaactggctatgcaaccctgtgcacaagcaccgtgagctccgtggcctcacctcagcaggcaagaagtaccgtggcctgcgtggcaagggccacacccaccacaagaacaggccctcaaggagagccacctggaagcgcaaccagaccctctccctccgccgctaccgctgagcagctcgtcgggtgcttggatactgccactgtccgatcattcccaatcaagacaacaagcgtgcctgtctctggttgcattttcaaagttttgctatttgtgttcttggcacttttaatgttagaagtcaattatggagcatatgtcatgaactatttgcaattcggttgtattatcagacaatgaatggttagtga

SEQ ID NO: 11407 - DNA, 403 bp, Zea mays
  Clone ID: LIB3157-007-Q1-K1-H4
gcagggcgagctacttcaagggggtgcatgtggttgacagcagcaacaacctcggggcgcccaggggcggcctgggcaccttcacggagcagtccagctgctacgacgtgcagagcggcagcaacgccgactggggcacctacttctactacggcgggcccgggaggagctccagctgccagtaactggtgggctctctagctaggtagtgatgtgcgtgctgctggcttcacctttgtttgtggtagtttcttcttcttcttccgattagtcattagtgccgccgtgccgggatggcttctgaagagaagcatggcatgtggtggtggtggtgccctaccctacccttgttggtggggcctgccttcttttcctatatgggagattcacttgttcgtcctac

SEQ ID NO: 11408 - DNA, 249 bp, Zea mays
  Clone ID: LIB3157-007-Q1-K1-H5
gttaaaaaaaaaaacaataacacatttttatctataactaatcatcaaaaacacacacggaggctcatctcaaacacataaacactcccccacctaaactttactcagcaaaaaatactctttcatagaatctcatatgccggcgcccctctttagaacaccccctcttacttccccttctttccgcccatttattttttttttccttcccccttactctaaattcacttcctcttttttctacaactc

SEQ ID NO: 11409 - DNA, 99 bp, Zea mays
  Clone ID: LIB3157-007-Q1-K1-H7
agcggctgaacacacggtggtgtaatctgttactggtaaggtgcattgttgtatgaattgtttctcacccggaagaaccagaccatcggggattctagc

SEQ ID NO: 11410 - DNA, 159 bp, Zea mays
  Clone ID: LIB3157-007-Q1-K1-H8
ggaggttatacgcagccaacaccgttgttgttctggagctagccaagaggccggggagggaggggtagctcatcgagaccgaccttccgagccttggccagcggtacctgtcgttcgcgctgttcgatgagctgctgaaggaggcacaagccatggaac

SEQ ID NO: 11411 - DNA, 404 bp, Zea mays
  Clone ID: LIB3157-007-Q1-K1-H9
gtaccgtggtctcgctcggacgcgtactgtcaagattgttcctgcacgcacgccctggtgcccctgctcgctgttgggccgaccgtcagcagcttcgtcagcagcttcccggcctccgtcgtgctcagcagcgagtaatttatgtcggagcagttactgagacgccctcctttgcgtcgtgctcgccagatcaagcctcgcgtcgtcgatttgcgcagttcatgttcggcaatcggtttagtctccgtcgaacttctatttaccgtgacgccgagctccttcaacactgccccactccgttgtcgttattccgtcgcctcacttcgatgtcagttccttcatgacatctcctacttgtgttcgcgccgacaaaaggatcctaagagaatgtggaaaaacaagcc

SEQ ID NO: 11412 - DNA, 56 bp, Zea mays
  unsure (1)..(56): unsure at all n locations; Clone ID: LIB3157-008-Q1-K1-A1
aaaaaggcatcgncctgcactgcttaaacgactcggccgactacggctttcagttc

SEQ ID NO: 11413 - DNA, 415 bp, Zea mays
  Clone ID: LIB3157-008-Q1-K1-A2
gccatgctggcatctgcaaggcacctcaagcttcgtgttctctcactgtctggttgctctaaggttactcagaagagtgtgccgttcttgggcaaccttggccagtctctagagggcctcaatcttcagttctgcaacatgattggcaaccacaacatcgcatccctggagaaaaagctctggtggtgcgacatccttgcataggcagcagacaagatgagccattgctggaaggggctcatgtctactgggagccacttccagatgcagatatacgaccttagcagtagcacaaccagacggtcttcaggtttttggctcgcatgccggtcattatggtgggcttccacattgttcaaggaccagttgttttagggggcgctttctagcggagtgctcgtttttcacagatcac

SEQ ID NO: 11414 - DNA, 409 bp, Zea mays
  Clone ID: LIB3157-008-Q1-K1-A3
ctggaggttcatgacgcgcgacgacgggccggcgtggagcacgaggcaggcgccgccgggcccgctccagctcagggtggtggtgacgggcgggtacgacggcaagtgggtgtgggccgaccgcgaggtgctgccgcggcggcggcgcgccggcgaggtctacgacacgggcgtccagatcacggacgtcgcccaggagggctgcttcccgtgtgacacgcacgagtgggaggagtgacggctgcaacggaactcgctgagggctggagcctgcggagttgagttgctctgtctgcctcctccgtgtcactcgctgcctcttttttttatgagttttgccggagtggcacttttaacgacgagaggagagccgcgaaacccctctccctcccctgtacattaattagct

SEQ ID NO: 11415 - DNA, 203 bp, Zea mays
  Clone ID: LIB3157-008-Q1-K1-A5
cttttgcattgggtaataggggctggtatatctggtagagctatttatgtgcttagacttgagttgtgatgctgtcaaacatatctatacttctttttcttttgtgtctcctggggctcgaagaggatactaatctgtgctcgcctcatgtattattcttagccagtatgagtattatttgagacttttggattggttgtgtt

SEQ ID NO: 11416 - DNA, 116 bp, Zea mays
  Clone ID: LIB3157-008-Q1-K1-A6
cggacgcgtggggttttgcacttttgtttcccttcctgctaccatctgtgacagatccgctcgctaatatgggacctgagattagctttttgctgcttgtggtgaggttgcagttt

SEQ ID NO: 11417 - DNA, 168 bp, Zea mays
  Clone ID: LIB3157-008-Q1-K1-A7
gccatgctggcatctgcaaggcacctcaagctttttgttctctcactgtctggttgctctaaggttactcagaagagtgtgccgttcttgggcaaactttgcccggctttaaaagggcctaaattttcaattttgcaacaatgattggctaccacaacattccatccc

SEQ ID NO: 11418 - DNA, 393 bp, Zea mays
  Clone ID: LIB3157-008-Q1-K1-A8
cgcaagctcgcgttcccgtggacgaccgttacgtacaacaacgtgatcgaagcgtttgccgaggccggcgacgccgggaacatggagcacgcgttcaaccagatgcgttccgagggcatgaggccggacactaagaccttgtgctgcctgatcgacgggttcagcagggcaggccagttccataaggtggtgggcatggtgaagctcgccgagaggctcgacgtgcccgtgaacacgcctttacacaacgctgttcttggcgcgtgcgctagagcggacgatcttgtggagatggagagggtgttcaggcacatgaagcatacgcagtgcgagcctgatgcttccacgtactctatcttggtggaagcttatcgcaaggagggaatgaccgac

SEQ ID NO: 11419 - DNA, 384 bp, Zea mays
  Clone ID: LIB3157-008-Q1-K1-A9
atttgatgcagccacaatcaatggctggatgcacaaaaggctgcatgagctgctgggggatcaaatactacaggtgaacccgacggtggctctcatcctagaactggctttgttcgcaccctacatgttggcgcaacaaaagatcctctttctggactattaaataagcgtgcagcgaacttacatacccctatagggaccgttggtgtcacatatcaaccaactggctgagcgacatattgagttctacacaaagaatcatgagacaggcgttaaacttgaactgtgcatcttctatgtgacacattctgaatgtcgtttttataaactccactgaagcaaccctatcaactaccttaggttatgctttaaaccgatcaccat

SEQ ID NO: 11420 - DNA, 374 bp, Zea mays
  Clone ID: LIB3157-008-Q1-K1-B10
aaacaatctctgttaccatggagtattgttttgtcctaaaaaaaaaaaaaaaaaaggggaaattattataaaaaaaatagggcttccattttaaaagaaccatatattatttaccctaacttgccccgccgttcttgctgttcctgctttctttcgttcacttcctccgccgttgtttttctattgcgtcacctgaaaccccttggctgtcccccttttactccccttgcactccttaatccttttgcctcctccccttttttcgctttggggctcctactcctctttccttcccctctcttttttgccctttttggccctctcctttccccccttttttaccgttgcttttccctattggctatttttactct

SEQ ID NO: 11421 - DNA, 169 bp, Zea mays; identical to SEQ ID NO: 11269
  Clone ID: LIB3157-008-Q1-K1-B2

SEQ ID NO: 11422 - DNA, 91 bp, Zea mays
  Clone ID: LIB3157-008-Q1-K1-B4
cggacgcgtggggtttggtccatcggtaccatgtttgtaaattgggcagtgatgcacatcattgactggcatgttcttgtcacttttatct

SEQ ID NO: 11423 - DNA, 370 bp, Zea mays
  unsure (1)..(370): unsure at all n locations; Clone ID: LIB3157-008-Q1-K1-B6
ggcaatcttgttgccgttggagggagagtccttggcttcactgccaagggcaaggacatcgaggaagcaagggcaagagcgtacggtgcggtagacgctatcgagtgggcagaagggttctgcaggcgtgacattggttggagagcactgaggcagaagcaagtggctaaccagtaaccagtagctattccatgaccatgagatttccctagagaaccgcaactacggtgagcctgtactgtttacaagtaataaaaagggaaacggtgcaacacccattgtttttggttgtggaaagacaagtattgctgatcaaacagtagttaacacctgttgatttcngcnntnnaaaaaataaataaataatata

SEQ ID NO: 11424 - DNA, 306 bp, Zea mays
  Clone ID: LIB3157-008-Q1-K1-B9
gtaattcaagaatcctggactatctttttatgtgcttatttgagtttgcaaaaaaaaaaaaaaaaaaaaaaaaaaaaaaaaaaaaaaaaaaaaaaaaaaaaaaaaaaaaaaaaaaaaaaaaaaaaaaaaaaaaaaaaaaaaaacaaaaaaaaatatgaagataacaactaaatgctaactaaagctattggggatcaaaactcccgtaggggggcggccccttcaagaacctaatactttctgccgtcggtggcgctatatcgaatctttttcgtgccgtccaaatacaaaacgactgcccccttt

SEQ ID NO: 11425 - DNA, 392 bp, Zea mays
  Clone ID: LIB3157-008-Q1-K1-C1
cccgggccttccctcccccgcctacctcgacggcagcctgccgggtgacaatggcttcgacccgttgggcctggcggaggacccggagaacctgaggtggtacgtgcaggcggagctggtgaacgggcggtgggcgatgctgggcgtggccgggatgctgatcccggaggtgctgaccaaggccgggctgatcaacgcgccgcagtggtacgacgccggcaagtcggagtacttcgcgtcgtcgtcgacgctgttcgtgatcgagttcatcctgtttcactacgtggagatccggcggtggcaggacatcaagaaccccggcagcgtcaaccaggaccccatcttcaagagctacagcctgccgccgcacgagtgcggctaccccggcagcg

SEQ ID NO: 11426 - DNA, 350 bp, Zea mays
  Clone ID: LIB3157-008-Q1-K1-C11
tacgtacaaaatgtggttttttttcgggggtacagtatcattgactgggggactcttgaggacatggtccttgaaatcgtgaggcaaatcgagaagctgatccgtgcaaaggagatgatggaagctgcagggaagccattctaaacaagatacacatacacaatagttctgctccggcatacctattttctggccagttaccagaccttcgatgcttcgttgttcaagaaaccgattgcagttgcctacggctcaaagcacaagcgcgtgaaatctaaggaactgaatctggttgttccactcgaatatgcttatattgtattgcaagatcacttgccaattgatagtgt

SEQ ID NO: 11427 - DNA, 59 bp, Zea mays
  unsure (1)..(59): unsure at all n locations; Clone ID: LIB3157-008-Q1-K1-C12
aaaaaaagaaaaaaaaaaaaaatttaaaaaaaaaaaaaaaaanaaaaaaaagcgagggg

SEQ ID NO: 11428 - DNA, 212 bp, Zea mays
  Clone ID: LIB3157-008-Q1-K1-C2
cggacgcgtgggaacggcggcggcggcatcgctgcgcaaggagcagctcctcgcccccagagagtgaagcttccaacgctgcgtgccacggagcaacatctggtagcgcttcagtgtacatacgaatatacgtagctataccctagcattcattcatgcgggtccacctgcctgcaaacggcgaagtcataaggataacgcttaataatttt

SEQ ID NO: 11429 - DNA, 331 bp, Zea mays
  Clone ID: LIB3157-008-Q1-K1-C3
attgttgacctcaaggcagacaagaagattatcaaggctgccgtcaagaagatgtatgacatccaggcaaagaaggtcaacaccttgatcaggcctgatgggaagaagaaggcttacgtgaagctgactcccgactatgatgctcttgatgtggccaacaaaatcggaatcatctaagtgctgcattaggcatctgttgtttcctagttcaatctgttgtgtcctagttctatgtgaaaccagagttttgtagctatggatctcaatcgttccattaccatgtgttatgcacacttctgaatttgatatcatccaagtgaccggttgaact

SEQ ID NO: 11430 - DNA, 379 bp, Zea mays
  Clone ID: LIB3157-008-Q1-K1-C5
ggacaaatgacccaaggaattggtggtatccaggcaggccaagcaccactgacacctgagatggaaaagatgctagtccaacaagtcctgggcatgtccgctgagcagattaacatgttgcctccagaacaacggcaacaggttcttcaactacgagacatgctacggcaatgatagatcgtcagttgactgggtggagaagtttcagttcactgcagcagggatcccgagtgtgggtgcctgttcgttttagccttttgtatcacctgattgacatcccgactagtctgcagcctaccttggatatgcgattgtagaatggtagtcgttgtcgtcatttatagaaatgcttgggcaatatgttttccgaaggactcac

SEQ ID NO: 11431 - DNA, 145 bp, Zea mays
  Clone ID: LIB3157-008-Q1-K1-C6
aaccgaccactcgtccaagggacaatcagcaaaattaatcttgttatcctccacctttatattccgccgccgttttaaataataccaatatccaaaatccaaaatacattacaatcatttatggcattaatacataccaaaccta

SEQ ID NO: 11432 - DNA, 55 bp, Zea mays
  Clone ID: LIB3157-008-Q1-K1-C7
gaaaaccggcccgaccccgcgtccgcggacgcgtgggctcaaaaaaaaatttttt

SEQ ID NO: 11433 - DNA, 236 bp, Zea mays
  Clone ID: LIB3157-008-Q1-K1-D11
cgacgacaaggacatcggctactattattttttgcacctgtgcttgcacatcgctgggggcgagttgtgcagtcgtcgtacgtgggaaacatggcttttggtgtatgaggaaggaatggaagtggtctgttgtacttaaagaaactagatgaagaagtcttgcataactgaactttacccctctcttgtgtatgatgtattcaccttcgtcttgaaaattcttgagaacggtttca

SEQ ID NO: 11434 - DNA, 184 bp, Zea mays
  Clone ID: LIB3157-008-Q1-K1-D12
cctggaggaggttccaattttgtgttcttttgtttaggggggaaagaacttttcctgagttcagatcacaagtagcttatctatgctgtaactcgataatttgtggcgtcttaatttctactatctgtatggaggtgattcaagcttttgttgtagtccgagcagatcaatcctgtgattaatc

SEQ ID NO: 11435 - DNA, 308 bp, Zea mays
  Clone ID: LIB3157-008-Q1-K1-D8
aaaaaaaaattgttctattaaaataactattatattttacctgttataaaaaaaaaaaaaaatggtgtttgatataaataattaaaatttatatatttattcttttgataaaataatttttttattattttaattaaatataattaaattatttttaatttaaatattatttaatgaaaaaaatttttttttttttaacttaatttttttttattatattctatttttataatatttgtttaattatttaatatttttattttttaatttttttttttaatatttttattaactcttaattatatatt

SEQ ID NO: 11436 - DNA, 348 bp, Zea mays
  Clone ID: LIB3157-008-Q1-K1-E10
acttgtgatagttaaaacattgggttttttaaaaaaaaaaaaaaaaaaaaaaaaaaaagggaatatttaaaaaaaaaaataataaaaaaaaaaaacaaacataaaaatacaacacaaattatatcactttcttccttctttatatttctttttttttccctccttcattcactcttttttcctttttattctcatcctctttttctgcttaactcccttgcatttccctacttattctccttgtaaaaccttctcctttcctattctttcctccttcccataataccccttcctatcccttttcttttattttttcaacccctttcttcttttccttccccctctttt

SEQ ID NO: 11437 - DNA, 53 bp, Zea mays
  Clone ID: LIB3157-008-Q1-K1-E12
caacaacctggctgctgttaccttttatatacttattcctgaagttgtttggt

SEQ ID NO: 11438 - DNA, 350 bp, Zea mays
  Clone ID: LIB3157-008-Q1-K1-E4
gtgcggaaagcgccgtcccgtaaggccaagaagtaaagcggccaagaaggggggcgcgatgctgtaaatttgatatcggagaggctcgggtacactggtcattcagtatccgagaccgatagctgaggctagtggcgatggaggactgtgttattactactataaactggtggttgtgtttctgtaactggtgaatgatcaagttggaagcttttagtctatcttagatatatcagtggatagtgttttttgtattttcgttttcttttccaatgtgtgttgggtcttgtggattatcctttttttctaatctaatacaatgaagaggcatgtcttttgaagcttccatt

SEQ ID NO: 11439 - DNA, 322 bp, Zea mays
  Clone ID: LIB3157-008-Q1-K1-E8
gagatactttgggtataacaagatctttcgtatttactaaactaatgcacagccccgacaatttttcacatttttcaaaaccttctcacgacactggtttgttttgggtcacccacacatttcagttgtcgctgtccctactttgtttcctcagtatttacagctattgttctgttcaccattgattcaagtgttttcctttttttagcgtgttttattttttcttctttttatctcttaacccatatatatgcacttgatcttctctgaatatcggttttccttcaccatgacttaatatgtaaaaatcttttcttttttc

SEQ ID NO: 11440 - DNA, 408 bp, Zea mays
  Clone ID: LIB3157-008-Q1-K1-E9
tggtttcacattctccacgtacacaaaggtcagctaatgctggtggcaaggatggagcgaaaggtgacaaggctatgctgtcatcaagagatgcaagcgagagaccactgaaagctgagtggagacgttgaggcggcgaatcaaatccaaatccttcatttgattagcgcgaccgtttgggtggatggatcgcccttgcagtttgctcggatttgttttgtttgtgatgtaaaaaaatgatgtccttatcgtcggcgagatgaatgaaccggctttgttgtgatgaatccgctgggagtcaacttatttattatagggttttccgtcatgccttttgtgatgtatagctgaagtattttcccggtttgttttggtttccagaccccccagacttccttccttttcctt

SEQ ID NO: 11441 - DNA, 373 bp, Zea mays
  Clone ID: LIB3157-008-Q1-K1-F10
atacagtactatagggctcgcagcttcttatgctgccggcatgaagtgtatcgtagcagaaagcggctacactgcagaagaggacttcgagacagcagatgcagtgttcgattgcattggtgacccgtcagaagtgcgcttcgatttggatttctgcgccaagttgctcaagaaacaatatgtgagctgaaagggggctagtgcaagtgatataccaagtacgatgttcctgaatatggagaaagagtccatggcatgccaatgttggttctttcaagccatgacctgatactaggacttggaagttcacgttctacctaatatgtacttatagaatgacatttactacttgcccactaaattggcatttgca

SEQ ID NO: 11442 - DNA, 346 bp, Zea mays
  Clone ID: LIB3157-008-Q1-K1-F11
ccgagcttcgaggaatcgacgatctttttttggtgaaccaccggtcctgagatcaagctcttcgagtcctacgagatcgaagaccctgagcatctgtttggtgaaggttgcctttggtgcaatctatgctcaggtaaagaagaaggcgtcaaggcgaatctctaggagttccacgacttcggcgagttcgaggattaggctagcgacctcccccagtcagctgcctgtggtgggtttgtttacgttggctacgtttcgattctgcgtactttgatttatattatgtaaatggctctagtctgtaacattattacttactctttattgaaattcgaagcattgtgct

SEQ ID NO: 11443 - DNA, 203 bp, Zea mays
  unsure (1)..(203): unsure at all n locations; Clone ID: LIB3157-008-Q1-K1-F12
gaaggaaaaaccgggccgacccacgcgnccgaaaaaaaaaaaaaaaaaaaaaaaaaaaaaaaaaaaaaaaaaaaaagggaagaaagcgggggggaaaacaagcgaacaaacgcgcgcaagaaacgaaagcagcgcgagaacaggcgaaacaaagacacaaaaaacaggcccaaaagaccacaacgaaaaagacgggaaaaacc

SEQ ID NO: 11444 - DNA, 338 bp, Zea mays
  Clone ID: LIB3157-008-Q1-K1-F2
aaaaaaaaaaaaattttttttaaaaaaaaaaaaaaatgaaaaaaggggggggggaaaaaagaaaaggaaggaaagaaaaaaaaagaaataggggaaggaagggggaagtaaagaaaaaaaaaagatagaataataaaaaaggaaaagtgggaaaaaaaggataataaaaagaaaaggggagagaaaaaaatggagagaaggaggaaaaaaggaggaaaaaaaaaaaaaagagtaaaaaaaaaataatggagattgaaaagggaaaaatgaaaaaaggagagaaaaaaaaaaggaaagggaaaaagaatgaggaaggaaaaaggaaaaaaggggatagg

SEQ ID NO: 11445 - DNA, 413 bp, Zea mays
  Clone ID: LIB3157-008-Q1-K1-F3
atcaccagctaagaacaggtcttcgtctcaataatggaaggcaaaacagggcagctcaggtgctgtttcgtcgccatcgtgctcgtcctgggtcttgtccttgagcagtcccagcaggctgaagctagaggcaaatggtgctgcgaaaccgccaccggaaaataccattttaatcgctgcgttgactcgggttgggtcgacaatattgggttctgtgcgagtaatgccggttgcatcattatggaggacagatgtggaggtcgttggccagtgcctgctcgtgatgcgctttctctggatgtcatttgattaattataagcaagtacgtgaagttaagaaacgagggccagacgactgtcgtccagcgattggttatttgtgaacttgtcgtttgtcttcttatttcaacttt

SEQ ID NO: 11446 - DNA, 440 bp, Zea mays
  unsure (1)..(440): unsure at all n locations; Clone ID: LIB3157-008-Q1-K1-F4
ccggcncgacccacccatccgtncgaaaaaaaaatactgttatatcctttttattttttaaaacaaaaaattaacaaatatggagcaatttttaaaaaaaaaaaactacaaaataaaaaaaaaaaaaaaacaataccaaataattgggcccccccttctaaaggatccaacctaccctccccctccttccaactttttaccttttttttaggctcccctaaatccaatcccctcccccccttttaacaacgtcggccctggaaaacccttgcctttccccaactaaatccctttgccaaacatccccttttcccaactggccctaaaaacaaaaagccccccccccatccccttccccaaaatttctccacccctacttcgcaaatggccccccccctttatcccccccttaaaccccccgcgttgtgtgggttcccccc

SEQ ID NO: 11447 - DNA, 417 bp, Zea mays
  Clone ID: LIB3157-008-Q1-K1-F5
ccttaaagaacttgtttctaagttcatttcgtaagttattggcaaagagattgagaagtctacctccagcatcttcccacttcaaaacgtcttcatccgcaaggtgaagatactcaaggcccccaagtttgatctcgggaagttgatggaggttcatggcgactacaaagaggacgttggtgtgaagcttgagaggcctgtcgagggtgatgaggctatgcaggaggttgctgctgccgagtagtttatttgctacttctttatctagacgaatctggacaggaggtcccttatgacgcgaacttcataaaattgtctggcgacatgttttcttctgtccctgccctaaactctaaacccaaaggttattcgtaacaagtgttttaagattatttttgtttatgtttgggttcgagt

SEQ ID NO: 11448 - DNA, 415 bp, Zea mays
  Clone ID: LIB3157-008-Q1-K1-F7
gagcggagctactagcaacgtagagtatttggcatgagtcctttcggggcggtgatcacgccagaaaccctcaagtacatgtccaagtaccagggacgagagatcacgcaggtggactgcgcacgggaggcgatgaggctgatccacgcggaagacaagaacctgcaagccgagaattcggcatgggaactcaagaagaagttcggcaacggcgtgagcaccatggtgctcgtctacaacgccaccggggccagcctgagcctggtggacgacggccaagactggatgggctccgtctacagctcgccgatcccggacaccttccacaacgggcagtggatcgccttcctccacgtcaagcccggctcgctggcgcggggcagccaggccgccagggtgttccgcggccgggacg

SEQ ID NO: 11449 - DNA, 334 bp, Zea mays
  Clone ID: LIB3157-008-Q1-K1-F9
gacccacgcgttcgaaacattcttcgtgccattgctggtttttttttgctttctggctatgaccagctgcggggcctttttttcggaaagaagtaccgctcctgtggcgcttaaatggagaaatatgatgacgaacaatatcagtgtgtgttcccggtcctttccaaacaggatctggtgaagtttttgcctttcatattgaataaattaataatttatgtacagggaggattctttcaacatattgttttgtatggagacttaaatctccaaacactcgtaactattctaccacgaggtgacatttgtccccataaatatttattgttataga

SEQ ID NO: 11450 - DNA, 333 bp, Zea mays
  Clone ID: LIB3157-008-Q1-K1-G10
cggacgcgtgggcggacgcgtgggctgactcgtgggcggacgcgtggggcggtgggttgcgacgctgagccacatgttcgtgatgtccaccgccgtctccgtctccaccaggcacgagccggcgcgccgggactgacccaccggtgcggctcctccctcgaagcaatggacccaccccacccatcacgacgtaaacgaaaacgttgatctgtgtcgatcccatgtgtatttagtactactactgcccatgaactgtatgagtagtatcagcactgcaagctgcaaccaaagattcagatactgtttaaaattctgtaaattcgcatcgttttc

SEQ ID NO: 11451 - DNA, 376 bp, Zea mays
  unsure (1)..(376): unsure at all n locations; Clone ID: LIB3157-008-Q1-K1-G11
cgcatcagaagcaatgcgcagctcctgtggcctcgaccgaacaggacaagaaataggtctagttggatttcttttcgcctttgggtttttgtttaaaaagaaagagaacttgattttccttaaactagaattctctgtcttccattatagtgcacccttttttatactcagattcaaaaccaaaatataaaagaattaagtnaaaaaaaaaaaaaaaaaaaaaaaaaaaaaaaaaaaaaaaataaaaaaaaaaaaaaaaaaaaaaaaaaaaaaataaaaattaatattaataatataaaaattatttaattgggggcggccgttttaagggatccaattttacttccccgtgcttgcaaagtaaaaattttttttt

SEQ ID NO: 11452 - DNA, 184 bp, Zea mays
  Clone ID: LIB3157-008-Q1-K1-G3
ggctgcgggagttcaagggaattgtagcggcttgtttagaagtagctcgttttttttttgggaacgcagatagtcagatgtctcagatgaggtgtaacctgtgttgcaataatctatgaacttacccctcttgttttctcctgcagtgaaacaggtcacacgacattgtcatggcttttattgc

SEQ ID NO: 11453 - DNA, 269 bp, Zea mays
  unsure (1)..(269): unsure at all n locations; Clone ID: LIB3157-008-Q1-K1-G4
acccacgcgnncgggccgacgggggcgcgcagggccagcaggggaggcggnncgagaacaaggncgagcacggccggggccggccgccgncgcnccggcaccagccgccggcgcccaagggccgcgnccacgcgccgccgccggcgggcacggccgacacgggcaccggcggggncgagcccggcgacggcgccggggacaacggcggcgccggcaggagcggcgcgngcagggcggcggcggcggccagcgcccggaaaacggggggg

SEQ ID NO: 11454 - DNA, 194 bp, Zea mays
  unsure (1)..(194): unsure at all n locations; Clone ID: LIB3157-008-Q1-K1-G5
gagcagcgcaaaaacacgataaaangnngagaaacggcncgaagaacnggcagggaaganccacgagggcccnagncacccggaggaagggnccncnncggngggcaagaggaacancccgaaacagaagcaggaaagncangcaaagaacggcagnggangccgccaanagangcgccganccacgcgacaag

SEQ ID NO: 11455 - DNA, 408 bp, Zea mays
  Clone ID: LIB3157-008-Q1-K1-G7
gccgaggcgcaagaggacgagcaggagttttatgacggcatggacctggacctgaagaagatgaccgatccacgcgccccgcacaaccggttttacatcacgaaatgaaaggttagagatagttgttagttgtgcaaaaggttcgattgccttggttgttgttgttgggccaccgcttccgcctatggtgcaagagttgggggcgcttgatcaggtcgtctgacattctccttgttgacccaaccccattccgattggggcgacctggtcaaacgcgggggcgtgctagctacgctcagtacaagtattcagcatggaatctccagtattttattctagagaacatatcttgtgtatattgaagtttagtgcacatgttacatatattaaatcagtatcactcatttt

SEQ ID NO: 11456 - DNA, 266 bp, Zea mays
  unsure (1)..(266): unsure at all n locations; Clone ID: LIB3157-008-Q1-K1-G8
gggggacaaaaaancaaaacgggggacacggcaacaggggaacggggagcaccagccnaccggaaanaagaaaacgaggcgcggacgcccggcccagagcgacacggagagaacnccagngcancaaaacgaaccgacnaccaaagnaggcgacnaggcatccgaaaccgcccatcaccctcggagccaccatcaacgagcaccaagaaagggaagggagctgcctcaggccctacgcagatcgtccacacgctcaacgctacagc

SEQ ID NO: 11457 - DNA, 283 bp, Zea mays
  unsure (1)..(283): unsure at all n locations; Clone ID: LIB3157-008-Q1-K1-H2
cggacgcgtgggatcgcttaccaagggtccaagtctgaatccacgccatgttatgttgcaattgaggattacaatatattgggtaattgtttgatggaataaacgataatgcttttgtagtttcttgcccaaaaaaaaaaaaaaaaaaaaaaaaaaaaaaaaaaaaaaaaaaaaaaaaaaatntaaaaaaaaaaaaaaaaaaaaaaaaattttaaaaaaaataaaaaaaaaaaaatttaattaaacataaattaaaaaaaaaaaaacttttataactttaatt

SEQ ID NO: 11458 - DNA, 412 bp, Zea mays
  Clone ID: LIB3157-008-Q1-K1-H3
gaagccgaccaccaaaggcacactgaaaagaacttacagagtacgatcaacggatgaaggaaggcgggtcctcaaggagatcgcttcagttctgtcccaagatgaccattttgtggatgcctcgtctcacaagggttgccaagttaggagggaaagtgctcatggcgaaagtgtttgctgctacaacgtgagagcgttgttcgatgagcttccaactcctcacctgcttctggagattacacctttccctgctggacaacttaccgacaacgactaccgaaaggcggagaggcttgagatggtgctgaggctcaacgcttctatttaaaaaactggggactggtttttcaatttcccctagtactttctttgcccaagttgtaaattgtcttcctgtgggcctgtaaattga

SEQ ID NO: 11459 - DNA, 351 bp, Zea mays
  Clone ID: LIB3157-008-Q1-K1-H5
cggacgcgtggggaacaaggcggtggactagactcttgggcgacttgttgtgtaccttagctctcgtggatggtgatccaagcaccatgtcgaacatggcaactgaggaggcacgggtggaggcagactcttttttgaagccactgatgtgctcatatttctctgtacccggattgagcatgttttgttttaaaagaaaaagatgctcccagtgaccgatttatctcgaactgagctgattctactgcatgtttcccttaactggtgcatgttacttcgaggtcaatgttctggcccctgtgaaaggcaggattcgtctaactattttgcatatatctattgcaaataaag

SEQ ID NO: 11460 - DNA, 393 bp, Zea mays
  Clone ID: LIB3157-008-Q1-K1-H8
gaagaaggacaccctataacgcgccttttttcccaacttggatctgaaggcgtacctggccaactcgtacctgcacccggtgttcaagggggacgaaggcgacgacaggtactcggtgatggacgacgatgggtggatggaggaggaggtgatcgtgccgacgaagcggcattcgaggaggacgacgcccgcgcagagcaagcatgaagggtcggactcgctctctgtgctcgagagttctctacagcggtagtcacagtaggagcttagcctgtacagaatggatgaaaatgatcacggccctgctccattgcttttgctttggttgttggttgttcatgtcacaggggacacacacacacagattgaatttaagatagcttttgggaggac

SEQ ID NO: 11461 - DNA, 243 bp, Zea mays
  Clone ID: LIB3157-009-Q1-K1-A10
gaaaacccgggccgacgcacgcgtccgcagagttcatctcccatacagattattctttttaagatggctgaaaagcctagaatataggtggttttatgcgatgagacgcatatacttgataacgagtgcatgttgataggaacacctccaaagattctatttacagtataacagcacacatgttactaaacactaatagagtcatgacagtagaatatatgaacactgatagtttatagaata

SEQ ID NO: 11462 - DNA, 194 bp, Zea mays
  Clone ID: LIB3157-009-Q1-K1-A11
cagtattaaggagctaactcagcttttttttttttgcctcaaattaaatactatgggcgagggtgttctatacttccggtcgctaatgtcgaagatggtttgccatgctatcaccatacgtctcaacgtgtcctacgtaggaaaagacaactcagtgtacaaagtcctattgaacatacacaggtccatatatg

SEQ ID NO: 11463 - DNA, 189 bp, Zea mays
  Clone ID: LIB3157-009-Q1-K1-A12
aaaaacgggccgacccacgcgtacgaaatatatgtgctctaaacaatattttttgtatttaccccaaacaaaatccaacggggcggagttttttatactatcgttctctcacccaataaaaatatttcctttaatattataatatcattaaaagttcatatatcactataaacaccacacattttaaaa

SEQ ID NO: 11464 - DNA, 120 bp, Zea mays
  Clone ID: LIB3157-009-Q1-K1-A5
aaaaaaaaaaaaaaaaaaaaaaaaaaaaaaaaaaaaaaaaaaaaaaaaaaaaaaaaaaaaaaaaaaaaaaaaaaaaaaaaaaaaaaaaaaaaaaaaaaaaaaaaaaaaaaaagggggggg

SEQ ID NO: 11465 - DNA, 299 bp, Zea mays
  Clone ID: LIB3157-009-Q1-K1-A8
catatctggccccgggccatcttatttgtgaatagcttggataagatgctacatctcattgtgccgcatgctttcgctcgcaaatctgggagaaggatagcctgggtttagtgatacctccaaattttgtattttcagtatgacagcacacatgttactaagtactattgagtcatgacagttgtatatatgaacactgatagtttatagaataagacctcttagttaaggtgtacaacacttgttattgattgttataagcatcagtcagcaaactagtctgacatgtttctgttccc

SEQ ID NO: 11466 - DNA, 288 bp, Zea mays
  Clone ID: LIB3157-009-Q1-K1-A9
gacaagtagagataataaacaggcgggccgaatttgcatgaactgataaaatataagtgtgatgatgcccgctttgtggggtgtttggagcatgcatgcgcgctcgtctgttggaatggaactgctgttttttttaaaaaaaaaaaaaaaaaaaaaataaaaaaaaaaaaaaaaaaaaaaaaaaaaaaaaatataaaaaaaaaataaaatgtttaaaccctctatataaacaaattaaaacaacacataccaaataacaaattataataaattttaaataaaaggggg

SEQ ID NO: 11467 - DNA, 357 bp, Zea mays
  Clone ID: LIB3157-009-Q1-K1-B11
agctaatcttctctgctgggaggaggaagctgatgccatggaggagaaggcgggagtgcgggatgagtaagacgggcttctggtgtcgatttgcttctgagttgtttattttatatcgtcgcaatttcgtggttgtcgtttggttattctgtgaagcagccaagccaggctattgttatgaaaatttgtcgtctgtaagcatgtgaacttccgatgttgccacatgctggatcagtctgaataagtaagtatgcagctctaggtggtcagctgcgtctaccacaatgagcatgtacgtatggagaaatatctgtgaacccattttgtttatgaataagatttgttttttttcgagtt

SEQ ID NO: 11468 - DNA, 257 bp, Zea mays
  Clone ID: LIB3157-009-Q1-K1-B12
cggggccgaccgacgcgtacgatctaattttctctgctgtgatgatttattttttgccatggaggataaagccgtagtgcggcattttttatacggtcttctggtgtctatatgctactgagttgtttattttttattgtcgcatattttgtggttgttgtttggttattctgttaatcatctcatttcaggcttttgttattaaatatttttctattgtaagtatgttaactttctatgaagtcacatgctggatt

SEQ ID NO: 11469 - DNA, 404 bp, Zea mays
  unsure (1)..(404): unsure at all n locations; Clone ID: LIB3157-009-Q1-K1-B2
gcaatgctcttatgttggatcgtgagaatgaccgtgccttgggactggaacctgaggttgcaatcgtgcatttcccctgggatgttggatgatcttgaggcatgcgagcctgtcgttgaagatgcaaggttacctacttgtacgacgtacgccaatgcgacctgtgtagctgtgagtagtctaatgttgcagtgacatgtaatggcgcaccctcgtcctactaacagatgcttactggagattgccatagctgatcttgtaatttgttatagggcagtatgaatatatntatggtagctngaatctatttgtggattcacttcngttttccatgtttccttgtctccagacctggactggactgctattgatttttgttcagaattcctagctacctgttgcct

SEQ ID NO: 11470 - DNA, 211 bp, Zea mays
  Clone ID: LIB3157-009-Q1-K1-B4
gcagatcatgtaactaccgagaagacatggtttgttgttgatgcacaagacaagatcctaggcaggctagcatccaccattgcagtacatatcaggggaaagaatgaacccacttacactcccagtgtagacatgggagcttttgttattgtggtcaatgcagataaggttgctgtttcttgtaaaaagcggtcacaaaagctttatagga

SEQ ID NO: 11471 - DNA, 197 bp, Zea mays
  Clone ID: LIB3157-009-Q1-K1-B7
agagggttccagactcccttgtgaagacccgcgtcgaggatgatggcttcactatcaactcgagaagagggttccagactcccttgtgaagacccacaactagagaaataggatggagagggaaatttactaagagaggacgtgtaataaataaggccataaattattagaatgaatggaaaatgtcctcttacacc

SEQ ID NO: 11472 - DNA, 230 bp, Zea mays
  Clone ID: LIB3157-009-Q1-K1-B8
ctgagggatgtgtggtaaagagcgattggatgaacatgcgtgcggattacacacgtgtacgactactaccggaagagcattgacaatggactcgatctgatattgtaattggttggatagggatatttattaagagaggacgtgttataaataagggcatatattattagaatgaatggaaaatgtgctttttctccaaatatatattaaaatatatataatataaataa

SEQ ID NO: 11473 - DNA, 352 bp, Zea mays
  Clone ID: LIB3157-009-Q1-K1-C1
cggacgcgtggcccagaacatgaccaagcacacctacctgaaagggcgctacgatgtgagcacctgcgttgccatccctcttgcccttgctgcctccagcatgttcatgattgggcgtggagtttacaacatgtctcatggaattgggaaaaaggagtgatctaccacgggttaactagtttttctacttggcatggaagtaccatccagactatgaagtcttctttgcttgctaaataatactgtcaaagaacaagtcgactacatttttgcatcatatttctgtttgtatttgtggatatgaaatgccatcaacttgaagatcagcattgttactattttggttaattac

SEQ ID NO: 11474 - DNA, 415 bp, Zea mays
  Clone ID: LIB3157-009-Q1-K1-C10
cccacttacaaggtgctggacatcctgcagtaggtgttctaccgctccaacgcggcgcgcgaggccttcgtggagatgtgcgccgacgactacgtgcagaagatgaccttcgacagctacctctacaagcgcgtcgtgccgggcaacccgctcgacgacatcaagctcgccgtcaacaccatcggcagcctcgtcagggccaccgcactgcgccgggagatggagaaggtcaccttgtgagccgccgcccgcgacgtcattgccgtcgaaatggtgtcgcagctgatcggccggtgtattagtagagatttgcggctgatcgggttaatttaggccaacatgcgtgggcagtgggcgcggagaggaagagaaacaagttgtgcaagtgcagcaagtagatcaaaagtgctggctg

SEQ ID NO: 11475 - DNA, 313 bp, Zea mays
  Clone ID: LIB3157-009-Q1-K1-C11
cgccaagcgtgccttcgtgcactggtacgtttgtgagggtatggaggaaggtgagttctcggaggcttgtgaggacctggcgccgctcgagaaggactacaaggaggtttttgctgatttctgatacaagctcatgatgccgaccaatccgctcgactacataaatcttttcttcaacaccattatcagcctttgtagggtcactgaactgtgctcttagatggagatggtcatttttttagctttcttccgtgactttattgccgtctttatggtgtttcatttttattgtctgtgtattattatgagattt

SEQ ID NO: 11476 - DNA, 415 bp, Zea mays
  unsure (1)..(415): unsure at all n locations; Clone ID: LIB3157-009-Q1-K1-C12
ggcgagatgcagatccagcgatagcgcggcggcggcgggagccttggcgctcagttcctcaccctccgtgcctccgtttactcgccgccgtccggccgggacgatgaacaggccgaggagtgggagtggccagaagaaggggaagcgcgggggaggaggaggcggtgggctcggcgcggcgctgaggaagcaggtggccaggctctgcatcatccgggagtgcgtcatcatgctcctcttctaccacgactgatcccactgacgatgccctttgcggttcttcctggccattgactacctttatcttttttttctcgatgtgcctcgtgtatgtacatacagagggtggtggtggatgttcttgttcttgttcttgctcacgtgtgtgtctgtatctncatcattttttgacact

SEQ ID NO: 11477 - DNA, 75 bp, Zea mays
  Clone ID: LIB3157-009-Q1-K1-C2
aaaaaaaaaaaaaaaaaaaaaaaaaaaaattttttttttttaaaaaaattaaaataatattggggggggggtttt

SEQ ID NO: 11478 - DNA, 259 bp, Zea mays
  Clone ID: LIB3157-009-Q1-K1-C9
tttctgtagtagtatataacttgtttttttttttgcaccacattgctacctttgcgggtggtttttatgcagtgtattgagaaactatttaaatataataattttaactaaatttattaattaataattatattttaaatttattatttttttatttatttatttatatttttattaattatcttactctcttatatttttctttctattttatttttgattatttttttttatttaaattaaatattatttatttttt

SEQ ID NO: 11479 - DNA, 159 bp, Zea mays
  Clone ID: LIB3157-009-Q1-K1-D10
gaaaaccgggccgaccgacgcgtccgaaaaaaaaaaaaaaaaaaaaaaaaataaatttataaaaaaaaaaaaaaaaaaaaaaggaggcgaagaaataaaaaaaaagtaaagaacaaaaaaaaaaaaaaatcttaatttataaatttaaaaaaaataaaa

SEQ ID NO: 11480 - DNA, 236 bp, Zea mays
  Clone ID: LIB3157-009-Q1-K1-D12
ctgtaattttccaaatgcaaagcatctgatgaggatggcttctgttaactccatgaatagagacgcttgtccgggtggagccttgtcctttcagtcacgggatccccagaaaagatttcttggttgtgctgctcttgcaagtttgtagtagggtgtccattgtagcaatggcaggggtgaccgttgcttgggtttgttgacctgcgtagcacttaagattgtgtatctaaagttgt

SEQ ID NO: 11481 - DNA, 139 bp, Zea mays
  Clone ID: LIB3157-009-Q1-K1-D3
gcgaactgtaccgatggacgggggtccggtaaggggaaataaaagaaatgtcatttaccgggctttctaaaaaaaagaaggcagcaagaaaacccaagaacaacgctggagccacaatgaaaggcaacgcagatgatga

SEQ ID NO: 11482 - DNA, 100 bp, Zea mays
  Clone ID: LIB3157-009-Q1-K1-D5
caatacccacagaaccaataaatgctgggttttttttacctaaagtaaactaacccaaatgtggggggccttaaaaataatccttacacaacaaaaaaca

SEQ ID NO: 11483 - DNA, 156 bp, Zea mays
  Clone ID: LIB3157-009-Q1-K1-D6
gggcggaccaacgcgtccgcggttaacaacaaaataaataataatctgtgttatttgcccaaaaaaaaaataaaataaagggggggggtttaaatgggggcggccgttttaaagaatcaaagttaactaacccttcaatccaacttataagttttt

SEQ ID NO: 11484 - DNA, 316 bp, Zea mays
  Clone ID: LIB3157-009-Q1-K1-D9
aagccaagtgtgtgtactagcaactttctttttcgggcggcagcaggcagccatcgggtgggttgataagcaccaccacttcttcaaccaccacaagaaggacgaggagcagcccgccggcgagtacgggtactccgagaccgaggtggtcactgccaccggctaggccgagtactagaggtacaagaaggaggagaaggagcacaagtacaatcattacctcttctaggccggcgccatcgccgtctgcgccttctcactctacgagaagcacgaggcgaagaaggactcctagcactctcacaggcacaagatc

SEQ ID NO: 11485 - DNA, 304 bp, Zea mays
  unsure (1)..(304): unsure at all n locations; Clone ID: LIB3157-009-Q1-K1-E1
aaaatggtcaatctttaanaaaaaattaaaaaaaaaaaaaaaaaaaaaaaagggaggaaataaaaaaaaaaaaaaaaaaaaaaaaagggggcggccgttttaaagaatcaaacttaactaccccttcattccaaggtaaaactttttttttagggtaactaaaataaaattaattgccggcggtttaaaaacgtcggaattggaaaaaccttgccttaaccaaattaaatggcttggaagaaaatccccttttggcaagttgggtaataacaaaaaaggcccgaacgaatcgcctttccaaaaa

SEQ ID NO: 11486 - DNA, 287 bp, Zea mays
  unsure (1)..(287): unsure at all n locations; Clone ID: LIB3157-009-Q1-K1-E2
aattaanaaaaaaaaaaaaaaaaaaaaaaaaaaaaaaaaaaaaaaaaaaaaaaaaaaaaannnaaaaaaaaaaaaaaaaaaaaaaaaaaaaaaaaaggggggggggggtttaaagggaacaaggttaaggacggggggatgggaaggaaaaagttttttaaagggggaacaaaaataaaataaaggggggggggttaaaaaaggggggaaggggaaaaaccggggggtaacaaaattaaaggggtgggaggaaaaaccccttttggaaggtgggggaaaaagaaaaa

SEQ ID NO: 11487 - DNA, 194 bp, Zea mays
  Clone ID: LIB3157-009-Q1-K1-E3
gcctgtttcgaaccaccaaaggacaacttttaggtaccaggggtttccggcatttaatctggttcaaccctgaatccggtggggctggactacctccattctcaacacctggtggtataaaacccgggcgcttttcatgtataattctggattgggggctcgggaaataaaatttggccacgggttatggactt

SEQ ID NO: 11488 - DNA, 258 bp, Zea mays
  Clone ID: LIB3157-009-Q1-K1-E6
atcgtaactaagtggaaaatttagatgatgttagtttaagtacgaacaagattaaattatgcggggtgtaatgggattatgtaaatcgaaaaaaaaaaaaaaaaattgggagggtgatgaatgggaaaaagctgacgttacgccagcttagataggttgtagtatattatagtgtcaccataatggcaatatagtgaacatggttgtacaaattgatgactggaataatcgtgcagtttgaaaagtgaatgggattgg

SEQ ID NO: 11489 - DNA, 174 bp, Zea mays
  Clone ID: LIB3157-009-Q1-K1-E7
aaaaaaaaaataaataaaaaaatattttttatatttataaaaaaaaaaaaaaaataaggagggttttttataaaaaaataaaaaataaaaaaaaaaaaaaaaaaaaaattttaaaaaaaaatatataaaataaaattttaaataaacttaacttgtttatttttttaatatatt

SEQ ID NO: 11490 - DNA, 76 bp, Zea mays
  Clone ID: LIB3157-009-Q1-K1-E8
aataatgtattgttgcagtacaatctagccttgtcgtcatgcaataaataaagcgactggtttccctatttcaatt

SEQ ID NO: 11491 - DNA, 404 bp, Zea mays
  Clone ID: LIB3157-009-Q1-K1-E9
cggacgcgtgggcggacgcgtgggcgccgcggggcccttcagcggcggctccatgaaccccgcccgctccttcggccccgccgtcgccgcgggcaacttcgccggaaactgggtctactgggtcggcccgctcgtcggcggcggcctcgctggcctcgtctacggcgacgtcttcattggcggctcctaccagcaggtcgcggaccaggactacgcctaatttattcaccactccatctccgctctggatgaatggattcaaaaccgtcgtcgtttgcttttgctcctcgccacgttcaattaatggttgtgtatgcatgtatgtgccaatatgatgtgcctttgccctggtccattcatttccctttcttttttcggcgtgaaatagatgtaaagatctcgtc

SEQ ID NO: 11492 - DNA, 193 bp, Zea mays
  Clone ID: LIB3157-009-Q1-K1-F11
aaaaaaaaaaaaaaaaaaaaataattatattataacaagcaaaccaaaaaataaaaaggggggcttatttacaagtatatacgatcacatacacttttatataatatatatatatgttcatttcattaacctaatttctattatgtccttgtcggtttaatactgttttaacacaaataaattgtctttaccc

SEQ ID NO: 11493 - DNA, 416 bp, Zea mays
  Clone ID: LIB3157-009-Q1-K1-F12
caccatttggcggagtaaagcagtctggttttgggagagaaggatcgaagtacggcgtcgacgaatacttggagctcaagtacatctgcatgggcaacttgggttgagttctgaaatctggcctgaggctagaaacgcttggcagatgatgaaccgagagaccaagaaggcaagcgttttgctgcaagaccggaggaacatggctgaaaggggccggccactggttgtgggggagcagttttcgaataaagcgaataagccgcggaacatgaacaaaagaaagccgaaatgagttgtaaatgacgtgaactataaagtatggcttcgcctccggacttttgtatacgtaatcatggcactacttgtctatagtgtctccaaagacgtccatgttacagaataaaagcgtatagggt

SEQ ID NO: 11494 - DNA, 55 bp, Zea mays
  unsure (1)..(55): unsure at all n locations; Clone ID: LIB3157-009-Q1-K1-F2
aaaaaaaaaaaaaaaaaaaaaaaaaaaaaaaattttaaaaaaaaaaanaaaaaaa

SEQ ID NO: 11495 - DNA, 415 bp, Zea mays
  Clone ID: LIB3157-009-Q1-K1-F6
tggaacacagccacgaaccccgttaccgaattcgttgacgcggggctgagcccgtcgtacgcgcggttactactcgcgctgggccggtaaaacacgacgcaaacaacgccgatcacgacggccatggacccggaaacgcccaacttgctggacaacaactactacaagctcctgcctcgcggaatggggctttttttttccgacaaccagttgcgcgtgaacccgcaaatggccgcgctggtgagcagtttcgcgtccaacgagacgctgtggaaggagaaattcgcggcggccatggtaaagatgggacgcatccaagtgcatacagggacgtgcggagaggtccgttttaactgcggcgttgtcaacccgagttcgtactcgtcgtcgtcggcggtggagctgggttcgagcg

SEQ ID NO: 11496 - DNA, 392 bp, Zea mays
  Clone ID: LIB3157-009-Q1-K1-G10
aaaaaaaaaagacagcacaccaaaagaaaacattaacgcacaataggaaaaaagcgccgacgggcgcaaacaacgacgaagccgcaacaatgcaaaaagcacaggaccttccggatcaagaagaaactggcgaataagatgcgccagaaccgacccatctccctactggatccgcatgcgcactgacaatagccatcaggtacaaaaccaagcgcatgcacaggcgccgcaccaagctcagcttatgagcgtcggaataggcccgctgctgcgtaggaaggctaatgtctaagagctatcttccttctgccttatcaatgagtcacttattctgtaagctaaaaagtgccgctatgacgcttttattaaaattctggcgagcggtgatgtta

SEQ ID NO: 11497 - DNA, 408 bp, Zea mays
  Clone ID: LIB3157-009-Q1-K1-G11
ctacacataaaggtggctcaagtacatgctgtaacaaatatgctttcggatgcactttcggattatcaatctgcactaagaataaacccacaaaatgaagctgcaaagaatggattggagcgcttggagaaacaaatgaagggagtggacccagatgctccagaagacgatgaagagaacgaggaggaggacgtcgatgttgatcgagatgactttatttgaagctggctcattacaggtctcttatacctgtggaagctggcgctgattgatcacgaccatctttgtatagcggtggtagcagtggttttgtgctatttgtgactgaatagcaagtgttctagcagaaccccaattgttttaacttgtaaaaatgccgcccgaaacgaatattgcacgtgttgtatg

SEQ ID NO: 11498 - DNA, 183 bp, Zea mays
  Clone ID: LIB3157-009-Q1-K1-G12
atgaattcccttcgatcggttagctttaatttgtctcgttagtgtgtcgtgttcgtgtagcgaccatgccacacaccagccgtgtgctctgtcacgtgggggccactcgtggggtctcctgctgctgtcagaacgaataagagaagatggaattgtgatgaaacaataaaaatgcatggtttt

SEQ ID NO: 11499 - DNA, 98 bp, Zea mays
  unsure (1)..(98): unsure at all n locations; Clone ID: LIB3157-009-Q1-K1-G2
gatgcaagagtacactgggccgctctgcccccaccgttatcacataaatntttgaagagtgatttacaatgagttgaggcgcttacacaaattttcat

SEQ ID NO: 11500 - DNA, 170 bp, Zea mays
  Clone ID: LIB3157-009-Q1-K1-G3
aattttgggaaccaccggttaaatttaaaggaccttgacctggaaagccagttaaaagggtgggtcttgtgattaataagggccggttggtaaaagaatggcaagatgtggtaaatttggtttgggccttccaaaaaaaaaaaaaaaaaaaaaaagggccggcggtttta

SEQ ID NO: 11501 - DNA, 60 bp, Zea mays
  unsure (1)..(60): unsure at all n locations; Clone ID: LIB3157-009-Q1-K1-G4
gactagnnctaggatgatcactaccgctcaaagcgccacaagaaaagggttaaggtaatg

SEQ ID NO: 11502 - DNA, 320 bp, Zea mays
  Clone ID: LIB3157-009-Q1-K1-G5
aaaaaaaaaaagatgatcactccactcaaagctttcaagaaagggataaagtaatgtatgggccgatctctcacacgcagcttgttacataactcgctgcaaggttgggaaaagcctgacaacggggggggccgttttgtagatgcaaagttacctttcgctggttctgaaacttattcttttcttttggtgcccccaaaaaattaaactgcccggcgttttaaaacatagcaactggaaaaaccctcggttttccaaatttatacgcttgacataaaatccccttttccccagttggataaataacaaaaaggcccccc

SEQ ID NO: 11503 - DNA, 364 bp, Zea mays
  Clone ID: LIB3157-009-Q1-K1-G6
cttttgtactgcctcggtcctaaaataattgacattcttgtttttaaaaaaaaaaaaaaaaaaggggaaattaaaaaaaaaaaaaaaaaaaaaaaaaaaagggcaaacgatataaaaagatccaatgcttacgttcggcttccatgcaaagacaaagcttatttaatagtgaaacttaaatttaatttaattggaaggggggtcccttttaaggggccagggttaacccccgcgttattcaacttaatcctttttttttgggtcccccaaatttaaaattcgtggcctggttttaaaaacccggatcgttgggaaaatcccagcggttcccaattttaatttttttaaaaaaattccccttttc

SEQ ID NO: 11504 - DNA, 71 bp, Zea mays
  unsure (1)..(71): unsure at all n locations; Clone ID: LIB3157-009-Q1-K1-G8
ttttaaatcagagactgatgatgatgagacaccaaagcaaagcaatgcaatgcaatgcaagcaagctntat

SEQ ID NO: 11505 - DNA, 405 bp, Zea mays
  Clone ID: LIB3157-009-Q1-K1-G9
cggacgcgtgggcgcccaccagtggtgtccattcacgcacctagggttttcgcgccgccgccgccgccgccgccgcagccgcaacaatgccgtcgcacaagaccttccggatcaagaagaagctggcgaagaagatgcgccagaaccgccccatcccctactggatccgcatgcgcactgacaataccatcaggtacaacgccaagcgcaggcactggcgccgcaccaagctcggcttctgagcgtcgggattggccggctgctgcgtcggaaggctagggtctaagagctatcttccttctgttttatcaatgtgtcagtttttctgtaagctagcaagtgttgctatgacgcttttattaagattctggtgagcggtgatgttaagagaaaattggcactact

SEQ ID NO: 11506 - DNA, 400 bp, Zea mays
  Clone ID: LIB3157-009-Q1-K1-H11
tggtgatactcgctagtgcctccgttcttttacttcgtgctaccgatggaatgcgggtggatggtgaagcttgtactttgccacaacttgagcttctggaagtgaccgctcgggctgtccatcttatcatcgaatggggagattcaggtttatcagttgcagatggtctttcaaatctgctgaagtgccgtctatcaaccaccatccgctgcctttctcacccaagtgcacacgtgcgcgcactcagcatgtctgtcctccgcgacatcctgagcaacggatccgttaaccccaacaagacaatccaaggggaacagcaacggaacggcatccaaagcccgtcctaccggtgccctgccgcaggcattaataactggcaagccgacgtctagaggtgcat

SEQ ID NO: 11507 - DNA, 137 bp, Zea mays
  Clone ID: LIB3157-009-Q1-K1-H12
atggcctatgaatgtgggtgtaactttcctgtttaaattaagggtctccagttctggaggattggaggggattgaggtgaaaataaactgatttcctccctcattcacctctaataaagttgacaatttgaatttcg

SEQ ID NO: 11508 - DNA, 86 bp, Zea mays
  Clone ID: LIB3157-009-Q1-K1-H2
tggactcacgtgtggacacctgtctgctgtgcttgtgcagacgggtcctctgctctaagactatgggcgctactggtgacaggtac

SEQ ID NO: 11509 - DNA, 189 bp, Zea mays
  Clone ID: LIB3157-009-Q1-K1-H3
tgcgaagttaggccaatctttaaaagtttatttgtggcctcaatcatggcccatatcattatggttttgtggcctcaaaatatttacatgtaactggtccttaagctgttccaactgccaattttgacagaaatactgagagagattgttgatgtatatttgtagctttcatacatgagtatttgagtt

SEQ ID NO: 11510 - DNA, 399 bp, Zea mays
  Clone ID: LIB3157-009-Q1-K1-H4
cgccatcgctaactgaggccgccgtagcactgccgtcaccgaaggctgcggtggaagagacgaagccccctgtgccgaccggggacgagaagggggaaccgaccgtggaggagctagcgggcctgctggacgtccgggtgggccgagtggtgaaggcgtggaggcacccggaggcggacaccctctacgttgaggaggtggacgtaggtgaggcggagccccggaccatctgcagcggcctcgtcaacttcctccccatcgaagagctccaggacagaaacgtcattgttcttgctaacctcaaaccaaggaacatgcgtggcatcaagtcaaatggcatgctcatggctgcctctgatgcttcccatgagaatgtggagctgctcatcccttcagaag

SEQ ID NO: 11511 - DNA, 262 bp, Zea mays
  Clone ID: LIB3157-009-Q1-K1-H5
ggcgtacgcggaagcgttggataaaaaagaaaaaaattttttgtttttgaaagatgaaaaataagagggggagggtattttttaaattgggggtgggttgttttaaaggataaaagtttacttacgggttttgctaggtaattgtttttgtatagtggtatttaaattgaattaattggacgttgatttataatatggtgagtgggaaaacattggtgttgcctaatttaatagaattttaaaaaatgctgattttttaatt

SEQ ID NO: 11512 - DNA, 440 bp, Zea mays
  Clone ID: LIB3157-009-Q1-K1-H6
gagggccgacccaggcgtacgcgtgaagggcctacctaagaggccggcccttcccttgtttggacggaagctgactgattcacaaagggagagagcaacgcacgtctgccttgattgtgggtacatatacttcctacccaagccttttgacgaacagcccgacgactacggttgcccacagtgcaacgcgccgaagaagcggtttgcgaggtacgacgctgccaccgggaaggccatcggcggcgctctgccgcctatcgccgtgatcgtaagtttggtgatcggcatcgctggggtaggagctctgctcgtgtacggcctgcagtagcctgctcgttcttgttcagaacctttttttttttttgctgtgctcaagaagctcaactgactgctgctgtactctgtctcacaagacattccgagtgatatacatacataaa

SEQ ID NO: 11513 - DNA, 372 bp, Zea mays
  Clone ID: LIB3157-009-Q1-K1-H7
cggacgcgtgggcgcggcgctctgctgctgctggatctgcgagatgtgctgcgactaggcacgcagctagcggtcagctagctctccgtctccggcggctatacatacgaaatacgatgagagagctagcctgccacagcttctgcttctgcttctgcaagagagatctgcttaaattattctatcgtccagagctgcagcaacacctgatatgtttgtttggggtgttattagtagggagagctagctcagctttattattgttaataataattctgtgctgtacgtagctatagcaagcatacgtatgtatacacgtatatgtatgtgttttaccgtgacttgaatgttaggaaatggtgatttcattgc

SEQ ID NO: 11514 - DNA, 314 bp, Zea mays
  Clone ID: LIB3157-009-Q1-K1-H8
gttatcacacctttgacaagctcggcaactgtctgaataatttctgtttctaatgaaaaaaaaaaaaaaaaaaaaaaaaaaaaaaaaaaaaaaaaaaaaaaaaaaaaaaaaaaaaaaaaaaaaaaaaaaaaaaaaaaaaaaaaaatgctgacacataaaaaaaaataaaaatataataaaaaaagggggccgccccttaaaaaaaaccaaagttaacttacacttcattcacaaggaaaactttttaaattggccaaccaaaaaaaaataaagcgccccccaattaaaaacgcttaaacaaaaaaaaccttgcc

SEQ ID NO: 11515 - DNA, 335 bp, Zea mays
  unsure (1)..(335): unsure at all n locations; Clone ID: LIB3157-009-Q1-K1-H9
ccgggccgacccacgcgtacggttacggtcaggcgagttantcttttttttttctgtgccctgtatccatggctgcggccggctttttttttttgtgaggcatcaataacaaggggctcactaacttcattcgttacgttcgcgattaacgatactttatatgccttttgtacggtaaccttttgcaaacgaaaatttacaatatttgatcaacacttgaaggatttgacaagtttggaaacaaatactattaaaaacttcatgacacttattacttatggtatatgtggttataatatgcatagaaaggtttcttcaatgcattcccaagtgcc

SEQ ID NO: 11516 - DNA, 106 bp, Zea mays
  Clone ID: LIB3157-011-Q1-K1-A11
acttggcaaatctttcattcctgttattttgccgggagcactgcaccggaaggttataagtcgagctcggctgagatcagatctatatcatctcctgcaggtggaa

SEQ ID NO: 11517 - DNA, 308 bp, Zea mays
  Clone ID: LIB3157-011-Q1-K1-A12
aaaaaaaaaaaaaaaaaaaaaaaaaaaaatttaaaaaaaaaaaaaaaaaaaaaaaaaaaaaaaaaaaggaaggaagatataaaagataaaaaaataaaataaacaagcatgcaaaaaaataaaataattatataaagaaaaataaataaaatgggctggcctttttttttacaacgattttgggtgggaaattttttggaagttacccattttttttggggttgcagaaaattaatttttttgtcgttggtgtaaaaacaaaaaggcgggaaccgtttgtttttcccaacttttgtgcaatttgaatg

SEQ ID NO: 11518 - DNA, 130 bp, Zea mays
  Clone ID: LIB3157-011-Q1-K1-A2
gccttgctgttattccatgttgtttgtttcagcgagctccgagctcccattttgttgttgtaatatcacatgttttgtgtaaccaaggtagtgacgctgtggataaataatagacgttatgtgttgtatt

SEQ ID NO: 11519 - DNA, 345 bp, Zea mays
  Clone ID: LIB3157-011-Q1-K1-A5
gatgacaaagctcaagtatcaacattgctattccaatagaggatggggtacatattatccataaaacaaagacgaacttgtgtaggctcactgcaacaaaaaggaatgaaacgatactgaaccacgcatgagttcaccataaggtacgcaaagacaaaacacaggaatacttcttgatattggtttatgcagttcacattccatttcatcttctactgggaaggaatgggctgcatctatggtgctgcagcaacgtcagtcacggggtacctgaacacgcaggcgagccggtcagtgggcaccaacgggagataagtggccactgcgtttccgcgcttggcacca

SEQ ID NO: 11520 - DNA, 191 bp, Zea mays
  Clone ID: LIB3157-011-Q1-K1-A7
ccacgcgttcttttccttactggcaatcctgtcgccttattaactgcagcgctcttgtggggggcagtcgagacttccttttggcacagaaaaatgcaccacccctgataagtgtaccgccgctgatgggttaagtagacctggctgtgattctaattgaacgcatctaccttgtttattggcttgatttc

SEQ ID NO: 11521 - DNA, 398 bp, Zea mays
  Clone ID: LIB3157-011-Q1-K1-A9
acgcgtcccagtcgtacgaacaaatctatcgtttttttttacacaaatgaacagacccggaaggggattttgaatcacagggacccaaaatatgcagaccaatcctgtgcaaaaagaacaaagctggaagcatcatattacctaacttcaaattatactacaaaggtgtagtacccaaaacatcatgatgctgtcataaaagcatacacatagactaatggaatagtttatacaaacccagaaataaatccacacatttgcagtcaactcatttttgccaaaggtttcaagaacatatttgagaaaggaccatttcttcaatacatgtttggtgggaaacttagatgttcacatgcagtataaagaaaatcgtctgcccgagtttgccatatatgaaa

SEQ ID NO: 11522 - DNA, 124 bp, Zea mays
  unsure (1)..(124): unsure at all n locations; Clone ID: LIB3157-011-Q1-K1-B11
agggcccnctacccacacatccgcccattttttgattttangttagacgctgcacgaccccgcgcgcgcttgttttcacggcacttgaggcatctctgagatactctgtagttacctcggagcc

SEQ ID NO: 11523 - DNA, 380 bp, Zea mays
  Clone ID: LIB3157-011-Q1-K1-B3
cggacgcgtgggcggacgcgtgggcggactcttgttgattgatcaaaaaaaaaaaaaatgggacaggaactattttaatacagacaaaaaaaaaaaaaaaaagaaaaaacaaaaaaaaaaagaactaaaaaacccacaataaaaaaaaaaacctgggggggccgctttaaaaaacccaacttttcttccttggtgttaaaaacattaatttttcttttggcttgcccgtaaatgaaataactgggacgcctttttaaaaatttggaaccgtgaaaacccggtttactcccaccttaaaaaaattaaaaaaaaaacgcctttcccctctatagaatttaagcaaaaggccgcgcccatattactttttaaatattttataa

SEQ ID NO: 11524 - DNA, 199 bp, Zea mays
  Clone ID: LIB3157-011-Q1-K1-B8
cggacgcgtgggcgaccaccaagcaaaacttaagagggaattatctaaggacaaccaagaggagagagagagagagaggtagcattattaatatacaaaagagagtgttggcggtttgcatgtgtgtatgatgacccagtgtgcttgtgtagattaattacggcctctgattagcgaatgaatgatcttgcttgctgtg

SEQ ID NO: 11525 - DNA, 85 bp, Zea mays
  Clone ID: LIB3157-011-Q1-K1-B9
gttattttgtctttgtaactgaattaagttcagtcctgctggaaaaaaaaaagggttttatttaaaatataccaaactaaaacat

SEQ ID NO: 11526 - DNA, 313 bp, Zea mays
  Clone ID: LIB3157-011-Q1-K1-C12
aatcccaccatttctggctggacgtttatttcatccaggaggcgatccagaacgggctggtgatccttgagatggtggtgttctccgtcatccagcagtacgcataccacgtcgccccctacagcggggctgacagggccaagttcgagaagaagaacgaatgaaccacgtttccaaaaggaatgaaaggaaaaaaaaactctctgctttctggtctctcggagatggagcaccagttcatcgagtctcgcgagtagcgtatttggtagcgagttatcgcgctgtaaaattacactgtgcttgcgcgctgaat

SEQ ID NO: 11527 - DNA, 199 bp, Zea mays
  Clone ID: LIB3157-011-Q1-K1-C2
cggacgcgtgggcgaccaccaagcaaaacacaagagggaattatctaaggacaaccaagacgagagagagagagagaggtagcagtagtaatatacaaaagagagtgttggcggtttgcatgtgtgtatgatgacccagtgtgcttgtgtagattaattacggcctctgattagcgaatgaatgatcttgcttgctgtg

SEQ ID NO: 11528 - DNA, 366 bp, Zea mays
  Clone ID: LIB3157-011-Q1-K1-C3
acgcgtggggagggacgacataccgaccagggttttaagctaactaccgggccccctcgtgcgcgggacattgataccgcacactgactcgtttctgctctggagccgagccatgaaccagtgcacatattattgtgctctcccagaagggacgaactggactatgtccgctcttgcattacatgtatgctctgtgtgagcctatatgaacgtgggtgtactgcatgggtgcccctgactactgacttgacgtcatcgaggagccgaagatgtgggcgtagaataggggctgctccaacacggcggctggcaaaggtgacctacgcgggccaccggtcgtatcctaggaaaagggggcgcactttt

SEQ ID NO: 11529 - DNA, 199 bp, Zea mays
  Clone ID: LIB3157-011-Q1-K1-C6
cggacgcgtgggcgaccaccaagcaaaactcaagatggaattatctaaggacaaccaagaggagagagagagagagaggtagcagtagtaatatacaaaagagagtgttggcggtttgcatgtgtgtatgatgacccagtgtgcttgtgtagattaattacggcctctgattagcgaatgaatgatcttgcttgctgtg

SEQ ID NO: 11530 - DNA, 315 bp, Zea mays
  Clone ID: LIB3157-011-Q1-K1-C7
cgggccagacccacgcgtacgacgccaccaaatacgcaccaggtttttaatcttactaccggaccctggtgtgcggggacattgagttgtacactactcgcttctgtcctgatctgtaccatgaacgattgcaaatattattgtgctctcccagaaggaacgaactggactatgtctgctctggcattccatgtatgctctgtttcagcatatatgtacttgtgtatactgttttggtgtagctgtaaactgatttgccgtcatcgagcaacgtatgtcatgggcctaaaataattgtattaaaatttactttca

SEQ ID NO: 11531 - DNA, 256 bp, Zea mays
  Clone ID: LIB3157-011-Q1-K1-D10
cggacgcgtgggttacattgtcatttttttctatccagctagtcgctgaggatggtgcattttataacaaggcgtccctgatcaacctctctgctcccttcatttgcgagttcttccgtgatgcccaatataacgtcctcccctatgctgactacatcttccccaactaaactgaggcaaatatctttgccaaagtcataggatggtacacttacattattgatgatattgctttccacatctctcaacttccttt

SEQ ID NO: 11532 - DNA, 299 bp, Zea mays
  Clone ID: LIB3157-011-Q1-K1-D11
attttgctttgtgcaacatgaattttaagtgtatggggtattacagtgccttgtgtgaacctgcttatctcgtgctgaacatcgttatgcatggaagtacttatcttttgttctgcttttaaaaaaaaaaaaaaaaaaaaaaaaaaaaaaaaaaaaaaaaaaaaaaaaaaaaaaaaaaaaaaaaaaaaaaaaaaaaaaaaaaaaaaaaaaaaaaaaaaaaaaaaaaaaaaaaaaaaagggggggccgttttaaaggatcaaatttaattacccgtgcttgcaaagtaataatttttttt

SEQ ID NO: 11533 - DNA, 229 bp, Zea mays
  Clone ID: LIB3157-011-Q1-K1-D3
acgagacgagacggcggcggcgatctagctctcctttttgctagtagtaattactattgtgaattcaggacttggcaggtgaatgtgaatgctgctgggttggttggatgcataattctggagaagacgatgattgtgctgcgcagacagtagtaaaacaacatgcaattcgaatgatctgttcaatacattatacatagaaagaatgcatggcgttcccgtattctgt

SEQ ID NO: 11534 - DNA, 110 bp, Zea mays
  Clone ID: LIB3157-011-Q1-K1-D6
gcgagggattgtgtgtaatgttcacgaactgtggtagtgcggcatgtggctcaactgttttaaggatggtgacgactgatttcaaataaatttgctgccatcgtagaatt

SEQ ID NO: 11535 - DNA, 357 bp, Zea mays
  Clone ID: LIB3157-011-Q1-K1-D9
cacggggctgatcattcgcaagctgtctttttagcgcctcggacgggagatcgcgcaggactgtaagacggacctgcagctccagtcctctgtcgtggcggcgctgcaggaggccgcggaggcgtacctggtggggctcttcgaggacaccaacctctgcgccatccacgccaagagggtcaccatcatgcccaaggacatccagctggcccgccgcatcaggggcgagagggcttgagctgtcgcgctgctgctgttcgtcgttgtaatgtctgaagtatatggtggtgggggctttctatgccgagcctatttggctataaccgacgtgttgtcctaactgaatggaaaatggaa

SEQ ID NO: 11536 - DNA, 254 bp, Zea mays
  unsure (1)..(254): unsure at all n locations; Clone ID: LIB3157-011-Q1-K1-E1
gcttgttcctggagagacttttgaagaagttgctcaggagacaaaagcctgatcataggctctaaatagtgaaatgttactgcaccaatgctgtgaggtcatggttttcgtgtgatggcactcttcttcctcccctcctaggccagccccagccactctttgtgttcgctgttggaaacttttagtttctccatctcaagcttttacctaaggttgtgcatgttgagatgccatggaaatccattttgctgntt

SEQ ID NO: 11537 - DNA, 223 bp, Zea mays
  Clone ID: LIB3157-011-Q1-K1-E10
ctggaacctggtttcttgggtgcgtctcttgtagccgtgttatgactgtcgtccgtaaaatttgggggctccccgtaagggatgctgcctggcaaggcctcggtgtcccacctcgtctgtggcgtggggcgctggagcccggtctggttgggttgggaagccctttaaactgttgtcacttgcatgttacctttttcatcgctgtttattgtgagtggtccta

SEQ ID NO: 11538 - DNA, 291 bp, Zea mays
  Clone ID: LIB3157-011-Q1-K1-E11
cggtcccgtgtttgtgggaagaagtttcattatagtaaggaatagcctgagggagagatgggcaaggccttcacggtaggtatcgaaggtatcatctcgctaatttagtggctatgacgtctttatagatgtacaattgataacacattcaagttcctaagtagttttttagcggttatgaggtttatatagcatgtattcgaatgcgggtgttactagtgtatattaatctccactgtgtttttaaaaaaaaaaaaaaaaactgggacgttataaaattataaaaacttg

SEQ ID NO: 11539 - DNA, 60 bp, Zea mays
  Clone ID: LIB3157-011-Q1-K1-E12
gttgtcgcgtgctaggttgtattctgaagtggattcctcaataccgcataccgtactgct

SEQ ID NO: 11540 - DNA, 288 bp, Zea mays
  Clone ID: LIB3157-011-Q1-K1-E2
gtttggatagcaacacgttagtatacaactttggaataggatttgtttgtaatgttattggatgcgggcacctgttgcccattaagctatggcatggtatccctggtttcttgtatatcttggagagcgtcagctcttttgcaggacatagtgctatgccgtcgaactcttgtagaaatgttgtaggcaataaaccagtgacacttgtcgaactacctgtgggcatccatttttcgtttgccatattactttggatctagaatctgacgctggaggtttagtatttgt

SEQ ID NO: 11541 - DNA, 210 bp, Zea mays
  Clone ID: LIB3157-011-Q1-K1-E3
cggacgcgtgggcggggaggtggtggccacagggctcggggcgagcacgtggagtagcctctcctcccgcttctccctgatcctctccagctccctgaacctctgctgcagcagggcgatggaggagaacatcatctggccctcgctgctctgtacccccatgatgaacaaaaactcctccgagttttcagttgatgtgtgtgtgtgtgt

SEQ ID NO: 11542 - DNA, 134 bp, Zea mays
  Clone ID: LIB3157-011-Q1-K1-E4
attttatttgtagcccatcgatgcctgtctatataaacttatttccttgctcacttttttattcgttgtccaccgacttttaccgataataaattattcacttcattctatcaaacaataattaacatttcttc

SEQ ID NO: 11543 - DNA, 344 bp, Zea mays
  Clone ID: LIB3157-011-Q1-K1-E8
gaggaaacatatgcatatgcctagtcatagagagagagagagacatcacaagatcatgacgaagagggtgttcaatttccatgtcgacgtatgtatgacgacgatccacatggtgtgtccttgtcggtatgtatgcgctacgaacggatgtgtgtatctctcgttaagatatatattgatattgatcgaattaagcgttacgtgtgagagttacgttgtagccatgcaattcagactgatattcgaatctatctttccggagaaaaaaatgtttaatagaggatagaagactaactgccaaatatggtaagatctaaaaaagtttctatccgggttggttgttc

SEQ ID NO: 11544 - DNA, 198 bp, Zea mays
  Clone ID: LIB3157-011-Q1-K1-E9
aaattacaggttgtcgagtttgtatttactctagactatgaaatcaagccgggacagaaaatatgatagtgcaccatttaccattcgatccattttgtattgcgtagtaatgaatattcatggtgatctgaaccttatgtcagtttttcttttacagcacacagcattgcctcaatttgcgtcaaaaccgatgaaaaa

SEQ ID NO: 11545 - DNA, 216 bp, Zea mays
  Clone ID: LIB3157-011-Q1-K1-F10
acaaggcctagttaggtcctagcatctcattatcctagtaatgagacgtgttcttcagacaatttctagctcggatgaccttggatgattgttccttccattggtttgctcatttggggcgcgcaactaaattatgtgaagtagcgtgttgtgttgtgtcaagaagtaccgcttgtcgatggccttttcagatctggaatgaaggtaagttcctgc

SEQ ID NO: 11546 - DNA, 421 bp, Zea mays
  Clone ID: LIB3157-011-Q1-K1-F12
cttcaactaatgcatcagaaacagatctacagaatgccctcaactgggcatgtggtccaggcaacgtagattgttctgccattcagccaagccaaccctgctaccagccggacactttagcttcccatgcttcgtatgcattcaatagctactaccagcaaaatggagccaacgttgtggcctgtgactttggaggtgcgggaatacgaacgacgaaagatccaagttacgacacttgcgtctatttggctgccggcaataagatgagcacgacgaactcaacatctcttccagctcgcagcgactccggtccagtcccatgcgccaaatgcttcgccactttgctgcccatgctggccctcgtgatggctgcagttatgctgtgatctatggaaaaaaaatgctccagctagcctcctta

SEQ ID NO: 11547 - DNA, 86 bp, Zea mays
  Clone ID: LIB3157-011-Q1-K1-F2
cactgacatctatgatttttagagcaaactctgatctgttttgactcgtttacacgtttgtgtgtggaatctgaagagctgttctg

SEQ ID NO: 11548 - DNA, 256 bp, Zea mays
  Clone ID: LIB3157-011-Q1-K1-F4
gggcccgctaagcagaaacccccttccgtttgctaatgattattttgtctgggatttaggtagttggagcctccctgattggtttactcgtgtaattagtatcccttttcagtatcgctgaggagcatctgctgtaggatgcacgcctgcctccgtctgtctgctcatctcctccggtgtacccgtcgctcaaatggaagtgttgtaaaatgttttggtgttgacctcaaatgcaatttgctggtttcgtgtactg

SEQ ID NO: 11549 - DNA, 317 bp, Zea mays
  unsure (1)..(317): unsure at all n locations; Clone ID: LIB3157-011-Q1-K1-F9
gtattgagtcatcgatctggatgcatggttattttcctttggtgtcagtcaaccaggcgtgcttgagttgcatggttgtacctcccatttattccatgtttgctattgcattacacctgttcatggttggcatagtagaagtgtgaagattggttgaactggtatgatggtttcagatcaaataaattattgttttcaaaaacacatttntnnnnccacctaaaattaattaacttgaccttcattaaaaaacttttaaacaggaaaaaccatagaataaaaaaaaatagggggcggcctttttaagggaccaaagt

SEQ ID NO: 11550 - DNA, 325 bp, Zea mays
  Clone ID: LIB3157-011-Q1-K1-G11
gtggatctatggggtgaattaacgagagagtcaatctgttttttttcccttcttttgatctcggttttcacataattgccgacagacctaggcacaaggatgtaataaagtcgctaccgtcacttcgagttggattgtgaccttcaggtgtagtaaggcacaaggaaggatggaaaggaaaggaatataccgtgaaatatagagcgtgcactgagtagtcgcgatgttcaaatcaaactatatatcaccgtcactggagtcatgtaatccaagatggcgatgcagatgtttctttggatctatttctctagatatccctaccatg

SEQ ID NO: 11551 - DNA, 258 bp, Zea mays
  Clone ID: LIB3157-011-Q1-K1-G12
tagtgacggaagtccatgtgcttttaatgttcaaatatagaaccacggttgccagtcttaggtggggaatcacatacaggctaggaacaatgcaagttaaattgatcgactgtttcgctacacatactgcattactgccgagagacaatggtaatgctcactgtatcgaaacgttagtttccttttttttcactgctttggcgcctcggtgtttcgtccctttgtatctggatatgttgtacttcacctggaccaagg

SEQ ID NO: 11552 - DNA, 409 bp, Zea mays
  unsure (1)..(409): unsure at all n locations; Clone ID: LIB3157-011-Q1-K1-G2
gccattttaggagattatgcgtttcgatttcatgggagttgggaggacagaattgtatcatagtgcagtaactcttggttgtaggattgagttatcctgcatgccatggttgtggcgcttcgtcagcgaccgaatgctgtaatgtggttacgattctctgagctccttttcaaccattnaaaaaaaaaaaaaaaaaaaaaaaaaaaaaaaaaaaaaaaaaaaaaaaaaaaaaaaaaataaaaaaaaaaaaaaaaaaaaaaaaaaaaatacaaaaatataaaaaaaatttaaaattaaaatataaaaaaaaataaattttttttttttaaaggggggtctctttttaaaatgcataatatatcccctccttctttcaaaaatttatttttttttaattgcctttataaaa

SEQ ID NO: 11553 - DNA, 93 bp, Zea mays
  Clone ID: LIB3157-011-Q1-K1-G4
aggacatcatgtatactgtttgagacgaggacattatgtatatacttggtacattagaaggccaccgaaaacaaattttgcatctggtttttg

SEQ ID NO: 11554 - DNA, 410 bp, Zea mays
  Clone ID: LIB3157-011-Q1-K1-G5
cggacgcgtgggtgacagcagaggctagacagacaatgcgcggcgtagcctctgcacgttcttgagctggcaggtgacgggttccgagaaagcggctggagtagtttttatgcttggaatcttcggtcgcggacggaagtatggctcaacaactccacaactcaagtgtgcatgtgaaagctgtcgatcactcaagttaaccttgatccagcgtcgtaaaaattccattttttttcagatgaactagtggagttagtgtctgtattgttgcctttccgtgcgtgctgatgggtgatggctgatgctgatgcgtgctttggtcttccgccaggtgatggcgatcctggcgcggccggacaagacgtccaaggtgcggcggttctggaactggtaccaccacaacatcgggc

SEQ ID NO: 11555 - DNA, 297 bp, Zea mays
  Clone ID: LIB3157-011-Q1-K1-G6
gtagacagagacggcacagaattgctattggacgtgcattgaacctctcgagttgacgggattgcgatataccgcatgccatggttgttacgcttggaaagtgaccgaacgctcggaagtgtgtacgaacaactgacatcctattgaaccatttgaaaactgcctatcactcaagttaaccttgatccatgcgagtaaaaattccattttttttcagatgaactagtggagttagtgtctgttttgttgcctttccgtgcgtgctgaatggtgatggctgatgctgatgcgtgcttt

SEQ ID NO: 11556 - DNA, 337 bp, Zea mays
  unsure (1)..(337): unsure at all n locations; Clone ID: LIB3157-011-Q1-K1-G9
cggncgcgtgggtgcgtactggcttgttatgtcacctgatgggtctggagggacggacatttttttcctgtgcagcgatagaccggattgttgcgtgtaatggtgccttctctagaggcggttgtgtagtgattgactctcgggtcctgggcaagatggaaggcgttgagtcctacaaacgtaaaacatggtgggacattttgtaagatccaaggttactgacacacctgtaccacgtcatgaaaactgttatagaagactgctaaataaaatttactggtcggaggtttacaacgtgacaagtgaataaaccatagctgtacgcaacttaatctga

SEQ ID NO: 11557 - DNA, 194 bp, Zea mays
  unsure (1)..(194): unsure at all n locations; Clone ID: LIB3157-011-Q1-K1-H10
ggaaaangcggcgggagccacgcgttcccgacgcctgggtccnaaactgcctggtttatattcacgtgatggttcttgagacgcgcccatttttttcccatgcaacattatacggcatttttgactgtctttgtaccaactctacaagctgtaattcgaggattcaaaccataaaaaaaaaagaaatttaaaaa

SEQ ID NO: 11558 - DNA, 405 bp, Zea mays
  Clone ID: LIB3157-011-Q1-K1-H11
cgagttaaaaaaaaacaaatcttattcataaacaaaatgggttcacagatatttctccatacgtacatgctcattgtggtagacgcagctgaccacctagagctgcatacttacttattcagactgatccagcatgtggcaacatcggaagttcacatgcttacagacgacaaattttcataacaatagcctggcttggctgcttcacagaataaccaaacgacaaccacgaaattgcgacgatataaaataaacaactcagaagcaaatcgacaccagaagcccgtcttactcatcaagcactcccgccttctcctccatggcatccgcttcctcctcccagcagagaagattagctagtttgtagtccttcttcataggaggaggagcactctccacgttctc

SEQ ID NO: 11559 - DNA, 184 bp, Zea mays
  Clone ID: LIB3157-011-Q1-K1-H2
gtcgaattatcagtagcacaacataaccctctgatatgttcgtggtttatccgtggtttctgaattgtagacttctgcgttgaagctcgtgctactgtttgttttccattgtttgttcacaccaacagctatatgcagatacatggcttctcagtgttacgccggcagatgaataagcttgggg

SEQ ID NO: 11560 - DNA, 157 bp, Zea mays
  Clone ID: LIB3157-011-Q1-K1-H3
tgtgtgccaagcacgcaatcctgactacattatatttaaatacattgagttcagctcgtcaaaaaaaaattaaaaatatataaagggtggtcgttggaggggattcaaaagtatccaaacttgcttgctgatgttttcactcttttatagtttcact

SEQ ID NO: 11561 - DNA, 178 bp, Zea mays
  Clone ID: LIB3157-011-Q1-K1-H4
gtaaagtgtgccatattggtcttttgaggctagcgtggcttggccatgttgacatctgaacactatcccgagggcctgattgaatgctcacagcctctgctgcctgtatgtacatgtaaattgtgccaagcgcgcaatcctgactactctatatgtaaatacattgtgttcagctcgt

SEQ ID NO: 11562 - DNA, 178 bp, Zea mays
  Clone ID: LIB3157-011-Q1-K1-H5
gtaaagagtgccatattggacttttgaggctagcgaggcttggccatgttgacatctgaacactatcccgagggcctgattgaatgctcacagcctctgctgcctgtatgtacatgtaaattgtgccaagcgcgcaatcctgactactctatatgtaaatacattgtgttcagctcgt

SEQ ID NO: 11563 - DNA, 179 bp, Zea mays
  Clone ID: LIB3157-011-Q1-K1-H8
gtaaagtgtgccatattggtcttttgaggctagcgtggcttggccatgttgacatctgaacactatcccgagggcctgattgaatgctcacagcctctgctgcctgtatgtacatgtaaattgtgccaagcgcgcaatcctgactactctatatgtaaatacattgtgttcagctcgtt

SEQ ID NO: 11564 - DNA, 127 bp, Zea mays
  Clone ID: LIB3157-011-Q1-K1-H9
gtgactggctggttcaaagtacgtgatgggtcttgggagacgcccatttttttcccatgccacgggataccggatttttggctggctttgtacctactctacaagctttagttcagtgattcagtct

SEQ ID NO: 11565 - DNA, 382 bp, Zea mays
  unsure (1)..(382): unsure at all n locations; Clone ID: LIB3157-012-Q1-K1-A12
gaggcacgcgtccgatttgggggcctggtcaagttaaggtactctgatggccaggcggcgccatccggctgtgctattgaaactgtctaagccaacaaaccatgagaggactcatgaggatgtgcaaaacatgaagacactcgtgggatcacttaaatgagtaatgttatgcccaatgtaactctggtggtctcaaacagcaacaaatgctgaaccaatgatgtattgtgatctttttcttatgcacggataccacagactagttctgataaccaataaggactattcgagaatttcatgtttgacgagacattctacgtctcgaagaggtgngggtggtgttttcaaaccataacttttcattaaatgcttgtgtggtgac

SEQ ID NO: 11566 - DNA, 118 bp, Zea mays
  Clone ID: LIB3157-012-Q1-K1-A8
gatagctgcagctgtaatctatagagataaatattgtagaaacagtagaagtcggtataaattaaacctaagcgatcaggcctataaattcttgaaaaggttcaagtgggcttattct

SEQ ID NO: 11567 - DNA, 385 bp, Zea mays
  Clone ID: LIB3157-012-Q1-K1-B10
gccagatgggattctttctgtgctatctcttcctattctgagtcctgatccagctggtaatgaaacaaaaactgaaggtgtcatcctgttggcctccaatgcaaattatgcatatagtgagaaagatagggcttggataagaacagttgcagacaaatttcaacttgcttaatttagagaaatgttgacagtcaggcagtactggaaaatggaccggaaagattgggaagtgtaaagtagactgactggtccaagaaggatttggagtcttggcaaacgtggacggagcagaataagagagttttgcagttgggaggagatcagcattaagctactgtttattaggattggtgctagttgaagcaaaatagtccagcaataattt

SEQ ID NO: 11568 - DNA, 376 bp, Zea mays
  Clone ID: LIB3157-012-Q1-K1-B11
cggacgcgtgggcgctgctggtgtctctatatgcgttgaagttactcctagatgggacggtggacacgaattcgtactcactttaggtgacgctacgatttgtgtgaaggttacttggtcgatggtagatccacggctgtaaatgggttcgcctgttcgttgttaagcatcatcggtggaagtgtagtagtgttgcattggaagggtttattctactcttgttatttgtctaaatgcatcattttttttgtgtggtggtggtggggttgtgttgctgggttctcaggttatatttttaaataaaacctgaaaatccaggcagagctcattataattccaaattcccattatttaaatataaatttaaaaagggcgg

SEQ ID NO: 11569 - DNA, 309 bp, Zea mays
  Clone ID: LIB3157-012-Q1-K1-B2
aacgatttgatcctcgtgatacgcccattgaaggatcatcttgtgattcaagctttgcacgctttgttttcttttgtgtttccccaattctgttggctatacatgtgtgctatgaactgggtagtgcatctggcaaggctaggtagtcagagttacagacgccggttccgtggtgacaatgtcagtacggtggtggtgtcgtactcgtctgctagtcggaagcaggcatcatcatccatctcgtcgcttgtgtgtggaagtgactgtaaatactaccactgatgacatggctctcgtggtttcttcgtc

SEQ ID NO: 11570 - DNA, 203 bp, Zea mays
  Clone ID: LIB3157-012-Q1-K1-B3
agaagatattcggagggcgtgaccgcgttgggtttctcgaaatatccgggctggtgaacccccacttccagaaatgattgggctttttttttgtgttgagttaggttggttaggagaacacatctctgttgtgctctctgtggctgttgttcaacacgcgcatttttctgctaaacctgggctataagtgggctctatctctt

SEQ ID NO: 11571 - DNA, 285 bp, Zea mays
  Clone ID: LIB3157-012-Q1-K1-B5
gatctgagctagattgggcagagaagatttgaaccattttatttgctctccgcggagcgcgaatgtaagaggttgtgttgtgttgtgaaatactgaattcgttataggtatttgtgcaataaattaagttttgcttaaaaaaaaaaaaaaaaaaaaaaaaaaaaaaaaaaaaaaaaaataaaaaaaaaaaaaaaaaaatataaaagaatataaccgaccggtctaccttgatcaatcttagggtccccctcctattaaaaacattttatttaaaggggggggggt

SEQ ID NO: 11572 - DNA, 177 bp, Zea mays
  Clone ID: LIB3157-012-Q1-K1-B6
aagagtgcaagctaggttccgctgttgatttttgatgtctgataacatgcatacggcccgcagttctagaaagttaggccgcattacctaatcatcattttgttagtgatatacgggcaatatattaaattgtgcttaaataaaagaaactgataaaaactattatatacataaaaa

SEQ ID NO: 11573 - DNA, 214 bp, Zea mays
  Clone ID: LIB3157-012-Q1-K1-C1
tgaccctctaataccggattcgctcgccttacttaagaacttagaagaaatggttcagcatgatacaagttttattttattttttgtttcattttgcggattatttgccctgggctggagagtgggaattgagggggaaaaaatagatgctgttactcgcgatgtactccctgattcgttaaggaattcaccagaactttgacttggccgacgc

SEQ ID NO: 11574 - DNA, 366 bp, Zea mays
  Clone ID: LIB3157-012-Q1-K1-C10
cgatttgattgctttcgaaacgattcccaacaaactggaagctgaggcatacgtcgaacttctcgaggagtgcaacgtcaatatccctgcatggttttccttcaactcaaaagatggagtgcatattgtgagcggcgactcgttaatcgaatgcgctactattgctgacaagtgtgcaaaggttggtgcggtcgggataaactgcacacctccaagatttattcatggactgatactctccattcgaaaggtcacggacaagcccgttctgatatatcccaacagtggcgaaagatacgatggtgaaaaaaaggagtgggtggaatccactggtgtgtcagatggtgatttttgttcttatgtgaa

SEQ ID NO: 11575 - DNA, 150 bp, Zea mays
  Clone ID: LIB3157-012-Q1-K1-C11
atttgttctgaggtcatttaggcctcaaacagaatttcttggacttattttgttggagggaatgggacatctcgagatctaaatgtgtatagaagatccaaatgtgtatagaacatatatttttatgggtatcaaacatgattgtgtgcc

SEQ ID NO: 11576 - DNA, 382 bp, Zea mays
  Clone ID: LIB3157-012-Q1-K1-C2
cttctcctccccctccggttcgggttcgggttcgtgaggttctccggggttcggtttcgtgggtgagcggatcgagatggcggcgtcggatgttgagtaccgctgcttcgtcggcggcctcgcctgggccacggacgaccactccctccacaacgccttcagcacctacggcgaggtcctcgagtccaagattatcctcgatcgggagacgcagaggtcccgcggcttcggcttcgtcaccttctccacggaggaggcgatgcggaacgccatcgatggcatgaacggcaaggagctggacggccgcaacatcaccgtcaacgaggcccattcccgcggcggccgtggaggcggcggcggcggctacagtggtggccgtgga

SEQ ID NO: 11577 - DNA, 430 bp, Zea mays
  unsure (1)..(430): unsure at all n locations; Clone ID: LIB3157-012-Q1-K1-C3
cggacgcgtgggcggacgcgtgggcaacggcatacagccagtcctctccggcgtcgccgtgggctgcgggtggcaggcgttcgtggcgtacgtgaacgtgggttgctactacgtcgtcggcgtgccgctcggcgtcttcctcggcttctacctcgacctcggcgccaagggcgtttggagcggcatggtcatcgggggaaccttgacgcagacgctcatcctgctctgggtcaccgtcagaaccgactggaacaaggaggtggagaacgccaaggcgaggctggacaagtgggacgacaagaagcagcccctcctagtagaagattgaaggaagaatctagtagatcacgcagtgagtggcaatgtagcgcgtgctgatggattnnttgtgtgtcgtgtgtgtgttttggagtggattgaatggaccatt

SEQ ID NO: 11578 - DNA, 364 bp, Zea mays
  Clone ID: LIB3157-012-Q1-K1-C4
ctggcgtgctacaacgaaaaactccaaacctttccgcagacttgttacagatggatggcacagcatactcctatagaaccatggtgtgtttgtttactttctagattatataagttggattatggtggaagggtaatatggtaaaatatcactctaggactgtgaagctgaaataatctaacattgggtagtttatttcaactgaacacctacaagatttattcatggactgatactctccattcgaaaggtcacggacaagcccgttctgatatatcccaacaatagcggggggggccgttttaaaaaacaagattacgttccactccattgcaaggtaaaatgtttttttagggtcccctaa

SEQ ID NO: 11579 - DNA, 103 bp, Zea mays
  Clone ID: LIB3157-012-Q1-K1-C5
aaaataataaaaaaaaaaaataaaccttatttaaaaaagaaaaattgggcggggggtctagactatccaagctttatatcccttgcttgcttcatcatatttt

SEQ ID NO: 11580 - DNA, 375 bp, Zea mays
  Clone ID: LIB3157-012-Q1-K1-C6
ggaggacctgattgagaagtttgccactggtgtctccatggttgcctccctgtgactggcgatctcgtacccgacccttgctgctgtgccccacatgttcatcaatgggtacaagaatgtgcttgctgttgctgtcgagacagactactcgtacccacatgctgacaagatcaaggagtacctcaaggacccaagcaagtttgctgttgccgccccggttgctgctggggactctggcgctgcagctgctcccaaggaagaagagaaggctgcggagcctgaagaggagtcggacgaagaaatgggcttcagcctcttcgacgactagagctgctgttttcgtcaaactgctgcaagttttggctttttttttta

SEQ ID NO: 11581 - DNA, 92 bp, Zea mays
  Clone ID: LIB3157-012-Q1-K1-C8
gatcagttgtgtttttgttttctccgacttgacatctatgaaatatgtggcaggagtcaataaagttatctcatacaacagaccgtttactc

SEQ ID NO: 11582 - DNA, 133 bp, Zea mays
  Clone ID: LIB3157-012-Q1-K1-C9
ggcggcgctggatcccaacaacatcatgattccgggaaagctgatcccgcctcaggtctgcatatgaccgtcacctgactggaggatcgatccccccatggccatcagtggggcttgttgggctcacctcatc

SEQ ID NO: 11583 - DNA, 382 bp, Zea mays
  Clone ID: LIB3157-012-Q1-K1-D1
gggaacattattcatccattgatattctcttccaacgggggggttcaaactgattatcccccaaagagactctttggaaataataaaattttgtgttcacacgctcagggagagggggaagtttcctgaaaaagatatcatgatgatgtgtgaccaatcccagaggctggacacagggagctgcgggaagatcacactttcaaatcttgtggagagccatcacttggtttcagaacccagggataagaaaaaggggaagaaatcttaaacatgtgtcatagtatgcacaagaattgaagggcagcgctaaaattttgggactagaaagcacgccaaatgagcaagggtgcgacaggaggcattctcctacacggaatggaaa

SEQ ID NO: 11584 - DNA, 368 bp, Zea mays
  Clone ID: LIB3157-012-Q1-K1-D10
gggttctcaaattgaatctttaacaagacatggaatgccatcatgattatttggtgtgatgtgtttactgggagtgaataagatatcaacagaaattcaattttggtaatggaagcaatttttggagtgagggctgatgttcgagagaactccagctggttgattgaacatgtggtattcaatgcaaaatgaaatggaggatccacttctagcatgatcaatggcatttttcatacataagcctttttgaataagagaagcgaagtaccaagtcgtgaattgcaatgaagaatgagtaaagtgcagtgctgagaagaataattttcatgtatctagtgtactcaataatgataaactttatatgactg

SEQ ID NO: 11585 - DNA, 216 bp, Zea mays
  Clone ID: LIB3157-012-Q1-K1-D11
cggcgacccacctcaaaaaaaaaaaaaaaaaaaaatttaaaaaaaaaaaaaaaggaaaaaaaaaaaaaaaaaaaaaaaaaaaaaaaaaaaaaaggggcgcctttaaggaccatttcccccctcttcaataatgtttttttttggccctaataattactgccgcttaacactctaactgaaaaacccgcttcccaataatccttgaaaaatcccttt

SEQ ID NO: 11586 - DNA, 409 bp, Zea mays
  Clone ID: LIB3157-012-Q1-K1-D12
agccaagcgagtgaattagcaacatgttggactgagctgatcagagcaattactggcgaactgaaaacactgtagtgtaccctgtgctcagctgccacaagatagcctgaagcaaactgctgtacaataagcaagtgattgttctgccatcaacggtggcatatcactgtacaaatgagcaccattgactaacgcacataagtcgccttgtctgaaactggtcattttctttgaaattcaccctccagttcatgtgctttggtggcagacgtcgtggcatggtatatggtacctgagaacattctttgggtggcaactggttttggctacttagtcttctgttgcctgtaatatgagatgtgatgttatttctagtctagctattgttgtaatttttttggactctaca

SEQ ID NO: 11587 - DNA, 117 bp, Zea mays
  Clone ID: LIB3157-012-Q1-K1-D3
cttgtgtggccggtcgcatttgcgcaaatgccactttcagtagttatatttgtatgttttctccgtttggagaattagagagatatgtctgtaacgtgaacaagatcatgctgttct

SEQ ID NO: 11588 - DNA, 425 bp, Zea mays
  unsure (1)..(425): unsure at all n locations; Clone ID: LIB3157-012-Q1-K1-D4
gtggaagtctgttataaagggtggccctgaagttgatacccaaaaggtggaacctgagaacagcaaactctctgatttggatcctgagactagacaaactgtggagaagatgatgtttgaccagcgccagaagcagatgggccttccgacaagtgatgaaatgcaaaagcaagaaattctcaagaagttcatgtctgagcacccggagatggacttctctagagcgaaaatgccttgaggatttgttcgggcagttatttctaccagtctgtttaggttgtctttgagtctggtatcggtgtcaaacaaatcttcatctgttttttttttaatgggtcaagaatatcaagcttgttctttttcatctcaatccatatgcataggaagcgtntgggtggggtttaaatccatagtaggtcaaaagc

SEQ ID NO: 11589 - DNA, 263 bp, Zea mays
  Clone ID: LIB3157-012-Q1-K1-D6
aaaaaaaaaataaaaattaaaaaatttttttgataccaagaatgatgaaaggagaggacagtaatctctatgtttaggatgctgaaactccgcatactgtggagaacatgctgttcgaccaccgcgcgatacagatggtggtgcccgcacgtgatgtaatgctaaaccacgaaattgtgaagaagttcatgtctgagtacccggagactgtctggtctatagcgaaaatgccttgaagatttgttcgagcagttatttcctac

SEQ ID NO: 11590 - DNA, 415 bp, Zea mays
  Clone ID: LIB3157-012-Q1-K1-D8
gacggtgaacgagccgtgctgcccgctgttgaacgggctcgtggagctcgaagccgccgtgtgcctctgcacggccatcaaggccaacgtgctggggctcaacctcaacatccccgtcaacctcagcctcgtactcaacttctgcggcaagggcgtccccacaggcttcaagtgcctttaaccatgcatgcacatcatgtgtgtgcgcacgtacgtagtatccaacaccacgcgatgcgtgagtatgacgaaaaatacacgcgtgcgccatgcttgccggccggggatacggtgtttgaggcaatagctgttagtttcgtttcttccattggagtatgtatccagggcatgcatgtgtccaagttcgactatgggttgcttgcacttctccatttcataaatgatatcatatttc

SEQ ID NO: 11591 - DNA, 410 bp, Zea mays
  Clone ID: LIB3157-012-Q1-K1-D9
ctggcagatcgtctataccgacgactagttttatatgatgcttgtgggagacgagccgtgggaagagttctgcagcatattgcgcaagatctacatctacacgaaggaggaggtccagaagatgaactcgaaatcagctgcgccaaggaaggaggaatctccggcagcgggcggcggaggaggttgcgccgccgccacaaacgagtagtatggtggtttgctcttggtggcaagttgaggccaaggttttactactgctattgttattgctgatttgctctccccgccttccggtgtaaatatctgtgtgtacccagtcccggccttgtgctagtaagtagcaagcagtgttaccttttggtattttaaccagcagctaagttcgcggcattttagttcctgtaagcggt

SEQ ID NO: 11592 - DNA, 74 bp, Zea mays
  Clone ID: LIB3157-012-Q1-K1-E1
ggaccgggggcattccctgcgacgcggcactggtacatcgagcactggctcattgggaaggtgttggggctgct

SEQ ID NO: 11593 - DNA, 352 bp, Zea mays
  Clone ID: LIB3157-012-Q1-K1-E10
gccggtgcagcggccagctcagcccctcgcttttcgtctgggaggggtgcatcgggacctcctcctgaacgccgcaccgcagcccagcccacgcgcccgccatcgcccatccgttccgttccatgcatgctttcgacctgctgctgtttgtttgctctgttggttttgtaacgttcgtaacgtagtgctgtcgttgttgctcgtaagtgatgatcgtcacgtcacgtgattggcttagctgtgtgtgtgagagagaggtgacggagagctagcactattggtttggcatgccaccttgtgcgtgccctgcttattgcatctactagactactactctaccaccatttgccac

SEQ ID NO: 11594 - DNA, 106 bp, Zea mays
  Clone ID: LIB3157-012-Q1-K1-E12
atacaagtgacacaaacacatgattttgccttcaaatactcgccccttatgtttgtttgtaatgtgcaacttgccaaaagatagcaatctaaatcattgcttggtt

SEQ ID NO: 11595 - DNA, 129 bp, Zea mays
  Clone ID: LIB3157-012-Q1-K1-E2
gagagtacttcgaccctacacgtcatatgagctgatcctcacattgcaccggaactgttcggcgagaataaaatttgatgttaagaccttgaacgtcttttgcaataaaaaaaaaaaggaagacgatat

SEQ ID NO: 11596 - DNA, 95 bp, Zea mays
  Clone ID: LIB3157-012-Q1-K1-E4
ttttacctgtgatgtacatcggactagggagctttgtatcattgtgttacaccttttcaatggtggcgaataaatttacagcagatgttttcaat

SEQ ID NO: 11597 - DNA, 416 bp, Zea mays
  unsure (1)..(416): unsure at all n locations; Clone ID: LIB3157-012-Q1-K1-E6
caacgttctaactccttatggccctttttagatagatggtcttttgaaggaaaggaatgagatccatgcttcctataccaacaatccacctctaaaacggagttccagcaggaataaagccaagtcgccttcgaaagtggccaaaactggtacagaaaaacatcatcagaaggaaaagaaggtgaaggatcactgcatggagggatgtggaagtgacagcgataactcaagtgaaaagaaatcaaaagagcggttcccaaggaagaaatggctgaaccttccattcaaacttgacaggagaaagacgtgctgagcaatgtattatatgttccgttgctattctatcctgttatgcataatcctgagctgaactcacatttcttctctttctcatgctnttataagaagtccctctc

SEQ ID NO: 11598 - DNA, 428 bp, Zea mays
  Clone ID: LIB3157-012-Q1-K1-E7
cgaggccgtgtggttcaaggccggctccctgatcttcagcgagggtggactggactacctcgggaacccgagcctcatccacgcgcagagcatcctcgccatctgggcctgccaggtcgtgctcatgggcgccgtcgagggctaccgcatcgccggcggcccgctcggcgaggtcgtcgacccgctctatcccggcggcagcttcgacccgctcggcctcgccgacgaccccgaggccttcgctgagctcaaggtgaaggagctcaagaacggccgcctcgccatgttctccatgttcggattcttcgtccaggccatcgtcaccgggaagggcccgctcgagaacctcgctgaccacattgccgaccccgtcaacaacaacgcttgggcctacgccaccaacttcgtccccggcaagtgagggaggc

SEQ ID NO: 11599 - DNA, 60 bp, Zea mays
  Clone ID: LIB3157-012-Q1-K1-F1
cggacgcgtgggcggacgcgtgggttgaattgcatccaatgcatgaagtttctttggttt

SEQ ID NO: 11600 - DNA, 402 bp, Zea mays
  Clone ID: LIB3157-012-Q1-K1-F10
aaaaaaaaaaaaaaaaaaaaaaaaaaaaaattataaaaaaaaaaaaaaaaaaaaatgttaattttttaatttaataaaaaaaattaaaaaatactaaaaaaaaataaaaaattggctctcctttctaaattatcccatttttttttccccaatcttcccccgcctttctctatcttattgttcactaaatttcaattcactccccttcttttaacaccttctatacttataaaacctttccttcccctactttattccctttacatttacatacccctttctctaacttttttattattaattaggccctttccttttccctttccaaattatttccctccttaatacgctaattgtaccctccccttataactcattaaacccccttttttttttttttcc

SEQ ID NO: 11601 - DNA, 385 bp, Zea mays
  Clone ID: LIB3157-012-Q1-K1-F11
aaaaaaaaaaaaaaaaaaaaaaaaaatttttttaaaaaaaaaaaaaaaaaaaaaaggagattaaatataaaaatattaggtttttataaaatacaaattgtgtttctgtttttgggataactaaattttttggcttgtttgtttcttgataaatgtttttttttttgttctatactggtttcctcttttttatttctttcctccttattgctttttaattccctttgttttcccacttttaggcttttaactgcttattttttttttacaattttatttttcttttttgtaaattcccttctcttcttgtctttttttaataacaccccctgctcttttttttttatccaaacctttttacccattatttctttactttattttc

SEQ ID NO: 11602 - DNA, 407 bp, Zea mays
  unsure (1)..(407): unsure at all n locations; Clone ID: LIB3157-012-Q1-K1-F4
ggccgccgccgtcgagggtgccgcttccggccgcggttggtggaaccagcagctcagcgacttgagctaccgccgcatgcgctgggtgcagcgcaagttcatgatctacaactactgcgccgacgccaagcgcttcccgcagggcgtgcccgccgagtgcaagctccggtgagggagcgaggtttgntgggacgtccgtggggcatcaaaaccaagcacgatccctagtcgtggaaagtagaaaccaggcatcgattcgatcgtcgtcgacagtcttagtagtagctacttattttgcaatgggcgatgaaagaatggtgtcatgtaaaaggtagctccaattcgggtcgcattctttgaattgttggttcagcaagccccggatgttcaagtcccgagtttgggct

SEQ ID NO: 11603 - DNA, 428 bp, Zea mays
  Clone ID: LIB3157-012-Q1-K1-F5
cttccccctcgccggccgcgtgatctgcctgccgcgcggacgccgcgggcgcgacgatgcacgacccgtcggagatccgcaacctccccatcgacatcgcctttggccgcctccaggagtggctcgtggaccgcaagcgagtgccgcacgactggcggaagcgcctcgccggtattcgcgcccgcatcgcgcccgctttctccgccctgccgcggaacctgcacccctcactcctcgccctcgatccagaagaaattggctaccttgaagcaaagaagatatacagcattctcctagaatccaacaccgagagtcgcaacatatttggccgcctgacgggatccgcgggtgaatgggagtcaattattaaagcttacgagaaggaccatgtcttccttggagaggcagcgcagatcatggttcaaaat

SEQ ID NO: 11604 - DNA, 420 bp, Zea mays
  unsure (1)..(420): unsure at all n locations; Clone ID: LIB3157-012-Q1-K1-F6
ctctgccccgagacctcccccctcgctggtctcagccatggtgaaatattcgagggagccgaccaaccccaccaagtccgccaaggccatgggccgtgacctacgtgttcacttcaagaacacacgtgagacagcttttgcccttaggaagttgtcactcaccaaggccaaaagttaccttgaggatgtgatcgcccacaagcaggccatcccgttccgcaggtattgtggtggtgttgggcgtactgctcaagctaagtctcgccactcaaatggtcagggacgctggcctgccaagtctgctaaattcattctagaccttctcaagaatgcagagagcaatgctgaggtgaaaggactngatgtggataccctctatgtgtcgcacattcaagttaatcaggctcagaagcagcgacg

SEQ ID NO: 11605 - DNA, 297 bp, Zea mays
  Clone ID: LIB3157-012-Q1-K1-F7
ctccccgatgcttcatgtagtttgggctttcctgatatctccaggctgaatgggggagcttccgtgcaatgaaaatctgaactagtcgcaacactgcaagcgatttattctttttcgtcaaagaaaagagtaagatatgatgtgccttccacagagaagcgcaaacgtatgcatgtaactgttgttaggaacggttctcttgatttctttatttttcattgaaattctactcggtttcatggaacagctgtagtgtctcaagagcatgaaattgatttaaaggcaaggcagttgaag

SEQ ID NO: 11606 - DNA, 200 bp, Zea mays
  Clone ID: LIB3157-012-Q1-K1-F8
ccgcgagctcatcaacggagacctcgtcgtcgacgacaaggacatcggctactgctagctgctgcacctgtgcttgcacatcgctgctggcgagttgggcagtcgtcgtacgtgggaaacatggcttttggtgtaggaggaaggaatggaagtggtctgttgtacttaaagaaactagatgaagaagtcttgtataactg

SEQ ID NO: 11607 - DNA, 118 bp, Zea mays
  Clone ID: LIB3157-012-Q1-K1-F9
gagccacgcgtccgcaacctggagctgatccttctaacatcatttttcatacctgaatactagttgatcgagatcaccaatgcttcagaaggctttttttacctggagagcgtcaacg

SEQ ID NO: 11608 - DNA, 403 bp, Zea mays
  Clone ID: LIB3157-012-Q1-K1-G1
ctcgtcgtgcttccgggagaggatgctccccaacagccgccaccagacgttgcagggaagatgtttgagccaccgcttcgtgcgtgggcggctgcaagacctgctcaggaagatgactctgactctggcagcggaaagaaggatccgccattgctgcttaagttttgacggccttcttatgccgatactagttcttaggctccaccatgggtgttgaaagctgaaagatcagatctgatggatgcctgaccttcttcgaacctcagttgtggttcttgtaatttgcaccgcatttctgttctgagtatgttttatgagaagactgggaagatgacagacagatactgtatcacgtgatgctcgtaaattaacactacatgcgaattctcttgctcgattgctc

SEQ ID NO: 11609 - DNA, 220 bp, Zea mays
  Clone ID: LIB3157-012-Q1-K1-G12
gacccacgcgaccgaaccagagggccgaacaaatacttaaaaatatattatcacccgcagcctgaaaaagaaaaattaaaaaaaaacaaaccaacccccaaaaaaaaaaaacaaaaaaacaaaacaacccaaaaacaaaaaacactcttaaataaataatattaaaaaaaaaaaaaaaaaaaaaaaccaactctttcctcttcactaccaacaaaaacaa

SEQ ID NO: 11610 - DNA, 304 bp, Zea mays
  Clone ID: LIB3157-012-Q1-K1-G2
ataaaatactgcaaatgttagccttaaaaaaaaaaaaaaaaaaaaaaaaaaaaaaaaaaaaaaaaaaaaaaaaaaaaaaaaaaaaaaaaaaaaataaaaaaaataaaaaaaaaaaaaaaaaaaaaatataaaaaaaaaaggggggggccgttttaaaggaccaaagtttacgtccgcgtgcttgcaacgttattgtttttttttggggccccctaatttaaattaactggccggcgttttaaaacgtttggactggaaaaaccctggcttacccaaatttattggctttgaaacaaatcccctt

SEQ ID NO: 11611 - DNA, 196 bp, Zea mays
  unsure (1)..(196): unsure at all n locations; Clone ID: LIB3157-012-Q1-K1-G3
aaagtcctcttatttaaaaatatccctttctttctcaatttctggcttctaaaactagagcttgtttgaaagcaagtgtaatagatgcgattgagggggttaaaaccttttactatttaaattttgactagtaaaaatttgggtcctcantaaaaaaataaatttaaaaaaaattaattaaaaggggcggcccttt

SEQ ID NO: 11612 - DNA, 321 bp, Zea mays
  Clone ID: LIB3157-012-Q1-K1-G4
cggacgcgtgggcagctcaccgcagctcaaaagccagcacaggcaaacccccgtcatggcctcctccaagatgctgcgcgccgccgtcgtcgtcgcggccgtcgccgtgtcctccttcgccggcgccgccctcgccgccgaggcccccgcgccgagcccggcctccggcgccgcggccctcccctcgtcgctcttggccgccgccctctgcccggccgtcgcgctccttctcggcaacctgcgccactgatgacgcctgcctgtctcctagaccgacgagagccgccgtgtgctgtcgcgtgatgttattggcctctggat

SEQ ID NO: 11613 - DNA, 415 bp, Zea mays
  Clone ID: LIB3157-012-Q1-K1-G7
cagaaaactgcaagccagaacaagtgttctctgttgaggtggagatgcaagaatcgaagcgcagtagtctctcacaaacatcagaagtagatctagaatctcaggtttagttctgcagttatagcttctaactgatttagcttaggtaacgcaattagtagcccttttatgattcctccacacaccaaatagctccacagagttcttaagatcttggatcgactctcgctagactaccagtccggtgtgcgcttttgtgcactgaaaccaagtaggtcctttcctgcattacgcagcatatgtgcttgttggctgggctccgatccactgacattgtaatctaagggtatctggcgcgtggacaaaaaacgactggggttattgtaacttatgggattatgtcaaacttcgaatc

SEQ ID NO: 11614 - DNA, 229 bp, Zea mays
  Clone ID: LIB3157-012-Q1-K1-G8
cggacagcgtgggttttttttttttttttttcacaattggcttttaaaacaatggggctccttcagatgtcccagatacatgatgagaagcacaaaatccaccaaatactaatatggcaaacacaaacacgcccggtaaaaataaaaaaaaaaaaaaaaaaaaggaaaaaaaaaaaataaaaaagggggtcgtggtcatagaaatcaaaaaaggcctggacgggtattt

SEQ ID NO: 11615 - DNA, 69 bp, Zea mays
  Clone ID: LIB3157-012-Q1-K1-H12
atgcaaatgtatcctggcgttttgccaattataaaagatcatgctaacagaaacggcgggatttttttt

SEQ ID NO: 11616 - DNA, 425 bp, Zea mays
  Clone ID: LIB3157-012-Q1-K1-H2
gtgaaacaagcttctgactccaaatcaaacaagtccaaatcaaagggaaatgctgcttgagctggatgaggaacactatgttaatttttgggcctaccagtacacaatacccatagcatgactatggcgttgcaggttttcgttttacccattttggtttcttggttgccacattatctaatgacctacctggcatacttatattgcaatagcatttcttgaaatctggaatatttgaccaccatcagctctaccggctgtgtttatcgcgttgccacagaacgctgcttgtttgtctccgaaaccaccagcgttctctgtagcacattagtaacaatttgctggtggatttgatatcatcttttttgaatgatggtgtattggtgtacttgtgatcgataatgaaaaagacatcttgtgttagt

SEQ ID NO: 11617 - DNA, 72 bp, Zea mays
  Clone ID: LIB3157-012-Q1-K1-H4
tggacgcgtgggcggacgcgtgggcggacgcgtgggcggacgcgtgggcggacgcgtgggcggacgcgtggg

SEQ ID NO: 11618 - DNA, 179 bp, Zea mays
  Clone ID: LIB3157-012-Q1-K1-H6
ctatgcattagttgtagagagagtttagtttaaaccatgtcaaactatgctgtagttgtatagagtctgacacataacgtcgaggacttgagctcttgttcagttttttttgtaaggtacctacaggtttggtcatatgataatttctccggaacggcataccttagcacctgttttct

SEQ ID NO: 11619 - DNA, 240 bp, Zea mays
  Clone ID: LIB3157-013-Q1-K1-A1
cggacgcgtgggcaagatatttgaaataataactttaggacttggtatgacgttttatgttaagcgttgtcaggttttgctattcgtgttatgctgaattgttggaactcctagatgcagaatcttacgtattggttttggttccttcgagaagtgcaaatgcaagacgcatctattcccattgtgtgaaaaaaaaaaaaaaaaaaaaaaaaaaaaaaataaaattaaaattaatataaa

SEQ ID NO: 11620 - DNA, 105 bp, Zea mays
  Clone ID: LIB3157-013-Q1-K1-A2
tctggactctgagtgtggagagtatgtatcttattattactgtaattggatagtaagtactacactgatatgctggtctaatcgatgttgttgttttatatggat

SEQ ID NO: 11621 - DNA, 309 bp, Zea mays
  Clone ID: LIB3157-013-Q1-K1-A3
ctctccaacctgccggcctaccgcaccgccgtagcccgctgctgcggggcgtcgaggtcggcctcgcccacggctacctcctcgtcgggcccttcgcgctcaccggcccgctccgcaacacgcccgtgcacggccaggcgggcgcgctcggcgccgccggcctcgtcgccatcctcagcgtctgcctcaccatgtacggcgtcgcctccttcaacgagggcgacccgtccacggtgcccacgctcacgctcaccggccggaagaaggaagccgacaagctgcagaccgccgacggctgggccaagttca

SEQ ID NO: 11622 - DNA, 330 bp, Zea mays
  Clone ID: LIB3157-013-Q1-K1-A7
ccggcaaggagctggagaaggagcccaatttctcaagaacggtgatgctggtatggtgaagatggttcccactaagcccatggtggtggagaccttttctcagtatcctcctcttggtcgatttgctgtccgtgacatgaggcaaacggtggctgtcggagtcatcaagagtgtggagaagaaggacccaactggagccaaggtgacgaaggctgctgccaagaagaaatgatctatctggctggtgacgaaggctgctgccaagaagaaatgatctatctggctggtgctgtgcttgcttggtgggtaccctcgtggaaacttaaaata

SEQ ID NO: 11623 - DNA, 381 bp, Zea mays
  Clone ID: LIB3157-013-Q1-K1-A8
ggagggaggggaggaaatacgtgaaaaaaataaaacctgtacacgtgtctgtccagatcgtgccgtcgatcgctcttcgttgttgatttttggttgtattgatcgatccgtatgtgtgcgtgcgtgtgtggcgttgctctttcttcttttgtgtagctgtgccctgccaccggccgacgtgcgtgcatgccatggtggcgggcagcgttttctaaggtcatatactgttgttgtgtttaagtacatcttgcgtactcaattccttctaagtaagtatcctaatactagaatgttcctctacttataaaaaaaaataaattaatacttttactatattatattttatttcattatctttttttatattaataattatttttt

SEQ ID NO: 11624 - DNA, 403 bp, Zea mays
  Clone ID: LIB3157-013-Q1-K1-B11
caggcggcggcgatcgggcgatggcatgcgggcgagcctgtctcggagcctaaaggagatccgcgtcctcttctgtcagtcctccccggccagcgccgccgcccgtgagttcgtgaagaagaactatggtgacatcaaggctcgcaacccctccctccccttccttgtccgcgagtgctccggtgtccagccccagctctgggcgcgctacgatatgggtgtggagagatgcgtgaacttggatggcctgacggaagcacagattgataaaaagctggaggagcttgccaaggccggcgagtctcttaaaaccaaatagttttggaactctatcctgccatgtttaactttcccaaataaatgatgccatatgggtgagcaattgttactctatcgttatctg

SEQ ID NO: 11625 - DNA, 340 bp, Zea mays
  Clone ID: LIB3157-013-Q1-K1-B12
ctaatctaatctaatccaaaacccttctgtctttgctgcggctgcccaaatgccctgctccatttgcagctagcttagctttggtttcctctgcttctcattctcccgtgcacttccagttcctgcccagctgcagggctgctccaatggccaccttgtccgccatctctgccaacgtcggctactgcaaggcaccaaccctgagctggaagggaagcgtagtaccaggccggattgtggtctccatgttcaccacccgaagaggcctcgtctccctaagacgacgatcccctctgtttcgcgtctacgcggcgaaagcggttaccgttagcaaagtgat

SEQ ID NO: 11626 - DNA, 300 bp, Zea mays
  Clone ID: LIB3157-013-Q1-K1-B2
ctcggttctcgacttcctgcacaaccagttggcgataagtaagacatagtcttctcctaagaatgcacaaccagcagatgtctcctcatggtaatgttcaactctactacataagttccctttggaaggagttggtctagaagcagcgatgagtgtgtgtttaccatcgtttgaaactttgtcacggcacaaaataagagctcctgcactgtaaatgtaatcatatatatgctcatcgagtattcttgatgattgccgatatggtttagtagtctaagcactctggtttgtcaatgtcat

SEQ ID NO: 11627 - DNA, 70 bp, Zea mays
  Clone ID: LIB3157-013-Q1-K1-B3
aaaaaaaaaaaaaaaaaaaaaaaaaaagggcttcgttaaaaaaagaaaccaaaataatagacgcgtgcat

SEQ ID NO: 11628 - DNA, 221 bp, Zea mays
  unsure (1)..(221): unsure at all n locations; Clone ID: LIB3157-013-Q1-K1-B4
atttcttatgtcagttattggtgccgntttttatataaaaaataaaaaaaattaaaataaaaggtaaaaaataaataaaataataaatttttatttataaataaataatattttataattttatatttcttatttattttttttatagtaatctttatttttaatatttattttatttatatttaaatatatattttatatatatatttgctttttctctt

SEQ ID NO: 11629 - DNA, 207 bp, Zea mays
  Clone ID: LIB3157-013-Q1-K1-B5
atatgagcagatattgttactttctcttaaatgttcgattcttgattgtttaaatgtaatagcacttgcacaaagctgttgtgcttaactctgttttttaaaaaaaaaaaaaaaaaaaaaaaaaaaataaaaaaaaaaaaaaaaaaaaaaaaaaaaaaaaaaataaaataaaaaaaaaaaaaatttataataaagcgcggccttttt

SEQ ID NO: 11630 - DNA, 411 bp, Zea mays
  Clone ID: LIB3157-013-Q1-K1-B6
ggctaggtagggcgactacgcagcacgacgcagaaaacagagcaaacacatgggaactctcctctatacatgtccaaacgggccgggtcggcagtgggcccgtgacccggcatggtcgtagcccggcacgaacacggcccggcccgactagaggcgtgcccgggccggtccaatagtcgtgctgggcttgggctggccgtcgggcccgcggtgcatgtacggggccgacacggttaattggtaggcacggtaacgactcgtttgagggactaattttgtaacggccagtctatttttagctataatacttatgatatgttattatatacgagtattctgacttatgatatgtgtttatatgtgtatctgaaattctttatctaaatatgtatctaaaattataaataaaaa

SEQ ID NO: 11631 - DNA, 403 bp, Zea mays
  Clone ID: LIB3157-013-Q1-K1-B9
ccatgattgaccagggtgaaaaggatgacagataatagcagtctgtgctgatgatcctgaatatcgtcactacaacgacatcagtgagctgtctcctcatcgcctgcaagagatcaagcggttctttgaagattataagaagaatgagaataaagaggttgctgtcgatgcattcttgcctgcgaccacagctcgagaggccattcagtactccatggatctgtatgcgcagtatattttgcaaagcttgaggcagttgattggaagcaactatttatctgggcgtcttggaatgagtgtgattctaataagtcaaaacacttgattttgtgtgcaaaatctggggttgagaacaatggaactagctgtgatttacttctgggaacttgcatttttttccttg

SEQ ID NO: 11632 - DNA, 234 bp, Zea mays
  Clone ID: LIB3157-013-Q1-K1-C1
ctaatttctataaacttagtcataaactagtattttggaaccacctcaatttctataaaccagtttcttaaaaactaggtgtttccaaaaaaaaaaaaaaaaaaaaaaaaaaaaaaaaaaaaaaaaaaaaaaaaaaaaaaataaaaaaattaaaaaaataaaaaaataataatatatatattttttaaatttttatttatttttttattgtatatatattgttttattaaataa

SEQ ID NO: 11633 - DNA, 401 bp, Zea mays
  Clone ID: LIB3157-013-Q1-K1-C10
cggacgcgtgggtttgggtacgaaggatatgcggccttcctactaattttgattctaactattgctatgcattaggctatggtgctggtgcccttctccaaagtgggaagacaggacttatttcgtcggttggcaaccttgcggctccagtagaagaatggactgttggtggaacagcattgacatcactgatggatgttgagaggaggcacggcaagttcaagccagtgatcaagaaggctatggtggaactcgatgctgcacctttcaagaaatatgcatcgttgagggatgagtgggccatcaagaacagatacatcatccctggccccatccagttcagcggccctggaagcgatgactcgaaccacaccttgatgctggaacttggtgctgagtta

SEQ ID NO: 11634 - DNA, 407 bp, Zea mays
  Clone ID: LIB3157-013-Q1-K1-C12
ccggcagggataccaggcaaccatcactcacagtggtcgagcatcgggctcgcttcttccactgctgtcactgctcgcgatctatgggcggtacgctgcttttgctgcctcgctcgctcttcagattgcataactccataccataaccaatgtaatgaaggctggctggtgttcgggcttgagatttcgtgttccattttgttgtgcagcactcgtcgttctcggctcaaggccagctatcagcttcggtgccacctcacgactgcaagatgtatgtcttgacgccgaactagctcagaagacaagagcggattgttccatggcgcgtgggatgcaaccattcggtcaggattcagggaagaagagtatgcagtgcaggcaaggatttcaagagaaggaaattcgat

SEQ ID NO: 11635 - DNA, 103 bp, Zea mays
  Clone ID: LIB3157-013-Q1-K1-C2
aaaaaaaaaaaaaaaaaaaaaaaaaaaaaaaaataataaaaaaaaaaaaagggttccgcttaattggaaaacttcggcgcggctctgctttcattatctttaa

SEQ ID NO: 11636 - DNA, 352 bp, Zea mays
  Clone ID: LIB3157-013-Q1-K1-C3
cgcaagatgaaggacaccgactccgaggaggagtcaaggaggccttccgtgtgttcgacaaggaccagaacggcttcatctccgctgctgagcttcgccatgtcatgaccaacctaggcgagaagctgacggacgaggaggtggacgagatgatccgtgaagccgatgtggacggtgatggccagatcaactacgatgagttcgtgaaggtgatgatggccaagtgagatatgcccgccgtttttaagctagttcctctcctgatggtagtaactagtctagtattggagactgactgcttttggttgtgtcttacgcctattcctgcgtcaatggacatatccgtttggtt

SEQ ID NO: 11637 - DNA, 290 bp, Zea mays
  Clone ID: LIB3157-013-Q1-K1-C6
ggagaaggctagagcggccttcctcgccagggcaaggccaactccgaggctaccctcggcacctacaagggtgatgctgccgccgacaccgagagccttcacgtcaaggactacaagtactgagttgcttctctttgcgatcccgttgttttggaactcctgcctgcgagtaggttgctgagtgttgtttgcttgttagagcttttatattcggacatgaaaaaaacatgcttcctatgtggatgatggttatctttatattcgtatattaactactagtctctgttgtt

SEQ ID NO: 11638 - DNA, 327 bp, Zea mays
  Clone ID: LIB3157-013-Q1-K1-C7
ccaagttctccatggccccgttccagcattcacctacctgctggcaaagcccaccaagggccttgtgctcgaggccccaactgagacagtagaggcttatgatggtttgagtggagagctctactcgtcgggtgcttgtctaaatgcggtatctatattatagctaagaactgccggagtcgattttgggttctgttttgtcctggatgctgttctgtactgtcaagttttggattatgctatggcactttttatcgatgaatgctacataatgatctcatgatagttgttttttaaaaaaaaaaaaaaaaaaagggcgggccgttc

SEQ ID NO: 11639 - DNA, 339 bp, Zea mays
  Clone ID: LIB3157-013-Q1-K1-D11
gccggtgtggttctagcttcctagagttctactctacgggtgctgtgaaagtccagtgtgttggactggatttgtattcgacggagggcgagttgtatagttctcccacaatggcttccttttgaggggtcaaggaccactgagttgtgatgtaattacttgctgaagtagctgtcgaaggggggagattgtgagtgcttaatattccactatcctcgtgctttactttctgcctgttgtagattcatagatttaaatgttggtatggtgtgacataatctatcatccgatgactctagtagcgtgattgatttgaggaatgagatagttcattatttc

SEQ ID NO: 11640 - DNA, 84 bp, Zea mays
  Clone ID: LIB3157-013-Q1-K1-D2
aaaaaaaaaaaataaaaaaaaaaaaaaaaatatttttaaaaatctttaaggagaaaaatttaggatgttcgttagggtctctct

SEQ ID NO: 11641 - DNA, 221 bp, Zea mays
  Clone ID: LIB3157-013-Q1-K1-D3
gaggaataatatgcccgcttgtatccataattctgttcttaactacggaataagccgccgcagctttagcggcaaacgtgactagtactgtcagaacctaccattgttatttggtacaattggtaaataatattgttttaaactggattttcgaacaaaaaaaaaaaaataataaaaaaaaaaaaaataaaaaattataaaaataaaaaaaaattagtttt

SEQ ID NO: 11642 - DNA, 141 bp, Zea mays
  unsure (1)..(141): unsure at all n locations; Clone ID: LIB3157-013-Q1-K1-D7
naaaaaaaaaaaaaaaaaaaaaaaaaaaaaaaaaaaaaaaaaaaaaaaaaaaaaaaaaaaaaaaaaaaaaaaaaagggaaaaaaaaaaaaaagaaaaaaaaaaaaaaacagaaaaaaaaaaaaaaaaaaaaagaaaaaaaa

SEQ ID NO: 11643 - DNA, 190 bp, Zea mays
  Clone ID: LIB3157-013-Q1-K1-D9
taataaaaaaaaataaaaaaaaaataattttaaaataaaaaaaaaaaaaaaggttgggcgatttaatagtaaaaaagaaaaacatactcatacatgcatcactattatttctaatattgtgtaaccttaaattcaaataaatagaccgttgggggtcctcgtttagattgggaaatccctgtctttgccc

SEQ ID NO: 11644 - DNA, 392 bp, Zea mays
  Clone ID: LIB3157-013-Q1-K1-E1
tgcattcctggctaatgtgaaggagctgaacgccataggcagaccagagaggataccttaagacaagcttatgagatcttcggtcctgaaaacaaggacctgttcaccatttttgagggcctaataagtcgcaatattcgctagtctcattacccatccttactagtgattcaagttttaccggtatattgttattacgatattcatcactgtttgtatttgaagtctgtggtctgttacggattcttggtatatagtagttctatagttcatcttttcatgcttatgtccatgtagaattctgggtttgtctggaagctacaatttatattccaatacaaatggaagctaaaattgtacgtaccaacttgcatatttctacattatttatt

SEQ ID NO: 11645 - DNA, 411 bp, Zea mays
  Clone ID: LIB3157-013-Q1-K1-E10
gtcaagtgcatgtttctgaacatcattgtcatactgtactatccaagtgctgttgagacacttttttctatcaatcgtgatgtaacagttggtaaaaaaaaaaaaaaaaaaaaaaaaaaaaaaaaaaaaaaaaaaaaaaaaaaaaaaaaaaaaaaaaaaaaaaaaaaaaaaaaaaaaaaaaaaaaaataaaaaaaaaaaataaaaataataaaaaaaaaaaaaaaaaaaaaataatttgggggggctcttttataattacaaatttttttaatgcgtgatagaatatttaatttttttttatagtggaccctaaatatattatagtggggggattttaaaacaagttttaattggaaaaaacatttgttttcaaaaatattattagctttgttaaaaattctaattttttt

SEQ ID NO: 11646 - DNA, 126 bp, Zea mays
  Clone ID: LIB3157-013-Q1-K1-E2
aaaaaaaaaaaaaagaaaaaaaaaaagaaagaaaaagaaaaaaaaagaagaaaaaagaaaaaaacaaaaaaaaaaaaggggagggagcaaacaacagaaggaagaaaagcgacgggccgagcgagc

SEQ ID NO: 11647 - DNA, 419 bp, Zea mays
  Clone ID: LIB3157-013-Q1-K1-E3
ctgcgcaacaaatttcactactgagcagccagatccaaccactccagctgagctagaaaaggttatagggaaggtgaagacaaggaagtacggcagcaagatcattgagctgatgaggtcacatgacaattcaggaagtggccgaggcaaggaggctggcgatgaacacagagctaagaagatcaaaacgaaggatgaggatgttgtttgtgttgagagtagcgaggaagaatagaatatgcccttcacatacttggctttttagtctatcatctcatggttaattattttgccaatcatttcctccgacgtcatctttctgtaatttagactttcacggattaatgcacagtcatatttcttacagagaaagcctcgagcatccttttgaccggttcatagtcttttgcttcggtagc

SEQ ID NO: 11648 - DNA, 143 bp, Zea mays
  Clone ID: LIB3157-013-Q1-K1-E4
ctcaaaaaaaaaatataagacgcgtaatattttttctaaaaaaaagaccatgtacttataaaaggggagaaattaaaaaaataaaaaaagtggtctcctttattttgaataattgtcttacatataccatttatattacaatt

SEQ ID NO: 11649 - DNA, 260 bp, Zea mays
  Clone ID: LIB3157-013-Q1-K1-E5
gtaccgatgaagactgtttgcttgtgtctatttttaaaataaaaattcttaaaaaaaatgagaggggatattaataaataagagtaaagtgggccacacaaacttaaattaacatcttaaccggcaccggcaagcgatttttattagtccttttatagtgagcgcgcatttctttttgttcggggggggcgcccccaatgggtcccagttttcttccccgttgtggccccccttgttttgttttttgtgggggcccccct

SEQ ID NO: 11650 - DNA, 348 bp, Zea mays
  Clone ID: LIB3157-013-Q1-K1-E6
gactagttctaggctaaacagtagtattactttgttgtcttcaaaaaaaaaaaaaaaaaaaaaaggaataaaaaataaaaaaaaaaaaaaaaaaaaaaaaaaaaaaaaataaaaaaataaaaaaaaaattaataaaataattaaaaaaaaaaaaaataattataggggggggcctttttaaaggaccaatgttatcttacgtttgcttggaaatatataattttttttttgggccaccaaaataaaattttcgggcgggggtttaaaaacgtggggttgggaaaaacctgggttgttaccaaattaattttttttgagaataatcccctttttgtaatttggtgtaat

SEQ ID NO: 11651 - DNA, 358 bp, Zea mays
  Clone ID: LIB3157-013-Q1-K1-F10
aaaaaaaataataaaaaaaaaaaaataatatatccgggggccctctcgtagtggcaagaatgggacgccctggttcctgcgggctgatgtgacttttatggggccaaacttaataactgtagcggcctgagttgtacatggtgccacatgaaacaaacgagctgctccccatattaaggtggtggaacaacatcaccttctaggcaggtgtggtagtattgaggatgctcatgagctgcaaccataacagcagtttcaccatcttgatctatactacgacgcgctaatgtaaaatgatcataaacgaactgttgttatgttggtttgcttattcgaggcctttcttgttggaaggttt

SEQ ID NO: 11652 - DNA, 405 bp, Zea mays
  Clone ID: LIB3157-013-Q1-K1-F4
gtttcatgctgtatgcttagacacgagccccccatcttctatatgaatgacacgtcacaccggataattagccttgtggaaaaatggaaccactcagaaggaaccccacaggtcgcttacaccttcgatgctgggccaaacgctgttctaatcgcccaaaaccgtaaaactgcagcacatttcctccagaagctcctatactatttccctccacaggataatgatttgagcagctatctggttggcgataaatcaattctaggtgacgccggattgcattccatgaaagacgtcgaggctcttccagcacctccagatacgaagataccggatcagaaattcaagggcgatgttagctacttcatctgcagcaagcttggggcaagtccaaaggttgttgttgac

SEQ ID NO: 11653 - DNA, 163 bp, Zea mays
  Clone ID: LIB3157-013-Q1-K1-F6
ggccagagtgttgcggaatgtatgttatcatctcttctgctagagcttttctgggttgctgtgtgtttgaaacctcactgtacatgtgcttacatgcatgaaggagcatggttgttggtttgtgtttaatcttcttgtgaattagcatgtgtattttccttgt

SEQ ID NO: 11654 - DNA, 311 bp, Zea mays
  Clone ID: LIB3157-013-Q1-K1-F9
taaaaaaaaaaaaataaaaaaaaaaaatttatatatataaaaaaataaataaaaaaaataaaaaaaaaaaataaataaataaaaaaaataaatataagggtctccgtttttatatttacctttattatattcggttgcctgcgctgtttgttcatttttttcgcccctttattctaatttaataagttcgttgtttttctccttggttcctttaatatccctgcctttccccaacttttatctctgtgaaaccctataaacctttcctctttttgcattttttttggatttgcccctttttctcctttttt

SEQ ID NO: 11655 - DNA, 256 bp, Zea mays
  Clone ID: LIB3157-013-Q1-K1-G1
cggacgcgtgggcggacgcgtgggttggattagtgttggtaccctgttgttcgctttggttgctcccgctatgaaacgagacgagagaagaatgagcaaggtttttgttcttaaaaaaaaaaaaaaaaataatttaaatataaataaaaaaaaaaataaaaaaaataaatatataaaaaataaaataaaaatttatattattaaaataatattaaaaaaaaaaaattaaaaaggggggccgtttttaaggtccaaa

SEQ ID NO: 11656 - DNA, 214 bp, Zea mays
  Clone ID: LIB3157-013-Q1-K1-G10
aaaaaaaaaaaaaaaaaaaaaaaaaaattttttaaaaatataaaaaaaaattaaaaatgggaggaaataataaaataatataataaaatataaaaaaaaaaaaaatttaatttaaaaatataaaaatataaaaattttggtggggttattttgggtgggccttttttttttgctcctttttttcttcctgttgtttttttttttggggtccttt

SEQ ID NO: 11657 - DNA, 352 bp, Zea mays
  Clone ID: LIB3157-013-Q1-K1-G12
aaaaaaaaaaaaaaaaaaaaaaaaaaatttatataaaaaaaaaaaaaaaaaaaaaaaaaaaggaaaaaaaataaaaataaatataaaattgtatttaattatatttattaagttaaattataatggttttaattttattataattttttttataattaattatattttggggggggggttttttgtttatatatgtttttggtgggtttttttgatttttttttttttttttttttgggtgtttaaaataataatttttgtgggggtggttttttatattttttttttggggaaatcctagttgtgtttttcttttatttttttttttttttatagtattattttttttttt

SEQ ID NO: 11658 - DNA, 89 bp, Zea mays
  Clone ID: LIB3157-013-Q1-K1-G6
ctctctatgtagtaatgtgtggccagtgggtctttgatccagatgtattcgctcgtgagtggtgagtcgtggaagttgatcgtttcagt

SEQ ID NO: 11659 - DNA, 97 bp, Zea mays
  unsure (1)..(97): unsure at all n locations; Clone ID: LIB3157-013-Q1-K1-H1
taaaaaaaaatantattgaaaaaaaaaataatttttaaaaaaaaagggcggaaaatggatagtggcggataatgggtgtatttataatgggcggccg

SEQ ID NO: 11660 - DNA, 290 bp, Zea mays
  Clone ID: LIB3157-013-Q1-K1-H2
gcagctgagcgtggatgacggtggccataagtgacgaatatttgtactttgctctaggttggctggggtgagtacaaaccgattattaacacctgtgcattgatggagcacttgcttgtaaactggttggggcagcagtaagcctgatcacagaatgtccttggctgttttcattcacatattgaggggcctacaaaacagcctggagaagccagggatattttgttatctatattaacaatgaaaacactatcaacgccagagagacatatgaaacggtgtgatgctga

SEQ ID NO: 11661 - DNA, 203 bp, Zea mays
  Clone ID: LIB3157-013-Q1-K1-H4
gaatggtcgaccacgcgttcggaccaatctgcaacagaaaatgagatttttttacctttactaggctggttgaaaggctacgcgaagtggtacttggaagcgaggagacatctgcactttcacatgctaggatgacgctggcactgaccttatatgctggtccccaagtgatgagtaatcatcttcaccgatctcctgtcatt

SEQ ID NO: 11662 - DNA, 294 bp, Zea mays
  Clone ID: LIB3157-013-Q1-K1-H9
gctttctgagcatcatcgcagtagctgttgcggctgcgtgccctacgagtggctattgctaggccggtgcaagaacttcagcgaaggctgttaattctagcaattgggagtctgggaccacaggaaccattttgtgtatgaaactttattatatttagttcaatgctatttggctcgtgtcccaggagcatagtgtttttgttctataatcagattattaacttgaaagaatggcctttcgacgaattgaaagagcccactcaaggaacgattaataattgatgtttcatgtgg

SEQ ID NO: 11663 - DNA, 424 bp, Zea mays
  Clone ID: LIB3157-014-Q1-K1-A11
ccctgccgcctcaccgcctctctcactctgataccgcagatccgtcgtccggtgagtggaagccgcacgaacccatggcctccggcgagcttgcctgcacctacgccgctctcatcctcagcgacgatggcatcgccatcaccgccgagaagatcgccacgatcgtgaaggcggccaacatcaaggtcgagtcctactggccggcgctcttcgccaagctcctggagaagcgcaacgtcgaggacctcatcctctccgttggatctggtggcggagctgctccagttgctgctgccgcacctgctggtggtgctgcggctgctgctgccccggctgtcgaggagaagaaggaagaggccaaggaggagtctgatgacgacatgggcttcagcctgttcgactgaggagaccccctcacccagcc

SEQ ID NO: 11664 - DNA, 253 bp, Zea mays
  Clone ID: LIB3157-014-Q1-K1-A12
ccatgaaccctaacctactgtttcactttttttcttttatatcccacaaccggtggggggtgattccacaaacccatggctctccggccagctagcctgcacctacgccattcttatcctcagcgacgatggccttttctttaccgaccagataatcgtcacgatctttatggccgtcaacattaatgtagattactacttggacggtgctcttcgtcaaacttcattaaaagcgcaacgtcaagaacctcat

SEQ ID NO: 11665 - DNA, 229 bp, Zea mays
  unsure (1)..(229): unsure at all n locations; Clone ID: LIB3157-014-Q1-K1-A2
gctctgtactagcagtttgactactggctagaatggggcagctcttctccccttgttcttgtgttattcgcctcaacgttgtaaaactgaattcagaaaattttaaatatagctggcatttggtaaaaaaaaaaaaaaaaaaaaaaaaaaaaaaaaaaaaaaaaaaaaaaaaaaaaaaaaaaaggaaaaaaaaaaaaaaaaaaaaaaaaaaaaaaaanngggggggggg

SEQ ID NO: 11666 - DNA, 147 bp, Zea mays
  Clone ID: LIB3157-014-Q1-K1-A5
cacctaccggtgtacctgctcaccgcttgttgtgacccgctaccacatcaggtgcgtgtgccggcatcccaaggacgccttcgtctcgtggtggatctttgacaacagcatgctgcgcaggggcttctcctgctactccggggacct

SEQ ID NO: 11667 - DNA, 418 bp, Zea mays
  Clone ID: LIB3157-014-Q1-K1-A7
cttgaatcaggtccgaccatagtgaaggcccggaccatgtggaggcctaagggaaccaaggcccaagaaacagcggttccatcttcattctgattttgtcagatgttcgagatggtgactttggcagcaaactatctggcagaagatcagaatggttactagcatcctctattggaagcaaatcacacggaccgtgacctaaactaatttaactatgaagtgtgaccaatagaggagatataagtggggtcacaatggaggagaccaaagcggggagatcgaagacaaaggaggcctcctgtgcatggtttgtttctgtttccgcctttcgagttctttcttacgacaatcttgggtcgcacaaatgggtgttgtaagtattgatctgtagctacaaatgtatgatgggggagtgatt

SEQ ID NO: 11668 - DNA, 359 bp, Zea mays
  Clone ID: LIB3157-014-Q1-K1-A8
gggagaacgtggacagtgctcatgctgctttcaataaggactacaagctagctaatcttatcttgtcggaagaaggatccgattccatggaagaaaatgccaaaggtcttggtttataaaaaaggcttctgggggcgactagcttatgagttggttattttatatcgtcccaatttcgcggatcgcgcttgcgtattctgtgaatcaatcaacccaagctattgttatgaaaatgtgcgcgatgttagcatgtgaacttgcgaaaaaacacatgctggatcagtctgaataagtgagtatgccgctctatgtggtcatgtgcgactaccacaatgagcatgtacgtatggtgaaatatc

SEQ ID NO: 11669 - DNA, 132 bp, Zea mays
  Clone ID: LIB3157-014-Q1-K1-A9
gtacgtacgctttaccactgtgtcagtgagtatctctttgtatcagcacccctgctgtgtgcataccaagcaagtgtttatatgggctgttatcattcagtggcgcagcaagaaacctgatcgcttgcttcc

SEQ ID NO: 11670 - DNA, 225 bp, Zea mays
  Clone ID: LIB3157-014-Q1-K1-B1
gttcctcaggcgggatcctgcgagggttccgccacgcatcaccgcactctcggtcgcattggcagccgtgctgcttgccgccatgcttggatgaacatcaaccgagagatgcacggcctgcttcaactcttgtctactgttctagatatactgtacttttaattactattcccactgtattcccaccgttgaagcacaacaacgcactgaactaaacgacgaacg

SEQ ID NO: 11671 - DNA, 162 bp, Zea mays
  Clone ID: LIB3157-014-Q1-K1-B10
ttgcatatcaaatagaatcacaagttctttggttatcacatgacacatactttagattctcttttactgtaaaagaaataagaatctctttcttatgttgcaatatgtgtcttctgtcaggtagaaattatatatgttgattagttataacatagtgtactc

SEQ ID NO: 11672 - DNA, 117 bp, Zea mays
  Clone ID: LIB3157-014-Q1-K1-B2
gcttgtacttcatcgttttatttttggtagttgaaatatggacttatgaatcatctttagttaagttgtacagtgctgttaactatttatactagtttttgagcggctatttgtact

SEQ ID NO: 11673 - DNA, 297 bp, Zea mays
  Clone ID: LIB3157-014-Q1-K1-B4
cggacgcgtgggtccagctacaatacagcacaacacattctccatggtgcgttaaatctgagtagaaagcaccaaattggagggttttgctgcactcctgcactagcatttgatgacctgttactcttggcagtgatgcagattggatttagccccaaattaggctaattgaagtgaaatgctgtaatatttatccttttatcaattatccccaagattaatagcaacacttgtggccttttggttcggcgactttgtaaaactcttcgtttcttatgtgccatctcaattttgtac

SEQ ID NO: 11674 - DNA, 416 bp, Zea mays
  Clone ID: LIB3157-014-Q1-K1-B5
ttccaattggggcgctagccactgcacttgctaacgccccaccagatcagcagagacttatgcttggtgagaacctgtatcctcttgttgaacagctggaacgtgagcgggctgccaaggtcactggcatgctttgggagatggatcagacggaggttcttcacctgctggagtcgccagatgctctgaaagccaaggttgctgaagccatggaggtcctccgctctgcccagcatctccagcagagcaatgtttctactgagcagcaactggctaatctatcattgaatgatggcgtcgtctccagctgaacgttaatgtttctgatgtttcggaagtgctgccagtttttgcttgaatactaccctatctagagtgtaatgactttgtttacttggcttgctggagttttagct

SEQ ID NO: 11675 - DNA, 391 bp, Zea mays
  Clone ID: LIB3157-014-Q1-K1-B6
cacctacccctttccctgctcccgccggacgtgtccggctaccgcgtcgtgtacctgtgccggcatcccaaggacgccttcgtctcgtggtggttcttcgcgaacggcatgctgcgcagaggctcctcctcctcctccgtggacctcgacgacgcgttgagcatgttctgcgaggggttctcgccgttgggccccttctgggagcactacctcgagtactggaaggcgagcttggagaggcctcagcatatcctgttcttgaggtacgaagagatcgtggcagacccggtgaaggttgtcaagacgcttgccggcttcttctctgacccgttcactgaggcggaagagagaggaagagtccccgagcaggtggcgaggctgtgcagcttcg

SEQ ID NO: 11676 - DNA, 421 bp, Zea mays
  Clone ID: LIB3157-014-Q1-K1-B7
cggacgcgtgggtttcaacaaacatctctttcaatacgtgagaacaataatttgatgtcattgagacaatgggttggtgaggcaaaaaaaggtccatttcatgttctttagcgtgatatcaccatttcgtggatggtagacttttctggtggaaaatttgcacagccgcaccatgggagctgcagtattcttgtgtaccgacctcaatttgacagctctactgtgacaacactcctgtagcctgtttgtttgatcgttacggatgcattcgacagggaagctgcattgtgcattgtcgcttctagtgtgacgtgtacatgattaatccatgggttattgcgtcaccgttcaagggggttcatggtcaagtagtaattatttcatatttaaaccggtcgccttgtcagatgactagactgaa

SEQ ID NO: 11677 - DNA, 140 bp, Zea mays
  unsure (1)..(140): unsure at all n locations; Clone ID: LIB3157-014-Q1-K1-B8
gggtcgcgtgggtatgaatacatgatacatgccgtacntgtggatcctaggatgcctatgcatgcacaccactagcgggaggcactactacgactattacatgctttctacggtgagcaccaaattgagagggacgagat

SEQ ID NO: 11678 - DNA, 162 bp, Zea mays
  Clone ID: LIB3157-014-Q1-K1-B9
ttgcatatcaaatagaatcacaagttctactgtgaacacatgacacaaactttagattctcttttactgtaaaagaaataagaatatctttcttatgttgcaatttttttcttctgtcaggttgaaattatatatgttgattagttataacatagtgtactc

SEQ ID NO: 11679 - DNA, 293 bp, Zea mays
  Clone ID: LIB3157-014-Q1-K1-C1
gctgtcgtcgctgccgtccacgtcctcggcctcgtcgacgacaaccgtgagctccacggcgtcctccggcgcgccgccgaccaaccgcctggactggatgctgttctgacgggcgggcgagtgcagtgcagcccggcgccggccggccaccggcacgaaagcagtcaagccggatgtggggaaagcggaagcggagtgcaaaactgcaatgccatgcaatgcttgggtgccaaaattggcacccctggaaaaaatttgggggcttcattgatgggcaccggcttacttacttg

SEQ ID NO: 11680 - DNA, 355 bp, Zea mays
  Clone ID: LIB3157-014-Q1-K1-C11
gcgatttgctcaagttatttgtcgtttatgaattacttgctttcctcaacccgggaagggcaatattggactgagtaaaagaatgtggtcaacactgtcatcaatggacactgttatttggtctagcgggccccgtactggctatataatctatatatgcgggggggcccttttaggggtcccttgtttacttccccggcgttggaaggttatattttttctttgtggtccccttattccatttgactggcctaaccttttacaccgtgcgtgcgggaaaaccccgggcttaccccactttattgcctttggagaccttccccttttctggggttggggtttttgccagggggcc

SEQ ID NO: 11681 - DNA, 404 bp, Zea mays
  Clone ID: LIB3157-014-Q1-K1-C12
tgttggtgtgctgcttgtgattgttgttttttcgtttgtatcacgtgctactgggatatcttatatattacacgccacttgttagtatatgtttgtataagctctaaaaaaaaaaaaaaaaaaaaaaaaaaaaaaaaaaaaaaaaaaaaaaaaaaaaaaaaaaaaaaaaaaaaaaaaccaaaaaaaaaaaaaagggggggccgttttaaaggatccaaatttacttccccgtgcatgcaaagtaaaagttttttaatagggtaaccaaaattaaattaactggccggggttttaaaacgtcggaactggaaaaaccctggcttaaccaaacttaatcgctttgaaaaaaaacccccttttgccagttggggtaaaaacaaaaaggcccgcaccaatcgcccttc

SEQ ID NO: 11682 - DNA, 184 bp, Zea mays
  Clone ID: LIB3157-014-Q1-K1-C2
cttccctttcatccatattccattcggcattcgattcagtaggactggcatatctgttcgtgttactacagtgtaggatcgtggcttggacagattggtttggctggctggctggttgggtgggcccggtggtgttgtgggtttccgttcttccatctgattaataccctgtggattttccttc

SEQ ID NO: 11683 - DNA, 60 bp, Zea mays
  Clone ID: LIB3157-014-Q1-K1-C3
cttggtcaatggaagttgttcatgcgcttcttcattgctgaaagtgttgtcatcttgtcg

SEQ ID NO: 11684 - DNA, 115 bp, Zea mays
  Clone ID: LIB3157-014-Q1-K1-C4
ggccagtggcccacattgcacatggtgggtgcgctggcttaccatctccccaagtgggagagtggacgtcataatttgtggtagagggggtacgcgttcgcgcggcccccgcttt

SEQ ID NO: 11685 - DNA, 237 bp, Zea mays
  Clone ID: LIB3157-014-Q1-K1-C5
taaaaaaaaaaaaaaaacaaacaatttttttttaaaaaaaaaaccaaaaatcggggggatttaaataaaaaacacaaacaacggacgcccgatctaaggggttcccccttctagacgctccaagctctcgtccccgtgcttccgatcgtataccttaaatttaatcgcccctccgttcttttacatgcccgtttttttacaaccccttgcctggacaaacctagtcgtttgccacca

SEQ ID NO: 11686 - DNA, 215 bp, Zea mays
  Clone ID: LIB3157-014-Q1-K1-C7
gaaaatcaatgacaaaaatgtagagtttttatgaaagtcaaaatagagatagatgatttacgctaaaaaaaaaaaaaaaaaaaaaaaaaaaaaaaaaaaaaaaaaaaaagaaaggaaaaaaaaaagggggggcgccctttgtttttgttgttaataaatgggggggggggcgcgagaactgggattaaaaaatgtttttttaaaaaatggaacaa

SEQ ID NO: 11687 - DNA, 256 bp, Zea mays
  Clone ID: LIB3157-014-Q1-K1-C8
cggacgcgtgggttgttttagatgctctatgctgtcgaagctgaagctgtgccgtgctattattgtagctgatttcctgttccctcacttctttttttatattagtaggctggtagtgttcgaattagttccccattgctttgtgttgccgctagttggcattaagtccgtgtggactggtattattcactggatttgagaagcatgtcagtggttgctctagcgttttattgagttttgaagtcatctccctcac

SEQ ID NO: 11688 - DNA, 106 bp, Zea mays
  Clone ID: LIB3157-014-Q1-K1-D10
ggcttatctcggtttatttcttcttcatactctacctgagtgggaacttttgatgctgagtttgtcttatgcctatttattttaagtcgaatgaaatatgaaggcc

SEQ ID NO: 11689 - DNA, 375 bp, Zea mays
  Clone ID: LIB3157-014-Q1-K1-D4
cacggagctgctcatccgcaagctccccttccagcgcctcgtccgcgagatcgcgcaggacttcaagacggacctgcggttccagtcctcggccgtggcggcgctgcaggaggccgcggaggcgtacctggtggggctcttcgaggacaccaacctctgcgccatccacgccaagagggtcaccatcatgcccaaggacatccagctcgcccgccgcatcaggggcgagagggcttgagctgtcgcgctgctgctgttcgtcgttgtaatgtctgaagtatatggtggtgggtgctttctatgccgtgcctatttggctatttcggacgtgttgtcctcactgaatggaaaatggaatgcgattgctcgtctggg

SEQ ID NO: 11690 - DNA, 198 bp, Zea mays
  unsure (1)..(198): unsure at all n locations; Clone ID: LIB3157-014-Q1-K1-D5
aaaagcngcacccacccacgcgtnnnaaaaaaaaaaaaaaaaaataaaaatttattatttcataaaaaataaaaacgcgggggtatattcaaaaaaaaaagcccccctctaattaaaacacctctctaaaaaagtactgcggcttatataaacaatactcattaatgcctctgtgcccctccacccattttttttttt

SEQ ID NO: 11691 - DNA, 303 bp, Zea mays
  Clone ID: LIB3157-014-Q1-K1-D6
aaaaaaaaaaaaaaaaaaaaaaaaaaaaattaaaaaaaaaaaaaaagaaaaaaaatataaaaaaaaaaaaaaaaaaaaaaacatacatacaaaaaaataaaatataatataaaaaaacctgggcggccttttttggggttcaaattttcaatccccttgcttgcaaaactttagtttttttttagtttaacttaatttaaattcattgccctttttttaaaaaccttaatattgaaaaaaccttggcttttcccactttattacttttgcacaacatccatttttaatcagttggcgtattat

SEQ ID NO: 11692 - DNA, 191 bp, Zea mays
  Clone ID: LIB3157-014-Q1-K1-D8
ctattgggccatttgttgttggggaaaccgttgtaactagtgtaaatttcgttttttattaccatcatatatcataggtctcgtctcactatagtccgatgtgtattactagtatgtgtcgaagacctcaatagtttacgcgctaccatattttgatggttgcaacttaatctcagttttgcttgtcgtct

SEQ ID NO: 11693 - DNA, 225 bp, Zea mays
  Clone ID: LIB3157-014-Q1-K1-E1
cggacgcgtgggaaaaaaaaaaaaaaaatttatataaaaaaaaaagaaaaaaagtgggaaaatttaaaagattaaatacttatgtatgcaaaaattataactcttatattgtgaaataaaggttcctttttttgtgcgttgttttttaattttacatcttggaaaatggtaaattttttttaatttaatacgtttttgaaaatatttgtttttcgctttttagct

SEQ ID NO: 11694 - DNA, 392 bp, Zea mays
  Clone ID: LIB3157-014-Q1-K1-E10
cgaggcggtggcgtcctgcgactacgtgttgtactcgcacaagccgggaatggccaaggacagtgccgccgcccactagagcatggtgtgacgagcaccgctacgccaaccgtatgtcatgtgtagtgcggtccggttacggtctgacgtaaccagtcttcacgcggaccgagatgaattatgtatacacgtgactcgagtattgtacacctgcaccgtcgagggaaaaacgaataaaggatcccacccgttttttttggtgtttaaaatgaattcaaataacaaggcttgtacaaaggtgggaatagggaggctacacaaaggcctgattcctagatttgacatgtggtttaggggctgctttcttaacgttcatattatcttgcatattg

SEQ ID NO: 11695 - DNA, 341 bp, Zea mays
  Clone ID: LIB3157-014-Q1-K1-E11
cggacgcgtgggttttttttttttttttttttttttttcccaatatataaagatgcaaaattaagagtcacaagtaactctgaaagaaaatacaaaattaaccaaggtactacaaaggtggcattgatgaggtctcggaatgacacttcgttccttttcagcgtttgccaccgccgccacccaacttggggcctttggaacccttctgaacagcacccttcgtctgcgccttctgggacttggacacctcagccttcttcgccttcttctcatccttggtcttcttgatgcgctccttgatctcacgaagagcagcttttctagcagcatcacggacttta

SEQ ID NO: 11696 - DNA, 233 bp, Zea mays
  Clone ID: LIB3157-014-Q1-K1-E12
cggacgagccaggcgcttctaggtagctttttttttcaaccagacctaacagggaggggatgatacttacattgttcttttactgcaaatactgaactagccactgtaagccaatggcggcagccttacatgcaccggaatgacagtcctaacgctctctgcctttggctctggtataaccaaaacagggtcattgcaaaccttgctggtccccccacttaggactcacattt

SEQ ID NO: 11697 - DNA, 417 bp, Zea mays
  Clone ID: LIB3157-014-Q1-K1-E2
gcgtacatcaccaccctgaacgtctgccaggcctacaccctgaagcggatccgtgacccggactaccatgtcgcgctgcgcccccacctctccaaggagatcatggactcgaccaaggctgcggcggagctggtgaagctgaaccctggcagcgaatacgcaccggggctggaggacaccctcatcctgaccatgaagggcatagcagccggcctccagaacaccggttaaaccacgaagaggggatcttttttctcctcctgatcattggctctaggtccttcgtattttcgcggattgtaacttcggccacctctctacaccgtgaggaaataatggtggtttctgcaaaagtggtggtaaataaaagggcgacaactatcttgtttttcttagtaacttataactttacgatgc

SEQ ID NO: 11698 - DNA, 422 bp, Zea mays
  Clone ID: LIB3157-014-Q1-K1-E3
gtcgccatgggtctgcaggaggagttcgaggagcacgccgagaaggccaagaccctgcctgccaccacgacgaacgagagcaagctcgtcctctacggcctctacaagcaggccaccgtcggcgacgtcagcaccggtcgtcctggcatcttcagcctgaaagagagagccaaatgggatgcttggaaggctgttgaagggaaatccaaggacgaagcaatggccgactacatcaccaaggtgaagcagctgctggaggccgccgccgcatccacctcctaggctactcaagggaaaacaaaaaccatgatccgcagtcgcatatacgtatacatgttgtcatgatatacgctcgccaataaatcttatcattgttgtactgcttggtatggcttctgatgccatatatactcatcaccctt

SEQ ID NO: 11699 - DNA, 107 bp, Zea mays
  Clone ID: LIB3157-014-Q1-K1-E4
ctggctttgtcgtttgtgggcgatttgtgaactagtagtatgtttgtttctatccgagccggaggcgatacttaaccatggatacttgttgtgagttcgtttctgtt

SEQ ID NO: 11700 - DNA, 374 bp, Zea mays
  Clone ID: LIB3157-014-Q1-K1-E5
aaaaaaaaaaaaaaaaaaaaaaaaatttatataaaaaaaaaaaaaaaaaaaggggggatattaaaaaaaaaaaaaaaaaaaaaaaaaaaaaaaaaaaaaaataaaaaaaagggccgccctttttgggggttccacctttccttccccgtgcttgcccctttatattttttttttggtgtcccctattttaatttctttgcccgtgtttttacaccgtcgtaattggaaaacccttgcctaacccaaattaattgcttttggggaacatccctttttccccctttggttttttagggaaaagcccaacccttgttcccctttccaaatatttgcccacctttatggcaaattggcccccccccttaaccgcccct

SEQ ID NO: 11701 - DNA, 367 bp, Zea mays
  unsure (1)..(367): unsure at all n locations; Clone ID: LIB3157-014-Q1-K1-E6
gtcctataattgactggttctgcactccccccaatccaatttcagaaaccgaagacgtttgagattgcggggtttgagtctcttgatttgtgcctagagattggttttccactttccacgaattgttggactgaaagaaaaaagatctataaaagggagtaagttgctgtnaaaaaaaaaaaaaaaaaaaaaaaaaaaaaaaaaaaaaaaaaaaaaaaaaaaaaaaaaaaaaaaaaaaaaaaggaaaaaaaaaaaaaaaaaaaaaaaaaaaaaaaaaaaaaaaaaaaaaaaaaaaaaaaaatggggggggccctttttaagaaaccaaatttaattaccggtggttggcaaaaaaaaattttttttt

SEQ ID NO: 11702 - DNA, 293 bp, Zea mays
  unsure (1)..(293): unsure at all n locations; Clone ID: LIB3157-014-Q1-K1-E7
catgagtcgtaaacaagatgaaagattccagtttcagtggcaatggatcaaagcataaggaatcaccatgggcagcacataagcattcccattttacttttaggactgaaaatcagatagatgtgttctagttgaaggggggggggggatgtgttctggaacttgggtaaatgggggaattctgaaaactgtgtaaatagaaaactgctccctttggatattgtgcatgcatgaagcaaaatgttatatctgaaaagcgcgtaccttgtacccgntaaaaaaaaataatagag

SEQ ID NO: 11703 - DNA, 173 bp, Zea mays
  Clone ID: LIB3157-014-Q1-K1-E8
gttttacaagtcgaagaactcctaggtcatctgttattacacctccaatatatccatgaatacaggaatgggcaactagtctgctatagcattctgttgatgcgagtttgtaaagtgacaggatttcgatttatttcaacaaacccatgtatatacaaacttttgaactctgc

SEQ ID NO: 11704 - DNA, 310 bp, Zea mays
  Clone ID: LIB3157-014-Q1-K1-E9
gcggtgagcctggtgcgactgcctgtgctgatccgacaacccattggagctgggatggcattcacctgacggaggctgcgtaccgccatatcgctaaaggctggttatacgggccttttgcggaccaaccaatcatccaatcctcatgatcacgccactcctgctgtagagtttcatcaaagtagcgcactggaaaaaaaatggagcgggggaaagtagttcttccatacagtttcaatgtttgcatacatgtacatctccattttgattggattcatttaacttgggtggtacaaaagtgggataggga

SEQ ID NO: 11705 - DNA, 311 bp, Zea mays
  Clone ID: LIB3157-014-Q1-K1-F1
ctattatctcacgaacatcaatcagcattcagacaacatataataattatattgacattggcaatggaacatggtatttgccatgtgcatccttttctctgttgaggtgtatttgttagatgtagcagctgtatattggcattatgatttttgctcctgcatacttatcagcaggtcgcaggatgtagtatgaaagggatacaccaatcagactgcaaaccttgtaagatgattgtggttaagctaagctgcaaatttgaactctgattcagttcaatttacacgttccttctattgctatgcacttactg

SEQ ID NO: 11706 - DNA, 346 bp, Zea mays
  Clone ID: LIB3157-014-Q1-K1-F10
atcttcacaagggcgaccatgaggagtgacgagagtgaaatgccgaatttgtagcctattcgagagagagagttgacggtcttgtccaataatcaatactggatttttaagactctcttcaacggtgttctcttcataaaatataaaatgagaaatatatgatacaatttatctaaaaaaaaaaaaaaaaaaaaaaaaaaaaaaaagaaaaaaaaaaaaaaaaaaaaaaaaaaaataaaaaaaaaaaaaaaataaaaaaaaaaaaggggggggccgttttaaagaaccaaattttacttccgcttccttgcaaatttttagtttttttttggggccccctaaatta

SEQ ID NO: 11707 - DNA, 396 bp, Zea mays
  Clone ID: LIB3157-014-Q1-K1-F11
agcggatcgacgcccgcaaccagctggagacgtacgtgtacaacatgaagaacacggtgggcgacaaggacaagctcgcggacaagctggaggcggaggagaaggagaaggtggaggaggccctcaaggaggcgctcgagtggctggacgacaaccagtccgccgagaaggaggactacgaggagaagctcaaggaggtggaggccgtgtgcaaccccatcgtgtcggccgtataccagcggtcgggcggcgcccccggtggtgatgccgacggcggcgtcgacgacgaccacgacgagctgtagatggtggtggggaagcgtgacgtggaatgcccggaaccaaagccaattttgtaatggtgtttagggggaggtggttggacaaaaaactaat

SEQ ID NO: 11708 - DNA, 168 bp, Zea mays
  Clone ID: LIB3157-014-Q1-K1-F2
gagagagagaggacaataaagagtttctgcttcctagctaggcccgttccgtgtcctggtcgttctttgattatttgttggcttgctgttcttttttttccttggggggagggtcgcgtttgtatgtgtttattacttgaatgaaaacaaaagtgagcttgttatatg

SEQ ID NO: 11709 - DNA, 407 bp, Zea mays
  Clone ID: LIB3157-014-Q1-K1-F3
gttttcagtcctgattagtacactgttttctaaaagcgattgagctctagtccaatgtattgataatttctgctgttgtcctattgcggtgatgtttaaaaaaaaaaaaaaaaaaaaaaaaaaaaaaaaaaaaaaaaaaaaaaaaaaaaaaaaagaaaaaaaaaaaaaaaaaaaaaaaaaaaaaaaaaaaaaaaaaaaaaaaaaaaaaaaaaaaaaaaaaaaaaaaaaaaaaaaaaaaaaaggggggggctcttttaaaggtaacaactttaaaaaccccggaattcaaacaaaatatttttttttaagaccacccaaaataaaaacctctgccgcattttaaaaaacgcgggatgtggaaaaacctgggaatacccaaaataaattttttgaaaaaaaatcccctt

SEQ ID NO: 11710 - DNA, 346 bp, Zea mays
  Clone ID: LIB3157-014-Q1-K1-F5
gcttgattgtgtcaagcaggtatggaagaacaggaaggacctcacggtcgaggaccttggcattgcgagtttatttggagttgagctctatgcatggttctgcgtaggcgagattgtcggcagaggtttcaccttgaccggctataaggtctagatgatttccactggtcaagacctgctttataattgatactcttagctgatgcttgtcgaaacgacgacgatggtacctgccttggttcacaattttgtttctttgtaagagtttacctagtgctgaatgccagcaaagacgggcacatcgttgcaacattgcctcaataatttgctcgctcaattgttgggg

SEQ ID NO: 11711 - DNA, 248 bp, Zea mays
  Clone ID: LIB3157-014-Q1-K1-F6
cggacgcgtgggctggaagtcatgtttcgtcattatgcagctgcttgtgcttctgctgcggcgtcggagcgatagaaccacaaacatcatctttgtacattctcgcaagagggcttatgcgcttaataattgatgaaattgagatatgtagttcgtctgcgcagttcagggctcaccctgttgctacttgatgctgctttggcattggttgttgtatcaaaacttatatttacgttgcttcgtgcttc

SEQ ID NO: 11712 - DNA, 337 bp, Zea mays
  unsure (1)..(337): unsure at all n locations; Clone ID: LIB3157-014-Q1-K1-F9
attttgagaagtcactgggtaaagacaactaaagaattcagcttgtgcaacagaaggcaatcgaatatgttcagagttcactgccgtcacaagacaactcttgaactacatggagacttaataagcccacaaccaatcattaggaaataccagtcgtactgtagatgtgatctctttgatgactccttgaacattattgtgaaaaggtcaatgtaaaatgtgggctgttcaaaattttgtttgaaaccgttatataagttatgagtctagtatgtcatgtttcacccaattntttggaaggaactattctaagccggatctggttcgaataaaanaa

SEQ ID NO: 11713 - DNA, 86 bp, Zea mays
  Clone ID: LIB3157-014-Q1-K1-G1
ggtttaccgaactccagttctcttgtcatttttctttattctatagtctgtattatgtatgcgtatgagtattgagatgattctgc

SEQ ID NO: 11714 - DNA, 429 bp, Zea mays
  Clone ID: LIB3157-014-Q1-K1-G10
ctccacctggtgctccgcttgcgaggtggtatgcagatctttgtgaagaccttgactggcaagaccataaccctggaggttgagagctccgacaccatcgacaacgtgaaggcgaagatccaggacaaagagggcatccccccagaccagcagcgtctgatcttcgccggcaagcagctggaggatggccgcaccctagcagactacaacatccagaaggagagcactctccacctggtgctccgcctccgcggtggtcagtaagccatggttcatttaagctgctgctgtacctgggtatctgcgtcgtctggtgccctctggtgtacctctatatggatgtcgtcgtctaataaacatctgtggtttgtgtgtcatgaatcgtggttgtggcttcgttggtttaatggacctgttgtgtcctctatg

SEQ ID NO: 11715 - DNA, 174 bp, Zea mays
  Clone ID: LIB3157-014-Q1-K1-G11
cttgacttgtagctccccttgaaaggtgttttgtattatcttagcaaaaaccttggctggttggaccataaccctgcaggttgagcgctctgactccttctgctgcgcgaaggcacagatcctttataaagagcatgtttacccggacctgtaacgcttgctgttctgccccga

SEQ ID NO: 11716 - DNA, 233 bp, Zea mays
  Clone ID: LIB3157-014-Q1-K1-G12
ctccaccttgagctcctcttgctaggttttttttatatcttagagaaaacctgggctggttagaccttaacccgggaagtcgaaagctcccacaccatcgacaacgtgaaggctaaaagcaacaacaaagagggcattcccccaaaccagcaacgtctgatctatcttcggccaagcagttggaggatggccgcaccctagcatactacaacattcagaatgagagcacttct

SEQ ID NO: 11717 - DNA, 119 bp, Zea mays
  Clone ID: LIB3157-014-Q1-K1-G2
cttttttatctcttgctctctagctacttttggctttatttcctgtctagacagcggattctgcataatgctaatgaactttcatatcaaataagattgctcagttatccataatgttc

SEQ ID NO: 11718 - DNA, 399 bp, Zea mays
  unsure (1)..(399): unsure at all n locations; Clone ID: LIB3157-014-Q1-K1-G3
cggacgcgtgggcggacgcgtgggcttgcatacattagtaaatatgtcgttggccttggtccatggaaggacactattgttccagcttcaggaaactacttgatgccacctagtgatcttgtcgcacgggcacatgctcataatctccaggtacatccatacacgtacaggaacgagaaccagttcctgcacttcaacttttttcaagatccctacaacgaatacgacttctggataaacactgtgggggttgatggactgtttacagatttcaccggaacccttcacaggtaccaagaattgacatccncacaccggaaggatgagactgcaaatagcctcctagtaaaaaatagccaaatgatctcagcatatgaaggtctctgatcagcacgacgt

SEQ ID NO: 11719 - DNA, 356 bp, Zea mays
  Clone ID: LIB3157-014-Q1-K1-G4
ctggcattctcatatacatgtcactagtggatctcattgctgtagatttcttgggtggaaagatgacagggaccctgcgacagcaagtgatggcatacatcgcattgttcctcggtgcgctctctatgtcatcacttgcaatatgggcttgagacctgcccttgatgaaatatcagacaaaagatgaagtagtgtccatatatagaatgtctgtggtatatgtacagttttaatgtgtagtattcatgcactgttttttaagggcatgaaaaaaaaaacaccgctgatgtactcaagggtgaactatgtggtttctttaatcgatgatcaagcaatgatatgtttgactgccgctg

SEQ ID NO: 11720 - DNA, 317 bp, Zea mays
  Clone ID: LIB3157-014-Q1-K1-G7
taagaaaataatgtttcttttttaagaaaataattgatggaaaatataagaattttgttaaaaggggggattgttttaaaggataaaaatatattttaacgttcatggaaaaaaaaaaatttttttaatgtaaatttatttaaaaatacttgggggggtatataaaattttggaataaaaaattaaaagtgttggttgtaaaaaaatatataatattttgaggggaaaaataataattttttttgaaaaaagttggtattatattaaaaagagagtcggggagaataatgtgtgttttttataaatttttgtataaa

SEQ ID NO: 11721 - DNA, 207 bp, Zea mays
  Clone ID: LIB3157-014-Q1-K1-G8
ggggggaagattacagggacccctcgacagcaagtgatggcatacatcgtattgttcctcggggcgctctttatatcataacttgcaatatgggcttgagacctgcccttgatgaaatatcatacaaaaaatgaagtggtggtcatatatataatgtgttgtggatatattacaattttaaagtgtagaatttatgcactgtttttt

SEQ ID NO: 11722 - DNA, 373 bp, Zea mays
  Clone ID: LIB3157-014-Q1-K1-G9
tttgaataataagatgcacctatatgtgtgtgttatatgtaaaaaaaaaaaaaaaaaaaaaaaaaaaaaaaaaaaaaaaaaaaaaaaaaaaaaaaaaaaaaaaaaaaaaaaaaaaaaaaaaaaaaaaaaaaaaaaaaaaaaaaaaaaaaaaaaaaaaaaaaaaaaaaaaaaaaagggggggcccttttaaggggaccaaatttacctgcccgggggtggaaagaaaaaatttttttattggggccccaaaaataaaataacggggcggggttttaaaaacgtgggaaggggaaaaccctgggggtaccaaaataaaaactcttggaaaaaaacccctttttcccagggggggataaaaaaaaaagggcccccc

SEQ ID NO: 11723 - DNA, 353 bp, Zea mays
  Clone ID: LIB3157-014-Q1-K1-H10
cctaagtctcggaccccaaccctcgaggtggtttaccggagatggcggcgtcggcgggggtggataagctcaaggtcctctgggactcgcaggtcaacgacgaggagcagtgggcgctcaattataagctgctgaaggctgttggtctgtttgcgggatccatcttcctgatgcgtgaacttcggtgatctgatggccatttagtaggcttatcagcgttgattacttggatcctatgagtgttgttttgatgttccaataattcctgctatgaatatgaaagtttttttgctctgaagaggacttgatctgtgccgatagtgcttgatcttagactttgtagccatttagat

SEQ ID NO: 11724 - DNA, 377 bp, Zea mays
  Clone ID: LIB3157-014-Q1-K1-H12
aataaaaataaaacaaataaaacaaaattttagtttataaaaaaaaaacaaaaatagggaggggataaaaaacaaaaagacaaaaaacacacaaacaaattaacttactcatgcacttcctcctgctttaaaaaaaaaaaggggcgctccttttaagagttccccatcttggaacccgagcttaccacaggctttgatcttttggtagtgtcctcaaaataaaattctggggcggctttattccaaaacacggcatgggaaacccctgcatctaccaccatttcatttacaaggaccaggcccctgagaacatcctgttgataaccgctctggcggcctcattttctccctttcgcatatttgggcgaccaagaaac

SEQ ID NO: 11725 - DNA, 418 bp, Zea mays
  Clone ID: LIB3157-014-Q1-K1-H3
cgaggcgcatcgagcagcagtcggacgagcagaccaaggcggagatcatgcaggtgctgcggaagatgttccccggcaaggacgtcccggacgccaccgacatccttgtcccgaggtggtggtccgacaggttctacaagggcaccttctctaactggccagttggcgtcaaccgctacgaatacgaccagcttagggcaccggttgggagggtatacttcaccggtgagcacacaagcgagcactacaatggctatgtccatggagcctatctttcaggtatcgactccgctgaaattctcatcaactgcgcccagaaaaagatgtgcaaataccatgtccagggaaagtatgactaggaagctacaggaaaattgatttaaagctccagcaaattgagcagtgtggatgttgcatt

SEQ ID NO: 11726 - DNA, 334 bp, Zea mays
  unsure (1)..(334): unsure at all n locations; Clone ID: LIB3157-014-Q1-K1-H4
gaagtaagagatctttgtgtttccatgttatcgcaaagtcttgcaggagttataaacatggtatcatgcttcaaatagctcgtacaatccatcggctttttctttgcttgcctcacgtttatggagttggaaatgctagttccttagtgagttgatagtagttttcaggttgcaatgtgagatgtaaaacgtttttttttttgctttggcccgtgatatcttgagccgggtctaacaccttcaagaaggattttccgttgatggattaaataccagtggggtcgaattgaatcatatgagataatatctcatcagttttgcnaaaccctcaagg

SEQ ID NO: 11727 - DNA, 417 bp, Zea mays
  Clone ID: LIB3157-014-Q1-K1-H5
cggacgcgtgggttcccagaacggttgtttcttagttgatttttcttccagagatggagaaatcgaggctattctgaaagatatatcagaaagggccaagggtaagggaaacttcagctacagccgattctttgcagttggcttgttccgtttgcttgagctctcaaatgcaacggagccaacaatactagacaagctttgcgctgcactaaacgtcagtaaaagaagtgtggatagggaccttgatgtttaccgcaacatactctcaaagttggttcaagccaaggaacttctcaaggaatacgtggatagggaaaagaagaagagagaagaaagatcggaagccccgaagccgaacgaagctgtcacaaaatttgatggaaacctttattccacaaggcattagaatcagccctt

SEQ ID NO: 11728 - DNA, 413 bp, Zea mays
  Clone ID: LIB3157-014-Q1-K1-H7
cggacgcgtgggcggacgcgtgggcaaattctttgttgtttgcaactttggataggcttgaacagctgttaagaaattcaacatgaagtttgatttttcctgtgaaaaatgtgtgattacgtcatctggcaactctagacaggattcttttcgcatgccatggcaaatcctgctgtataatataagtattaccacacaatattttccctttccaattctgatgccttctgtttttactcatttacctgactgtaatcttttttgcttctgcaggactgctgctttcctgtgctgattgcagtatttctagtggatgatctagcacctttgtggctttgtcgtttagcctgtgcggcttcattaatttcacaagtttgatgccagttgaagcaccgaggtgaactgtgaggaaa

SEQ ID NO: 11729 - DNA, 417 bp, Zea mays
  Clone ID: LIB3157-014-Q1-K1-H8
cagcaattgaggaagctggtggcccaaagattccaatgaaatacggacgagttgatgttacaggacctgagcagtgcccccctgaggggaaacttcctgatgctggcccaagttcacctgctgaccacttgagggaggtattctacagaatgggccttaatgacaaggaaattgttgccttgtctggagcacatacacttggaaggtccaggcctgaacggagtggctgggggaaaccagaaacaaaatatactaaaaatggtcctggtgcacctggtgggcaatcatggacagttgaatggctgaggtttgataacagttacttcaaggatatcaaagagaaacgagatcaggatcttctggtcctacctacagatgctgctttatttgaggacccaaagttcaaggtctatgcgg

SEQ ID NO: 11730 - DNA, 426 bp, Zea mays
  Clone ID: LIB3157-014-Q1-K1-H9
cctaagtctcggaccccaaccctcgaggtatggcgtaccggagatggcggcgtcgtcggcggtggagaagctcaaggtcctctgggactcgcaggtcaacgacgaggagcagtgggcgctcaattataagctgctgaaggctgctggtctgtttgcgggatccatcttcctgatgcggaacttcggtgatctgatggccatttagtaggcttatcagcgttgtttacttggatcctatgagtgttgttttgatgttccaataattcctgctatgaatatgaaagttattttgctctgaagaggactagatctgcgccgatagtgcttgatcttagactttgtagccatagagattagaccctttaatattcggcgtgtaccgtggatattttggaacgatggtatcagtctgcacccataataatt

SEQ ID NO: 11731 - DNA, 175 bp, Zea mays
  Clone ID: LIB3157-015-Q1-K1-A1
gcggaaagtgagcttgactgttgccggggtggaagtgtcgttttggactgatgatgagtgctgcggaggggtttgttgtttgtttgtttgttcggtgaccgaatcgcgagctggacgcctgtttaatccgtgcttatacatcgtctgagtaaacagcaataagagggacatccgt

SEQ ID NO: 11732 - DNA, 122 bp, Zea mays
  Clone ID: LIB3157-015-Q1-K1-A10
tgttatgcccgccatcctccatttctttttaacgattatctcctctctaacaggggggagtcattgagctggttagcctgcctatgaataaacatatctacggatataaacttactaggctt

SEQ ID NO: 11733 - DNA, 418 bp, Zea mays
  Clone ID: LIB3157-015-Q1-K1-A12
cccattcgttccccttctcgcctccacgaaccttcacaaattgccctctcagatcttctcctaatctcactcaagccctagccaaatcccagccctagcgacaccaaccagctcgccagcgaccatggggaacccggagaagctgatgaatcagatcttcgacctcaagttcacctccaagtcgctgcagcggcaggcgcgcaagtgcgagaaggaggagaaggagcagaagctcaaggtcaagaaggcgatcgagaagggcaacatggacggcgcccgcatctacgccgagaacgccatccgcaagcgcaccgagcacatgaactacctccgcctcgcctctcgcctcgacgccgtcgtggcccgcctcgacacgcaggccaagatgcaggtcatcggcaagtccatgcagtccatc

SEQ ID NO: 11734 - DNA, 421 bp, Zea mays
  Clone ID: LIB3157-015-Q1-K1-A4
aagtgtccttcctccatcttcctcctccactccactcccaagtccccaccacccccaaccccgtctctccactgcggcgcaggcttcgcttcggctccgctcggctcgagcagaagaaaatgcaacgggcagtgcaggccgtcaggtcacacggcaatgttcttaaatatgctgttctacaacacatcagcgctcccaagccagcaatgcttcctgctgccttttctcgtttcatgtcagtttcatctgctcgcctagaggatcgtggatttgaaactgccactgtagcagatgtcttgaagtctaaagggaagagtgctgatggatcttggctctggtgcaccacagaggatagcgtctatgacgctgtcaaatctatgactcagcacaacgtgggagctttggtggttgtcaaacctgg

SEQ ID NO: 11735 - DNA, 421 bp, Zea mays
  Clone ID: LIB3157-015-Q1-K1-A5
cttgaacctgtatgatggctggagagaggagagacggtggcttctctggttgataagttggtcctggtatggtgtgcttgccgccgatgcaaaaaaaaaaaaaaaaaaaaaaaaaaaaaaaaaaaaaaaaaaaaaaaaaaaaaaaaaaaaaaaaaaaaaaaagaaagcaaacaaaaaaaaaaaaaataaaaaaggggcacctaaaaaaaatttaatgtccataattttaaaaactaaaaaaaaaaaaaaggggggggcgtttaaaaaattaaaaatttttaaaacccattcttcaaaaaaaaaatttttttaatagggaaaaaaaaaaaaaataaagggcgcttaaaacaaaaaacgctacaataaagaaaaaaactttgacaaacccaaaaaaaactcattaaaaaaaaaaacccttttt

SEQ ID NO: 11736 - DNA, 430 bp, Zea mays
  Clone ID: LIB3157-015-Q1-K1-A6
ttaaaaaaaataataaataaaaaaaaaaatttttttttggacaatctataataaaaaaaaaaaagttaaaaaaacttacaatgataaatattaaatattgtgtcgtgttaaacaaaaattcaatttattaaatctatatggggccgccccttttaagggaccaagttttccgtccccttacttcctcggttttctttttttttttggtctcctaaaattaaattattgggccgcggttttcacccttttgtccttggaaaacctttggctttcccaattttattcgctttgcgccctttccctttttctcctgttgcgttttttgtgaaagggcccctccccgttcccctttccctagggttgcccctcctgatgggtaattgggcccccccttttttcgtccttttaacccgggtggggttgtggtttc

SEQ ID NO: 11737 - DNA, 373 bp, Zea mays
  Clone ID: LIB3157-015-Q1-K1-A8
ggagagaagcagcccaacatcactattggcattctggtctccgttgtcgtcgtgttcgttaccgttctcttcaagatcctgtttggaggcaagaagccggtggcacctgtgaaacctgcagctgaggcgaagaagcccaaggccacagtgaccgacggtgctggaagcagtggcgacaaggatgagaaagaggacgaaaaggaggagacagcaggcccacgtttgaggacccgaagggagacatagagacctatttttgatgtgtttggatgttctggcgcctgcttattttgaggactcttaatatttctgagtgtataatatgaacttgtgtcacccctgcggctttcctgctgcttattttgtttttaca

SEQ ID NO: 11738 - DNA, 411 bp, Zea mays
  unsure (1)..(411): unsure at all n locations; Clone ID: LIB3157-015-Q1-K1-A9
gctaccgttccgcgttgggatgatgtagacgtgccaaatataaaggtcgctgagccgcagtccaaacgcaagagcggtggctacatcttagatgagtgggacgaggagtacgaccgagggaagacgaagaaggtgcggaggtcaaagcaagactttggcgggccaaacccgttccaggaggaggcggactacgtatcgcagcggaggacgaagcagaaatcctaccgaggcaagtcttggaacaagcgggcctaacacggtagagaggggggagttgagagaatacgcgcgcgagagagagaatccccggacgcacatgctgtttgttgttacgttntagcacccattggtgagggagatttacgttaaaaaccatccgttgtcgggagtccccattagctgtcgaagtta

SEQ ID NO: 11739 - DNA, 169 bp, Zea mays
  Clone ID: LIB3157-015-Q1-K1-B10
ggaaaacccgggccgacccacgcgtacggccgaccgacctaggggtgcgcaactctatttagcgcatacagctatttctccccgctcggcgccgtttaaaatatctcgtgcacgtgcatgcattatctactgtctaaagccgccgctgcgccggcgccgctcgcatagt

SEQ ID NO: 11740 - DNA, 354 bp, Zea mays
  Clone ID: LIB3157-015-Q1-K1-B3
cggacgcgtgggcggacgcgtgggcgcgctcattaaaaaaaaaaaaaaaaaaaaaaaaaaaaggaaaaaaaaaaaaaaaaaaaaaaaaaaaaaaaaaaaaaaaaaaaaaaaaaaaaaaaaaaaaaaaaaaataaaaaaaaaaaaaaaaaaaaaaaataaaaaaaaaaaaaaggggggggcctttttaaagaaacaaattttatttccgggtgtttgcaaatttaaattttttttttagggccactaaaaaaaaattattgggccgggttttaaaaactttgggattggaaaaaccttggttttaccaaattaaattgtttggaaaaaattcccttttttccaagttggtttaat

SEQ ID NO: 11741 - DNA, 399 bp, Zea mays
  Clone ID: LIB3157-015-Q1-K1-B5
cgtccggtactatgggcctgaggattatggaacttatttctgcggggggtacaaagagggaatcagggaagaaaattgcagccatgttgtagatgatggatcgaggataatttttcatattgatcaagatcacttcttttggagtaggccaatggtcagcagtgcttcaatcatctactactgataatcaggatgtgctgtacggggagcttgtcttgattgaacctcagtttggttgagatgaattgacaagggtgcacggggagcttatcttgattgaaccccactttggtcgagatgaatagacaaaggttgcgtaagaggctatggaaggaacctctaataagtgggttgccagaataatgaagttttttgtcaaatctggatttcatgggaaca

SEQ ID NO: 11742 - DNA, 352 bp, Zea mays
  Clone ID: LIB3157-015-Q1-K1-B9
tccacgtagaagaaaccgatgtcctgcgtctggcaatttttcttagtcccttgatgatggcgatgatgctgaaacctttttttgaacaatgatacatgatgattgttgcgttgaaaaaaaaaaaaaaaaaaaaaaaaaaaaaaaaaaaaaaaaaaaaaaaaaaaaaaaaaaaaaaaaaaaaaaaaaagaaaaaaaaaaaaaaaaaaaaaaaaaaaaaaaaaaaaaaaatggggggggccgttttaaaggaaccaagtttatatcccctttcttgcaacgtattatttttttttttgggacaccaaaatcaatttcactgcccgacttttaaaaacttggggattggaaaaac

SEQ ID NO: 11743 - DNA, 412 bp, Zea mays
  Clone ID: LIB3157-015-Q1-K1-C1
gcgtccctggagaagcagctctggcggtgcgacatccttgcttagaggaacacggcggttattcgtcgctggagatgctaggtcaaccttctccggatgcaaatacacgaccgaagcagtagtttagtactcaagtctatgctctgtagttgagtctggtttccggctcgtgtttgtgtcatggtgggtcttctgttcgtcgtcgtcctagggccagttgttttccgaggggggtgtttttttccggaggctcatttttttgcaggaatcctcctgtgaggatctctgtttcttgagcctttggcagccattgctatggcactctgcccccttttgtcccaaactaagccctcgtgatcagtcgttccaccatgcagtttctcaagttgtgtttgaaacccaagtatctgtg

SEQ ID NO: 11744 - DNA, 127 bp, Zea mays
  Clone ID: LIB3157-015-Q1-K1-C10
gaaaaaaataaaggagctacaggacaatgttgctgctgtcaatttcactccatccagcaaactgggaaaaatgctgatggctaaatgcagaacactacaagaggaaagagtagtttagttccgtggg

SEQ ID NO: 11745 - DNA, 393 bp, Zea mays
  Clone ID: LIB3157-015-Q1-K1-C11
gaggaaattagtctgacctgtcggcactggtgtgaatggtggaaaccaaccatggcccttggctttaggatggcttgatggggtgtcgaatacatacacatggctgtcccacggttggtgtcgcttgttttgcattacggtcttgcggtggcggctgtatataatggaaaaacattcgatccattactgaagcatggcccgtgaagacacctttaaatgctcttgtgtgttagcttgcttatttgagaagtatgaagccatgcatgtagatgttgtatccaaaagccgagtactcgatattgtctggtctgttatctagcgcatgtcacacatatgtattcccttcctttgattgaagggctaatggcatgatgtcttttttttttttgataa

SEQ ID NO: 11746 - DNA, 129 bp, Zea mays
  Clone ID: LIB3157-015-Q1-K1-C12
aaaaaaaaaaaaaaaaaaaaaaaaaaaaaaaaaaaaaaaaaaaaaaaaaaaaaaaaaaaaaaaaaaaaagacgagcaagcgaaaaaaaaaaaaaaaaaaagcgaaagcgtaaaagaaaaaaaggccggg

SEQ ID NO: 11747 - DNA, 229 bp, Zea mays
  Clone ID: LIB3157-015-Q1-K1-C3
caaaagaaccaaggataaggcctccaagagttagtcgatttaggccacaatgtttgagtccattcgaatttatttcagcaggaaaatttctcgcgggtatggggaatcttggtacttatgctagtagtatgtgagatgggtgtggtttaaattttgagcgtaagttgagttctgttaacttgttaagttcggtggaatgttttaaactatgtggatgtcagattttgtt

SEQ ID NO: 11748 - DNA, 100 bp, Zea mays
  Clone ID: LIB3157-015-Q1-K1-C5
atggggtataattgggctgggcagcagccagcattataatgggctgatctttaatctttactagttgggtcgtccgatatctttctttcttttcttcccc

SEQ ID NO: 11749 - DNA, 283 bp, Zea mays
  unsure (1)..(283): unsure at all n locations; Clone ID: LIB3157-015-Q1-K1-C6
agaagaagtgtcgaaacctcaagctgcggacaaggctgttgaggctgaggagacggagtcagcggaaaccaagattgaggcggctcagagcagttgaagatgcttatgatctaagctagattgtatcctcatgttaattctgctgaatcggaggacaaaccttacatttatggtgctggcaagtcccagtggcgtgccatgaaaatttacgttccgtcttttaactgggtatccgagtgtcgtgctcagcatattatggatattatttccgtaatgcttcnna

SEQ ID NO: 11750 - DNA, 406 bp, Zea mays
  Clone ID: LIB3157-015-Q1-K1-C8
gaaagattcagttagaacgcagatcaggtgacttcgttatgctgtctgttgatacacactctgcttggattgttttggcagctagatctaggaggagcaaaatatctatcccaagtagaataggtaggatcttccggccatgattggtgggtgacatgcttctgggtttgttgttgtaagtagctttgggaggggggtgggggaaaggaaatgaatgaatgaattgaaagtgactgattaaaaaataaaaaaaaaaaaaaaaaaaaatttattaattatatttaaaaaaaaatatataatataatatatattatatttttttttaaatttataaataaatttaaggggcggcctttttaaaggaccaaaatttacttccccttccattgcaaagatatattttttt

SEQ ID NO: 11751 - DNA, 118 bp, Zea mays
  Clone ID: LIB3157-015-Q1-K1-C9
aaaaaaaaaaaaaaaaaaaaaaatttttattattatagaaaaaaaaaaaaaaaaaaagggggggatattataaatggggtggtcgcgttttaattggatcttaactttaatttttact

SEQ ID NO: 11752 - DNA, 339 bp, Zea mays
  Clone ID: LIB3157-015-Q1-K1-D1
taaaaaaaaaataaaaataaaaaaaaaaatttttttataaaaaataaaaaaataaaaaaaaaagaaataaaaaaaaaaccgcttttcaatatagaggatctaagttttatttactcttacatgcaattaaaatgtctttactttggagtaccctaattttaacttaacttgacctttttttaacaacatttggggggggtcatctttggatttccctatttttttcgctttgtatgacatttctcatttttttttttggcctaataaaaaaatggcccctccctgtttttttacataacattttcgtaaaataactgtttatcgctacttatttttttt

SEQ ID NO: 11753 - DNA, 266 bp, Zea mays
  Clone ID: LIB3157-015-Q1-K1-D10
agccttttgtgagcgagcacaagcgttgcttaaaagcatggcaagtgtgggcaaacgtgctaatctcaacaatcggactgtaggacaagccgaaccgttgaaacgagtaatgaccaagcatgttgtagggattattgacatacattagtttctgaccaatatattttatgataaacccttgatctcatgcaaagacgtaactgaccaggcaagagtggaaaactttgtggaggatgggggatagagtgggctgacaatctaccaga

SEQ ID NO: 11754 - DNA, 268 bp, Zea mays
  Clone ID: LIB3157-015-Q1-K1-D11
tgtgtattttgtgatactaccaacgtgggtgaggttgttgagcaagagtttttcacggaagaggttagtgtttaaaaaaaaaaaaaaaaaaaaaaaaaaaaaaaaaaaaaaaaaaaaaaaaaaaaaaaaaaaaaaaaaaaaaaaaaaataataaaatttaaaaaataatatcataatattatatataaaaaaaatttaaaattatacttatattaaataaaaaatatatgggcttgcctttaaaaaaataaaaattttttaaaatttt

SEQ ID NO: 11755 - DNA, 235 bp, Zea mays
  Clone ID: LIB3157-015-Q1-K1-D2
attcatcatcatcatcagatgaacgattacgtactagtacgtccttatgatgacagacatattatcatttacttactgttcgtgaacgattcatgtaatagacactatatatgaagtgtatttagctttctagcttctgatgatcgatcgagaggctaattaatgtagtgtaccatgcatatccatctcttgagtatcgcttggcatgcagtattaattgattacctgcctaatt

SEQ ID NO: 11756 - DNA, 273 bp, Zea mays
  Clone ID: LIB3157-015-Q1-K1-D3
cgccagtttggctacatcgtcctaacaacttttgctggaattatggaccatgaggaggcccgccgtaagaatgttggtggcaaggttctaggtttcttttattgaaaatgtgtttttttgagccacagatgcgtccaagaactcgtctgatgttttgaggtttgttaagactgggtgtctgagcctttgcggtttgttaagacagcgatgtgtcatgtatttcagaaattgggatttttatgagatgtacctgctagagccctgtctgtttcg

SEQ ID NO: 11757 - DNA, 420 bp, Zea mays
  Clone ID: LIB3157-015-Q1-K1-D5
cggacgcgtgggggagaatggacggcttgttttatagtggagttaaaaaaaaaaaaaaaaaaggggaaaaaaaaaaaaaaaaaaaaaaaaaaaaaaaaaaaaaaaaaaaaaaaaaaaaaaaaaaaaaaaaaaaaaaaaaaaaaaaaaaaaaaaaaaaaaaaaaaaaaaaggggggggcccttttaaaagaaccaagtttatttcccggggcttgcaaagaaaaaattttttttttgggcccccaaaaaaaaattccagggcccgtgttttaaaacggtgggactggaaaaaccctggggttccccaaattaattgtcttgaaacaaaaccccttttctccaattgggttaaaaacaaaaaggccccaaccgaacgcccttccaaaaaattgcccccccttaaagggaaaagggccccccc

SEQ ID NO: 11758 - DNA, 418 bp, Zea mays
  Clone ID: LIB3157-015-Q1-K1-D6
cggacgcgtgggttcggtcagcgatcgctattcgcgagctgccagtagacggagaaaggatctgttgatctccacgacaccgaaagacgaacgaacgaactgatatgggctgctgcaggaggagggggagccgtccacattattgcttgtattttttttcactcttttgtttattgttgagaataataatgaatcaggtgggggatgtaaactctgtgggttgttgttggtgtgtcgtccagagggggggaaaaaggagaaaaagaaaggcagccaaaaaaaatttgtccatacatgaatgaagaagcccaggatcgttgtctttgtataggagaaggaattgaaacgtttttgttttgttttctttttctgtcattctttgcttctgttcccgttttgacaatgagaaatatcgggt

SEQ ID NO: 11759 - DNA, 411 bp, Zea mays
  Clone ID: LIB3157-015-Q1-K1-D7
cgcgtccaagctggctgccgacgacaagatgaagatcgaggacgccatcgacgcggccatcagctggctggacgccaaccagctcgccgaggcggacgagttcgatgacaagatgaaggagctggagagcctttgcaaccccatcatcgccaagatgtaccagggcgcgggtgccgacatgggtggcgccggcggcatggacgaggacgctccggctggaagcggtggccctggccccaagatcgaggaggtggactaagcggattgtgtcagtctcgtgtgtctgctgcagtggctggctggcccagtcgctgctcgatttatcgtcgtcgtcgcggtgtatccgcgttagaaccttttgttggtgaacaatattatcgtggcacgcgttttaagtaatacggtattctg

SEQ ID NO: 11760 - DNA, 259 bp, Zea mays
  Clone ID: LIB3157-015-Q1-K1-E10
gcagaggcatatactacgagcttgcataaacatggcgctttcctaccagagtggtgcctttatattgtataaatatttgtcatgtttatgagttacaattagctagggttgaagttcgattgtttgtacttgaaagaaagtcatcacttgtgaaaaatcgaaacatagtgcgacaaatgattggttgtgcttaccaaactgtaactcaattgtgataaattacaattcttcagcagtcctcatcttgctgctttattgt

SEQ ID NO: 11761 - DNA, 382 bp, Zea mays
  unsure (1)..(382): unsure at all n locations; Clone ID: LIB3157-015-Q1-K1-E3
cggccccttggccggccccttgggcggacccttggggtcgtaccatatcatatactgcgaaatgaggatgtggtgaccgttctcgagatgttcaatagtgtgtttctgtcctcgacaacggagacagtattgaccagtatctgactgaacaaaagcgcttccggaaaattaattaagaaaagaataaccgtgtccgggctccagcaagtcgagtgttaatttccattctggatacgtgtaactgttgtagaagaatgcgtattaatcgcttagggtttgttcggtttanaaaaaaaaaaaaaaaaaaaaaaaagggcggaccgtattaaggatccatgctttacgtccgcgtgccttgcgacttctttcctttttttttgtg

SEQ ID NO: 11762 - DNA, 351 bp, Zea mays
  Clone ID: LIB3157-015-Q1-K1-E4
gtgggctgggctgtcttccaagatgcatggagaggcagtacgtatgtacacgtacgtgtatctatctgttcgtgtgtgtgcgcccgctgctgcttgatttatcttgtgcgtccgattggttacgtcaaaaaaaaaaaaaaaaaaaaaaaaaaaaaaaaaaaaaaaaaaaaaaaaaaaaaaaaaaaaaaaaaaaaaaaaaaaaaaaattaaaaatttaaaaattaaaaaaaaaataaaataaaaattaaaaaataaaaaaaaaaaaaaaatggggggggccctttaaaaaaataaaattttttttccccgtgtttgaaaagttaaaattttttttttgtggcaccaaaatta

SEQ ID NO: 11763 - DNA, 396 bp, Zea mays
  Clone ID: LIB3157-015-Q1-K1-F10
gggctggacgttttggcacgaagggactttcaattacctttgtttcctctgcttcggattctgatgttcttaaccaggtgcaagaaaggtttgaggtagacataaaggaactgcctgagcaaattgacacctcgacctacatgccatcataaatgggaaggacaactgagaagagaggaggataggggagtgagcagccgtctggagatggttacctttgaactatccgatctggaggatttgatttgcctcctttgtgtactttaaaaagggcagccaggatgatgatctgtattttaagacaatgctgtctgtttgggtttaggattttgctttgtcgaaaactagcacacttattgtactactgagcagcatatttgttttcatccctgggtt

SEQ ID NO: 11764 - DNA, 87 bp, Zea mays
  Clone ID: LIB3157-015-Q1-K1-F11
agctagtgctttcctttctgtgtgaaataaacctgaaacccagacccaggccaccgcaccaataaagatggggggttactatgcatc

SEQ ID NO: 11765 - DNA, 298 bp, Zea mays
  unsure (1)..(298): unsure at all n locations; Clone ID: LIB3157-015-Q1-K1-F2
cacttttctcatgttgtcagatcatgtggaccaacttgaatggcnnaaaaaaaaaaaaaaaaaaaaagggcagacgaatataaagaaaacaaactaacgtacacatgcatgcgaaaaaaaaagatggggtgtagggtcacctagaatccaaattttcctggccgcgggcttgacaacggctggccttttgtaataccctgacgttacttcacttgactggccggcgttacactacctcttgcggcggctaaaccttttatttacggggccttaatcgccttgcccttccttacagttt

SEQ ID NO: 11766 - DNA, 402 bp, Zea mays
  unsure (1)..(402): unsure at all n locations; Clone ID: LIB3157-015-Q1-K1-F5
cggacgcgtgggtgccggcgacgatgcccgtcgtcaaggagctctgcggcctcgacgtcgtggagaggtacctcgagaacgtgtctgccgccagtgccggcccaaacacagcgaaagcatagatccagcaggcctcagggtgcagtcggcgcactgccagagatgatgtgtgctgccctgatgtacagacagtacagtacagaggagagagaattgggggaactcaggaactgcgaggagcgatgaacagtatatagagtgaaaaataaaagtgcttcgtactaataatcactagaaaaaattatgcacatctnccacgcactaccggcacgactgttgaatattttgtaaaataagatgtcataagctatttattttctgtatgattagatcagcnnnnna

SEQ ID NO: 11767 - DNA, 417 bp, Zea mays
  Clone ID: LIB3157-015-Q1-K1-F6
ggcttccagaagatttatggtggccgccagaggaatggctcacgcccacctcacttctgcaagagcagtggtgccatttcacgcaacatcctccagcagctgcaggagatgggcatcattgatgtcgatcccaagggtggacggcgcatcacctcccagggaaggcgtgatctggaccaggtggctggaagggttgctgttgaagcttgagcaatctcatatttggtttctatgatgtcatgtttgattgttgagatggctacactttatttgcactttggattaggatttttgtgttaagagaactcaaggcattctagctatggttcacactgtattttcccttgatacctatttatcaaaaccctattcgtatgtttgggaagtgtctgagctgatattcatgacatgtatttg

SEQ ID NO: 11768 - DNA, 415 bp, Zea mays
  Clone ID: LIB3157-015-Q1-K1-F7
ggaatacctgaggagatggaaggagccgtcgatggattgtctgaaaaggtctccaggatgcactcctaaggcaggactgtccatggcgacagcaatctcgagtctcgacactaggtttctgtctggtgcactgtaatgccgacgacacactgtttggatcttgtgtacacccacagctagttcaactaagatgtagcactagttcgtccatggaggaagcagaatggacgatgaagtgtggtcagcctgtcgaccatgaggcgttttcttccaatggagtctagggtatgtttgagttctacaacggcttgtgccgtacgaagtgtcagcagtgtacgaggaggaggatatcgttgtcagtacacattttgcctgtctagaaaattatgagtactttcttcgatcacaagtacat

SEQ ID NO: 11769 - DNA, 397 bp, Zea mays
  Clone ID: LIB3157-015-Q1-K1-F9
ggaagaagaaaacccctgctgcaaagaatgataatgctgagggacaagaggttgaggcggcagctgaggaaacgaaaaagagcaaccatgtcacgaggaagcttgagaagcgcaaggagggacgtacccttgacccacacattgaggagcaatttggcagtggacggttgctggcatgcatttcttcccgccctggacagtgtggccgagctgatgggtacatccttgagggtaaagagcttgagttctacatgaagaagctacagaggaagaagggcaagagcgctgtagcttagagcattctcatggattgtcttgcaccgaaatgtgtgtcctgatgagtacacttttttttggttagtcgtctcaagttcagagcgttatgccatgttttcag

SEQ ID NO: 11770 - DNA, 418 bp, Zea mays
  Clone ID: LIB3157-015-Q1-K1-G1
atgagcgtgttcgtggcggagcgggacgtgccgcgcctcgactccatcctcacctccatcccgctgcccgacatcctgcggaggcagcgcctgctggcgagggactccgtcaagcgggcgctgctgttccaccagcccgccaggcccggggacgccttccaccaggtgctcaacgggctggcgcgcaagctgccgcacggcgagggcgtgttcctgcagcccggggagaaggcgctcgactgggacgccggactcgagagcgacctcaagccgtggtagtgggccagtacctagcggttgacttcttcatgttccttctttcttttgttctctttgatttgattggcattggcatcgatggatggatcacagtatcacacattagtttttgtataccacggcccgtttacatgcaaaa

SEQ ID NO: 11771 - DNA, 392 bp, Zea mays
  Clone ID: LIB3157-015-Q1-K1-G11
ggatgctggaagggtgcctttcataatactgcaaacttgttaatcgcaaaaatgctatggctgtacttggggtctatattgaggtccttggagctccgagtgaagatggtgtcgttcggtggcttgattaatacatcaaggctatgctatatttagagaacattttaaggctatgttgtttctatagaacaatttaggcttatgctgccaactgctatcctcgggttaggtcttctctgagtctcttttgccaagtctcagttttggctgttctactgcatctgcatggacatggactcgcaacgcagtcttttttagtttgtttgtttttttactgtctggttgttgtaagctgtgtctattgtattttaaatatacagtgtgacaagcaa

SEQ ID NO: 11772 - DNA, 151 bp, Zea mays
  Clone ID: LIB3157-015-Q1-K1-G12
ccggcccgacccactcgtccgctgacacatcagctgacacttatttttttttacaaaaaaaaaaaaaaacataaaaaaagggggtattttaaaatataactttactcaaaaaataatctaaaattaaataaaaaactactaaaaaaataaa

SEQ ID NO: 11773 - DNA, 246 bp, Zea mays
  unsure (1)..(246): unsure at all n locations; Clone ID: LIB3157-015-Q1-K1-G2
cgccgccgactcagcagcaggagacgcgccaaggagagcccgcaaggaggcgactatgagggccaagtggaagaagaagcgcatgaggaggctgaagaggaagcgccgaaagatgaggcagagatccaagtaggctgatggggattgtggatggtggtgacgacatggttgtgttacgattcttcgatgcgtgtgagttcatggagagatgtcacatnctagttcgtcgtccccgtttgccatgtg

SEQ ID NO: 11774 - DNA, 127 bp, Zea mays
  Clone ID: LIB3157-015-Q1-K1-G3
gaaaacccgggccgaccacacccgtccgaacactcagtgatccaaattcgtcattttttttttttaatttacagtttcaaaaaaaaaaaggaatattttaaaaataattatatataataaaaaaata

SEQ ID NO: 11775 - DNA, 411 bp, Zea mays
  Clone ID: LIB3157-015-Q1-K1-G5
cggacgcgtgggcggacgcgtgggcggacgcgtgggtggcaaacgcttctctgcagtccttccttctcccgcacgaccattctttcgccggcgccggcggcagccgtgacggctccgcgtccgccgtgcacaagctctccaccaacaccagcggcagcatttccttcaggctctacaccaaaacctccccctcggtgacagcagcctcagccaccaattcgtcagctccgactccagttgccccggcatctgcaccagcggcaggggacgaagaagaagaagaaggcccctctctcgacctcctccgccgccagctcgccgcgggcgactaccggcaggcggacgagaccacgcgggcgctgatcatcgacctcgccggcgagcccgcgaggcgccgagggtacgtcttct

SEQ ID NO: 11776 - DNA, 168 bp, Zea mays
  Clone ID: LIB3157-015-Q1-K1-G7
gttagttccagctcgattacctttttggttctgctgcagagggtatcgactaggatgttttagccttaattaatgccgtagcagttaactgaaacgtagatagccaaaatggagagacaattcaatgaataataaacggaggccacttgatgtatagttgcttctgtc

SEQ ID NO: 11777 - DNA, 399 bp, Zea mays
  Clone ID: LIB3157-015-Q1-K1-G9
cggacgcgtgggcggacgcgtgggttccaaaccacaagagggtggagtactcgctgcagtacatacatggcattggacgctcacgctcacgccagatcctcctggacctcaatttcgataacaagatcaccaaggacctctccgaggaggaggtcatcaccctccgtaaggaggttggcaagtacatgattgagggagaccttaaacgtttcaaccgtgtggcgattgagaagctgaaggagattaagtgctacaagggcatccggcacaagcttggactcccagttcgtggccagaggacaaagaacaactgccggacacttaagggaaagaaggcttcagttgccaagaagaagtcacccgcctcccaggatgaataaatcgtattgccatgtattg

SEQ ID NO: 11778 - DNA, 409 bp, Zea mays
  Clone ID: LIB3157-015-Q1-K1-H1
agggtcttcctcccggtcatcgctggcctttccgcgcgatctacgatgtcgtcgccacgatatgccgcacggcagcgtggcagcagagtggggtccagaggcgtgggtgcggccgacttctgctgacgcccgcgcggagtggtcggtgctgtcagccgccgtagatccggccgaggaggccccgctgggcgcgggcgacgggacggccccaccagcggtggtcgcgcagcgccgcgttcgccgcgagccagccgcacccgccgtgcaccccgccaccgggatggatcgccgcgctgccgaagtacagccccgccaggtgcgtccgcggcccgccgagccccgtcaccggacggaagatcgcctgctggaacagctgctgcgtcccgccgccgacaccggcctgccccag

SEQ ID NO: 11779 - DNA, 70 bp, Zea mays
  unsure (1)..(70): unsure at all n locations; Clone ID: LIB3157-015-Q1-K1-H11
tagcctgaaaccttgtttgcaatgtgaaattaatgtgagagattatgaagactattttggctagtcccna

SEQ ID NO: 11780 - DNA, 421 bp, Zea mays
  Clone ID: LIB3157-015-Q1-K1-H2
ccccgtcctccggttcatgtcctgctgctccccatgtcgcccccactcgacctcgactacataggcctctcgccggcggcggctgccgccgctgcccacgacgacctgaagggtaccgagctccgccttggtctgccggggtccggttcgccggaccgccgtgttgtggctgccaccgcaaccaccctggacctgctcccggctaagggcgccaagcgcgggttttctgacgaggcgccgacgccatcgcccggtgcagcttccgggaagggaaagaaggtagcggaagaggaggacgacaagaaggttgcagcgacgccgcagccggtcgcaaaagctcaagtggtgggatggccaccaatccgaagctaccgcaagaacacgatgtctaccacccagctgaagggcagcaaggaggatg

SEQ ID NO: 11781 - DNA, 379 bp, Zea mays
  Clone ID: LIB3157-015-Q1-K1-H3
cgaccacgcgtccgccaccctgttgcaggagcgtctccctaatctccaggctctgaggcatggttttcttagttgcattccaaatccctatggcacaagggctcgaagcaggtcatgtcctcaccagttcggcgtctgtttactctccgaaacataccaggagatcttatgcagacctgcaatggcaaaatgtctatatgtgcttggatcacatgggtactgttggtgtttgaccgtctcacgcacatcgaaagaatcaagaatcaccctatttagagtggctcaaggcgcagagcaaacatgcccttagaccagaaagcactgaaccttattattgtgcatgcttaaaacggtaccttatgttctctccaagagggtt

SEQ ID NO: 11782 - DNA, 430 bp, Zea mays
  Clone ID: LIB3157-015-Q1-K1-H4
ccaccttgtatgagctatatataattatatatgttaaaaaaaaaaaaaaaaaaaaaaaaaaaggggaaataaaataaaaaaaaaaaaaaaaaaaaaaaaaaaaaataaaaaaaaaaaaaaaaaaaaaaaaaaaaaaaaaaaaaagaaaaaggggggggccgttttaggggtcccaggtttccttccccgggcttgcgaggtattattttttttttggggccccctaatttaatttcccgggccgcggttttccaccggggggcctgggaaaccccgggggttccccaacttattggctttgcagcccttccccttttccccagttggcttataagcaaaggggcccgcccctttcccctttcccaacatttgcccaccctaattggcaaatggcccccccccttttccggccctttaagcccggggggtg

SEQ ID NO: 11783 - DNA, 368 bp, Zea mays
  unsure (1)..(368): unsure at all n locations; Clone ID: LIB3157-015-Q1-K1-H8
ggcgattgctaacgagaagatcaaggctgagaaagaggccgcagcaggcaaaaagaaacaaggagcgagaaagaagcagctccacatcgagaaaggagacgacgacttcatccccggacggggtggtggctacgatgacccggacgagtacgacttcatgtgatttggctggaagggagagtaagtagggttaataggtttccgtcttgtatacatttggcaagcagagaacatatcacgagagtttgcggcatactatactatggcatggaacatgcgttatctgtttgaagatgaattttgactctgcaggacaagaagagcacaagtgcttagttaattggtattgaatctctggtattttttnt

SEQ ID NO: 11784 - DNA, 325 bp, Zea mays
  Clone ID: LIB3157-016-Q1-K1-A1
ggttcggcggcggcggcggcgggggtggcggcgaccgctcctgctacaactgcggcgaggccggccacatcgcccgcgactgccccacgtgaggtgtgtccgcgtccgtccagccagatcagatcggatcgctccaccacctgctggtctgatggcgccgcccccttctagatctcgcttaaaaaaacacccccctctcgctgtgtgtcggagtaccgctttagttttgccgatccgggcacgagtgcccgctgcctctttcctctcatgcgtaagaggaacccgtccgccgttttcagatttcgttcggtccgtagaagaactc

SEQ ID NO: 11785 - DNA, 377 bp, Zea mays
  unsure (1)..(377): unsure at all n locations; Clone ID: LIB3157-016-Q1-K1-A11
caaaaaaaaaaaaaanaaaaaaagaaaagaaaaaaaaanaaaaaaacaaaagaaaagaaaaaaaaaaaaaagggaaggagaaaagaaaaaaaaaaaaaaaaagagaagaaaagaaaagagaaaaaggaaaaaaaaaaaagaaggaaaagaaagaggaaaaaaaggaaaaaaaaaaaaaaaaaaaaaaaaagaaaaagagaaaaaagaaaggagaaaaaagaaagaggaaaaaaggaaaaggaaaaaaaagacagaaagagaaagaaaaacacgaaggaaaaaaaagaaggggagagagagaaaaaaaaaagggagaagagaggaaggaaaaaaaaaaaaaagaaaaaaaagaaaaaaaaaaagaaaaaagaaagaga

SEQ ID NO: 11786 - DNA, 150 bp, Zea mays
  Clone ID: LIB3157-016-Q1-K1-A4
gcgccactaaggctggcttaaattttgggttgtcttgatatatttggtgtgtaacgcaatcagcctgttcgatgcgaaaaaaaaaaaaaaaaaaaaaaaaaaaaagaaaaaataaaaaaaaaataaaaatttaaaaaaattaaaggggcg

SEQ ID NO: 11787 - DNA, 379 bp, Zea mays
  unsure (1)..(379): unsure at all n locations; Clone ID: LIB3157-016-Q1-K1-A6
aacaacgcgcccgaaaaccaaaaaccacaaacgagccggaggcggtgtacaagcagcaccacatgggagcgaacggggtcaacgacgacctggggccggagatcaccgaggcagtctctgagctcatcgccctgcccctgcccgagcccgacctggaagagggcagcatgagcaaccaggcggcagctagaggagccacaactccgaaattctcgcagcgcgagaactcgaacctgctgaggcttaaacctgagctagaccaataaagcctaaacttccaggtgttctgtctgtccatcatggaggaaaagacaaatgtgttactgatgtactgaacccgaaacaagaaaagaagcccccgagcanggtataatttggt

SEQ ID NO: 11788 - DNA, 307 bp, Zea mays
  Clone ID: LIB3157-016-Q1-K1-A7
ctgatggctcaagggagaactggggacgccaagtacaaaggcatggtccatgcgatacgaacaatatatgccgaagaggggctgcgagccctgtggaaaggcttgcttccccggctcatgaggatcccacctggacaggctataatgtgggctgtagctgatcaggtgatgggcctctatgagcgaactcatctgcagccagttcatatttgaccattctattgcagtgctggtgctgcactgaattttttttttggttggttctctcaatcggcggttagacgtggaaagtcgtcgatttaaatgt

SEQ ID NO: 11789 - DNA, 210 bp, Zea mays
  Clone ID: LIB3157-016-Q1-K1-B1
cgactattcttgtccttcctccgacaataaaccaacgggcctgagatctcactgtgagacgctgtaaataaggaaatatggaagttggagctcgtcattaaggacgagttagcggtgtgcatccagggggcttttgtggctcagtatgtgatgccttttcgcccctcctgattttctgtaaataaaacgatgctgggagccatcggtgtg

SEQ ID NO: 11790 - DNA, 330 bp, Zea mays
  unsure (1)..(330): unsure at all n locations; Clone ID: LIB3157-016-Q1-K1-B12
gaaganccggggcgacccacgcgtgctaagacgtttgggcttactcttgggttttttcgtgggcggacgcgaggggcctgatactgtgccgttttgcgacaggtgggactcgtgcttggcgaggcctatgagcagctttcatctacattgcacacggtggggtgatgctcactctggggtgaagatcacttacaacaaatcgtctgtgaaccttcacaccgtcaagcctttcctttacaagccggcctccgttcctctgtattgtagataaacaacacattttgctgtaacgcagatgatttaacatacacggtagataatattgttttc

SEQ ID NO: 11791 - DNA, 389 bp, Zea mays
  Clone ID: LIB3157-016-Q1-K1-B3
gcgaagtggaagatggtgaagagcagacttgaaaacagtaccgatgacaagctgctgctgttgtgctctgttagtgttgtttaatttagtttaataccgtgtgcatgagatatggcacgcgttcttgctcaactacatcaccatggcaatgtctgcaaatccatggattgatggatggatgttggttgtttcttgacattctggacatgttgttcactttggctatgtatgttttaacagtccagcgttctccttacaaaatatggcgtgctttgttgactacacagaccgtagttcctttcctgaattattgtctgcaaagataagagatatcaatgggtaactaatacccgatggatcaaaaaaaaaaaaaaatagccaaactgaat

SEQ ID NO: 11792 - DNA, 118 bp, Zea mays
  Clone ID: LIB3157-016-Q1-K1-B4
ccgaagtgggagattaagaacggtactgtttttttcaagacggcgaacgagctacagccctggagcgagatcccattcttgcaacttataaacaaaacgcttacctacgccagggagc

SEQ ID NO: 11793 - DNA, 361 bp, Zea mays
  Clone ID: LIB3157-016-Q1-K1-B6
ccacgcttccggggaaacagaaaaaaggttctgatgaatttttcttgggagataataaaaaaagccaacagggtctggagcaatcttcagcttactgttatcaaacaaaattttggaaaccctcaatgaaatgggtgtacagtatacacagatctgcagcttcatccaacagaccaatcatcgggcatcctttgctctttggggctgtcgcttccctcggggctgatgttggcatccagctctccaagaccggtgaaacattggacgatttggacgtgatccttttcatcgaccagctgaacaagatgtgccgagatgtcacccagatcaggttctccgctcgccccgaacagaacttgca

SEQ ID NO: 11794 - DNA, 238 bp, Zea mays
  Clone ID: LIB3157-016-Q1-K1-B7
ctgttccttgattagtttcatttatatgtataggtcctcttttcgttggtgtcattttagtacaatttggtttaataacacacaaggaaatcgtgttgtagatagggtagatcaaatctcgtgtatcgaccttcgtcttcgtggtggtagaatgaaaggatatataaataagttggtgtaaaaaaaaaaaaaaaattataaaataatatataaattaaaaaattaaaaaaattaaaaa

SEQ ID NO: 11795 - DNA, 398 bp, Zea mays
  Clone ID: LIB3157-016-Q1-K1-C11
cgatcaaggacgagaagatcgcgtccaagctggctgccgacgacaagaagaagatcgaggacgccatcgacgcggccatcagctggctggacgccaaccagctcgccgaggcggacgagttcgatgacaagatgaaggagctggagagcctttgcaaccccatcatcgccaagatgtaccagggcgcgggtgccgacatgggaggctccggcggcatggacgaggacgctccggctggaagcggtggccctggccccaagatcgaggaggtggactaagcggtttgtgtcagtctcgtgtgtctgctgcagtggctggctggcccagtcgctgctcgatttatcgtcgtcgtcgcggtgtatccgcgttagaaccttttgttggtgaacaatattatc

SEQ ID NO: 11796 - DNA, 362 bp, Zea mays
  unsure (1)..(362): unsure at all n locations; Clone ID: LIB3157-016-Q1-K1-C2
tgtgcttccagatactgcactgactcgcagcatgcagttgctcctcgcaatgggcttcagctacatccaggtcatggaggcctacagcatattcggcgaggacgtggactcgatggtctgctacctgttggagacaggaggcaccggagcctcagcgggcggtagcaatcgccggaaaggaaaggctgctgagtgatctgcacaccttcattgctgtggatgtaatcgttgatcgaaatcgttgggcatgaggaagcataccagataatgacagccttgtgagttgatatgtcgatatacctgctaccttttgggtgatgaataaatggtactcacacttgagacttctcgnnnnaaaaaaa

SEQ ID NO: 11797 - DNA, 127 bp, Zea mays
  Clone ID: LIB3157-016-Q1-K1-C3
tggaatttttggtagatatatgcgataagtagtgcaccgtgattattcatgttattcgatgcgatgatttttagaatgttggattagagaaaagtatgacgaaaattagtagtcacacgttggtggt

SEQ ID NO: 11798 - DNA, 303 bp, Zea mays
  Clone ID: LIB3157-016-Q1-K1-C5
taggtggttacggcgccgaatggaggctttttttcgtccgcgcaggtcattaggaagtgcatgggtatcatggagggtaatcctcatccaagagctataaagggtcggctgtctttccaaaaattcaatccatctatcgataaactaaatgaagaggcacgaggtgaccaccaaacagaatcagctttcctcagtaactgtgaccaagacaatgcaaacttcatctgacgggatgaagttccagcattaagatgtacagactatggcattcccagttcagaaagcatttctctaaatgaactg

SEQ ID NO: 11799 - DNA, 230 bp, Zea mays
  Clone ID: LIB3157-016-Q1-K1-C7
gccgctccgtccttaggcatagaggtcatttttcttttctttttttttcttttttaaaaaattatatgtactatgggtggtcgaaataaagtactgatatggtgttacacatgttttataataaataaaaaaaataaaaaataaaaaaaattataatggttgaaaattatttacaaaaaaaaaaagactatattattaatttcacccaaattatattcttttaaaaataa

SEQ ID NO: 11800 - DNA, 253 bp, Zea mays
  Clone ID: LIB3157-016-Q1-K1-C8
ttttggttgatgtgctgggttaccttttttcttagttccccaattcgccattttgatgaggagctcttcccactgtgagagctactgcgctcctcccctgtgctaccttccctgcctccccaaatccaaagacgttgcactcggtgacccggagtcctggtcccctagccctgccgctgtctccctggacaatccgcccgcgttccataagatcgaggaatctgtggcggtaaccggcggctatggcgactgt

SEQ ID NO: 11801 - DNA, 226 bp, Zea mays
  Clone ID: LIB3157-016-Q1-K1-C9
aattaatgccagatgactgaagatacttattctttctgcatttatagaatttgttctgggagtgttgtgtgctatattgttcatatagtaacttggcacgtttgtacttccacgttcatgcccttgtgacatccaccctataaaggcttgttctgatattttcaattcttatggatttgaagggattgattctgaataaatagggattttgatttactagggattg

SEQ ID NO: 11802 - DNA, 336 bp, Zea mays
  Clone ID: LIB3157-016-Q1-K1-D1
ataacgggttggaagtaatgactatcgaagaaatacgctctggaattgatacacgtggaactgaactcgagggaattgatcggggtgttctgatgcgggctctgcggcaggtggagcaaaagggaaaggcagctatcttcaaaggcacctttgctgatgacgaacgcgtaaaggtttcggggtcattcttttgcgatccttaaactggcagactaataatctagttcagccggtgcccttgaacatggcatgagacacccatagcctcgatcattcagtgccctttgaaaatggcatgacacattcttgttaaaagcagtagggctgatcacattc

SEQ ID NO: 11803 - DNA, 341 bp, Zea mays
  Clone ID: LIB3157-016-Q1-K1-D11
agccctactatgtagccagcgggtgtttcttcctgctgtggattaagcccaaccgcgtggttaggcagtcaacgttaggttgcttggccttgcaatgactgtggctgctggaattatggtccaatatggggggcgtgctctggtctggtttattccggcctattaatggcccagggcggacactaacacgttaccagggatgacaccgacttataggccggccgttgtgagggatccagactaatttgcattgacatcacatgtattgaatcctctatatggcacgttaaaataataatgggatggaagcattacaatcaaaaaaatgaaaaaaccggggg

SEQ ID NO: 11804 - DNA, 274 bp, Zea mays
  Clone ID: LIB3157-016-Q1-K1-D3
attccttacacgtaaatcgaccaagggtgggcgcaaggtgattgcccggagaatcgcaaaaggcaggcacagaatttcagtttagcaagatcccatagcagcactggatgttttctgtactacagattcgtatcgtgttctttgtgtgaacgacatatttttaagctttttaaagtttttgcataccaccctgctgaagcatgaagctgagcccccgcgcaagcagctgaaacaaactcttgctgcgaaataaacaagtcaaaggaactggtgg

SEQ ID NO: 11805 - DNA, 383 bp, Zea mays
  Clone ID: LIB3157-016-Q1-K1-D4
cggcttcatcgtctactccatcggcaagccgctcgacgcctggcttaaggacatgcccgctgtcgcttaattcgtctgaggtgctccattggattggatccggggaaggaagaagaggaactggttgaccattcttcattacagtttgtttttttgcaggattcttaaaagttggacggcgctgctagtattccatgtttcgtgttttcatattggaggacgtctgtagatgtaaaaaaatcctcgggcgcttgtgctcggcttgaggaaatatccttgtacggttgtaccctggacccgctatagctggttggttcttcaaattgtgttcctatagaagccaaagttactacacgatcgatatgttctttttgcagaataac

SEQ ID NO: 11806 - DNA, 181 bp, Zea mays
  Clone ID: LIB3157-016-Q1-K1-E11
accaaaagggggggaaagaacaaggaggacggaccaaaacacacaacgacgacaacaacaaaaacacagcgaggacgacccggaaaaaaaaaaaaaacaaacaaaaaaaaaaaaaaacggacaaacaaaaaaaaaaaaggggaagaaacaaaacacagaagaaacagaaaaacaaaaaggg

SEQ ID NO: 11807 - DNA, 392 bp, Zea mays
  Clone ID: LIB3157-016-Q1-K1-E3
ggtgaagaacaccgtgacccaggtggccaagaaggtgctgaccatgaacccctcgggcgagctctccagcgcccgcttcagcgagaaggagctgatcagcgccatcgaccgcgaggccgtgttcacgtacgcggaggacgcggccagcggcagcctgccgctgatgcagaagctgcgcgccgtgctggtggaccacgccctcagcagcggcgacgcggagcgggagccctccgtgttctccaagatcaccaggttcgaggaggagctccgcgcggtgctgccccaggaggtggaggccgcccgcgtggcggtcgccgagggcaccgcccccgtggcgaaccggatcgcggacagccggtcgttcccgctgtaccgcttcgtgcgcgaggagc

SEQ ID NO: 11808 - DNA, 300 bp, Zea mays
  Clone ID: LIB3157-016-Q1-K1-E5
caaaagaagcaccggaaagagcagctgctttatctcgttcacaatcagcgagagaggcaagccttcgttcagaacgtgctgctatgcagagatcccaacacgcagtccatcggaggccgcgttacatgctacaagagcaagcagacagggctactgtggcaatgaagcaaaaggcttgcgctgaacgtaaggaaaaagctcttagtaaagccaacgatagggctgaagcatacagatcttctaagatgagagctttccaggaagcgctgaatacagctctaccagcagaagtggaaaggg

SEQ ID NO: 11809 - DNA, 413 bp, Zea mays
  Clone ID: LIB3157-016-Q1-K1-E6
ccggggacaacggggggttgaacgcccgtgctacatggtacggtgccccgaacggggctggtccggacgacaacggcggcgcgtgcggcttcaagggcgtgaacatgccacctttctcggcgatgacgtcgtgcggcaacgagccaatcttcaaggacggcaaaggatgcgggtcctgctaccagatccggtgcaaggcccaccctgcgtgctccggcgtggcggagacggtgatcatcacggacatgaactactacccggtggccccctaccacttcgacctgagcggcactgccttcggggccatggcaaaagacgagcacaacgacgagctaaggcacgcaggaatcatcgacatccagttcaagagggttcccctgccagtaccctgggctgacggtgaccttccacat

SEQ ID NO: 11810 - DNA, 366 bp, Zea mays
  Clone ID: LIB3157-016-Q1-K1-E8
cttcccacaaacttcctacctccatgcagtttggcatttagctgcagcgctgggtggcggcacatgcaacaagctgcttgagtgacaaaggaagcaagatgcaagacgagtccgtgaaggccttcaaccttgctgctactgctgttatcaacaagctgttgatactgatttatcagcatgtcctcactaaatgcagaatactgtgcagttccattgttttacgttgatccgaacattggaggaatcctcgagacagattaatgcaccagatattagattacctggcatcagtttgttgcctgtatttgttgtatgctattgtattgtttgtgccaacataaactaaatactgtttgagaatcagat

SEQ ID NO: 11811 - DNA, 178 bp, Zea mays
  Clone ID: LIB3157-016-Q1-K1-F1
cggacgcgtgggcggcaacggatatctctgctttcgcatcgatgaagaacgtagcaaaatgcgatacctggtgtgaattgcagaatcccgcgaaccatcgagtttttgaacgcaagttgcgcccgaagccttctggcggagggcacgtctgcctgggcgtcacgccaaaagaagaagg

SEQ ID NO: 11812 - DNA, 320 bp, Zea mays
  Clone ID: LIB3157-016-Q1-K1-F10
cggacgcgtgggttctgccgggagaaaaccggcggtgctgctaagtacgaaaaggttgtgtacggggagcatttggttcagaaagtattgacgaacttcgtcatgtaaatttgctaagtacgacaaataaatctgcattgcagcatcagaactccagacctatttggtgtgtagtgctgtaccagaaaggtagtaacggactaaagcatgcgcccgtctctgaaatttgaccttaacaagagtcgcagacttgcagtgcaggtgatatcacaaggaaatcggggggagatttgttctctctgctgcacggagttgtcgac

SEQ ID NO: 11813 - DNA, 400 bp, Zea mays
  Clone ID: LIB3157-016-Q1-K1-F2
ttcggatcctgcttctggacgaagcgaccagcgcactggatgccgagtccgagcggatcgtccaggacgcgctggacagggtgatggtgaaccggacaacagtggtcgtcgcccaccgtctgtcgacgatacagaatgcggatctgatcgccgtcgtcaggaacggggttatcatcgagaagggaaagcacgacgccttggtcaacgtcaaggatggcgcgtacgcgtccctcgtcgcccttcactcggcagcctcttcatagctgcaggtggtaggtagcatgggatcctgcaaacgtctgctgaaacatatatatatatatggacagaggcacagagctgccacaacctgtgtagcaagtcaggtgctagtatctgttcctctatttgatgacacaca

SEQ ID NO: 11814 - DNA, 279 bp, Zea mays
  Clone ID: LIB3157-016-Q1-K1-F4
gtaaaatgaagacttcaccttcaaaaaaaaaattaaaaaaaaaaaaaatacaaacaaatgggggaggacacactaaacagggtgatggttaacaggacaacagtggtcgacgcccaccgtctgtcgacgatactttaatggggatctcataatccattggggtgggcggttttataaattacaagtttatgcacgatgcttgggataacaactttttttttttgtgcgcctaaatttaatttccttggccgggttttctcaccatagggtgcgggaaaa

SEQ ID NO: 11815 - DNA, 340 bp, Zea mays
  Clone ID: LIB3157-016-Q1-K1-F6
cctttgtagctaattttagcatattgtctttgttattcgaagagtcaaagtttaaggcgtttgatctggcatcaaaaccagaaggtgaagggacgccaactacagactttagggcactttttgcacaagttaatattctcttttaaagacataagattgttcttgccaagaaattgagggcattctttcgtaaagcgatatgaaatgtgtgtttagtaagaacatcgtcgctacatcgactcggtacatttggaaggagatgaacgctttctcgtttcaaccattaataagctacatcagcactgttagggcctatttggaagcacagtgttttttattt

SEQ ID NO: 11816 - DNA, 142 bp, Zea mays
  Clone ID: LIB3157-016-Q1-K1-F7
gtcctgaagatgaataattggatgttattatttgatgcaactagttatcggtgatgggtggtatgtaaaaagaggtgtagcggtgtatgtaaaatattatattcgtcagatctttttataccaataatatttactcataaaa

SEQ ID NO: 11817 - DNA, 258 bp, Zea mays
  Clone ID: LIB3157-016-Q1-K1-F9
cggacgcgtgggaaaaaaaaaaaatttttttttaaaaaaaaaaaaagacaaacaaaaggggggaaacaaaaaaaaatacacatgcatacaaaaaaaaaatctttttaataatttaatctaagggtcatcttttttggcggttccaaactatcttccccactcttgaaaccctgtcgttaccctatttagtcgcctaaattcaatattctcccctctttttcccacctttttgcctggaaaacccctcgcggttgccca

SEQ ID NO: 11818 - DNA, 404 bp, Zea mays
  Clone ID: LIB3157-016-Q1-K1-G1
gggcaggcgacgtacgtgcgcttccacgctagcgtgcgcggcaaggccgtgacggtgcggtcggaggtgctgatgggaagctacagcctgcacaaggggctggtcgtcgagaagctctcggtgctgggtctggagggtaccggcaaggaccttgccatccaggtggacggcacggacgccaccgccgtggcgacgtcgagcccttacttcgcagcaggtggcaacgcgaagctgcagggggaagaaggcgtcgaggatagtaagaacggcgtcatggtggagatcggcgggctggcattgccgctcgggaagagcttcaccatgacatggaacatgcggatcgaagcataggtcgagtgatgctgtgcttccgtctccatgaatttgcttaaagtcgtgttccg

SEQ ID NO: 11819 - DNA, 378 bp, Zea mays
  Clone ID: LIB3157-016-Q1-K1-G2
gcactgcacaatgacctcaaggtgctgctactaagccacccaaagaaggacatcagggatacatcagaatatgaggttttcagaagggagagaaagaggcgatcattgaaggatcttgctgctgaagtccttggtgctaaaatacaacagaatgaacactgccccgtacgctctacattatatgcatgatttgtgttgtgttgttcttaatactttctgtactcttacagatcgaggatgcgagagctgcgatgctcatttacaacaagcacaagaaagcatgggagaagaacatgaaggaacagttcagattcaaaaagaagctcaagaagcgaggcaagaagaaaactactgagtccaatgggaatgatcccaatg

SEQ ID NO: 11820 - DNA, 386 bp, Zea mays
  Clone ID: LIB3157-016-Q1-K1-G3
gtttctgggacatgtacgacccagagggctactctttgtggttctgtgactacaagtacaatgatgagaacaccgtctcctttgtgaccctgaacaaggttggtggattcctgcagcggatggacctgtgccgcaagtacgcctttgggaagatgctcgtgataggctctgagccacccttcaagctgaagggcctttggctcttccgtggccaggatgttcccaagtttgtaatggacgaggtctatgacatggagctctacgagtggaccaaggtggacatctctgatgaggcccagaaggagcgtgtcaatgcgatgattgaggaccaggagccctttgagggcgaggccttgcttgacgcgaaatgcttcaagtgagtgtgc

SEQ ID NO: 11821 - DNA, 313 bp, Zea mays
  Clone ID: LIB3157-016-Q1-K1-G4
gttgaatccataatttgtcgcaccatcattcttcttttgacagtgcatcagtttttttttggttgatttggatctgtacaattttccttatgtactgatgcttataatagtatacgcaataatattcaggtacagttttgatggtaaaaaaaaaaataaaaataagctataaaaacacccaaaaaaaatgaagggtcttaggctattacgtggccaaaaatgttaccaagtaagttaatggacgaggactatgacatggagctctacaattggacaaaggggggcctctttataggaggccaattttgatccc

SEQ ID NO: 11822 - DNA, 268 bp, Zea mays
  Clone ID: LIB3157-016-Q1-K1-G7
tcttcttcccagatgattcttaatttacttagctagaagattaattccttttgctaggcattgttgttggggggttaaggataattaatttgtatacagcaaaggaagataggaagtgtataattgtttagtcacacttttttggttctttgttttgcatttgcccgtttttgttctggtgtaccaattttccttgtactcatttttcttccctctgtaaactaaacataagagacacatacatgcatacgtaaatacatatattggt

SEQ ID NO: 11823 - DNA, 278 bp, Zea mays
  Clone ID: LIB3157-016-Q1-K1-G8
tcttcttcccacatgactcttaattttcttttcttgaagattaatcccttttgctggggggtgttaatggggggttaatgataatcaatttgtatacagcaaatgatgactggaagcgtataattgtttagtcacactttttcggttcttagatttgcatttgcccgattctgttctagctgtaccaagtctgcttgcactcatttaacttccctctgtaaactaatcatatgagacacatacatgcatacattattacatatttagataaaatattt

SEQ ID NO: 11824 - DNA, 232 bp, Zea mays
  unsure (1)..(232): unsure at all n locations; Clone ID: LIB3157-016-Q1-K1-H1
gtcgagatcgaatagtggtgtactgctgttgttttggtatttgctgtgggcattgagcttgtgtctaagttccgtatgcttgcaaggcttgtttttatgagaacatatctggtgtatatgggagtttggtgtacatattaaaaaaaaaaaaaaaaaaaaaaaaaaaaaaaaaaaaaaaaaaaaaaagganggcgnaataaaaaaaaacaaaaaaaaanaaaccgggcaagcg

SEQ ID NO: 11825 - DNA, 240 bp, Zea mays
  Clone ID: LIB3157-016-Q1-K1-H3
gtcggcgacgccctccccgacggccagctcgggtggttcgacgagaacgaccagctgcagcaggtctccgtccacgcgctcgccgccggcaagaaggtcatcctcttcggcgtccccggcgccttcaccccgacctgcagcaaccagcatgtgccaggcttcatcacacaggctgagcagctcaaagccaagggtgtagacgagatccttgcttatcaagcgtaacgaccccttcgtcat

SEQ ID NO: 11826 - DNA, 302 bp, Zea mays
  unsure (1)..(302): unsure at all n locations; Clone ID: LIB3157-016-Q1-K1-H8
gctatcttctatgttctgctagtttatgtttggagtccgngggaatatactagctgggtaataaaaagaaaaactgatgtgatgccataatagtataatgtcatggctttttgttatgtttggagaagtgatgttgtaagctattgattctgaataccactgcggcattgttggcatcaaaaaaaaaattaaaaaataaaaaattcttattataaaaaaaaaataatataattaagtggggcgttttttaaaaacttttccaattggaaaacaccttgggttttcccggctttatctttttt

SEQ ID NO: 11827 - DNA, 280 bp, Zea mays
  Clone ID: LIB3157-016-Q1-K1-H9
cggacgcgtggttttgtgagtgagtttttttgtttataagcggtagaagaatatggggctagggataggtgaagtcagaatcaggacatggtttttcgtttgttttcatccttcttttttcagttttttaagatgatgcttttagttttgctatatcctcgtcttttccttttttttttcgtaccctatttttccgtaccgagaagaatgttgacatgcatatatgcatttcatgctgagtttgaagttctataagcaaaagatgcattttgtgttgtcc

SEQ ID NO: 11828 - DNA, 58 bp, Zea mays
  Clone ID: LIB3157-017-Q1-K1-A1
ggggtccaccggcccggctggattggccggccagggcataggggcggggatttccttt

SEQ ID NO: 11829 - DNA, 424 bp, Zea mays
  Clone ID: LIB3157-017-Q1-K1-A10
aggacttctacaacaagagcatggataccatggtagaggctctcaagatgaatcttacagatggatggtctgacgacatcgtccactgggaaaattgcaagaacaaacacgcgacctgcgcgaacgactatgcgattgagagcatccattattcctgcaactacgcctacaaagatgtggagcaagacatcactctaggagatgattattttttcagtaggtacccgattgtggagaagaggttagcgcaggctggaatcagattggcgttggtacttaatcggatatttggtggaggtgaagcggatgatataccactacaagtacagtaacagctctaataaaaggaagcatagctattacaaggatttgtccattacgtcgtctatacatcaataaattggcatgaatttgtaactccatt

SEQ ID NO: 11830 - DNA, 167 bp, Zea mays
  Clone ID: LIB3157-017-Q1-K1-A12
aggacctgttcgagctgggcggccttgcctatgtcgagaagaataacgcgcgcatggccggcgccctttacgacaccatcatcgcctgcggagggtactacgtctgccccgttgtcaagtacgagcgctctcacatgaacgtgccctttaccctggccaagggcctc

SEQ ID NO: 11831 - DNA, 177 bp, Zea mays
  unsure (1)..(177): unsure at all n locations; Clone ID: LIB3157-017-Q1-K1-A2
gtttgatgggagttttctgcgtagccgattggacgtggtagcaaaataagaactggttttttttagttttttttgtatgatttacgcaccaactgaccggtcttgtagctcagattctgttccccctggttggctggttgcaatctcttgagagaatgaacanaatgtagttgaacc

SEQ ID NO: 11832 - DNA, 190 bp, Zea mays
  Clone ID: LIB3157-017-Q1-K1-A3
gtgaatttgttttgagggcttaaggttgtgttgtgcgtgttggattggattgattaaaatcgtagtttcgtacagttttgtcaaaaaaaaaaaaaaaaaaaaaaaaaaaaaaaaaaaaaaatcaaaaaaaaaaaaaaaaaaaaaatatatcaaaaaaaatgaacttgcatgatattttccctatttaaaa

SEQ ID NO: 11833 - DNA, 383 bp, Zea mays
  Clone ID: LIB3157-017-Q1-K1-A5
tgattttttgcaacaagagcatggatatattgatcgcgcacacgcacaaaaagcttagagagggatggtgtggataggaaacgtcagctttggttacacgaatgcctcatggtctcgatgtgttgctttgtacattttttatttatatttttccacgctatgtcatcctacaaagatgtggagcaagacatcactctaggagatgattattttttcagtaggtacccatttttgttatataaagttttttaaatattaaatcagattggcgttggtacttaatcggatatttggtggaggtgaagcggatgatataccactacaagtacagtaacagctctaataaaaggaagcatatctattacaaggatttctggaaaaac

SEQ ID NO: 11834 - DNA, 267 bp, Zea mays
  Clone ID: LIB3157-017-Q1-K1-A6
aaaaaaaaaaaaaaaaaaaaaaaaaaaaaaaaataaaaaaaaaaaaaaaagaggggcggcccgttttgggggacccattttaagttccccttctttgaaagggaatatcttttttatagggcaacctaaattaaatcaacgggcctttttttaacaccgcgttaaaaaaaaaaaccttggggaaacccaattaattcccctgcaaaaccaccttctttaaacaagctgttttaaaagaaaaaaggcccgcacaaaatcgccctacca

SEQ ID NO: 11835 - DNA, 81 bp, Zea mays
  Clone ID: LIB3157-017-Q1-K1-A8
tttggattaaaggcttaaaggtgggtttttgcttgtggaatggattgattaaaatggggagttcattcagttttgctaaaa

SEQ ID NO: 11836 - DNA, 341 bp, Zea mays
  Clone ID: LIB3157-017-Q1-K1-B1
accggtatttactggttggacccacgcgtccgccaggatgttcccaagtttgtaatggacgaggtctatgacatggagctctacgagtggaccaaggtggacatctctgatgaggcccagaaggagcgtgtcaatgcgatgattgaggaccaggagccctttgagggcgaggccttgcttgacgcgaaatgcttcaagtgagtgtgcttgcctggagacagaactgtttagcccttgaatttgcctatggaagagtttgcccttttactagtgtcgatgttgatctggtataccttgctatgaactggttaaagtttgtgctggtttgggattttttgtgc

SEQ ID NO: 11837 - DNA, 274 bp, Zea mays
  Clone ID: LIB3157-017-Q1-K1-B10
agaacggttttggtccttgaggcgccccctgtactggtgtcgtcgctgtataactgttacttaagttgttcgggatgatcgtcgatgtccttagattatcttaagactagtaatctgagcttagcttacgctcatgctgaacatgtagcacggcttcagcttaattaccattggtggaattcggatgttataaggttagacgcatagagaatcattacattattgtgatctcggagcacaataacatgtataattaactccttctggaactaac

SEQ ID NO: 11838 - DNA, 424 bp, Zea mays
  Clone ID: LIB3157-017-Q1-K1-B11
gcgcggcgatggatgtcaagtgccggcgtctggaggggaaggtggccatcgtgacggcgtccacgatggggatcggcctcgccatcgccgagcgcctcggtctggagggcgccgccgtcgtcatctcctcccgcaagcagaagaacgtgaacgaggcggtggaggggctcagggccaagggtatcaccgcggttggtgccgtctgccacgtctccgacgcacagcagcgcaagagcctcatcgagacggccgtcaagagctttgggcacatagatattcttgtctccaatgctgccgcaaatccttctgtagatagcatacttgaaatgaaagagtctgttctcgataagttgtgggatattaacgtcaaggcttctatccttcttatccaggatgctgctcctcacctacggaaggggtcatc

SEQ ID NO: 11839 - DNA, 363 bp, Zea mays
  Clone ID: LIB3157-017-Q1-K1-B3
attgcatgcaataattggatgaaataaacagcaataagcttcatcagtattattattgttgttgttgaatatatgcatcctctcctctctaaaaaaaaaaaaaaaaaaaaaaaaaaaaaaaaaaaaaaaaaaaaaaaaaaaaaaaaaaaaaaaaaaaaaaaaaaaaaaaaaaaaaaaaaacccaaaaaaaaaaaaaggggccgccctttaaaaagaaccaaatttaactaccccttcattccaacttaaaacttttttttaatgtcccctaaaataaaataaacggcccgtgttttaaaaccgctgtatttgaaaaacccttgctttaccaaaattaatccctttaaaaaaaatacccttttt

SEQ ID NO: 11840 - DNA, 267 bp, Zea mays
  Clone ID: LIB3157-017-Q1-K1-B4
cgccgacaacgccttcctctataacaccccgtcctgcttcgccatctacgtctgctgcctcgtcttcgatgacctgcttccgcaaggcggccttgccgaagtcgagaagaaaaacgcgcgcaaggccggcgccctctacgacaccatcgacgccagcggagggtactacgtctgcccccgtcgacaagtaccgggcgctcgcacatgaacgtgcccttctccctgggcaaggggcccgacttcgagaagcagttcatcgccgaagcg

SEQ ID NO: 11841 - DNA, 147 bp, Zea mays
  Clone ID: LIB3157-017-Q1-K1-B6
attcaacttggacaaggaataatatgctgccactggccaaagctttaagtggcctgtttaaaaaaaaaaaaaaaaaaaaaaaaaaaaaaaaaaaaaaaaaaaaaaaaaaaaaaaaaaaaaaaaaaagggggggccaatttaaagaat

SEQ ID NO: 11842 - DNA, 117 bp, Zea mays
  Clone ID: LIB3157-017-Q1-K1-B7
caagaatgtagaacactgctaataagcagatggacagtttgggtcgccgtagcgctttgtagtcatttttcccattaaagtcgataacactgaacaaggaggaaggatcttttgccc

SEQ ID NO: 11843 - DNA, 398 bp, Zea mays
  Clone ID: LIB3157-017-Q1-K1-C4
cacagatgtattagtgatgtttaacttttatgtaacgattgattagctgtaatataagttaagcatttaaaaaaaaaaaaaaaaaaaaaaaaaaaaaaaaaaaaaaaaaaaaaaaaaaaaaaaaaaaaaagggcggacgataaaaagggtggaggcttaagaaaggaaaatgcgaagcatatgtttctatagggacatctaaattaaatgaactggacgtaaatttacagggtggtgactgaaaaaaccctgacgggaaaaaacttaatggtaccgaagtaaatccccttttagaaaattggctttaaagcaaatagggcaataccgattgacttgacaaaaatttgccttccctaaatggggaatggtacacgccctgtagggacgcattaagagcg

SEQ ID NO: 11844 - DNA, 426 bp, Zea mays
  Clone ID: LIB3157-017-Q1-K1-C6
ggaatttaatggccggaccaacgcacccgtaaaaaaagcgcttcgaaataagaggaccaaaaaataaaaaaaaaaaaaaaaaaaaaaaaaaaaaaaaaaaaaaaaaaaaaaaaaaaaaaaaaaaaaaaaaaaaaggggggggccgtttaaaaaaaccaaagttaactaacccttgattgcaactaaatagtttttttatagggcaaccaaaataaaattaactggccgtcttttaaaaacgtcgaaactgaaaaaaccctggggtaaccaaactaaatcgctttgaaaaaaatccccttttcgcaagttggataaataaaaaaaaggcccgaaccaatcgcctttccaaaaatttgcccaccctgaatggcaaatggaaccccccctttagcggcccataaaccgcgggggttgtggtgttaaccc

SEQ ID NO: 11845 - DNA, 419 bp, Zea mays
  Clone ID: LIB3157-017-Q1-K1-D12
cgcacaacgggttccccgtgctggactggccgcggccaggcgtatcggagctccacgggctggtgctccggtcccacctgatggccgtgctcaagaagcggtggttcctgacggagaaaaggaggacggaggaatgggaggcccgtgagaggttctcgtcgacggagctcgcggagaagtccgggagtatcgacgaggtggcggtgcagctgacgccggaggagctggacatgtacattgacctccacccgttcaccaacaccactccgtacaccgtcgtggagaccatgtcggtggccaaggccgtggtgctcttccgcacctgcgcgctccggcacatgcttatcatcccaaagttccaaggccctgagatagctccaatcgtggggatcctaacgaggcaggacctgagggcacac

SEQ ID NO: 11846 - DNA, 422 bp, Zea mays
  Clone ID: LIB3157-017-Q1-K1-D2
gagcgattgggaggtgggctacaatgcaatgactgacaagtacgagaacctgatggaggctggtgtgatcgaccctgccaaggtgaccaggtgtgcgctccagaatgcggcctcagtagctggaatggtcctaaccacgcaggccattgttgttgagaagccaaagccgaagcctcaagtggcagagccaccggagggagcccttaccgtttaaaaacttatcgttcttgaggctgctgtccagacggttcagatcagttgagagggtagaactttggtttgagaattttggttcagatccactgggagttgtagagtaggattgctattttgcagacgaagggtaattttactctggtctgaacttatctgaatcgaagacatttgcatcaccattttttaaaaataagctcatggcgatg

SEQ ID NO: 11847 - DNA, 415 bp, Zea mays
  Clone ID: LIB3157-017-Q1-K1-D5
cggacgcgtggggtcgtgcgcaaaagataatatgagattattgcctcttggctggatcacctgtggacgccaatgcacattataccactgctatagagcttgcaagattgactggtgatgttttctggcacgctggagcccttgagggtagtgtctgtgcattagtgcggcgaggttacgagtcacttgaagaccaagttggtacctgggaatcacgagtctaaggtcaagaactggtaccaccggatgaggcgcatgatggatgttgtgatgagttcgtgagaggtctagcccgtcgtctcctagtcaactttggttgtgggatcgttgtcttcgtatgatgtaattatttaactattttgtatagaacttcgttatatataaatgatgtgacattcgtttcaaaaaaaaataa

SEQ ID NO: 11848 - DNA, 342 bp, Zea mays
  Clone ID: LIB3157-017-Q1-K1-D6
gcggcttgcccgtgtttccaatgttgggtttttgggcccagcccttgttcacgggcaggggccgcttcgaaaacctggttgaccacttggttgacccattcaacaccaacgcatgggcctacgccaccaacttcgtccccggcaactaagctcaacggctatgctatgcaacttcattgtctttcggatcggaaagggtgtccgtacgtggattgattgatgctgcgagatgcatgtgtgtcttttgtttcacgttgcattgcataggcaagtcgagatgatgagttggcgttgtacactaagatgaacccatgttgtgcaatagtggtggtttttgtttcc

SEQ ID NO: 11849 - DNA, 323 bp, Zea mays
  Clone ID: LIB3157-017-Q1-K1-D8
gcttcttctgctggttcagcgggcacttgtgagaagccaggtgacggaggcgatgtgattgacgcagattttactgacagctaatgagggggcatgctaggtattagatggaggcggctttgccgtacagggagataatttgttcccacaagattagctaagatgtggatcgatctacttttaggtagattggcacctaactggggaatgaatatacatatggtcctttgcttctgcttgcatagtgtgcattttgattcacgttgcattgcataggcaagtcgagatgatgagttggcgttgtacactatggggggccattt

SEQ ID NO: 11850 - DNA, 252 bp, Zea mays
  Clone ID: LIB3157-017-Q1-K1-E10
cagttttgagacttgttagaactgagcaaaccatgttaagatgctgctgtgtgtcattccttaaaaaaaaaaaaaaaaaaaaaaaaaaaaaaaaaaaaaaaaaaaaaaaataataaataaatggggggcacgctataggaggtcctatttatcgaacgagcaagcgcaacgtaaatatttcttctattgggacccctatttaaaatacacggcccgtttttataaaacgacgacattgagaaacccctggtg

SEQ ID NO: 11851 - DNA, 108 bp, Zea mays
  Clone ID: LIB3157-017-Q1-K1-E11
cggacgcgtgggattttttttctctctcccttgctaccagatcatgtaatccagcaggaacatgtagagaaagatcaaacgaggttatagatcgagaaggtcgcctgc

SEQ ID NO: 11852 - DNA, 378 bp, Zea mays
  Clone ID: LIB3157-017-Q1-K1-E2
caggagctgcaccggcggtaccacgaggagacgggcatcacgttcgcgtcgctctacccggggtgcatcgccaccacggggctgttccgcgagcacatcccgctgttccggctgctcttcccgccgttccagaagttcgtcaccaagggcttcgtgtcggaggcggagtccggcaagaggctggcgcaggtggtcagcgaccccagcctcaccaagtcgggggtgtactggagctggaacaaggactcggcgtcgttcgagaaccagctgtcgcaggaggccagcgatccggagaaggccaagaagctctgggagatcagcgagaagctcgcggggcttgcctgaactcgacggcacggggacagcgacatgatgaat

SEQ ID NO: 11853 - DNA, 208 bp, Zea mays
  Clone ID: LIB3157-017-Q1-K1-E3
cggacgcttgtgtgccaaggcccaagggggaggccgctagaatgacagaaggtttgtcacggaggctggacgctgtgttaggatcgtgtgtgttctttaggaaaggagagaaactagcccatgtaaacatcataatgttcatatgaaatataacgatgatcaccctgttacgagtccattattgataaattaataaaaaaaaaaataa

SEQ ID NO: 11854 - DNA, 385 bp, Zea mays
  Clone ID: LIB3157-017-Q1-K1-E4
aactcagaagcagcaagactgttcagcgagatcaagctggagttcaaccgcatagtccgtgagatcgtggagcagagctggacagccgactagtgtgcataaagatgctcgtcgtgcccgataggggcacaataagatagcgtgaaaaaaacacacacccactccttgtgtttctggttcgccaggctcgtcgaaacattgaagaacccccatgattggtttgtagtctgtcgtcgttgttctgccccgatcaagagccccggttgctcatggtggtggctgtcgaaagtaacgggtgttgacctatcttttcatgaatttgaatggatcctgcctatgttcaaaaattattatcgtggggatggttgtttggtctaaaaaatat

SEQ ID NO: 11855 - DNA, 408 bp, Zea mays
  Clone ID: LIB3157-017-Q1-K1-E7
ctagcatcgaaggtattctaagcaagcaaccagaaaaccgaatgcgtattcttccttcaccatacctttgcttaccactgatgagcattgtcaaaattgccagggaatgtggatggaggaaaacttccgcctcatccacttgtcaggatccatgtgtcatatgtttggaggtggaatgcactgtagctgcagaaggttgcggccatgagttctgcaccaaatgtgcactctacttgtgctccaccactagcagctcaacatccacccgtggagttcctggctccatatcatgccctctgtgtcgccatgccatcgtctccttcatgaggctcaccagcactaccccgataaaagagcttccatggacaagcgcgtcactagcctttatgtgcagcgggctcaaacact

SEQ ID NO: 11856 - DNA, 62 bp, Zea mays
  Clone ID: LIB3157-017-Q1-K1-F1
gtgctttccaccggccctgatgtcgtcccgttgtaaccgatgttcgtttgtgtttcaatgtg

SEQ ID NO: 11857 - DNA, 217 bp, Zea mays
  Clone ID: LIB3157-017-Q1-K1-F2
cgcgcatacgaagaagaaagatatgacgggcattattccgccgtcagcttattagaacagtgcagctagctagctgccatatgcatatgttttaagatacagatatggtgtgtgtgtggtaagtatggtgcatgtatgttgtttgtaaaataaattaacccacatgatgttgtggaaagtaaaattaaaatactcaatggatcggagacctgacata

SEQ ID NO: 11858 - DNA, 381 bp, Zea mays
  Clone ID: LIB3157-017-Q1-K1-F3
ggaaaccctagccgccatatcttacgatccactctatcaccaatcctatgtatggggatgtgcgattgctcgcgtcgtgttgtctgctaagggcggctcggtatcgggcaagatgaaggggtcagtttccttcacgatcgactgcaccaagccagtggaggacatgatcatggaggtcgcctcgctcgagaagttcctgcaggagcgcatcaaggtcgccggcggcaatgctggcaacctcggcgactccgtcaccatctttcgcgagaagaccaatgtcaccgtcacctctgacggacccttctccaagaggtacctgaagtacttgaccaagaagttcttgaagaagcacaacgtgcgggattggctacgcttggttgc

SEQ ID NO: 11859 - DNA, 305 bp, Zea mays
  Clone ID: LIB3157-017-Q1-K1-F4
gttttgtagcgtgagttatcatggctacaatttgttctgaaactagtggtcactaatcttaatttacacagttcagtcaatttaaaaaaaaaaaaaaaaaaaaaaaaaaaaaaaaaaaaaaaaaagaaaaaaaaaaaaaaaaaaaaaaaaaaataaaaaaaggaaaataaaattggaataataaaaaatacttgggtgtaaatgaaggagcgattgggatctaattttttatatagcaaaaaaaggggcgtgaatgagaaagaaaaaattaataaaacggtggttgaaacggaacataatttttt

SEQ ID NO: 11860 - DNA, 427 bp, Zea mays
  Clone ID: LIB3157-017-Q1-K1-F5
taatggtccaggttctactgcggcacctctttcaggctaagcatctaaacaacaatatgtaaattatccttttccaataaaatacatgcttaaatcgtggctgctaggcgaatggtcctactttggtcatcaaatgcaggaattccactactatatgtgccacttgaagttgttatgtcaaaataatatggtgaaaacgagcgtctattgggatctattttttatcttgcaaatgatcttcctgaaggagattgatatgtcaagatacgcttgtttcatttgagctcaatgttatctgaaaatatatagactgccttcgtccccttcatcactgctaatgaccgtgacttggagacccgacagcggccctcgacgttgtcgccgccgagcccatgctggttccaccagtggtccaccacccggatgt

SEQ ID NO: 11861 - DNA, 178 bp, Zea mays
  Clone ID: LIB3157-017-Q1-K1-F6
cgtccgggtttccgttttttatgcgggtggattggtccgttggttggctaaaattccaagggccggggatgtgcagctagctggtagtgtagcctgccgtctcgcctaattggtccattgtaaaaaaactgctactctccattgactgactgaatggacgagtataaacgtattggac

SEQ ID NO: 11862 - DNA, 202 bp, Zea mays
  Clone ID: LIB3157-017-Q1-K1-F7
gaaataaaaaatatatgctagaaagatttgtttttattgtatgcttagattacaagggagggaggtgtgcagttagctggtagtgtatcctgccgttatcgccttatttgtacatggggggaaccgcttgataggctccattgtctgaccggatggtctaatattaatttcttggtcctaggggaacaaaatattaattaac

SEQ ID NO: 11863 - DNA, 421 bp, Zea mays
  Clone ID: LIB3157-017-Q1-K1-F9
ccattacaataatttataaagaaaccattttttctccaaacacataggaaggggaggagcgttggttcgcggcttggtgtctgcgaagggcggcgcggttgccggcaataagaaggggtcagtttccttcacgatcgactgcaccaagcctgtggaggacaagatcatggaggtcgcctcgctcgagaagtttctgcaggagcgcatcatggtcgccggcggctttgctggctaccttggcgactccttcaccatctctcgcgagaagaccaatgtcaccgtcacctctgacggacccttcttcaagaggtacctgaagtacttgaccaataagtacttgaagaagcacaacgtgcggtgattggctactcgtggttgctgccaacaaggaccgcaccgtctattagctccgcttctttat

SEQ ID NO: 11864 - DNA, 164 bp, Zea mays
  unsure (1)..(164): unsure at all n locations; Clone ID: LIB3157-017-Q1-K1-G1
cgaccctgtgggatcctgggggcccctctttacaacacccccttcggctagatatctgctcctctgatcgcatgaaacagggctgctatatcacctcatggatgctacctcgcatgaacatataggctcttcatctaatttgagctttttnaaaaaaaatataa

SEQ ID NO: 11865 - DNA, 368 bp, Zea mays
  Clone ID: LIB3157-017-Q1-K1-G10
gtgaacttggaagagtttgttatgaccaaagacgagttttcgggtgctgatattaaggcaatctgcacagaggctggattgcttgccttaagagaacgcagaatgaaggtgacccatgcagatttcaagaaggcaaaggagaaggtgatgtacaagaagaaggaaggtgttccggatggtctctacatgtagccaatctattcatcatgccgaacaagttacccgattgtgtgtgtactagcacatctcttcatcatgggagatatgttaccacaatacttgttgcatactgtgctaagtggtcaggagaaccttgtattaattaattatcctttcattgtctcaaagtaaaaatttcccttgcgctt

SEQ ID NO: 11866 - DNA, 331 bp, Zea mays
  Clone ID: LIB3157-017-Q1-K1-G2
gtcaaggagatcctcggtacctgcgtcagcgtcgggtgcaccgtcgacggcaaggaccccaaggacctgcagcaggagattgacgacggcgaggtggagatcccgtccgcttaagaaggattggtgtccaggactgcgttatctttgctgctgaagccattctctgcctagattttctcatatttatttgaggtgggggtggacgtggacgtggaactatggaagttatcacagcggagttttgcttagaaactttgtcatgctttaagtctgagacaatttctgtcaaattttatgaacattcctaggtacaatcgaagttaccagtgcc

SEQ ID NO: 11867 - DNA, 58 bp, Zea mays
  Clone ID: LIB3157-017-Q1-K1-G5
tgctgtgttgtgtcaccatccatctataataatcttatctataccccaccttttgtgt

SEQ ID NO: 11868 - DNA, 337 bp, Zea mays
  Clone ID: LIB3157-017-Q1-K1-G8
ctggccgagaccacgatcctctggcagccatccctcgaggcggaggctcttgccgccaagaagctggcgctgaaggtgtgaagcagctgaaggatggttcaggcaccaatataaaccggtccgcgacaagattgatctttgtgtccatggcgtgggtcttgcgactctctgctcggcggtgccactctgtacaaaatcacggctgtctttgattcatcggatattcggatacgtttgtttgttactttttgcttggacacccaccatgtttggaacttttttgggctccgtttgggggctgaacgatggtcagtggaaatttaaaaattcgtcgtct

SEQ ID NO: 11869 - DNA, 254 bp, Zea mays
  Clone ID: LIB3157-017-Q1-K1-G9
ctggatttgttccattgccaatgaaattttttattcaaaagaaaatagatcttgccaacaaaaagctagtaatcttaaggggtgacgcttctataaggtacgtgctggcctccactttcatccggtccgtaaactcgatctttcttttagcccattgcctatgtcttgcgcctctttgttctgcgttgccactgtgtacacttttactgctccctttttttcttcttttattcacatacctttttttgctactg

SEQ ID NO: 11870 - DNA, 327 bp, Zea mays
  unsure (1)..(327): unsure at all n locations; Clone ID: LIB3157-017-Q1-K1-H2
gagggagaaaaggtggtgggcgtggggccggctacgtcgagagaggcgtgttcctgtactcgcttcgttttctctgcatgcgtgtataaattgtgttcaatcnaaaaaaaaaaaaaaaaaaaaaaaaaaaaaaaaaaaaataaaaaaaaaaaaaaaaaaaaaaaaacaaaaaataaaaaataataaaaaaaaaaaaaaaaaggggggggccgttttaaagaaacaaagcttacaaacccgtgcatgcaaaagaataacttttttataggggaacctaaattaaattaactggccggcgttttaaaaagtctggactggaaaaaccct

SEQ ID NO: 11871 - DNA, 323 bp, Zea mays
  Clone ID: LIB3157-017-Q1-K1-H4
aaccaccccatggctggctgagcctctgctcgcccgaaaggaggcgagttgaggtgaggcttcccttggttttgtttccgaaggcaaataatctgctggagtggcacacaaaaacttgttcctggtgctctgcattgcttcacggtgacggatgatgatgtcgaaatggaacattaacattttcagcgttagattgttgtttttgtgtgcgtgttatatctatatatactgggtgacaaactagtttggttgattgagtctgatcgttattgagttatttgaattgggctcgtgatagcttcccatgatattttatctggttt

SEQ ID NO: 11872 - DNA, 66 bp, Zea mays
  unsure (1)..(66): unsure at all n locations; Clone ID: LIB3157-018-Q1-K1-A1
aaaantntnnnnnaaaaaaaaaaaaaaaaaaaaatnnttntttntttataaaaaaaaaaggggggg

SEQ ID NO: 11873 - DNA, 240 bp, Zea mays
  Clone ID: LIB3157-018-Q1-K1-A11
cgcgaggttccgggacggagactagggcttctgtgcgggacgggcgcctgccggtcgaccagaaacgggaggaggaggagagggagaaggcggtggccaacggcaggaaggcgtgaggtggtgagcgggagcgggaaggcatggtcagggacgacgacgagtggggtgtacatgtacatgtgaatatagtacttttttgtttttgcattcacccgtgatgaccgacccttgttacctttc

SEQ ID NO: 11874 - DNA, 137 bp, Zea mays
  unsure (1)..(137): unsure at all n locations; Clone ID: LIB3157-018-Q1-K1-A3
cccacgcgtccggggattgggnnnaaaaaaaaaaaaaaaaaaaaaaaaaaaaaaaaaaaaaaaaaaaaaaaaaaaaaaaaaaaaaaaaaaaaaaaaaagaagaaaaaaaaaaaaaaaaaaagaaaaggggggagaaa

SEQ ID NO: 11875 - DNA, 422 bp, Zea mays
  Clone ID: LIB3157-018-Q1-K1-A5
ccacgcgtcggacggggtaacctacggacgcctgctcacttttttgaaagccatcatgaccaacgccggcgggtgcaaccagcagctgcagggcgcctgcgcacccgcccgcaaggtcgtcaacttcagcggcgtgcaggaacctaacctgtcttgctcggagatgttcgacgtctaccgcaagccctttgcgctgtgaacctcctctgcattgtcattgccttcgcagactaccacagattcccgtctggaccctatatataaattaccgtgacggaataataaaccagacgggtttatattgtatatgatgatatgaggcctgcttgctcataatgtgtgccttaattgtcttggtgccaataatgtgtgtccatgtgtcggataccggccccgagccaagcttgtagcctgtggaccga

SEQ ID NO: 11876 - DNA, 392 bp, Zea mays
  Clone ID: LIB3157-018-Q1-K1-B1
cactccgcgctagctgaggacggtacagcggcacagaggtgcgacgtacgacgacgacgacgcaggcgccacacatggcatcccagctctccgccgccgtgccccggttccacggcctccggggctacgccgcgcccaggtccgcggtggcagcgctgccgtccgtgagggtgggcaggaagaggtcgtcgtcgcagggcatccgctgcgactacatcggctccgccaccaacctgatcatggtgacgacgacgacgctgatgctgttcgcggggcggttcgggctggcgccgtccgcgaaccgcaaggcgacggcggggctgaagctggaggcgcgcgactccggcctgcagacgggtgaccccgccgggttcaccctcgccgacacgctg

SEQ ID NO: 11877 - DNA, 149 bp, Zea mays
  Clone ID: LIB3157-018-Q1-K1-B2
cccatgttgggtactatctatgtactattgttatatccacaactatagttgtcctggttgaattgaactcaaaagggtttgtttgagaaaaaactgtccaagattggattgcttgttaaagctctattgttattggagtgttattgctt

SEQ ID NO: 11878 - DNA, 321 bp, Zea mays
  Clone ID: LIB3157-018-Q1-K1-B3
ccgtccgaaagcttagcttgttgcggatccctatctcctgcttgagaggtttctgtggaggaagaataccacttttgcaatctctcggcattacaaacgctttgatgtgttcgaagaagcagaagctaacaaagctgctggaaagtattacaacgcatcgatcgattaccaaatagagttttacagaaatgagggcctaacacattattctcctgcgaagcttcccatcacaagtgatgtccctgaaggctgtgtgatcatcagagaacacatccccatcacgaacctcttcacgtgcctatggttcaatgaagttgatcg

SEQ ID NO: 11879 - DNA, 340 bp, Zea mays
  unsure (1)..(340): unsure at all n locations; Clone ID: LIB3157-018-Q1-K1-B5
cggacgcgtgggtggtgccattgaggtctgtgccgagctgaggcccaccgtcgacatctctgggcctgccaacgccgactttgtgcgcccggagctccggcagtcttcctagattgaggcagtgagcggagagggagagggagagagaaagagaggatttcgtgtcccgagttagaacagagtgctgtatgttttgtgcgactgtttgtaagtcaagtctgaactgtgaacctatgtttgcttctatcagaggacccggagaaagcctgggcatctgtttccggaataaaatgggtccttcggngtaaaaaatcgcataaaactccagtgaccaattaag

SEQ ID NO: 11880 - DNA, 107 bp, Zea mays
  Clone ID: LIB3157-018-Q1-K1-B9
ctcccagtcaacttttgggttgctgcaccgttgtctccttataacgtaatgatttatttattgtgtgtagaactcctgttgtatagtaaagatgtgacattcgatcc

SEQ ID NO: 11881 - DNA, 377 bp, Zea mays
  unsure (1)..(377): unsure at all n locations; Clone ID: LIB3157-018-Q1-K1-C1
cgcgnccgatttggcaatcgtttactgaagccatatgtggtttttagaacctgaaattcaggaagaacagggcagtggtgagctggaatgcctggttcttgctagtgatgggctttgggatgttgtggaaaatgaggaagctgttttccttgggagatcggaggacacgccagagtctgcagctaggatattgacagagattgcttacttttgcggtattgctgacatttcacatgcattgtggtccaatttcaccatgacaaaaccggatgagccgcatggctgccaatttcagttgtaccctgcttcagtctattattatcctgcaagctggggggtgggcttctaccagatttaccctgtttttatgctattat

SEQ ID NO: 11882 - DNA, 345 bp, Zea mays
  Clone ID: LIB3157-018-Q1-K1-C12
cgatcttcttcccattgagaaagcccatctacgtgcccgaagggtctcctatagaagtgcacttctggcggtgctgtgcccccacgaaggtgtggtacgagtgggctgtgactacgccgaccccgtcgccgatccacaacagcaatggccggtcctattgggttggtctataataaggcatcaagatcatctttgtgttgtaacagagaggaaaaataacagagatgatatggtttagttctatctgagttgagcagtgtgcttagtgctactggtttctgcctggagagctgatcaaaggatatatgtagcgtgttgttatctgatctgaaaaggagtgcttga

SEQ ID NO: 11883 - DNA, 407 bp, Zea mays
  Clone ID: LIB3157-018-Q1-K1-C2
gcgcgcgcgtgttccgcgccatgttccccgacgagagcaggagccagcgggtcggcgacggggaatggcaggtccacatgctgccgctgcagttcctcctcctcaccgtgcgccccgtcgtcgtcatgcagctgcggcaccgcgccggcgggctcgacctccgagtcacggagtgggagctgagggggctggacgtcagctacgcgccatccagcttcgacctcggcgtgagcgggtcgctgtacgccgaccggagcacgagccgcgggtgccggatgaggggccacctggagatcgccatcacctgcgttctgccgccgcccctgcgccttgtgccagagaccgtcctgcgcggcgtcgccgaatcggtcctgtcgacgctggcggagaagatgaagcgggacgtg

SEQ ID NO: 11884 - DNA, 314 bp, Zea mays
  Clone ID: LIB3157-018-Q1-K1-C5
gtttgggcctttgtggacctgtagcaagcaaatttattaggaggctggcaagggattcattctagtagttgcagggactcgcctcaagctaccatatgcatcacagaacacatgaaatacatcacgctttaacaagttgggagcgaaaagaaggaactaactaaccttctcttaacttcgcttgctagatgcatgtatcgcaaacatttaacggtgcgctggagaaatatacctttccagcagctgtcggctgcaaagtggattgtgctcaataaacacgtcattgcctgctgtagtgctgatttggttttttt

SEQ ID NO: 11885 - DNA, 362 bp, Zea mays
  unsure (1)..(362): unsure at all n locations; Clone ID: LIB3157-018-Q1-K1-C8
gtacattaagcctattactgtcccaaaaaactcgatgttatctatccgatactggaagtctgtctatcgactgcaacgcttaagcaaaaaaaaaaaaaaaaaaaaaaaaaaaaaaaaaaaaaaaaaaaaaaaaaaaaaaaaaaaaaaaaaaaaaaaaaaaaaaaaaaacccaaaaaaaaaaaaaaaaaaaaaaaaaaaaaaaaaaaaaaaaaaaaaaaaaaaaaaaaaaaaaaaaaaaancgggggggcccttttaaaaaaaaaaaatttaataacccggtgatggaaactaaaaattttttttatggggcaaaaaaaaaaaaaaaaaagggccctgtttaaaaaagaggggaagggaaaaa

SEQ ID NO: 11886 - DNA, 401 bp, Zea mays
  unsure (1)..(401): unsure at all n locations; Clone ID: LIB3157-018-Q1-K1-C9
ggtttgtgctataaatagctactgtagttgcccatcgtcaaagttttgtagagtggttagtgtttttggttgacagacattggtgctagatttgggatcagccttcctaaacagtaccatctacttcagctcaatgatatgaataatgcttgtttgcaggacatattgctaagaatctgccacattatgtttgcttgaggtattaatttatccaggtgtttaatgctggagtacagttagaagatccctaatcaatttcttctcatttcagtcgtgtaagtcactctgtaagttttgctaccattttctaaactccattgttctccatatgattntatttggtcacatgctccttcatgtgatattttgcttcttgcaagttcttgtgatcttgtgttctg

SEQ ID NO: 11887 - DNA, 112 bp, Zea mays
  Clone ID: LIB3157-018-Q1-K1-D1
gaagaattggcttcaaaaaaaaaaactgatctttaaaaaaaatataaaaaatacgaggggtggagctactgtaacaatctgattgccgggtcttaacattaaggggaacctt

SEQ ID NO: 11888 - DNA, 357 bp, Zea mays
  Clone ID: LIB3157-018-Q1-K1-D10
cttccagactgacttccatccagcttattatccaaatgggatgattgagttcaacgagcttgttccatttaggctgacacgcaacttgcaagctttcttctcgaattttggtgttgaaggtctcattgtgtctgccatgtgctctgctgcccagtcagtggtttctcctaaacaaagccagcacatttggcatcatttggctatgtttttccgagatgaactgttatcttggtcgtggaggcggcctctgggcattccatcagtccctgtcgctgctggaatgatcaacccatcagatttccaacagaaggtggtaaacaatgtggagcatgtcatcagtcgtatcaagtcaatatc

SEQ ID NO: 11889 - DNA, 377 bp, Zea mays
  Clone ID: LIB3157-018-Q1-K1-D11
aaaaaaaaaaaaaaaaaaaaaaaataaataattataaaaaaacaaaaaaaaaaaaaaaaacgggaaaaaaaaaaaaaaaaaaaaaacaaaaaaaaaaaaaaaaaaaaaaaaaaaaaaaagggggcgcccctttaaaaagaccaaagaatccatccccggcctgccgaagttaaagctcgtaattagggccccctaaatcaaaaccacggcccgctataaaaaaacggggggccgggaaaaccccgggcgcccccaacaaaaaatccggagacaaaaacccccctttccccagggggattaatagacaaaaaggccccaaccaatcccccttccaaaaaatcgcacacaccagaagggaaaaaggaacccccccttaa

SEQ ID NO: 11890 - DNA, 342 bp, Zea mays
  Clone ID: LIB3157-018-Q1-K1-D12
ggccttcttcggaggggacagcgttttgttcgtcgacgtcgtgctcggcggccttgttgggtggctgtacgccaccgaggccatctgcggggtgaaggccctcgacgccggcaggacgccgctgctggcggcgtgggcggagcggttctgcgcgctggagggtgtcaaggggctgatcccggacgtggacaggcttctggagtataccaaggccaggcgggccgtatttggcctgccgccgctccgtccttaggcatagtggacatgtttcttttctttttttttcttttttaaaaaaattatatgttctatgtttgtttgaaataaagtactgttatggtg

SEQ ID NO: 11891 - DNA, 315 bp, Zea mays
  Clone ID: LIB3157-018-Q1-K1-D4
ccgaaaaaaaaaaaaaaaaaaaaaaaaaaaaaattttttaaaaaaaaaaaaaaaaaaaaatatgggggtgtatataaaaatattagggggggccgatgtgggggatcccatgtttgggagcgcgcggttgcctcgccatggctttttctggggggctccttttgggttggttttatttttctggctttttcctggcaatcctttggtttccttgtggggttccttaccttttttgtcctgggcggttttccccctttgcgcctggggagtaccgtcggtggggcccttttgggctgtttttatccattttttttt

SEQ ID NO: 11892 - DNA, 416 bp, Zea mays
  Clone ID: LIB3157-018-Q1-K1-D6
caggtcgtcaactcttgggatgaattcacttctgctctgaataacaaaaggttgatcttggctccttggtgcgatgaggaggaagttgagaaagatgtgaaagctcggacaaaaggggaactcggagctgcgaaaacattgtgtactccatttgagcagccagaacttccagaaggtaccctgtgctttgcatctggaaagccagcaaagaagtggtcgttttggggccgcagctactgattgcctttgctgggagtccttttggattcagtagtgaaccatgtaacttcgagattttggatacaaatcggaaaatccatttacattgtttttacatcgacttgcaggtctgatgtcatcacagctgaaaaaaagccattgattccagtggacattacttccgagttttgatgttg

SEQ ID NO: 11893 - DNA, 403 bp, Zea mays
  Clone ID: LIB3157-018-Q1-K1-D7
gttcattcctgagcggtatcctggcctttctaaattttgcttatacattgctggtgcttaactactcctgcatcgggttccaggtactgagcttcaaagaaaccttggcgtcctaccggagcgtatattatgttggcacaattgttcccattgtgtgtcttctgctgggcaatgttatcaagccagcaaggaaggcgaaggctcggaagaccgagtgaggaaataaatactcactcaagtgacctttacatagaagaaagatggtgaagcttcaacgaagataaggacattctagttttcaatttatttattctgtctttttgtacggtatcaaatttagcataaggataatgtggtgaccccggttctcctacctcggaactcgattgcgattgatcaatca

SEQ ID NO: 11894 - DNA, 327 bp, Zea mays
  Clone ID: LIB3157-018-Q1-K1-D8
gttcattcctgagcggtatcctggcctttttaaattttgcttatacattgctggtgctgaactactcctgcatcgggttccaggtactgagcttcaaagaaaccttggcgtcctaccggagcgtatattatgttggcacaattgttcccattgtgtgtcttctgctgggcaatgttatcaagccagctaggaaggcgaaggctcggaagaccgagtgaggaaataaatacttactcaagtgacctttacatagaagaaagatggtgaagctttaacgaagataagggcattcttagtttttcaatttatttatcctgtttttttgta

SEQ ID NO: 11895 - DNA, 292 bp, Zea mays
  Clone ID: LIB3157-018-Q1-K1-E10
gagactcgtgggctatattggaccgtttttttctaacccaccacatctccagacactgcggccatatcaacggaggtgccggtcccaatttcgacaggctatacctgatgaaggccttgtatgaggattagaatactgggttgtgactgaaggctgctagatttagctcgagatactgcttaaaatcacactattgcgatgtaccttacatgagcgcacctgacttgttcttaatgttacccatcatatggataacacacattctgccccacttactaattataccagcatt

SEQ ID NO: 11896 - DNA, 364 bp, Zea mays
  Clone ID: LIB3157-018-Q1-K1-E12
ggcaagctgagggttggcttcgcggttttttcctaaggaaacgtatggtttggcgcctgctccataggaggcaaaacgcatgcgccgagagagaagcttcgcttgtttttaacttgtgtatttatgcggccggcggtgtgaatatgctacatgtttagtgatgctttccgagacctgagacaatgcccgtctgttttaacctggctcaaggaaatttctcgatgtgtttgccttcgtggttaagcccatcttgtacccaattgtcaccgtgcatcctggcaacgtgtactcaagtatttttccttgagttatgcgtgagaaaaaaaattgatttcgttttttatatttaaaatttttttttttt

SEQ ID NO: 11897 - DNA, 168 bp, Zea mays
  unsure (1)..(168): unsure at all n locations; Clone ID: LIB3157-018-Q1-K1-E6
cccacgcgnccggggacgcttgggcggacgcttggccggattctttttcggactcgtgggttttccttttcccttgagacctatttgctgcaacaagaaataataatgaccaaactcttgtattgacagtgaggttttgactgtgttagctgttaccggcttgtcttc

SEQ ID NO: 11898 - DNA, 407 bp, Zea mays
  unsure (1)..(407): unsure at all n locations; Clone ID: LIB3157-018-Q1-K1-E8
gngatgtgccctccatggttgatcgtagtttaactcaggcttccaggacatgtgttgcgggtaataccttttcagcgttactcatccttcatctgtatttccagtaatccagcttgtggcgagtgacataatgctaataagtgacataaataaccatttgctgatatgctgtatatgttggtcttgtggatggagcgctctgaagattatatccattgccagtaataaatcgtggctttatctgtcctaataaaaaaaatgatcttataaatcatttaatctacttacttacactctttatttcataatttgtgattattttaaaaaataccactattattatgggcgctccttttaaaggacccatctttacttaccctttctttcaacttcttatttttttttta

SEQ ID NO: 11899 - DNA, 399 bp, Zea mays
  Clone ID: LIB3157-018-Q1-K1-F1
gtcacgcgtagcgaatagcgttggctgatgggtgatggctacaggcctcgagagagagcgcggtaatctccacagaattttctgagttatggtttgtcggtgtcggtcgttgctgctgaaagggactggattgaaggtggtggtggggctttggagcgtgtaggcttgggatttgtggttaattggctgtgaataaaggagagattgagagggactgaagaggaggattgtaggtccagcgatctatcatatatgtgagtgtatagagaagttccagcccggttaagtttagtcaggcataaaagtttagaaacaacaaaaaattccattgccatttgttccttttgtatcacagctaccatcggatatttgctcttatattattcactccttttcttt

SEQ ID NO: 11900 - DNA, 337 bp, Zea mays
  Clone ID: LIB3157-018-Q1-K1-F10
gtaaatctgaaagaaaatcccagttcttctgcccaaaaaaaaaaaaaaaaaaaaaaaaaaaaaaaaaaaaaaaaaaaaaaaaaaaaaaaaaaaaaaaaaaaaaaaaaaaaaaaaaaaaaaaaaaaaaaaaaaatgaaaagattaaaaaaaaaaaaggacatgccactggcgcgtggtctttagaaatggctatgctgaattcactatgtttgcttatgagttgttctacttttaccttacaaacaaggaaaacaagctggttttctccagtaaaaaattcgatacagcactcgatttcactctatgaaatgtcagtattcgtaagcgggctcttaac

SEQ ID NO: 11901 - DNA, 340 bp, Zea mays
  Clone ID: LIB3157-018-Q1-K1-F11
gtaaatctgaaagaaaatcccagttcttctgcccacaacataagaagctagaaaagagggaaaaaacaaattgattatttaaaaaataaaataaaaaaaatgacaaaatctaaaaaataaagagctaaaagcctaaaaagcttaaaatacaataaggacatgccactgccgctggactttataaatggcgatgctgaatttgatatgtttgcggatgacttgtacaactttgaccttccaaacaacgactcaagcttgttttcttcactcccaacatgcgatccagctcctcctctccaccctctgaaatgtcagtctttgcaggggggctttttatttt

SEQ ID NO: 11902 - DNA, 172 bp, Zea mays
  unsure (1)..(172): unsure at all n locations; Clone ID: LIB3157-018-Q1-K1-F12
gaaaaccggcccgacccacgcgtncggagaatcctgattaaaatccaactttttttgttttcatagaaacaggcgaaaagcggcgagggccctcgtctgaatgaagactgatccaatctgaaaatactgagaccctgctttgattgtttggcggcaaaccatattctgaacg

SEQ ID NO: 11903 - DNA, 395 bp, Zea mays
  Clone ID: LIB3157-018-Q1-K1-F2
gcctgccccacgcgtccgccgaatggtaacctgaagccaaggtccctgaattctgatgctactgaaagcaaggaagctgggaagaaagagggcattcagaaagtaaatcctggtgcaagggtcagaggctcctgtaacaggaatccagtcaaaaacaccaccgcaaaggaagcagttgccaagaacaccggtaaggaaaccaagaaagtggccatgggtcagcaggaagttagcgaggctccgtcagcccttccaaatcaggaatctgctgatgttgtgaaggagatgacccatgaagataaagagaacatgggcgatattgaaatggcagcggatgtcgccgtagcccaagatatctagaacagccggaccaacttcagattcgatcctttttt

SEQ ID NO: 11904 - DNA, 413 bp, Zea mays
  unsure (1)..(413): unsure at all n locations; Clone ID: LIB3157-018-Q1-K1-F6
cccacgccgtccggggggggaggaagcttgaaaaggatgacaaattttatggaattccgagcaaagcacggaatcgnagacatctgtcgatncgcgtaatcttttttgtctccttggttaccaaatgtagnccccttctgttttctcttggaggacaacacgaggtggtggtgtatgaaaaaagaggagacctcctcaaggggtgggggggactgactgatactacgaccactgatgttacaccccgtaaactattactatccaataagaatgttttcttcttcaactatctaggatggtcattttgttggtgtttagttaaagcagctatccaatatttttttggatccaaatgtgtatgtcctcgctacttggttcttcatgcttatgaatgtggagtgatgatgtcctgt

SEQ ID NO: 11905 - DNA, 402 bp, Zea mays
  unsure (1)..(402): unsure at all n locations; Clone ID: LIB3157-018-Q1-K1-F9
gttgtcattgctgtaggagaaggagctcgctaacgcagctgggaagctcgcagagtgccagaagacaattgcttctctggatcgtcaaatcaaatcactgacagatctcgacagtgtggtgctagagcctgaaaggcttgagtccagcagggacatgccactgccactggacttcagaaatggcgatgctgaatttgctatgtttgcggatgacttgtacgactttgaccttccaaacaacgacacaagcttcttttctccactcccgtcgtcgatccagccctcgtctccaccctctgagatgtcagtatttgcaggggggctctcgactcttagcagttacaggagcaaaagagcaattagaaagtgatgaaagaaaagctgcccanatgccatgctaac

SEQ ID NO: 11906 - DNA, 292 bp, Zea mays
  Clone ID: LIB3157-018-Q1-K1-G12
gctaagccttcgtacgacgtgtaaatgtgtttggtacaatgagtgctgcgactacgattgagcacccctctacctagtttgcaaaaaaacagtgtcccatggactgtctgttgtccctctatataaatgtccaatgaagcttgctaatgtgtggtcaaaaaaaaaaaaaaaaaaaaaaaaaaaaatataaaaaaaaaaaaaaaaaaaaaaatacttttttaaaaaaacaaaaaaaatataattacctgggcatttaattaaaaatctaataaaataaaaaatccttaaaagg

SEQ ID NO: 11907 - DNA, 214 bp, Zea mays
  Clone ID: LIB3157-018-Q1-K1-G2
gccggcatgagctgaggacggatgaccatgtgtatgaaagcaggaaggagcgtgaaagggaagaggaagaagatagaaggggtgcggcaaatgctgttaggggtggagaattcatttatatctgaactcaacagttccagaatgtaatccctttgatgaacttcgtgattaccatgttgacatctatatatacctagttacttatgcttgagtt

SEQ ID NO: 11908 - DNA, 425 bp, Zea mays
  unsure (1)..(425): unsure at all n locations; Clone ID: LIB3157-018-Q1-K1-G3
gaaaaaccgggnccacccaacccgtccggaaaaaaccaaaaacctttttaggggaaaatgtattaacgggagttctgcccactgaccatgggggttcaaattggacaccacccgatcactcaaggttggtattttgctctccatgttgcattggggcaggtcattgcggggtgtatatagtttagatattacgagcctcacacagatcaaatcttgaatcgtctataaaagctactcgagaccaccacgaattagggtttcaaccgcgatggcggccttctaggctggcggatctagcgcgggcgtcgctggccaagcgcatggcggctgtcaccggcgtggcgaccgtgcatgaacctgctaccactgctgggcccgttcatgatggagaaagcgcgcgctcgatctcgcggttcttcggggcg

SEQ ID NO: 11909 - DNA, 380 bp, Zea mays
  Clone ID: LIB3157-018-Q1-K1-G4
cggaagctaaaaaccggccgcctcgccatgttttcaatgttcggcttcttcgtccaggccatcgtaaccggcaagggcccgctcgagaacctcgctgaccacatcgctgacccagtcaacaacaacgcatgggcctacgccaccaacttcgtccccggcaactaagctcaacggctatgctatgcaacttcattgtctttcggatcggagagggtgtacgtacgtggattgattgatgctgcgagatgcatgtgtgtcttttgtttcacgttgcattgcataggcaagtcgagatgatgagttggcgttgtacactaagatgaaccatgtttgtgcaatagtggtggtttttgtttcctgctggttaattgttgatatcc

SEQ ID NO: 11910 - DNA, 376 bp, Zea mays
  Clone ID: LIB3157-018-Q1-K1-G5
gtgacttcccgatctccggcgatggccgcgcggcgcctcggatcccccgcatctaggtggctgcgcccgtccgcgctgctcctcctggtcgcctctgctctcctctcggccccgtcgccggcccgggccctccggttcgacctcgagtccggccacaccaagtgcgtctccgacgagatcaaggtcaacgccatggccgtcggaaagtaccacatcgtcgggcccgaccccaactcacccgacgcccagctccccgagtcgcaccgcatctccctcagggtgacgtcgccgtacgggaacagcatgcactacgcggagaacgtgcagtcgggccacttcgccttcacggcggcggaggccggcgactacctggcct

SEQ ID NO: 11911 - DNA, 326 bp, Zea mays
  Clone ID: LIB3157-018-Q1-K1-G7
ccgacccacgcgtacggacactacccgatctccaccgatggcctttcgttgcctagcatcccccgcatctagggggatgagcacgaacagactgatcctcctgcaaacctttgttctcctctcggacccataaactgcccgggccctccggttcgacctcgagtccggccacaccaagtgcgattacgacgagatcaaggtcaacgccatggccgtcggaaagtaccacattgtcagaccctaccccaactcacccgacgcccagctttcacaagttggaccgcatttcccttatggtgacctcgccgaactggaacagtctgcac

SEQ ID NO: 11912 - DNA, 324 bp, Zea mays
  Clone ID: LIB3157-018-Q1-K1-G9
gcaagttcttgtgatcatttcgagaccatttgctaagatatttttatatgatgatgggagcatgcctcatacagccgtggtactgaaattccccttcgcctgggatgaggactgcttctatgcagcaaaagacgaactttatgttacaagatgtttaaacgcactgcatctgtttcatacatgatcctgctgtactactaaatctcacatgcactagccgaaataaagcctgtgcgcttttcatgtataaatctgtattgcggcttcgctaaaaataaaatttggcaacctgtttattaaaaaaaaaaaaaaaaaaggggcggc

SEQ ID NO: 11913 - DNA, 339 bp, Zea mays
  unsure (1)..(339): unsure at all n locations; Clone ID: LIB3157-018-Q1-K1-H12
ccggtcncnncggtctttgcttnntctcaacnntacnngattcnnttattactttccanacgcttttcnnngaatttctgaatcgactcggccaggagtggggnngcacggttgctttccgggcgaaagttgcattcacttttggaagcgtttggtgaaatgggaatcnaatgaagctnnttggagtacnctcggcnnagagttctttacggtggnnntccccataaccgaggggagagaanntattaaataacccaccanncagttgaaagaacccannaagagttttcatttatgcnncacgagcttgaggggacaaaaatatttgcaaagagtttt

SEQ ID NO: 11914 - DNA, 411 bp, Zea mays
  unsure (1)..(411): unsure at all n locations; Clone ID: LIB3157-018-Q1-K1-H2
tcgggctgcaaggatatggcccttcaggaatcccgggaacggatggctcaaggagtatggacttgaaagcctttccaccaggatatggacctgctggagaaaaccagggcggtggtgcttcagggagcgtcataagcccccaagctcggtctgcagagaacgtagagttttcagacgaggctagaaaaaaggctatacagcgggagctgagacggcggcagaagttcaggtgatggccgtgatgcgaacttctgatcctgctcatcgaattttgactacggattactactttntaagactacatatccagtcttgatggctgaatgagtgacgaccctagttgtcgagacgcannaaccttttgtggatgtgttccttttacagactttcttggcttgtcatgaatttcta

SEQ ID NO: 11915 - DNA, 365 bp, Zea mays
  Clone ID: LIB3157-018-Q1-K1-H3
ccgtccgccatttgcgactatgggaggctttgttcgggctacctgtccgtcggagcgcggcctggaggcgacggctcctggctcctcagcgcctacatttggccgcagatggcggcggcgctggagtcggacggcgtctttaagcctctcacggcggagtatctcggtctcacagtcacaccctagcggcgacgtggtcgatctacatgcgctgcatgcatatcagatcagaatcagatatcgttcgtattgctcattgttgattgcatgattgcgcgctaccttgtattgtgtacgtcgttcgtgtaataatggtgcatggtctcgggccagtgctaaataaaaatctctgttaattttctttc

SEQ ID NO: 11916 - DNA, 73 bp, Zea mays
  Clone ID: LIB3157-018-Q1-K1-H5
ggcgtaataaaagcagaaggcgagctatatgtatttttgcaaataaagcacattgagatctcataatttgaac

SEQ ID NO: 11917 - DNA, 302 bp, Zea mays
  unsure (1)..(302): unsure at all n locations; Clone ID: LIB3157-019-Q1-K1-A1
ntaaaaaaatataaaaaaaaaaaaaaaaaaataaaataaaaaaaaaaaaaaaaaaaaaaaaaaaaaaaaaaaaataaaaaaaaaaaaaaaaaaaaaaaaaaaaaaaaaaaaattaaaaaaaattatattaatttttgttaaaaaattttaaaaattaaaggggggggggttttttaggggttcaatttttttttccctttttttcccaatttttatttttttttttggggactttaatttaatttgctgggcggtttttttaaacttccgttttggggaaaccttggggtttcccaattttt

SEQ ID NO: 11918 - DNA, 437 bp, Zea mays
  Clone ID: LIB3157-019-Q1-K1-A10
cccacgcgtccgcccacgcgtccgcggacgcgtgggcgcacgctcacctccgacctcctcttcaagggcgccgtgccggggctggcgcacatcgagcccaacaagctccggctctgcctcgagctcgtgcagtcggcggccatggtcatgtcccgcgaggacgcgcacacggcggtcaacgccgcgcccatgtacggcgagccttccggcggcggcgtgtacagtgcgagcggcaccagcagcacgagcttggtgaacctcaacctggacaacaggatggtgtacttgaacctagggatggacgcgcagttcggcaagatgggcgacggcgatgacggcgggggcagggggccgtcttctttgttctccccgcatggctaccattggacaagatggaaccggccggttgctgctctactatctccttgtaagcttaa

SEQ ID NO: 11919 - DNA, 259 bp, Zea mays
  Clone ID: LIB3157-019-Q1-K1-A12
cggacgcgtgggttctgcggcacgccggcgtcgaccacgtgcaccgacccgtccaagttcgtctcctgggacgggatccacttcaccgaggctaccaacaggcttctcgctcgtaaaatgcttcaggaactgctaagccgtggagcttacaatgttgcaatctgattttttctatgcccgcgagtcgtatcaacgtgtttcccatagcggatcggagctagcgtggaacctcttgtgcaataaaaaaataagtgtcatc

SEQ ID NO: 11920 - DNA, 217 bp, Zea mays
  Clone ID: LIB3157-019-Q1-K1-A2
gcctccgtggtggtcagtaagccatggttcatttaagctgctgctgtacctgggtatctgcgtcgtcgtcgtctaataaacatctgtggtttgtgtgtcatgaatcgtggttgtggcttcgttggtttaatggacctgttgtgtcctctgtgttgtacccaaaactcttctgcagcagtatggcttgaatccttgtgaagtttgatgtttgaacttt

SEQ ID NO: 11921 - DNA, 410 bp, Zea mays
  unsure (1)..(410): unsure at all n locations; Clone ID: LIB3157-019-Q1-K1-A3
accgaaccggaggtcccggccaggcctacgcgtcccattaactggttgcggaagaacaagtttcaagtgggtgacaaggttcgttcaagaaagcttgaaatctcttgtcgtcctgatactatggaaatccctaatggaacagtagttggtgtcgacgatgacgaagggcgcgatgcgtacgttcttgtacgagtctatgggctgcataatgctttaaaggtccgctgctcgacggtggagaggggtatcatatggtcttgttgatggaaactgggtcactgcagctagaaaaccattgtgcctcaatttgaggagcttttccatctatattttttaccaggcacagngcctatttatctcttgtattcgaacacttttgcantaagcaataaaagaatactttcttcgat

SEQ ID NO: 11922 - DNA, 423 bp, Zea mays
  Clone ID: LIB3157-019-Q1-K1-A6
cgtcgtcgtccttgcagctctgccactcagcaaagggacgtacggaggaggaagacggaggggcggcagtcgccgccgtggacgccgccggaacgagctcgtggccgtgctgcaacgagtgcggtttctgcaaattgtcttacccgccgcagtgccaatgcctggacttctcgatggtcgggtgccacccagagtgcaagcggtgcatcaggtacaccgccgacggtggcgtcgacatcccgcccgtgcacgcctaccgctgcgccgacatcctcgtcaacttctgcgagcgccgctgcactcccgccgcagctgcttctatgtgtagcgctagcaccaagtagaaggatgcatgcatgccatgcatcctcgtcgatctgcatgccattgccgggtgccgcttttgagaagaagcaaataaat

SEQ ID NO: 11923 - DNA, 236 bp, Zea mays
  unsure (1)..(236): unsure at all n locations; Clone ID: LIB3157-019-Q1-K1-A7
aaaaaaaaaaaaaaaaaaagggggggggggnggaagaaanaagggaagangagggaggaaaagaagggggggaagaagaaaaaaaaaaaaaaaaaaaaaaaaaaggaaaaaaaaaaaaaaaaaaaaaaaaaaaaaaaaaaaggggggggggggccgcccnnngaaannnnnnnnnnnnnngggaaaaaccaggagaaaangggccgggaaaaaacaaaagaaaagggggggaaaaa

SEQ ID NO: 11924 - DNA, 212 bp, Zea mays
  unsure (1)..(212): unsure at all n locations; Clone ID: LIB3157-019-Q1-K1-A8
ctgttttgtttnnnnnttntnttttttttttttaaaaaaaaaaaaaaaagaaaaagggggagggaaaaaaaaaaaaaaaaaaggggggtcgaatataaggatacaaatatagcgtacgcatgcatgcaaagaactggccaattaattaaggggggggccttttaaaagactcgggggttatttcacatgggtgggagtggaaaaactttttt

SEQ ID NO: 11925 - DNA, 385 bp, Zea mays
  Clone ID: LIB3157-019-Q1-K1-B1
atcgcattgacagatcgttcatcgtagctgcctccagtcgtctcccgagatcttctccggctataaatttccgccccaattccccaatccagatgcgcaaacatcgaatcgtctcactcgtgtctgccctgctcatactgcttgccctcgccgtatcgtccacccgcaacgcacaggaggattccatggccaacaacaccgggacgttggtgggcggcatccaggacgtgccggggagcgagaacgaccttcacctccaggagctcgcccgcttcgccgtcgatgagcacaacaagaaggccaatgctcttctggggttcgagaagcttgtgaaggccaagacacaagtggttgctggcacgatgtactatctcactattgaagt

SEQ ID NO: 11926 - DNA, 315 bp, Zea mays
  Clone ID: LIB3157-019-Q1-K1-B2
cggacgcgtgggcggacgcgtgggctctaacgaagcgattgatagagtttgaaaatacggtttctgccagtttaccgattgaagaatttctagcaccagctgatgaatataatgaagcgtctgtttcaaaacattcgcctaagtctggggaaatcctttgcaaacacaagggtaaagattttgagcattttgcccatggactttgtgaaaaatgcttcaataagttcactaaactgtcgggtggactagaaggtggtgctaaccctccagcattccaacgagctgaaaacaaaagactttgagctgctaaaaggg

SEQ ID NO: 11927 - DNA, 91 bp, Zea mays
  Clone ID: LIB3157-019-Q1-K1-B7
aaaaaaaaaaaaaaaaaaaaaaaaaaaaaaaaaaaaaaaaaaagggcgaaagaaagaaaaacaaatacgggcgggcgcctgaaaggaccag

SEQ ID NO: 11928 - DNA, 314 bp, Zea mays
  Clone ID: LIB3157-019-Q1-K1-B8
aaaaaaaaaaaaaaaataaaaaaaatttatatttaaaaaaaaaaaaaaaaaaaaaaaaggggaaggaaaaaaaaaaaaaaaaaatattaaattttaattaaaaaaaaaaaatttaaaaaataaaaaatatgggggggccttttttggggttccattttttgtttttctgggttgtaatttttatattttttttttgtggcctctttattaatttcctgggtggtgttttttaattttttttattggggaaacccttgggtgtcccaactatatgggttttgttgattatctcttttttgcttgggtggttttta

SEQ ID NO: 11929 - DNA, 276 bp, Zea mays
  Clone ID: LIB3157-019-Q1-K1-C1
ggtgataataatggatatcgtgggtggagccggggtcgtccaaccggaacatttttaaaaacacggcttggtccaactctttattatgggtattaatggagcccccacgagatgaggaagagtggtagaagatcattttttgagccggatttagctcttacaatatcatacccgctctgggggttcgatccatcatagagggctacccgtagtccatacaagttcatgtaacaattaacaaagtgctgctttgggcgacccagatgcagtttcgtt

SEQ ID NO: 11930 - DNA, 357 bp, Zea mays
  Clone ID: LIB3157-019-Q1-K1-C10
gaaaaagtggacgttatggatcattcttttatttaacaagtcgattcttgtaagataagctatgaagcagtgctctttttaggacccgttttacctgtatcttattttgtaaggttttggttgtttgtaacattgtgtaagatgtctctttgtgaacatgttaaagctttttgttctattcttatatttgatttatttatatgaataaaggtttacttgttcctttttaaatattataaattataatatctattattttaatattttaattatgtggtggtctgttttagaggatttcaatgcttaacttaacttcttgcaattccgattttttattgcttttttttattgtgtgtt

SEQ ID NO: 11931 - DNA, 377 bp, Zea mays
  Clone ID: LIB3157-019-Q1-K1-C12
atttttctccagatatgtcaaaacatctctggttcagcatgttgattcaaaaaatttaaatgaaacttcaagacaggaaagcgggggagcgtcttgttatcatttggagagacatgatgattatccgctagagatccctgtcaaatgctctttggattggattcgtccaagatgaaggattttgtatgaggacgcaacagctgtgtttcgcagtgtcaaatttctatttcaagttcgataaataatatagaatagcttttcagctagtttctaattcaagttcgaccaaggaaaataatctagaatagctttttgtgctaacattgtaattggcgattgcggataattcgttgcttggacaaattacagctatttcg

SEQ ID NO: 11932 - DNA, 267 bp, Zea mays
  Clone ID: LIB3157-019-Q1-K1-C2
gcggacagctctcctagatctctctgatctggtctgttcggccgccctccctccgtcatcgtcgactccccctgcgtccgttcctttggatctgaataagatggtggtgatctgagtggtggtcttagtttatcatgtatcgctcgcagtttaatttagcggtttaggtgtggatctgtgaaccccatggcgcctctgcttgattcgtgtttcacctgttatgttctgagattcatgataatgctatgagaactgaaattcccgttt

SEQ ID NO: 11933 - DNA, 57 bp, Zea mays
  Clone ID: LIB3157-019-Q1-K1-C3
aaaaaaaaaaaaataaaaaaaaaaaaaaaaatttaattttaaaaaaaaaaaggacgg

SEQ ID NO: 11934 - DNA, 429 bp, Zea mays
  Clone ID: LIB3157-019-Q1-K1-C4
gcaagctgctaaaggacgccataaatctcagcagttaactgctgagcattacggagcagaagtttgctagttttcttgtccttgtagttctaatagcgtgctgtcagcatttatctggacttatggaggaaattgccgaggcccatgtttgacgtcgcgctcgcaatcgctccctgtgaaggttggagtggtgaaccccagcgacttccttctgatccgtgttttcttttgtgcaactaatatgaagatgaagtacagagtatgtaaaaacttaagatgcatatcgctctgtagctcctttttcttattgatgtacgtactcatataccatggtactgttatcgtttgctgcctcgcctccatttcgttaaactttggtgaactcaggttcaatcaaataaacaagagatacatgccacactttgtaaa

SEQ ID NO: 11935 - DNA, 392 bp, Zea mays
  Clone ID: LIB3157-019-Q1-K1-C5
ggcactcttggtgtggtcgactcaactaacaaggtaccagccccgccaggccccagcttgtcgtgcagacaatcctaaatttatggcatgaaagcaacctatgtacatgtcgttatagggcttcagtatcatgacgcgcctgttgtttcttcccccaccttgtgcttgtttaggataagtcatccatatttagtcatctggcaaacggtttggttttgtttgctgcaggtgatgcatagtaagcctgtaaatggagttatttctctttattttctagtcatcttccgtcacgaagtagatttggcattctgatgaaagatgattgtacatatcgagatgtgtgatgttggggacttgttctcaaatgctatgaattaagaacgaggcaacat

SEQ ID NO: 11936 - DNA, 429 bp, Zea mays
  unsure (1)..(429): unsure at all n locations; Clone ID: LIB3157-019-Q1-K1-C8
atttccttcaacgaccaggacagggctgttcctcacttcgccaccgggctgatcggcagggacaacgccatagcaaggcacgggatccatgggctctactggctgtttaacatcgatgtggccagtgcttggcttgtgcaaggggtgaacaccatctacctgaagcagcccaggagccagagcccgtttcaggggttgatgtacgactacttgcgtttggagggaccatgcggcttctaatcgatttttgtgtgaaattgcgttgctagatgtgaaattacaactgcattcactgtgtaaacccaatgcatacgattgggggaaagatgttgcggtattataggcactggggttatgtaggtaatgttagtttaattttcgcatttataaccgtgcaagctatgctgattngtaactataatgatgtaa

SEQ ID NO: 11937 - DNA, 311 bp, Zea mays
  unsure (1)..(311): unsure at all n locations; Clone ID: LIB3157-019-Q1-K1-D2
cggacgcgtgggaattcagtctggccttgtcatgcatgcaataaataaagtgatgggtttccctgtttcaatnaaaaaaaaaaaaaaaaaaaaaaaaaaaaaaaaaaaaaaaaaaaaaaaaaaaaaaaaaaaaaaaatggtggtanataaaaaaaagggcggcttcattaaaacaatcaaacttatttaaagcctctttttaaaataaaaactatatttaaataatctgccaaactaaaaaaaaatatggcggctgttaaaaaaaatgttaattaaaaaaaaaaatctttttacaaaaaataatatttttt

SEQ ID NO: 11938 - DNA, 138 bp, Zea mays
  Clone ID: LIB3157-019-Q1-K1-D5
cgcgtgccgtgcgcgccctgtggctgtggctgcagtggcgtcgcgttgggtgttttcttgttgtgacgaagaaaaaagggtgtgggttggggtggtccgctggccggcgcaccgggtaaaagacgagaggttttaatc

SEQ ID NO: 11939 - DNA, 436 bp, Zea mays
  unsure (1)..(436): unsure at all n locations; Clone ID: LIB3157-019-Q1-K1-D6
gtccgcagcctatccaatcccattccaaatccgcagtccgcagacggtagcggaagcggggcacacacagagaagccaatggcgctgtccctctccctcgcgcgccccgcgcccctcgccgtttccgccggcgcaggagccaggaagctacccgcagccagcctagcattcccggcgaaatccttcttcggcgcgccgctggccgccaccgcggcctccgtcgcgtcgccgctcccgcgcaagccggccacctccaccacctcgctcgaggtcgtcgcggcggggaagaaggggtacaagatgaagacgcacaaggcgtcggcgaagcggttccgggtgacggngaggggcaagatcgtgcggcggtgcgccgggaagcagcacttgctcgccaagaagaacaccaagcgcaagaagaggctctcgaagatggtgc

SEQ ID NO: 11940 - DNA, 306 bp, Zea mays
  Clone ID: LIB3157-019-Q1-K1-E1
cggacgcgtgggcgggaattggcagcggacgtgaacaaaaaaaaaaaaaaaaaaaaaaaaaaaaaaaaaaaaaaaaaaaaaaaaaaaaaaaaaaaaaaaaaaaaaaaaaaaaaaaaaaaaaaaaaaaaaaataaaaataggggggggccgttttaaagttccaaattttttttccccttgtttccaagtttagtaaaaaaaaaaagaaagggcaaactctatttattggccgggggtttaaaaccgttttatttgggaaaaccctttttttacccaaattaattgattttgaaaaaatcccttttt

SEQ ID NO: 11941 - DNA, 357 bp, Zea mays
  Clone ID: LIB3157-019-Q1-K1-E12
cggacgcgtgggtgcacgcgcaagctatacgcgtgccaagctaaatagctgctgcgtatatatactactactactgccgctgtgtacatgtgcgtgtatgaactgtgtgtgtgtgtatggtctcaagtcactgtgttcgtggctgctttccagatcggtcagtgtgttttctcggtttgcttggatctgcacatcaagttgttgtatcaccagctaccagagggaccatgccctttgctttgaaaaaaaaaaaaaaaaaaaaaaaaaataaaaaaaaaaaaaaaaaaaaaaaaaaataataaaataaaaaaaaataaaaaaaaaaagggggcggccgttttaaaggaccaaatttta

SEQ ID NO: 11942 - DNA, 342 bp, Zea mays
  Clone ID: LIB3157-019-Q1-K1-E2
aaacaaaaaaaaaaaaaaaaaaaaaaaaaaaaaaagtaaaaaaaaaaaaaaaaaaaaaaaaaaaaaaaaaaataaaaaaaaaaaaaaaaaaaaaaaaaaaaaaaaaaaaaaaaataaaaaaaaaaaaaaaaaaaaatcggggggcccgttttaaaaaaccaatgttttttcccagcttattggaattttaaatttttttttttgggccccctaatttaaattccggggcggccttttaaaaacgtcgttactgaaaaaaccttggccttaccaaataaaatgacttggaaaaaaatccccttttaaccactggggttataaagaaaaagcccagcacgaatg

SEQ ID NO: 11943 - DNA, 72 bp, Zea mays
  unsure (1)..(72): unsure at all n locations; Clone ID: LIB3157-019-Q1-K1-E4
tgtttatctatttttatatttaattatcaataagaaacattcacattttttgttttgagaaagagggcnnat

SEQ ID NO: 11944 - DNA, 126 bp, Zea mays
  Clone ID: LIB3157-019-Q1-K1-E6
cggacgcgtggggagtcttcacggcaggcttttcctgttcttggtgggccttgtgtttgctggtgcagctcctacaaccggccaataggacgtgctcaatgccaccttgttataataatgtttgat

SEQ ID NO: 11945 - DNA, 184 bp, Zea mays
  Clone ID: LIB3157-019-Q1-K1-E7
gcgtgaagtacgaatcgactgctaggagctggactcagaaatatgcaatgggctgacaagctattggtctctcgtagacctaaagcacgtactgccttctgtaactgaaaccagatgtctaaattaatttgtccattcgtgcatcgaacttttgatatataatggaaggagaaacattgatagt

SEQ ID NO: 11946 - DNA, 368 bp, Zea mays
  Clone ID: LIB3157-019-Q1-K1-F1
ggcctttcgctacagagatcgagctgggggctacacaagaatgttaagaaccaggatacgtgttggtgatgctgctccaatggcatacatcgagttcgtggatagggagaatgagcttcgagaggccaaacctgcaacgccgccgcctcctcaacgagtccctcttgatccatgggccaagtcacgtgctagccaacagtgggcaggacctaaaatcaccaagagctcggaaacggacggcttatgagctagtatacctatgttccatagaaagtttcagttattttgcttaagagatttttttatctagagatatctgccgatagaataattcaaactttattgtcattttgtatgcttctaattca

SEQ ID NO: 11947 - DNA, 62 bp, Zea mays
  Clone ID: LIB3157-019-Q1-K1-F10
cgtctgttcatattccacaccactcctatgtaaataacggcatgcatgataatctctctccc

SEQ ID NO: 11948 - DNA, 233 bp, Zea mays
  Clone ID: LIB3157-019-Q1-K1-F12
ggatggaacgcatgccggatgcgacagcggcaacgaagatggtgggcggatggcaataatgtagtgctctgttgatctattctatctgtgagttgtgacgagaaacctgttgtatacggaggtcctgaacttgcagaattcaaattggcaatgtagtgtgacgaaataccttgtattgtatacgaaaatctgaacttcttgcagaatcaaaattcagaaaattaggtttggcg

SEQ ID NO: 11949 - DNA, 347 bp, Zea mays
  unsure (1)..(347): unsure at all n locations; Clone ID: LIB3157-019-Q1-K1-F2
catccacctcaccgaggcggcctaccgctccattgccgacggctggctcaagggcccctactgcagccctcccatccagcactgatcgagctagctgggccgggggactgaatagctaattaagctagcagcatattattcatgagtgacatcatcgtgctttgtttgtttacggctaattgccatgtgcatcatcctagcgctctagcaggttcatcaatgatgggtttgctatttggtttgtcaattagttgttcaattggtgaggaaggggtagctggtgtttcggcggtgtggtgggaacagtgatgaataaacgtgtaatggactgtttacaattnannaaa

SEQ ID NO: 11950 - DNA, 436 bp, Zea mays
  Clone ID: LIB3157-019-Q1-K1-F3
cggaatggaagggccgacccaggcgtccggtcattgccggctccgccggccacagtagcaccgcagtgtgagcagtcggttcccgtgcgtttaccagccgtcgccagcaaggtggcggcgggcggcgcgccaacggggccgccggtgcctgtgccaccgccggacgttatggccggggacatgggccagcagatccaagggaagaccagggtgggctccagggtccgcaaccgcaaggcgctctccaagtagtagagaggtgaacacggtggccggtgggatttaggaagaagctaatgatcctggtcgtttatgcagcagcgatccttacatttgattatggatatcaggatgtggtttaatctctgtgagatcctttctgtgagcgtgagaacgttgatatcctatcaaagttctcggaatatacaatcactac

SEQ ID NO: 11951 - DNA, 194 bp, Zea mays
  Clone ID: LIB3157-019-Q1-K1-F4
accgactggaacagggaggtggagaacgccaaggcgaggctggacaagtgggacgacaagaagcagcccctcctagtcgaagattgaaggaagaatctagtagatcacgcagtgtagcgcgtgctggtggattttttgtgtgtcgtgtgtgtgttttggagtggattgaatggaccatttggcatttgggtttt

SEQ ID NO: 11952 - DNA, 412 bp, Zea mays
  Clone ID: LIB3157-019-Q1-K1-F5
aaaaaaaaaaaaaaaaaaaaaaaaaaaaaaaaaaaaaaaaaaaaaaaaaaaaaaaaaaaaaaaaaaaaaaaaaaaaaaaaaaaaaaaaaaaaaaaaaaaaaaaaaaaaaaaaaaaaaaaagggggcgcccgttttaaaggatcaaattttacttccccttccttccaacgtaatactttttttttagggcccccaaaattaaattaacggcccgcgttttaaaaactttggaattggaaaaaccctggctttcccaaattaaatccctttgaaaaaaatccccttttccccagttgggtaaataccaaaaaggcccgcaccaatcccctttccaaaaatttgcccaccctaattggaaaatggaaccccccttttaccggcccttaaaccccgggggttgtggtgtttaccc

SEQ ID NO: 11953 - DNA, 215 bp, Zea mays
  Clone ID: LIB3157-019-Q1-K1-F6
ctccgacctgtcctgtgtgtgtgtgcgtgtgtttttgcactggatattccccctcccctctcgtggtcgtagggagggtttgtatgttcagtggaaagatgtttggtatggtctactccattctatttcatgattcatgaatatgtatgtatgtatgtatgcgtgtgatgtactactgtggtatgctgtataaatttataaacacgcgctttatt

SEQ ID NO: 11954 - DNA, 118 bp, Zea mays
  Clone ID: LIB3157-019-Q1-K1-F8
gaaacatctacttgcgagatgcagcaactacttatatatatgtgtatattcaataattgtgccacacgaatttgactatgatgcaaacctcttacacaggtaagtcttttttttccgt

SEQ ID NO: 11955 - DNA, 212 bp, Zea mays
  Clone ID: LIB3157-019-Q1-K1-F9
gctgagcatcatgcatgggagggggtaaaaaaaaaaagccctggaggtcaggacggggaggaaaaagcaggaacagggttttgaagcgtgtggagttgttgtgaacgagggatggatgatgcatgcgggagtggagtttctgcaggggatgatgtatgatggatgtagtagggtaggctaggccaggttgggtgtgtacaatgcaagccccc

SEQ ID NO: 11956 - DNA, 378 bp, Zea mays
  Clone ID: LIB3157-019-Q1-K1-G1
cggacgcgtgggcggacgcgtgggcggacgcgtggggtaatgatgaatgcaattaacttgaagaagttgtgtaactcaattttttttctggacaaaaaaaaaaaaaaaaaaaaaaaaaaaaaaaaaaaaaaaaaaaaaaaaaaaaaaaaaaaaaaaaaaaaaaaaaaaaaaaaaaaaaaaaaaaaaaaaaaaaaaaaaaaggggggggccgttttaaaggatcaaagtttacttccccgtgcatgcaacgtaatagttttttttttgggccacctaaattaaattaacgggccgtgttttaaacaacgtgggattggaaaaaccttggggttaccaaattaattggttttgaaaaaaatccccttttcgccagttggc

SEQ ID NO: 11957 - DNA, 123 bp, Zea mays
  Clone ID: LIB3157-019-Q1-K1-G11
caagaaattttctcgtgggtttggggaatcctgatacttacacaagatatgcgagatgatatggtttaaattttgagcggaagttgcggatccttttattttttaaaatctcggtgcaatgtt

SEQ ID NO: 11958 - DNA, 167 bp, Zea mays
  Clone ID: LIB3157-019-Q1-K1-G12
gctcatcatcgtctacatcctcgactatgtcttcggctggtcataggctcatcggagtgaacgcctggctttttgacagccgccggtgtttctgtttgccctccttgtgattttaactatatgtccagactttttctcatgtgatgctgtgatcatgttctactttc

SEQ ID NO: 11959 - DNA, 366 bp, Zea mays
  Clone ID: LIB3157-019-Q1-K1-G3
ctgcgatacagcagcaattcatcgaagaaaattagagctcttctgcacaacatcaacagttgagcccatggcaggattttgctccccaaattttcatctctagtcaccggtatagaggcaggttaatcaggttgtctagtttatacgtcccttaattggtgggatgctatacacatcatcatcagaaaagaaccgaaatcatatggagccaaaaatgttactaggtcgtccggtgtttgtgctcgacggtgtcacatttgtttttctagccgatcgtgcatatggtcatataaaacactgcactgttgattgtactgtttatatagtgaaatttgaaatgatagatggaataggagatagaatgga

SEQ ID NO: 11960 - DNA, 394 bp, Zea mays
  Clone ID: LIB3157-019-Q1-K1-G4
tctgcctggtcacgtgccgccaacggtcgcctctcagtaaatacggtagcaccagagcttcgcttgcagtgcgatgacgggcatgtgatctcgaagattacatttgcgagttacgggacccctacaggaggttgccagaacttctctgtagggaattgccatgcatcgactactctagacttggtggtagaggcctgcgaaggcaagaacagatgcgcgatcagtgttaccaacgaagtattcggagatccatgccgcaaagtcgtcaaggatttggcagttgaagccgagtgctccccgccatcggttaaccaagaacctcgatacgatatatgatcacggtactgtattgtggggcctaaggtcttggaagagctatggtggacgttgccgc

SEQ ID NO: 11961 - DNA, 427 bp, Zea mays
  Clone ID: LIB3157-019-Q1-K1-G5
cccagctgctgaggaggaggacgatgatgatgttgacctttttggtgaggagaccgaagatgagaagaaggctgctgaagagcgtgctgcagctgccaaggcttttggcaagaagaaagaatctgggaagtcatcagttttacttgatgtgaagccatgggacgatgagactgacatggccaagcttgaggaagctgttaggagtgtccagatggaagggctgctctggggcgcatccaagcttgtcccagtcggatatggtatcaagaagctgcaaatcatgatgaccatagtcgacgatcttgtctctgtcgacactctcattgaggactatctgtgcgctgagccagttaacgagtacgtccagagctgcgacatcgttgccttcaacaagatctaggcgtgactttcgatcagtccttcccct

SEQ ID NO: 11962 - DNA, 354 bp, Zea mays
  Clone ID: LIB3157-019-Q1-K1-G7
ccggaatcgtgaaaaaagatagcatcaagattcacggattttagactgcaaatttgaagtgcttgtgtgtgcctatcatatgataccatatgataccaggtattgaagcttcggaagcttgttggccttcgtaacatcagtagtcgttattcatctgaatatgtgtcattatttgatttgataagactggtattgatgcaagttgtccttgcagtatgttttgtaagtgttacctgcatgaaagtatcgtttgtctggggaactgtctactactgatattgaataacaagagagattgctgttaaaaaaaaaaaaaaataaaaaaaaatatataaaaaaaaataattattaatt

SEQ ID NO: 11963 - DNA, 112 bp, Zea mays
  Clone ID: LIB3157-019-Q1-K1-G8
ccctgatcagctaaactggccggttggtaccaagtatatgcagccaactgtatccccatcgttgtatgctgtaaagcaactgctcatgttttatatacttcagtttcattgc

SEQ ID NO: 11964 - DNA, 423 bp, Zea mays
  Clone ID: LIB3157-019-Q1-K1-G9
ggcgagttcaaagcttcgaacaacctgaaccgactcttaccatcccgttgcagatctgcagctcatccaacaaaccaatcatcgggcatcctttgctctttggggctgtcgcttcccgcggggctgatgttggcatccaggtctccaagaccggtgaaacattagacgatttcgacgtgatcctttccatcgaccagctgaacaagatgtgccgagatgtcacccagatcaggttctccgctcgctccgaacagaacgtgcacgtcgagcatgtcgacgggcagtgggtcgccgtccagccggaggtggcaaattcccatcgcctgcatgccgaggttacgagtgtcttagactcttgcgctcctgataagctgtgtgtcatggagattgttgagcaataaaagtttcttgcctgtgtactgt

SEQ ID NO: 11965 - DNA, 404 bp, Zea mays
  unsure (1)..(404): unsure at all n locations; Clone ID: LIB3157-019-Q1-K1-H12
tttggtttgagaaatgagatgagtccatcttctcaaaaaaaaaaaaggaaaaaaaaaaagaaaagaaaaaaaaaaaaaaaaaaaaaannttaaaaaaaaaaaaaaaaaaaaaaaataataaaaaaaaataaaaaaaaataaaaaaaaaaaaaaaggggggggccgttttgggggttccaggtttccttccccgtgcttgcgccgttttggtttttttttggggccccctaatttcatttccctggccggcgttttcccccgtcgggcctgggaaacccctggcgttccccccttttttcgctttgcggcccttccccttttcgccggttggcgtttttccgagggggcccgccccgttcgcctttcccaccagttgccccccctgtttggcgattgggcccccc

SEQ ID NO: 11966 - DNA, 229 bp, Zea mays
  Clone ID: LIB3157-019-Q1-K1-H2
ttttatttttcataccggttgtttttgtctgtatagccacatgtcatgtgggtgttcgaactggcctgtaatggtctaccgttcgtgacttgtgttttcccactccatttctgatacttaagcacatatgaaaaagttgtttccggatcaaattcaatggtggtgtatcatggttaaaaaaaaagcaatatttagatttaaaaataaaaaaaacaaagaaagttaaact

SEQ ID NO: 11967 - DNA, 224 bp, Zea mays
  Clone ID: LIB3157-019-Q1-K1-H4
cagccatttcatataggggccgtgccatggcccatgggactggagtgagactctcctaggacaacattcgtttctttaaactcttttgctgttgtgtctggtaggctgaatcgactctttgcccatggaaccctggtaatatctgatgcaaaggaaacatgaggttgacataaacccccctgcagctgcaacctgtatgtcaatgccacgcttggcttcctttg

SEQ ID NO: 11968 - DNA, 400 bp, Zea mays
  Clone ID: LIB3157-019-Q1-K1-H5
cggacgcgtgggaaaaaaaaaaaaaaaaatttttttttaaaaaaaaaaaaaaaaaaaaaaaaggaaaaaaaaaataaaaaaaaaaaaaataaaaaaaaaaaaaaaaaaaaaaaggggccccgtttgcaatttaaaactctaaattttgagcggcccttttaaagaatccaatctttctttcgcgtgcttgctatttaattatttttttttttggtgccccctaaatttatttccttggctcttttttttccaccctttagatttggaaaaacccttggttttcccaatttattccctttgaaaaacatcccctttttcccattgggttttatagcaaaaagcccccctctcttcgccttttcaaaaatttgagaagtcttattggttattcgtcccccct

SEQ ID NO: 11969 - DNA, 197 bp, Zea mays
  Clone ID: LIB3157-019-Q1-K1-H7
ccatgatttacgtctacctgtagactcatgtgcttatataaaatcatacgacgaaactgtacgtacggcgtagagtggtgtggcggggtccaatgattcagatcagattgtacgtgtccatcgatccaaactgtagttgtgtacgcagtacagtacgtgctagctacggatgatatatatagcttgtgcgttttttt

SEQ ID NO: 11970 - DNA, 174 bp, Zea mays
  Clone ID: LIB3157-020-Q1-K1-A1
ggtttctccaataattgtcgctgttctgtactcttctcttctcttatgttctgtctgtcagtgtgtatgagatgatgctcatcttatgttataaggcttaatcatgtgtctagttgtactttctgtcttgtaatgttatcagttatatgaataataagtgttatgtaagctcct

SEQ ID NO: 11971 - DNA, 301 bp, Zea mays
  Clone ID: LIB3157-020-Q1-K1-A11
gcagaccaaacggattagagtggcttcaccaccggtatatacatattggctttggtcatgccaccgaagtctcaggctcggggagctgggggtgctcggaatggcgctggctacctgttttgacaggtgggaaactgactttatgcagggctcggctgggatttgggtcctgtaacaatggtggatcctgaacggacgaaatatttttttttaatagaaactcaccaaattgatcaatttcaaaaaataaaaaatataaatttttttttcccttatttttggggcgggccttttttaaaag

SEQ ID NO: 11972 - DNA, 383 bp, Zea mays
  Clone ID: LIB3157-020-Q1-K1-A12
cggacgcgtggggccggagggagggcggtctgtaacgtgccagcaagccgtttccggcacagacaagacaactcacacggatcctcgcccatttgggacgactcgacacagacaacaatggccgtcacacctctcacgtccacgaacaagagatgtaaaaacgtgcgagacgccgagacggctggtgctgacacttggagcggtaaaagatctggaacttctcagccattctcttcccgtgctgatctctggtcgtgcgtcactgtgaatcgcgatcgcgtgagaaatcccatgtctggaccgagagcgccggacggatcggagaggacggtcgcactgcacgagcacgagcggtggctacgggctcaatcccattctggacg

SEQ ID NO: 11973 - DNA, 340 bp, Zea mays
  unsure (1)..(340): unsure at all n locations; Clone ID: LIB3157-020-Q1-K1-A2
cggaatggaaggnccggcccagacccacccgtacggcgccactgaaaagtcgattgatacatgggtggcttctgaaggagtggactcggtagctgaagcagaatctgttgtcctggaaagccttagcagccatgtccgcactgtagttgcaactctggggggcaagcaaggagcagctagcagattcgacaagtggcagtaccttcactctgggttcacggtttggctatcggtgtccgacgcaagtgacgaggctagtgcgagagaggaagcccgaaggagcgtgagcagaaaaacccttttttacgcgaaggctgaaaaaaaaaagaccctcgccgga

SEQ ID NO: 11974 - DNA, 374 bp, Zea mays
  Clone ID: LIB3157-020-Q1-K1-A3
gtgaaacgcatcatagaagatgtaataaatagcatgtctgatgatgaaggtgaagaaggctcggaagatgaagcagaagacaacggcaaggtggagaagtcaaagagtgatcccgatggaggagaagagaagtgattctgtggaccggatgtgccagtggtggtttggattgaacctggaaggactattttccggccaattctcccgtgtttggaggtttttggctctgtacaattgggggcaccgcgagaacgagccggtgacctgggtactggttacaaagattgttaaccatttcacagccatacacacctagttgtgcttgacttggtagtggatgtagtctctagtgtatggtcatgtacgatagtttg

SEQ ID NO: 11975 - DNA, 175 bp, Zea mays
  Clone ID: LIB3157-020-Q1-K1-A4
agagaataacgcagagctctctgcttcctgtctgtcttctgccgacccggccgttggagtggactattgtgttcgtcctatatgtttagcagcagcaggtgtattgtgcgggtatgtaatggtattgcaactatattgggtgtaaaaccataataaatgtgggcaaatatgcatg

SEQ ID NO: 11976 - DNA, 451 bp, Zea mays
  unsure (1)..(451): unsure at all n locations; Clone ID: LIB3157-020-Q1-K1-A5
cgacccacgcgancgnggacgcaagggaaaaaaaaaaatttattttttttaaaaaaaatttttaaatttataagatgttgtttaaaaaaaaataataaaatataattctataattatattaattattaatttaatttataattaaattttattaattttttattatatatctatatttattcataaattttatatttttatttatataatataataattttaattatttaaaaataatatattataaatatttaaaaaaaaatatataaaaatattatataataattatctattattttaaaatataaaatataattattatatttattataaaatttaataataaattatattttatattatatcttattatttacataatatatatatctaaatattatttaaattctaaatatttttatatatatattatttcattataatatataat

SEQ ID NO: 11977 - DNA, 355 bp, Zea mays
  Clone ID: LIB3157-020-Q1-K1-A6
agcagttgagcagagcagcgtaggatcagattgtcgcggtagagatgtggcagttgatcctgtttggttgcgagcgaaaacaagaggcggcggcggacagcagcccttgacatggtcgataggagatctgtaggtggagagaagcaagatgagattcttctgacttttttagcaacgcaacaacaaaagatggggctcgagttaagcagccgttgtactttaggtttcttttggttggtaatagtgttcctagtgtaagcttgatgatgcagcagaacaatgaacagcagtacatgtttttttcccttattttcatgcgtgatttggaaattaaatttattgcgatctttctttt

SEQ ID NO: 11978 - DNA, 236 bp, Zea mays
  unsure (1)..(236): unsure at all n locations; Clone ID: LIB3157-020-Q1-K1-A7
tcgctgggctgttctcttttcttctcttataaactgcccgtcggagcgtgtgagaagatgctcatcctatattgtaaagggcaaaaaagtggctcagtggcaccttctgtcttgtaatgttatcagttatatgaataataagtgttatgtaagctcctcacaaaaaaaacacggattggctatcggtgtccgacgcaagtgacgaggctagtgcgagagaggaagccctanggagc

SEQ ID NO: 11979 - DNA, 210 bp, Zea mays
  Clone ID: LIB3157-020-Q1-K1-A8
cgaccacgcgtcgttgaaacactacgcttgtatgtttgtaataaacacataagcatggcggactaagtcatgcgaaaaaaaaaaaaaaaaaaaaaaaaaaaaaaaaaaaaaaaaatataaaaggggcgcgttaaggtccaacttcaaccaaatggggggcctttttttataagtactaaattaattcatggcgtgttttaaagtgaactg

SEQ ID NO: 11980 - DNA, 317 bp, Zea mays
  unsure (1)..(317): unsure at all n locations; Clone ID: LIB3157-020-Q1-K1-A9
agagaataacgcagagctctctgctcccggcctgtcttctgccgtcccggccgtttaatttactagtgtgttcgtcctatatgtttagcagcagcaggtgtattgtgcgggtatgtaatggtattgcaactatattgggtgtaaaaccataataaatgtgggcaaatatgcaaggaaaaaaaaaaaaaaaaaaaaaaaaaaaaaaaaaaaaaaaaaaaaaaaaaaaaaaaaaaaaaaaaaaaaaaaaaaaaaaaaaaaaaaaaaaaaaaaaaaaaaaaaaaaaaaaannnnnnngggggggggccgttttaaaggat

SEQ ID NO: 11981 - DNA, 352 bp, Zea mays
  unsure (1)..(352): unsure at all n locations; Clone ID: LIB3157-020-Q1-K1-B1
gtccggtgtggcaaacatcaatttgtagtgctgtcaatatctgttcaatatacgtgcagctcagttctgacttgnaaaaaaaaaaaaaaaaaaaaaaaaaaaaaaaaaaaaaaaaaaaaaaaaaaaaaaaaaaaaaaaaaaaaaaaaaaaaaaaaaaaaaaaaaaaaaaaaaaaaaaaaaaaaaaggggggggccgttttaaaaaatcaaagtttacttacgcgtgaatgcaaagaaaaaatttttttataggggcaccaaaattaaattaactggccggggtttaaaaacgtgggaactggaaaaaccttggcgttaccaaaataaatcgctttgaagaaaatcccctttt

SEQ ID NO: 11982 - DNA, 116 bp, Zea mays
  Clone ID: LIB3157-020-Q1-K1-B10
gaaatgttctagaacctctaaatctattactaagagcaacgatattgtcgcttcttaaaccttagtactacggatgttatgagctaataaatatatttcgctaatgtgatgcagtt

SEQ ID NO: 11983 - DNA, 303 bp, Zea mays
  unsure (1)..(303): unsure at all n locations; Clone ID: LIB3157-020-Q1-K1-B11
ccggagggtctcaaaggtttgggaactaaggttgttgaggatgaggattaagccctgtataccatgagataaatttgagaatgttgcttcagcttattgttatctactgccaatgactcatgtaatagaagcttcgagacttgtctcctttcaagtgcttcgtcaagtccaaatatccacatggtatttcatggtcctacgcattttctgacaacgttgttattatgtcgtgccnnanaaaaaaaaaaaaaaaaaaaaaaaaaaaaaaaaaaaaaaaaaaaaaaaaaaaaaaannnncccccc

SEQ ID NO: 11984 - DNA, 302 bp, Zea mays
  Clone ID: LIB3157-020-Q1-K1-B12
cgcgtccgtcatttgagcaatggggaatgtaactggtactttacctttacgtatgtaaggttctggcatggctttgccgacctctgcttctggaggtgggagaccaagatgccaagaagagtgtgtaccatatatacaccatgcatgcgtgtgccatggctaccttaagaagcgtagcgaggaggattcctcatttctggttgacttcctccaggaaaccaggggaagagaaggttgtctcataaatttgtacaaaaaatgactatttcaccttgattacatgccttctctgttatgccctg

SEQ ID NO: 11985 - DNA, 306 bp, Zea mays
  Clone ID: LIB3157-020-Q1-K1-B2
ctgaaactactggaaacctacagccggctgtagttggatgcttttgcttgtgctgttatgtttatggaagcatcagtgttggcgatgaatataatgacgatcattctatatggggaagtggtgctaatgaatgaatactcctttttataaaaaaaaaaaaaaaaaaaaaaaaaaaaaaaaaaaaaaaaaaaaaaaaaaaaaaaaaaaaaaaaaaaaaaaaaaaaaaaaaaaaaaaaaaaaaaaaaaaaaaaaaaaaaaaaaaaaaaaaaaaaaaaaaaaaaaaaaaaaaagggggggggccttttt

SEQ ID NO: 11986 - DNA, 319 bp, Zea mays
  Clone ID: LIB3157-020-Q1-K1-B3
gcgaggccgacgtcgatggcgatggccagatcaactacgaggagttcgtcaaggtcatgatggccaagtgagtaaagcctgcggtaacggtatagtaccccgcgggaattgaaggaggaaaccaaaccgtgcatcgcatattagaaaggcagtgcaggtcttgtttccttcgtcttccccatgaagaaaccgtactagctgtagctgctgaacgtttgagtccccctgctgccacccttatctccatttgtgtcatcgaaactccttgcttcccctgctgtgtgaatctgtacggctttgcgtgttctggacactgatt

SEQ ID NO: 11987 - DNA, 306 bp, Zea mays
  Clone ID: LIB3157-020-Q1-K1-B6
tgagaattgatacaccttaataacatcagagggaaaaggaagatgtacttgctagaatgcttcagctggaaaaagagctgcatgagaagcaacagcttgagctcgaagtataacggttgaatggtacactccaagtgatgaaacatatataaggagaccatgacccgggggatattcattaaaagatggagaagctgagtgaaagatttgagcgggaaaagaagcgcctggaggatttgagtggtgatctggtgacaaaagagcgtgaaagtaatgatgagctacaacaagcccgaaaagaattga

SEQ ID NO: 11988 - DNA, 259 bp, Zea mays
  Clone ID: LIB3157-020-Q1-K1-B7
tcggagggtcttaaaggtttgggttctattgttgctgatgatgaggcttacgccttgggtaccatgatgaaaatttgagaatgttgcttcagcttattgatatctactggcaatgactcatgtaatagaagcttcgcgacttgtctactttcaagagcttcgtcaagtccaaatatccacatggtattttatggtcctacgcattttatgacaacgttgttattatgtcgtgccaaaaaaaagccgccaatatataaat

SEQ ID NO: 11989 - DNA, 304 bp, Zea mays
  Clone ID: LIB3157-020-Q1-K1-B8
ataaaaaaaaaaaaaaaaacaaatataatttaaaaactaaaaactaaaactaaaaaagaaaaggggacacataaaaaaaaggcaaacaatataatgaacacacacactctataacaaaaaaggggcgttcgcgtctttggctcccctttctaaaaaccccagtctttcaaccttataacttgctaaaacgtttcccctatatccatgtctcggcccgttttaaaacacccctctttccagataaccccctttcgaaccccctcttaaccccctggcctaccctccctttttccccctcggtttt

SEQ ID NO: 11990 - DNA, 287 bp, Zea mays
  Clone ID: LIB3157-020-Q1-K1-B9
tgtaagaagaaatttggaatgttgacctgaaaaaaaaaaaaaaaaaaaaaaaaaaaaaaaaaaaaaaaaaaaaaaccaaaaaaaaaaaaaaaaaaaaaaaaaaaaaaaaaaaaaaaaaaaaaaaaaaaaaaaaaaaaaaaaaaaaaaaaaaaaaaaaaaaaaaaaaaaaaaaagggggggggcgtttttaggggatcaaattttatttccggttgtttgcaatttaatattttttttttggggccccaaaaataaaataaaggggcggggttttaaaaacttggggt

SEQ ID NO: 11991 - DNA, 313 bp, Zea mays
  Clone ID: LIB3157-020-Q1-K1-C1
aaggaagtctcttcctacctgaagaaggttggatacaaccctgataagatccacttcgttccaatctctggttttgaaggtgacaacatgattgagaggtccaccaaccttgactggtacaagggcccaaccctacttgaggctctggacttgatcaatgagccaaagaggccttcagacaagcccctgcgtctcccccttcaagatgtgtacaagattggtggtattggaactgtccctgttggacgtgttgagactggtgtcattaagcctggtatggttgttacttttgggcctactggtcttactactg

SEQ ID NO: 11992 - DNA, 267 bp, Zea mays
  unsure (1)..(267): unsure at all n locations; Clone ID: LIB3157-020-Q1-K1-C2
cggacgcgtgggcggacgcgtgggcgattttctcttgtgtcaggcataaaaaaaggttggacgggctgctagtattccctgctgtttggtgttttcgtatcggaggacgtctgtagatgtacaattcctcaggccccttgtgttcggcttgaggaagtttccgttgtaccctggacctgctatagccggttgattcttcaattgtattcctaaaagttactacacnnnanaaaaaaannaaaaaaaaaaaaaaaaaaaaaaaaaaaa

SEQ ID NO: 11993 - DNA, 317 bp, Zea mays
  unsure (1)..(317): unsure at all n locations; Clone ID: LIB3157-020-Q1-K1-C3
gccggattccgggcgccccgcgccggcccagaaaacagacattcgttgggaaccattagaggagctttatttgcgggnnaaaaaaaaaaaaaaaaaaaaaaaaaaaaaaaaaaaaaaaaaaaaaaaaaaaaaaaaaaaaaaaaaaaaaaaaaaaaaaaaaaaaaaaaaaaaaaaaaaaaaaaaaaaaaaaggggggcggccgcccaaggggacccaggctaccggccgcgggcgggcgacgtaaaagcctttcaagggggcccccaaaatccaatccccgggccgccggtaaccaccgccgggccggggaaaccccg

SEQ ID NO: 11994 - DNA, 363 bp, Zea mays
  Clone ID: LIB3157-020-Q1-K1-C4
gtcaacagcttcggggataagcctggtggactcaaggtggttgattcttttgtgccacttgctgagatgttccaatacgtcagcaccctccggggcatgaccaaggggcgagcgtcctacacgatgcagctcgccaagtttgacgtcgtcccacagcacatccagaaccagatctccgtggcaaaaacagaggaagctgctgcttagttttggttttccgtagatatatccatacagcaacaggagagcaggttgataggaaggacatcaaggtgtatgtagctttgtagtgtaaatctcttaaggcttgttcggatgattggaggggattgatatggattgagagagattttaatttactat

SEQ ID NO: 11995 - DNA, 308 bp, Zea mays
  Clone ID: LIB3157-020-Q1-K1-C5
ctacgatatcgacactggcctcgtgtccgtcgacttgccggtgccggagcaggagctatacctttggacgctggagattatgatctaggtcgtgatgctgtgcgccgacgccaacgcttgccttcgcggctgagccattatgagtcggacgacattgtcatttgctatgtgcacgagagatagatgtattgtggtggtgttgtataattggcatggggagtgttttttttgttatgttcttatctgtatatcatacgtgctctgaatgttatataatacttgataataaaggatggtgctcctttaat

SEQ ID NO: 11996 - DNA, 345 bp, Zea mays
  Clone ID: LIB3157-020-Q1-K1-C6
ggtggagaagtttgccgactccttcgacatgcctgggttcacgcttgagagcatgaaatacaaggagtagacatgcctcccatgcgcggcaaggtcctcctgtaccgatgtctttccttgtggtggcgcagggtgccatggcactgcactgccgccacacttacgatgatgatggtgggttatggattttgtctacaatgtcagcaggataggctcacaattgccccctgccctccggtttggtcgcctctcaggttttcatttggtagttgttcgcagggaaccatatgagaattgcaatgtcaatcaggtgtttgccaataataattgggtgggttctgctaa

SEQ ID NO: 11997 - DNA, 304 bp, Zea mays
  unsure (1)..(304): unsure at all n locations; Clone ID: LIB3157-020-Q1-K1-C7
gaaaacctcatctggcgaccatacgttatttaccttgtatgggcgctccgcttgctggtgagacacggtgttacgagttacgactcgatgaacatgtaataaagcttttcagagaaaaaaaaaaaaaaaaaaaaaaaaaaaaaaaaaaaaaaaaaaaaaaaaaaaaaaaaaaaaaaaaaaaaaaaaaaaaaaaaaaaaaaaaaaaaaaaaaaaaaaaaaaaaaaaaaaaaaaaaaaaaaaanggggggggccgttttaaagaatcaaagtttacttccgggggattgcaaggaaaaagtttttt

SEQ ID NO: 11998 - DNA, 415 bp, Zea mays
  Clone ID: LIB3157-020-Q1-K1-C8
gaaactcttggaaagcagtaatcctcactctacccttgatctcaacaaagcggcaccactcatttgttgatgtcttttcaccactgcaaagtagaaacattaggagttaggatatgataacagaatgttaagatgtgtgttttggggagggccctcacctcaaccaagtaaccaacatcaaaactgaccaccatgcattggtccagtgtggcctatccttgtgccaatgaatctaacaattctttttctgggatgcacgtggtctgaacaggcctgatcggcggaactcagctcatgacggcattatgtctgccaatgctgacataggatgtttacatgagacaagcttgttcggctgactgcagtcgtagctgcaatgtatagagataaaatactgtagccgcagcgagcaagc

SEQ ID NO: 11999 - DNA, 304 bp, Zea mays
  Clone ID: LIB3157-020-Q1-K1-D1
ctgtgtttggttttgcaggacccaagcaagtttgctgttgccgccccggttgctgctggggactctggcgctgcggctgctcccaaggaagaagagaaggctgcggagcctgaagaggagtcggacgaggaaatgggcttcagcctcttcgacgactagagctgctgttttcgtcaaactgctgcaagttttggctttttttttatcatccacaagtactgtttcctatatttttttagcagacaaattatcgtgtgtaatcgacaatgatatctccttcaattttaagtacctgtgttgtgtc

SEQ ID NO: 12000 - DNA, 311 bp, Zea mays
  Clone ID: LIB3157-020-Q1-K1-D11
agttgtgctcttatgcgcactgctacagatatcaagagcaaggcacttcatatcgggaagcttagaaatataatacagtgtgcaatttcattgcagattttttgtgaccctttttgtgcaaggacattgtccacagtgattgttatctgatgatttctcttcccctctcttctcaatcatctaggttgcagttcttctcttcagtgggaatccactctacattgaaagttttgcttgcatatagtccttcagatgcatgtatgttgtaaaaggatgctcagaagcgcaatgtatcatttctatttagttgt

SEQ ID NO: 12001 - DNA, 230 bp, Zea mays
  Clone ID: LIB3157-020-Q1-K1-D12
cggacgcgtgggcggacgcgtggggtcgaggtccaaggggtggaggccgtggcggttttagagggcgaggaaggttctaggtgcagtttgagtttgatgatgttttccccttgaagcatcatagctgcacaattggaaacttccatgttattgtaaccagatatgtttaaggtagcagagcactttatctgtggaacttggattctcaactgaaacaaacggtttgtacc

SEQ ID NO: 12002 - DNA, 377 bp, Zea mays
  Clone ID: LIB3157-020-Q1-K1-D2
ggaccgcctcaatgcaaagacaccatatcaaactgctccttcagatgcggcaccagtcaagaaggagccggagagccagccatggctcggattaggatcgaatgccgtggattccagcctgaacctcagctagtacacaacaacacagccataataagacggcacagcaacggcacccaccatgacctggaatttgctttgccactagatcgagtttggaaaccataaatattcttagttatcgtgttttagtgttcgcttatgtcgtggttctacgccctcttgtcgcatagttctggatgtaaagaaaagtagccagtcatgaccatcactgggagtcgaagagaaagtttttgggggtattaacacacggtgac

SEQ ID NO: 12003 - DNA, 359 bp, Zea mays
  Clone ID: LIB3157-020-Q1-K1-D3
cggacgcgtgggccgagaaggacgagcttcgcgacgagaagcagaaactgaaactggagaaggagagtctagagcaccagatgaagctgatggcatcggctccagcctacatgccccatccgaccctgatgccggcgcctttcgcccaggcgcccctagctccattccatgcccagggccaagctgcagggcagaagctgatgatgcccttcgtcggctacccagggtacccaatgtggcagttcatgccgccttcagaggtcgacacctcgaaggacagcgaggcgtgccctcctgtcgcatgatcaccttgatggggctggtcctgctcacaccatgtggattagccgcaaactagt

SEQ ID NO: 12004 - DNA, 118 bp, Zea mays
  Clone ID: LIB3157-020-Q1-K1-D4
ctgaagttatagtagcctacttagtttgttcagagctttgagtaacaagtgttatgggtatttcatttttatcttgcaattgtttacatctgtgggaaaaaaacccagtttcctacgg

SEQ ID NO: 12005 - DNA, 325 bp, Zea mays
  Clone ID: LIB3157-020-Q1-K1-D6
gtcggacatgttcccggtgcgagaggcatggatgatgtaccagcaaggcaggctgctagagatcgtggacgcgagcatggggagctacccggagaaggaggtgctccggtacatcaaggtggggctggcctgcacgcatgccacgcccagcagccgccccacgatgcgccaggtgcttgccttgctgtcggaacggagatgctcccgccgagtttcgccgagcaccgcggccaccacacggcccctgccctggggggtttgcccgccggtccgctaatccatgcgtcgccgaaggcgaagtggccggcggcggcgccgtcagcag

SEQ ID NO: 12006 - DNA, 397 bp, Zea mays
  Clone ID: LIB3157-020-Q1-K1-D7
cgcgaacgagctgaactctaatacacactgttttattttttaataacatgccactccatttcgggaggctcataaatataatacattgctcaattttattgcatattcttagtgatcctttttgtgcaacgacatttaccatacagatcgttatctgattatacgtttaccaaatttcttctaactcaaccatgttgcatctcttctctttaatcgaaatccacacctcattaaaatgttttacttccatatatacctttttaatcatgaattgaaataatacccatcctttacaagcaccaatgtattttttctttatttaattatacaatacaatataacttttctaatttttatataataataataaaatattttttcttttccatattttata

SEQ ID NO: 12007 - DNA, 393 bp, Zea mays
  Clone ID: LIB3157-020-Q1-K1-D9
caggtctccagctccactcctctggctacccgatcaaccctgacttgttccacgtgttggagcaaaggaaggctggatgggtcagtacacctgatggcatccatcagagcagaagcggcacaaaatctgatcccaggagagcgcaccggaagctgatgtttgacactgtgaatgagcttctccttcagaagtttgagaaggaaaccgccgtttatgcgctcagttccttcaccagagcgaaggatccacctgcaaagacttttagcgggcaacagctgccgaagttcatatcttcgggaattgaagaactggatatggagcgatcgtccatcagccaaaaggacagcagcgtgatacctgatgcagagatcctgcggaggctgcagggatgga

SEQ ID NO: 12008 - DNA, 309 bp, Zea mays
  unsure (1)..(309): unsure at all n locations; Clone ID: LIB3157-020-Q1-K1-E10
cgacccacgcgnccggatcactcatgggaaagcaggcagatcgtcttttatgggtccgcagcccatcgcataagcaggggaggggtgactccgtcaacaggatgaacaacatgtactatggcacaccattctacggcgcatatgaatgtgccttcccggagcctcacccaaacatgtacgctgcagcgaatggcacgtacccgctatatggcaaccagcagctagtgagctagagagctcccctccgacgtgtcccctttgacgggaaacaaaggttttggaacggggagcttattagcattaggtgag

SEQ ID NO: 12009 - DNA, 327 bp, Zea mays
  Clone ID: LIB3157-020-Q1-K1-E11
gcgccagcgtgacttggtcagtgttaccagtggcctgggcagcgccatcgttgtatccaaatttaaccggaaccccacattcggcgagggccaattggggcacaatggtaccatttcaagcagccagtatctgaaccgaagctgtagcagctagcagttcgtgcaacggggaaaccgtcaatttgggcacgcttcttggtttggcaagagtggtcctttcttcttttgcgatggctggactggaacaatggtggtggaaaaaaaggagaggtggagaaaaggttgtttaattgtaccacgttctataagagtggtctttttttttat

SEQ ID NO: 12010 - DNA, 76 bp, Zea mays
  Clone ID: LIB3157-020-Q1-K1-E2
gctcaagttagcgtcctatgaataaagaatagtggaatcatctctcacgatgattcccttgagagtatcgccaatc

SEQ ID NO: 12011 - DNA, 200 bp, Zea mays
  Clone ID: LIB3157-020-Q1-K1-E3
ttttttttctctgccaactttcacagttgggcgggttttttttaaaatttataaaatataaaagcggcgcactcgtgcaaggttagggtccgtgtcaagatctggaagtggacttttatgtacggtctactggaagataggagacaataacttttaggggctgcagcgcgcaaaaaaaaaagattttcgctgtcatttat

SEQ ID NO: 12012 - DNA, 401 bp, Zea mays
  Clone ID: LIB3157-020-Q1-K1-E4
cggacgcgtgggatccaggctcaaagcaagctccaggcagcgtcgcgacagagtgagtgagtagcacgacaacaacaatggcttccctgaaggccgcgaagcccagcggagttgcggcgcagggcaaggagccggcgcccaagctcagcgagacggcgacgaagccgtcagccgcgaagagcggcggcgttaagaaggctgagcagaagccccgggaaaccaaaaggaaggtgaagagcagcaaacaggcggcggcggccaaaaagtgacgtacagtacagtacgtgtggagtgtaatggagcttccatgccatgttatgaatctagtccttcctttcttggatcttccatgtgacggcgtgtgcgtcccctcatgtgtgatgatgccagatgattactac

SEQ ID NO: 12013 - DNA, 343 bp, Zea mays
  Clone ID: LIB3157-020-Q1-K1-E5
gcgcagtatattttgcaaagcttgaggcagtagattggaagcaactatttatctgggcgtcttggaatgagtgtgattttaataagtcaaaacacttgatattgtgtgcaaatcttggggttgagaacaatgtcactagctgtgatttacttctgtgacttgcattttttttcttgttaaattatgaataagcgaagtccatacgtctactgtgtggcttcttgctgggttcatcgtctacccatgttcctcaagcttgggaacatggggcttttccccatttccgtgtcttccatgcgaagtaaaatttatttgtatacaatcgtattaatctgttcatgtg

SEQ ID NO: 12014 - DNA, 254 bp, Zea mays
  Clone ID: LIB3157-020-Q1-K1-E6
gaatttctagctatggttatagccgttatgaaggaagaaagtgtaatgcatgcatggtagggtaaaagagtgggtaattaatatcgttagatcatcccagtcactcgtggtgttccagaagatcaatggggttgggcggagaaataagtgcgcatagaggcccgtactactctttttatggcacattgcctatgtcaaatcagggtgttattaccagctggttttttttaaaaaaaaatactgaactattacgc

SEQ ID NO: 12015 - DNA, 413 bp, Zea mays
  Clone ID: LIB3157-020-Q1-K1-E9
cggacgcgtgggcagcaccgccgcgctcgcgcctgctccggcgccgtccgccgccgacgcgacgccggcgaagacggccacggtgagcacggcggcgcactcgtgcaaggttagggtccgcgtcaagatctggaagtggactttctaggtacgggcagcgggaggagaggagacgacacctttaggggctgcagcgcgcaaaaaaaaaagattttcgctttcattgctatttatttatctatatataaatatatatacggcgataagtttgttatcaccatgattactatatatcggagcgggcaggagtatatgtattgtaggaccaagacatgcgtgcgtcggtgtaaattcattcccccaggcattttcttttcctttttgcttaaccatttttcacccctgtgattgat

SEQ ID NO: 12016 - DNA, 303 bp, Zea mays
  Clone ID: LIB3157-020-Q1-K1-F10
cggacgcgtgggcggacgcggcggccgagagggccgacgtgcgggcgcacgtccccgacgccgggcacgggcaccagcaccacttcttcatgccacacccgcagttcctgcacgggttccgactgctgccaggcaaccccgaagcggtggctggcaatggtaatggcgatggcagcagcagcagcgctagcgtcgctgccggcagcggggacgagatagcgctggcgatggcggcggcggcggaagcgcacgcggcggggtgcatgctgccgctgtcggtgttcaactaagcaggcgtatagc

SEQ ID NO: 12017 - DNA, 282 bp, Zea mays
  Clone ID: LIB3157-020-Q1-K1-F12
cccttgaaaattaacttaggataaagcctgacgggggtaacagcatccatcgatccgcagtccatgctggttgatgcatgggtctgctggagccgaggttgaacacagcactaacaactgacacaaagcgaccttgcaatcaaaaacacagatgggcaacaccaaacttgagacgaacgaagataaaccctttggactagggtaaacaacacggtagcgaacaggataacttggccgggcgggccccaccgtttagttccttcagttcccgtcggagttgcc

SEQ ID NO: 12018 - DNA, 248 bp, Zea mays
  Clone ID: LIB3157-020-Q1-K1-F2
ccacgcgtccgttcgttcgttcaaatcgcacatatatgttgctgtcgtgactccataccgtgaagaagcttgcccaaagtctgcagttttctaaaaaaaaaaaaaaataaaaaaaaaaaaaaaaaaaaaaaaaaaaaaaaaaaaattaaaaaaaaaaaaaaaaaaaaaaaaaaaaaataaattatttaaaaaaaaaaaaaaattataaaaaaaaaaaaaaaaagggggggcctttttaaagaaacaaa

SEQ ID NO: 12019 - DNA, 212 bp, Zea mays
  Clone ID: LIB3157-020-Q1-K1-F4
ctcctctgggtcgttttgctgtccgtgacatgaggcagacggttgctgttggagtcatcaagagcgtggagaagaaggacccaactggtgccaaggtgaccaaggctgcaataaagaagaaatgatgcgtcctcccatgtgccctcgtttattttgtacttgtgcccgtatacttcgatctgttaaaatctattggttgtgtgccctgtgtc

SEQ ID NO: 12020 - DNA, 293 bp, Zea mays
  Clone ID: LIB3157-020-Q1-K1-F5
gccggttcggagtgatttctatgttcatttgttctgggatgggtgctgctgctgtgttcgagcggggagacggcgttgatgagctcaccaatgctcggggaatctcgacccacaactggctttccaaggacgccatgtaaagctacacccaccaaaatttgccggaactggtagcattgtttccagatcgctgtagggagcgaattggggaataaaatgattttgtatttgtcgcccctgctggggatttagtaagatttttacgccactggtattggaacttgcttacctgg

SEQ ID NO: 12021 - DNA, 372 bp, Zea mays
  Clone ID: LIB3157-020-Q1-K1-F7
caaaaaccttcctttgcaggagaatggatgggactgcggcatgtttatgctcaaatacattgacttctacagcagagatatggacctcattttcggacagaagcaaatgcattacttccgcaggaggacagcgaaggaaatactgagtttgagagctgaataaaccttggaggacatcataagtcattttggctatgttcagaattgttggaatatgtacttaacaaatgggtgcagcggcttaaaggtatagcactgagtgcaaggaatttggaagttctccagttgcacaacggcaccaagcgatggccaagcaaccggttggaattttgcatgagcacagtggtgcctttaagttttgccagtgagcat

SEQ ID NO: 12022 - DNA, 198 bp, Zea mays
  Clone ID: LIB3157-020-Q1-K1-F9
gtcgcgtggacttgtccggtgcggtctgcgagtgacgtgggctaaataaagtgtgcgtcgggtggtaatggtggtggggcccggtgtcagtggcgcggtgccccatgcctgccgcggctgcagcttgttgtgtcttgtgttggttggttcctgttctttctgtctatctattctcacgcatggcagtttgggtatggt

SEQ ID NO: 12023 - DNA, 171 bp, Zea mays
  Clone ID: LIB3157-020-Q1-K1-G12
caaatacgaaaactaaaatagaataaaatggatggactaaaaataagttcctagaaataaaacaccccctaagcatgcatgcgaagtatttgtgcccattggataaacacctgatcatctatgtttcttggaagatgtgatctgaagaaatgtacagtgcgataacaccac

SEQ ID NO: 12024 - DNA, 371 bp, Zea mays
  Clone ID: LIB3157-020-Q1-K1-G2
caacttgaccctatggacttccgacaccaacgaggacgccggagatgagatcaaggaagcagctgctgcccccaaagaatccgcccccgagggccagtaagacggatccgatctcccgacctgatgcgtgtctgctgatgtcggggagtttaccaggactgtgccgttcttgatttctgatagcttatcttctagtacacctcgtgttgttctcttcgtcacggcgccggtgcgtgtgcgctgaagctgcctgccattgccattgccgctgtttttaattaagcacacactctagatgttatgcccgcatgctatgtttcgattctcaaagttgataaatgatggctggatgctggttttcgtgctccaaa

SEQ ID NO: 12025 - DNA, 284 bp, Zea mays
  Clone ID: LIB3157-020-Q1-K1-G3
cggacgcgtgggcggctacggtggtggccgtggaggcggcggctacggcggtggcgggcgccgtgatggcggcggcggctacggcggtggcggcggcggctacggtggcggcggtggctacggtggtggtggtggcggctacggcggtggcaaccgtggcggcggctacggcaactccgacgggaactggaggaactgagcggtggggcccgcgcggccaagttatcctgttcgctaccgtgatgtttaccctagtccagagggtttatcttcgttcgtctcgt

SEQ ID NO: 12026 - DNA, 192 bp, Zea mays
  Clone ID: LIB3157-020-Q1-K1-G4
gaaagatatgtaattagaaatgaatttttatttgtatggataaaaaaaataaggttgagaaggggaggaataatgtaattgggatgatatattgtttaccaagtgggtataatacttaaaatggatatattttgtggattatattgagcattatattttttttcatacggttatgggagggtttttatattt

SEQ ID NO: 12027 - DNA, 292 bp, Zea mays
  Clone ID: LIB3157-020-Q1-K1-G5
ttcgttgacccgttcgccgggtcatgttttttaatcagcgaaatcgacgttggcgcggccgtgccacgctctgccatcggcttcgcggacgtgctggcagccgggctcgcggtctccgagctatccgtgttgtcgtgaaacccttcagtttccctcgacgcatcggtcgtcgtctgcgcgccatttgtcttcagctcgcctatggtgttggaaagagatttttttgacaagtgctactagtacctattaggttgttcaaaatgtatgtgttattgttaatttgtttttttaa

SEQ ID NO: 12028 - DNA, 308 bp, Zea mays
  Clone ID: LIB3157-020-Q1-K1-G9
aaaaaaaaaaaaaaaaaaaaaaaaaaaataataaaaaaaaaaaaaaaaaaaaaaaaaaaaaaaaaaaaaaaaaaaaaagggcggacgaaaaaggggcgcccggtttaacggactccagcttaacaaccccgggggtccgccgttttggggcttcaattctttcccccgggcgcaggttaccggctcgttttttttgaaggcccctaatgttaaacccctggcccgccttttataacctgcctgtttggaaaaccccttttttcccccatttgtttctccttgagagcccttcccctttttgccctttg

SEQ ID NO: 12029 - DNA, 326 bp, Zea mays
  Clone ID: LIB3157-020-Q1-K1-H1
ggcgtggtgggccacgacgtcgcggtaccatcctggcgcagcacggctgtcgctggggcgacaggtgctggacccgtcgcgctccctaggccgccgcctctcggagtcgtcgctagcgtccctggcgacgcgcctggccccgcaccgcggctccgtggcggtcgtggtgacggcgccggacgtgctcgtggacgggttctgcctctcccgctgcggcctccacgcgtcgtccccgaccccgaacgccacccgcgggcgtggccgcgggcggtacgtgtacgcgtgggtggggaaccccgcggagcagtgcccgggggagtgcgcat

SEQ ID NO: 12030 - DNA, 222 bp, Zea mays
  Clone ID: LIB3157-020-Q1-K1-H10
tgtagtaaataaaataaagctagctgtattgccaggagcagcatgcattatttatcgatctatatatatatatactgtactgtagtactctattatatatgtatgtgtggcctgcagtgcgagttgcttcgatccacctacttgttcacacagtttaatggttttggtgccaaaaaaaaaaaaaaaaaaaaaaaaaaaaaaaaaaaaaaaaaaattttatat

SEQ ID NO: 12031 - DNA, 199 bp, Zea mays
  Clone ID: LIB3157-020-Q1-K1-H3
gcaagcagagttcaagactgtcttgtcattcgaacttcaacctagtagggcgggggagcttaatactggaagtatttctcaatttatcaacacttcaggagcagaattctgttgaactagctaggaggtgcaagcatgttgtacgctttcgaatatcaaagtcatcgatgtaatctacaatttagagttcttaaaaata

SEQ ID NO: 12032 - DNA, 66 bp, Zea mays
  Clone ID: LIB3157-020-Q1-K1-H5
ttttttttttttttttaacaataaagaataagtaataatgttaaagactagagtcatttacataat

SEQ ID NO: 12033 - DNA, 270 bp, Zea mays
  unsure (1)..(270): unsure at all n locations; Clone ID: LIB3157-020-Q1-K1-H7
ggtccatgtaagctttttgtgggtgtctgtgttcaactgagacgtttttatccggagttgaacatcacaataaagcaaagtcactgataccatgcttgatggggcccgtgttttttagactcacaataaagccggtttgtgtttgtgcctaaaaaaaaaaaaaaaaaaaaaaaaaaaaaaataaataaaatataaaaaaaaaaaaaaaaaaaatataaataaaaaaaaattaaaaaaaaaaaaaaaaaanggggggggccgttttaaagg

SEQ ID NO: 12034 - DNA, 289 bp, Zea mays
  Clone ID: LIB3157-020-Q1-K1-H9
gctttctttcaagctggagcttaggtttggttgttgtattcgaacatgctatgatgggtatgatgtagtagtactttcctgggtagcatgttgtatgctaccacttgccctctttcacctagctgcttgatttgctacttgtccgacctcttgtgatcctacttgacattagttctcaatccatattgattgggattgtgtggctttaaatcctaagcaagtcaaactttttatttttttttttcaatcccatctaatttatgtgtaatggaaatgagaataaccgaac

SEQ ID NO: 12035 - DNA, 348 bp, Zea mays
  Clone ID: LIB3157-021-Q1-K1-A10
gaaacccggacgacccacgcgtacggaattcatgaagtcgtgatcgattactattgtcgatgccacccttgtttcccaggcgagaggcatcttcagcttacgcttcttcagtttggaggcagagccgtcggtggttgctgcgatgaacgtgatttggttctggaagatacttacggggatggagaaaacctattctaggaggaagctcagcgataatgggataacacattataagggattaaggaaggatgctattttacttcgcacacattatcatcactgttttacgtattcgcacttaccgaatggtactcatactcactcatattctacacagatgtaatttct

SEQ ID NO: 12036 - DNA, 350 bp, Zea mays
  Clone ID: LIB3157-021-Q1-K1-A12
tggacggcgaggcttcttccatctcgccagtttggctacatcgtcctaacaacttctgctggaattatggaccatgaggaggcccgccgtaagaatgttggtggcaaggttctaggtttcttttattgaaaatgtgtttttttgagccacagatgcgtccaagaactcgtctgatgttttgaggtttgttaagactgggtgtctgagcctttgcggtttgttaagacagcgatgtgtcatgtatttcagaaattgggatttttatgagatgtacctgctagagccctgtctgtttcgattttcagatattggttttgatttatgcgatacaaacaggtcctttagtccat

SEQ ID NO: 12037 - DNA, 396 bp, Zea mays
  Clone ID: LIB3157-021-Q1-K1-A2
gttgctgttggagaaggaaggataattggggataagaaagttgatgtcagcattcaggttggagctcaggttgtgtattctaagtacgctggaaccgaggtcgcgttgaacgatcacagccatctggttctcaaagaggatgacgttataggtatcttagaaactgatgacgtgaaagacatgaagcctctgaacgaccgtgttctaatcaaggttgctgaagctgaagacaaaactccaggaggcctactgcttacggaaactgccaaggagaagccatctatcggaacggtcgtagcggttggcccaggccccctggacgaagacggcgagaggctcgcgctgtccgtctccggggggagcactgtcctgtactccaagtacgccggcagcgag

SEQ ID NO: 12038 - DNA, 260 bp, Zea mays
  Clone ID: LIB3157-021-Q1-K1-A3
aagtaatgctactggtattttaagctagatcgaggtgtgcctgtctctagtcatttatggtgtttagcaatcgtctacacagttcgtaaacggtgtatcgtggatgcatgttgccgcgagcagagtacgtaggcatgaaccgatgtgtgcgcttctgtctgtgtactctctctatgtagtaatgtgtggccagtgggtgctttgatccagatgtattcgctcgtgagtggtgagtcgtggaagttgatcgtttcagtatc

SEQ ID NO: 12039 - DNA, 430 bp, Zea mays
  Clone ID: LIB3157-021-Q1-K1-A5
cgcgaggcaaggccatcgtccgccatgacgctctccctctccacctctttcctccccatccccgccgccgcgaggaccaccgtccgcaccctacgctccgtcgtccccttccaggggatgcgctgctcgatgcgcaagaaggggttgcacccggagatctactaggacgcgaaggtgtactgcaacggcgagctggtgctggtgaccgggggcaccaagccggagtacacggtggacgtgtggtccggaaaccacccctactacgtcggcgacacctcggcgctcgtggtcatggacagccagatcgagaagttccgcaagaagtggggccacatcaaggagtactggcccgaggaccagtggagggagatgcacccacacggcgacccggagttcgagcccgagggggacaactgattgatggctcccc

SEQ ID NO: 12040 - DNA, 430 bp, Zea mays
  Clone ID: LIB3157-021-Q1-K1-A6
cggaggtgaaggactccaatgtgcctgctgcacttgatggaaatcctcaacctatggaccaaactgaagacaattctatgccctcagcacagcaacaggaagaagcaatcaagaagaagtttggaggactaatgcccaaaaagcccccactcatctcaaaggatcatgagcgggcctactttgattctgctgactgggctctagggaagcaaggtgttgccaaacccaaaggaccgctggaggcacttaggcccaagcttcagccaacacgccaacaacagcaacaacgtgcaaggcgccctatttacacttcgtcagaaaacgaggacggagacggggctggtgctgaggatatgaacatcaattgaagtggagtggaatgcctgcctgaattggttgatgagcaagtcgtcactatatgtcaagtgct

SEQ ID NO: 12041 - DNA, 381 bp, Zea mays
  Clone ID: LIB3157-021-Q1-K1-A7
cacttgcaaatattagcatatttgaagagttgccattttgatcatcaaaaaaaaaaaaaggaaaaaaaaaaaaaaaaaaaaaaaaaaaaaaaaaaaaaaaaaaaaaaaaaaaaaaaaaaaaaaaaaaaaaaaaaaaagagggcaagcaaaaaaataaaaaaataaaaaatggggggggcctttttaaaggttcaatgttttttacccctgccttgtgtgaaataacttttttttttgggcaacttaatttaatttcaggggccgggtttttacaaagttgggctgggaaaaaactggtcttccctaatttaaattgtcttagtaaaaaacaccctttttgccggtggggttttaaacataaaggcccccttaaatcccctt

SEQ ID NO: 12042 - DNA, 116 bp, Zea mays
  unsure (1)..(116): unsure at all n locations; Clone ID: LIB3157-021-Q1-K1-A8
cggacgcgtgggcaaaaaaagagaggatggaaattattgaagttcctaggatcgtattgtaactgtacttgtgcgagtaacattattggttctctttgtatatccatctctgngac

SEQ ID NO: 12043 - DNA, 253 bp, Zea mays
  Clone ID: LIB3157-021-Q1-K1-A9
gccttcagcacatattattgtattatgatttgttcatgctacaaacgaagtgaatacacgttttgtgatttgttcatttgtaataaaaagtttgtataaataaaaaaaaattaaacaaaaaaaaaaaaaaaaataataaaaaaaaaaaataaattaaaaaaaatgtaataaataaaattaagggtccttcttttaataggtggggggttttattttagtggttcatgctataattttccccttatttttaaaa

SEQ ID NO: 12044 - DNA, 430 bp, Zea mays
  Clone ID: LIB3157-021-Q1-K1-B1
ctcgggtatcttcacaggaacctgtggaacagcgttggaccatggtgtcacggccgtcggctacggcacagagaacggcaaggactactggatcgtgaagaactcttggggcagcagctggggcgagtccggctacgtcaggatggagcgcaacatcaaggcgtccagcggcaagtgtggtatcgccgttgagccgtcgtaccctctgaagaagggcgccaaccccccgaaccctgggccgaccccgcctttccccaccccgccgcccaccgtctgcgacaactactactcgtgccccgacagcaccacctgctgctgcatctatgagtacggcaagtactgcttcgcctggggctgctgcccgctcgagggcgccacctgctgcgacgaccactacagctgcttgccccatgactaccccgtctgcaac

SEQ ID NO: 12045 - DNA, 273 bp, Zea mays
  Clone ID: LIB3157-021-Q1-K1-B12
ctcagggcgacgcagacagctccttggacaggctgtggcagaagaagaaggctgatatcaagcagtagattttacatctagtttaccaagatatggacactgccttagctatgttttgaattcatgtcactatatgcaatgttgtgatttcagctggtaccttaaatctgaagatttagtatctttgttgggttccttctgagtttgatgtgtggtgttcgtttaattcccttgtacaaccccatttagtatcattgtgatgattttggattc

SEQ ID NO: 12046 - DNA, 333 bp, Zea mays
  Clone ID: LIB3157-021-Q1-K1-B4
gaggacactaacctctgcgccatccacgccaagcgcgtcaccatcatgcccaaggacatccagctcgcgcgccgtatcaggggcgagagggcctgagcgaggctggctcctctcaccgcaggcggcgtcgttgttgcttcgggcctgcttgtaggacttgtgcttctcttggtttcctttctggtggcagtggcatcttggtaccattgtgcttgttcttagaatcttagggatagagagttgttcagttgctgggtaacctgattgtttatcttgcattcctgcctctgtaatggttgtctgctgtcttaatggaaatgatatttgcttttt

SEQ ID NO: 12047 - DNA, 395 bp, Zea mays
  Clone ID: LIB3157-021-Q1-K1-B5
ctcaggacccaaggttattggcatctgcgagcgacgatggcacggtgaaattgtgggaactgagagggaatgtgcttgattgagttctgttgtaatcactgaaccgtgcgttgagataataaaccaaataaggtatcgcctttggatttctgttctactgacctcggttctctgaagtcaatacttgtatatcgagagggttttttatgagggtttttcacaagattcacccggcacactataacccgcgccatcttataaaacacgtgttgttcgcgcgttcctcattgggggggcgcccgcacatgttgttcaaccactttttaaaaatcaaataattcatgcacagtggtgagtgatgaataatgaaaaaatttttgcttttttttgtttgc

SEQ ID NO: 12048 - DNA, 375 bp, Zea mays
  unsure (1)..(375): unsure at all n locations; Clone ID: LIB3157-021-Q1-K1-B6
cggacgcctgggccggacgccttgggaaaaaaaaaaaaaaaagatggaaaaattntttggagggggggaaaatttatgagaaaaagaaataataaaaaagggggggaatgtttaggaatttaaattaattagagttgttttgaaagggggggggtttttttagggggcccttaatataaaacaaatgcccccggcggacaacctctttttttggggaaaccctgtagttacccaacctttttttctaaccgcgcatcccccataacccccctggtaaaccaccgaataaccccccaaaaaacgcccttttctaccacttggttttctgtatgggagatgggacaccccccccccccccccataattccccccaat

SEQ ID NO: 12049 - DNA, 422 bp, Zea mays
  Clone ID: LIB3157-021-Q1-K1-C12
taaaaaaaaaaaaaaaaaaaaaaaaaataaaaaaaaaaaaaaaaaaaaaaaaaaaaaaaaaaaaaaaaaaaaaaaaaaaaaaaaaaaaaaaaaaaaaaaaaaaaaaaaaaaaaaaaaaaaaaaaaaaaaggggggggccgttttaggggaccaaagtttacttccccgtgcttgcaacgtattagtttttttttggggcccccaaaattaaattaatgggccgggttttaaaaacttggggcttggaaaaaccttgggtttcccaaattaaatccttttgaaaaaattccccttttccccagttgggttaataccaaaagggcccccccctttcccttttccaaaaatttgcccaccttaattggaaattggaacccccctttttccggccctttaagcgcggggggtgggggggttccccc

SEQ ID NO: 12050 - DNA, 412 bp, Zea mays
  Clone ID: LIB3157-021-Q1-K1-C2
ccctgagctacccacttaaattgattgctaaaaatgccggtgtcaatggcagcgtcgtcactgagaaggtcctttctaacgataacttcaagtatggttacaatgctgctactggacagtacgaggacttgatggctgctggtatcattgatcctacgaaggtggtgagatgctgtttggagcatgccgcgtcggtggccaagaccttcctgacatctgatgttgtggtcgtcgatattaaggagccagagtctgcgccccttgctaacccgatggacaactctggctatggatactaatggagatgagatggccaagccgcatgggaagaagggtgatcaccatttttttttttggtaggcgagaagagtcgggtcgaggtagtttttcatcatcagataaaaaaagcgag

SEQ ID NO: 12051 - DNA, 430 bp, Zea mays
  Clone ID: LIB3157-021-Q1-K1-C4
gacggcgtcaagcacatggtcatgaccacaggcaccccgaacgcgaccgaccggggcgccgccgtcctctgcgcgagcgccttcgccgtcaaagccgcggtcgacctgccgatccaggcgcaatgcgagccgccggatgacgaccgctggttcgagcgcatgaaggcctcgggcatcgacgccctcggcatgcacctggaggccgtcacgcccgagatccgggcccggatcatgcccggcaaggcgagcgtgccactggagcggtactatacggccttcgaggcggccgttccggtcttcgggcggggccaggtctcgacctacatcctggccggcctcggcgacgcgccggaggcgatcctggagatggccgagcgcctcatcaagatgggcgtctacccgttcgtggtgccgttcgtgccgatctccg

SEQ ID NO: 12052 - DNA, 392 bp, Zea mays
  Clone ID: LIB3157-021-Q1-K1-C7
atccaaattcacatctaccaacacatgctttacaatcatatcgaagatcgaagatattgcaaagaatttgcggttgaatttgacaaagaaggatggtggtttgttaaagatggaagcttcaaagcccggaaggaaaggggtaatgggtatcgatgccgaagtatttgaggttagccctaactttcatcttgtggagataaagaagactaatggcgacactttttagtttcaaaaggtcctgaaccaataaatgaggcccgctctcaaggaaatagtgtgggcttggcaaggtgagcaatcaaagcaaaagcaggaacatcagtcgtgttaaaaacttatgaacttttgcaatacatctttttagccaaattccaacctttcgtggatttgtg

SEQ ID NO: 12053 - DNA, 428 bp, Zea mays
  Clone ID: LIB3157-021-Q1-K1-C8
cggacgcgtgggtgccggtggaggagggcgggccgggcggggagatggagaagttcctcaagcagccggagacgacgctgctggacatgctgcccacgcagatgcaggccatcaaggtcatgacgacgctggacatcctctcgtcgcactcgcccgacgaggagtacatgggggagttcgcggagccatcgtggctggcggagcccatggtgaaggcggcgttcgagaagttcggcggcaggatgaaggagatcgaggggttcatcgacgagtgcaacaacaacctggacctcaagaaccgctgcggcgccgggatcgtgccgtacgagctgctcaagcccttctccaagccgggagtcaccgggaggggcatccccagcagcatctccatctgatccatcctcagcatgcattagtccaattaatta

SEQ ID NO: 12054 - DNA, 431 bp, Zea mays
  Clone ID: LIB3157-021-Q1-K1-C9
taaaaaaaaaaaaaaaaaaaaaaaaaatatataaaaaaaaaaaaaaaaaaaaaaaaaaaaagaaaaaaaaaaaaataaaaaaaaaaaaaaaaaaaaaaaaaaaaatgattatataaattaaattaaaaaatatttaaattaatattaattttaaaaaaatagggggggggggttttttggggttttaattttttttcccgtttttttggaaattttttttttttttttgggttactaaattataattttggggccggtttttttaatcttcgttttgtggaaaattgtttggtttcccaattttatttttttttgcccatttatttttttttcaatttgggtaatttaaaaagaggccccatcagtttccttttctaaaatgttggccccttttttttttttttgggcccttttctttttgtgtcttttat

SEQ ID NO: 12055 - DNA, 429 bp, Zea mays
  Clone ID: LIB3157-021-Q1-K1-D1
ctccgttcctgcatttctgaaggtgcagttatagaggactctttgctaatgggtgcagactattacgagactgagaatgataagaatgccctttctgagactggtggcattcccattggtattgggaaaaattcacatatcagaaaagcaataattgacaaaaatgctcgcattggagaaaatgtgaagataatcaattttgataatgtccaagaagcagtaagggagacagaaggatattttatcaaaagtggaattgtcacggtgattaaagatgctttaattcctagtggaacaatcatataaagtcagccaacaccatgtatataaggttgggttgcatcatatggtgatcgccaatgcgcatcaagttctctcatcccttgcgagaccatgcttatttccattgcaaaatcatcaagctctgca

SEQ ID NO: 12056 - DNA, 429 bp, Zea mays
  Clone ID: LIB3157-021-Q1-K1-D2
cggacgcgtgggctcgtcgtctccctcgtcctctgcctgctggcggctgcccctgcggcgtccgcggcgcgggccttcttcgtcttcggcgactccctcgtcgacaacggcaacaacaactacctgctgaccacggcgcgcgccgacgcgcccccctacggcatcgacttccccacgcaccaagccacgggccgcttctccaacgggcttaacatccccgacatcatcagcgagcacctcggggccgaacctgcgctgccgtacctgagccccgagctccgaggggagaagctgctcgtcggcgccaacttcgcgtcggccggcgtcgggatcctcaacgacacaggaatacagtttgtgaacatcatcaggatcggcgaccagctgcagtacttccgggagtaccagcggaagctgcgagccctcgtc

SEQ ID NO: 12057 - DNA, 393 bp, Zea mays
  Clone ID: LIB3157-021-Q1-K1-D3
cggacgcgtgggcgcggcgccggctcgggggcagcttccagctctgcgcgccctgcacctgctgcggcggggccagcggcgcctgcatcctcgcgccctgctgctactccatcaactgcaacatccccaaccgccccttcgggtactgctccttcacgcccaaatcctgccagtgcgtcggatgcaacctctgagctccgtggccgcgggattcattggattggattggtcagagtgtgtttgtgtgtgtgtgtatgagtatgagagagagagtggggtggtaacaaatctgtataaaaaaatccccacaatcctaatttaaggggcgatggcaataacttcaactaagtagaattttgtgggaaccacggttccatccgactaagtggaggg

SEQ ID NO: 12058 - DNA, 418 bp, Zea mays
  Clone ID: LIB3157-021-Q1-K1-D4
gagttgccctgccatcgtctctctctctctccatctctactatttccaatgttgagttacgcttatttgtccagtaaccttgttttgccgaatataatgcatgggggtgttggcgctcaaaaaaaaaaaaaaaaaaaaaaaaaaaaaaaaaaaaaaaaagaaaataaaaaaaaaaaaaaaaaaaaaaaaaaaaaaaaaaaaaaaataaaaaaaaaaaaaaaaagggggcggccgttttaaagaatcaaagtttactttcccgtgcttgcaaaataaaaaattttttatagggaaaccaaaataaaattaattggccgccttttaaaaacgccggaattggaaaaaccttggggttaccaaattaaatcgctttgaaaaaaatcccctttttgcaagttggataaaaaacaaaaaggcc

SEQ ID NO: 12059 - DNA, 429 bp, Zea mays
  Clone ID: LIB3157-021-Q1-K1-D5
gagaaacctaagccagcggttgtgcaaaagaacgcgacgaaacctagcgctaaggctcctgctaaaaagggaaaacagcaagcatcaacaagtgccgaggaaccagacgagcctttgagtcccacttcagagaaaattcgccaacagaggcttgtggaagaagctgacttcaagtcaactacagacctttttgcaaagaagagcggtgaacaaaagtcactagatacttttatcccaaagtccgagagcgactttgcggaatatgcggagcttattgcaaataaactgctcccctacgataaaagttttcactacatggctctcctcaagaatgtcatgagactttccatgacaccgttgaaaggctcggacgcgaaagacatatcttcctccgtgacggcgattgctaacgagaagatcaaggctgag

SEQ ID NO: 12060 - DNA, 385 bp, Zea mays
  Clone ID: LIB3157-021-Q1-K1-D6
gtcgcctatgggtgtgtgaagctgctatattagagttactttttgtctaaagcctgaacattttcaaagaatttgaatatctgaatatttgaatatttgtgctgagtttttcgaagaatttgaatatctgaacaattgaatatctcacttgaacgttatatggcttaaaaaaaaaaaaaaaaaataaaaaaaaaaaaaataaaaaaaaaaaaaaaaaattataaatttataaaattaaaaaaaaaaataaattttacaaaaattttttttaatttatagaaataaaaaaaaaataaataaggggggggtttttttaaaaaatcaatttttttaacccggggggtgtgaaaatatatctttttttttggggcgcttaaaattaaat

SEQ ID NO: 12061 - DNA, 429 bp, Zea mays
  Clone ID: LIB3157-021-Q1-K1-D8
gcatctcaataagctggagcgcgaagaacatctcgtggcagccttttcatatttcgacaaagatggtagtgggtatatcacagtggacgaactacagcaagcttgcaaagagcataacatgccggatgcttttcttgatgatgtcatcaacgaagctgatcaggataacgatggccgcattgactatggagagtttgttgccatgatgaccaagggcaatatgggagttggtcgacggacaatgagaaacagcttgaatatcagcatgagggacgcacctggtgcattctgagacttaacacgatgtacagcttgtggcctagtcacttcctcttctgtcttgtcttgctgccctacgaaaccttctgcatttttttttcaagatgttatcaggtgtatgtgtggatgtgttttttctggggattctga

SEQ ID NO: 12062 - DNA, 192 bp, Zea mays
  Clone ID: LIB3157-021-Q1-K1-E1
ggccggtgctcgagtcgtcgccgctgccgctggccggcgtccccgacgtcagccgggctgatctgccgacgcttgtcatcggcggcaccgagcacgtaggtaaatgagctagctgtgtggtgatccgaggattgattaaaatgtccagcatctgtttgttgcgaataatttatgaactgggattgattcttg

SEQ ID NO: 12063 - DNA, 385 bp, Zea mays
  Clone ID: LIB3157-021-Q1-K1-E11
cgaatggcgcctatgaggatctcaatcagggcaagatcgtaggacgagctgtggttgagatcatgtagtgatgacggacaaggtaatcaatcctgtggttccaagtctgggtcacacaacaataaagttttgtgtgctctttcacagcattgtcaaaatctgtagatgaccaaactgcattgtgtgtgtgtgtgacagtgtgttgctggaaaaaaaaaaaaaaaaaaaaaaaaaaaaaaaaaaaaaaaaaaaaaaaaaaaaaaaaaaaggggggggcaatataaaaaaaaaaatttaattaatcacgtatacgaaaaaataaatattttttttagtgacccaaataaataaaaatatgaaaagggggtcctcatttggggttcag

SEQ ID NO: 12064 - DNA, 396 bp, Zea mays
  unsure (1)..(396): unsure at all n locations; Clone ID: LIB3157-021-Q1-K1-E12
caagtctccaaaggtcgaatcaaagtgcaactgtgcaattatgtagagttatgcatcaactcaagttggcaactatacttattatgatcactaaaatccatggttgcttgttattatttcagcgcatgtgagttaacaaatgaatctgcacccacctggttcagtaagcagcagcgacctacaattttttttttggttgtggtgcatttgccctttatttctgggtcatagagtgctcaacgagccattcttttgtaaattcttgcttctccagtcagttctatggtttgtctattttttttcctgagagtcaacatctcaagcttaagcatatttatataataaaataataacatttatgataccaaataagcatcattagatttttcgttnntt

SEQ ID NO: 12065 - DNA, 211 bp, Zea mays
  Clone ID: LIB3157-021-Q1-K1-E3
cggacgcgtgggtgaagatgcaagggcttgctgcatatggatatttgttttgcttattgttttgtttggatctagatcatcgatggctatgagtcatatgtaaatatatttttatcctaccaaaagtggctcgaacatatattatatatgaaactatggatcaacttcttgtaatgctactattgatttttaatatatattaattttgctt

SEQ ID NO: 12066 - DNA, 288 bp, Zea mays
  Clone ID: LIB3157-021-Q1-K1-E5
tcctggctgaagcagcttggagtccagcatcatgacttcaacttcttcatcactcaccccatgtgaactgctgatccggagtggcttgcaaagaaccacatgggtacagtttgaagctagtgatattacctacccaccaccaacggggtagcaaaacgtttacagtacaatgcgctggtgaaatgagtctaacaatcgcaggatagatttatacttgagtttactgctgcagcgaataccaaacatgtcggcactcaaaaaggttttctgtttcttgtttcttggcag

SEQ ID NO: 12067 - DNA, 425 bp, Zea mays
  Clone ID: LIB3157-021-Q1-K1-E9
cggacgcgtgggcggacgcgtgggcggacgcgtgggttatatttgaaattttaatgatcaataagaaatattcgtgttttttattttgagaaaaaaaaaaaaaaaaaaaaaaaaaaaaaaaaaaaaaaaaaaaaaaaaaaaaaaaaaaaaaaaaaaaaaaaaaaaaaaaaaaaaaaaaaaaaaaaaaaaaaaaaaaaaaaggggggggccctttaaaaggaccaaaattaactacccctggcttgcaacgaaaaattttttatatggggcccccaaaaaaaaataaacggcccgggttttaaaaacttcggaccgggaaaaaccctggggtacccaaattaaatccctttgaaaaaaatccctttttccccagtggggtaaaaagaaaaaaggcccgacccaatcccctttcaaaaaatttgccc

SEQ ID NO: 12068 - DNA, 415 bp, Zea mays
  Clone ID: LIB3157-021-Q1-K1-F1
cggacgcgtgggcagggttggcaggcaaattgtcaacgtcccatcattcatggtgagggtggagtctgagaagcacattgacttttcactgtcaagcccattcggtggaggccccgcaggaagggtgaagagaaagaatcagaagaaggcaagcggtggcggtgatgctggtgatgaggatgaggagtgaggatggacaagtagtgttacaccaatataataatattatctagttttcttgaacttgttcgaatgatgagtgcttagctgtgtgatctgacgcagagtcccctgtgctgactctgtgtcatggatggtccattttatcttgtggtattatcagcctttacataactgctatgtttggatatgttcaattctgttgcaattttatgtggttgttttttttgcgttt

SEQ ID NO: 12069 - DNA, 303 bp, Zea mays
  Clone ID: LIB3157-021-Q1-K1-F10
agcccgccctgaccaacatggtctcggccaccaagctcatccgcacccagcttgccagcgcgaaatgagtcgtttgatagctccatggtctgatagcgcggaatgagccagtttgttttgaataatttgggtgttaccccctgttccatggtgttagtgttaggttagcctctcattggtgggatacgccgttacaagatgtgttctaagtttggagtgtgtgttttcctttgggctatgtttctgggggtatgtgtgtgctatggttataaacagaaatgaaatacgcagtcttccaattgc

SEQ ID NO: 12070 - DNA, 412 bp, Zea mays
  Clone ID: LIB3157-021-Q1-K1-F2
aaaaaaaaaaaaaaaaaaaaaaaaaaaaattatattattaaaaaaaaaaaaaaaaaaaaaaaaaaaaaaaataaaaaaaaaaaaaaaataaaataaaatataaaaaaaatttaaaaaataaaaaaaaaaaaaaaaggggggcgccctttttaagggtcccaattttccttccccttctttccacctttatacttttttttttttcccccttaatttcattctttttcccttgttttaaaaactttttattttgaaaacccttggttttccccaatttttttctctttcgccctttccccttttttccccttgggtaaaaactaaaaggccccccccttttccccttttttaacattttcccccccttatttgccaaatgggccccccctttaacttctcctttattctcggg

SEQ ID NO: 12071 - DNA, 60 bp, Zea mays
  Clone ID: LIB3157-021-Q1-K1-F6
tttccattgtaaaaaaaaaaaaaaaaaaaaaaaaaaaaaaaaaaaaaaaaaaataaaaat

SEQ ID NO: 12072 - DNA, 125 bp, Zea mays
  Clone ID: LIB3157-021-Q1-K1-F8
aaaagttcgcacactggccggctgagaaaatttctctggacctgcaaaaaaaaaaaaaaagaaaaaaattaatataataataaaaccggtggaagatttaaagaacaagcttaaatacgcattca

SEQ ID NO: 12073 - DNA, 85 bp, Zea mays
  Clone ID: LIB3157-021-Q1-K1-F9
gcaggggttgttaatgcgatcgcttgtaatgtgtctgcgatgacgaagatgggtacatgatccttggcttcgtgctgaagccccc

SEQ ID NO: 12074 - DNA, 358 bp, Zea mays
  Clone ID: LIB3157-021-Q1-K1-G1
ggcacttgtggccgacgttggggaagagaagccccttggtgacggcgatgttggcggcgtcctcgtcggaggaggactcggtggagctctcgtcggagtcccacgcgcggcacacgtgggcatcgccgcccttcttcttgtgagtggactttagaagaatttgaagaattgattcacaaggcattcaaagatgttgtttcagttgaccttgcaatggcttcaaatcttgattcttcaaacaagaagaatatcaatcgaggctttggatttgtgagattttcttctcatgcagtatttgccaaatattattgcctcttcctacgcccccgcccgtcccggccttgcctgccgcttccgt

SEQ ID NO: 12075 - DNA, 355 bp, Zea mays
  Clone ID: LIB3157-021-Q1-K1-G10
gacgcaggcaactaaggagaaaccttctgttggatcagtggtagccgttggcccagggccgttggccgaggacggcagcaggaatcccctgtcgatcactcctggaagcaacgtgatgtattccaagtatgcggggagtgagttcaagggcgaggacggtgagtacatcgtgctcagggcgtctgacgtgatggctgttctttcctgatccccaaaccatacagcgccaggtgtgcgataggaagttttgatgttgaggccgagccttatcttttatttgctcttgtttggaattggtggaggcttttgaactgtaatctggtgcgaattataaggaaaataagccgagttgtgt

SEQ ID NO: 12076 - DNA, 82 bp, Zea mays
  Clone ID: LIB3157-021-Q1-K1-G12
aaaaaaaaaaaaaaataaaaaaaaatatttttttaaaaaaaaaaaaaataaaaaaaagggggggtctatctttactaataaa

SEQ ID NO: 12077 - DNA, 427 bp, Zea mays
  Clone ID: LIB3157-021-Q1-K1-G2
gccgcatcctctccccatcggcagtcttccccaagtcgtctaaaccccaatccctaaatccccgacgcagaccacacgacgcgcacctccgttcacgaggcggaagcatgagtcgccatccgatcactaagtgggcacagaggtccgacagggtgttcttgacaatagagctgcccgacgccaaggatgtgaagcttaacttgaagtctgaaggccatttcaacttctcagctaagggctcagatgacttgccctatgagtttgacattgagctgtttgatgctgtgaatgtggaggagagcaaagcagctgttgccccaaggaccatatgctacctgataaagaaagctaagagcgggtggtggccaaggctgctgaagcaggagggcaagccacctgtgttcttgaaggttgactgggacaaatg

SEQ ID NO: 12078 - DNA, 124 bp, Zea mays
  Clone ID: LIB3157-021-Q1-K1-G3
atttgtttctatagtttctgtgactacttgtggatcgttcagtgtgaggctgcaatttgtacatgaataatgtaaatctagcattagtgcttattttttaatgttgaaatcaacaacttactgt

SEQ ID NO: 12079 - DNA, 422 bp, Zea mays
  Clone ID: LIB3157-021-Q1-K1-G4
ctactttcttccatgccattcagccattgttctactcaaaaaaaaaaaaaaaaaaaaaaaaaaaaaaaaaaaaaaaaaaaaaaaaaaaaaaaaaaaaaaaaaaaaaaaaaaaaaaaaaaaaaaaaaaaaaaaaaaaaaaaaaaaaaaaaaaaaaaaaaaaaaaaaaaaaaaagggggggcctttttaagggaccaaatttttcttcccgggtcttggaaggtaaaattttttttttggggcccccaaaataaaaacaaggggccgggttttaaaaaggggggaaggggaaaaacccgggggtaaccaaattaaatgccttggaaaaaaatccccttttcccaagtggggtaaaaaaaaaaagggcccccacaaatcccctttccaaaaattgtcccaacctaatgggaaaagggaacccccc

SEQ ID NO: 12080 - DNA, 426 bp, Zea mays
  Clone ID: LIB3157-021-Q1-K1-G6
taaacatatatctcaattcacaggtacattgagttttacgacgttatgtctgttccaatggcaattgctctgtctggtcaaccgctgcttggacaagcagtgatggttaaaccatctgaggctgaaaagaacttagttcagtcaaatgcgacatcaggtggtgcggcttcaggtggagcaagaaagttgtatgttggcaatcttcactcaaatattactgaagaccaattgagacaggtatttgaaccatttgggcaagtagagcttgtacagcttcctgtagatccaatgactggattgtgcaaaggttatggttttattcagtttgcacggcttgaagatgcaaaagctgcacagagcttgaatgggcagcttgatatcgctggcagagttattaaggtttcagctgttaccgatcatgtggga

SEQ ID NO: 12081 - DNA, 427 bp, Zea mays
  Clone ID: LIB3157-021-Q1-K1-G7
ctcaagttgttgaagacgatgacaacgatgaccttgttatgtttgatgaggacccaaggcaagacaagaagatgagattgcaatagcatcctgttgcggtgataacagctcttgactcccggcatcatggctaacacattgttcgacttcgatcataccatctttgataagtcatctatgtggtgatgtgctaggttgatgttgagacattggtagcaatgcccgggacactttttggcctcagatactggcctgtaggattgtaatttgtaggttttaggcacgagcaacggaaccactgagcaatctgtcatgttaattgttaagtacttaagtggcactgtgtctggaaatatgtaatcctgtaatcttcttagtgctacgctatatgctagaaacaacgcctgggtttagaagctatccctga

SEQ ID NO: 12082 - DNA, 387 bp, Zea mays
  Clone ID: LIB3157-021-Q1-K1-G8
gttgagtgtggaacgggtgctatattctgttcagcctttgcagttatgtggtgtacctctctgatggtagcacttgcatctcacagtgagccggactttgtaaattgttgtacagaaaacgtacatatgatgatgccgtgttaccctgatattcatgacaccgttgtttaccacataaaaaaaaaaaaaaaaaaaaaaaaaaaaaaaaaaaaaaaaaaaaaaaaaaaaaaaaaaatatttaaaaaaataaaaaaataaaaaaataataaaaagtaaaaaaaaataataaaattaaaaaaaaaagggggggggcctttttaggggatcaaagtttacttccccggctttgcaagtttaaactttttttttgggggccctaaaattaaa

SEQ ID NO: 12083 - DNA, 295 bp, Zea mays
  Clone ID: LIB3157-021-Q1-K1-H10
cggacgcgtgggcgggcacgctaggctcactgtcatcgcgagtttcatgatcacgcatcatggactcgcctactactgtggatttgtatgccattatagacttggtgctgcgaaagactgctttggtgatttgtgggtttgttgctgtgtaaaaagatcctcatggcttccagaagaccatgaaggtttggatctatcatgtaattccttgttatctgccaattatgtatggactatggacatgtgttgcgctgttcaactcactacaaataagtaatcgatatattccctaccc

SEQ ID NO: 12084 - DNA, 270 bp, Zea mays
  Clone ID: LIB3157-021-Q1-K1-H3
gcgcaataaattccagactatgcttcagcttgagcagcaaatccaggctcaacaataaatcgaagcagaaagcgtagctgcatgtggcctcacatgataagtgtatctttaaagatgtagaccatgttctctgtgttcctacaattgtgacaaaatcatcgtcgttgaggtcggctcacatgcatgtaactgttagctataacaattattgtctaacgttgtccttgttactccacccgtttgtgttggattgccatcgaccatcatatg

SEQ ID NO: 12085 - DNA, 168 bp, Zea mays
  Clone ID: LIB3157-021-Q1-K1-H4
gtgagagagagaggagacggagagccggccatgtccttttggctgtttggtttatttttgagttcatgcggtctttatttatttccatgtacgctgcttcctcgtatacccactttaaatttgtaccatgcatgcatgttccttatgatacactcacctctttttgtt

SEQ ID NO: 12086 - DNA, 405 bp, Zea mays
  Clone ID: LIB3157-021-Q1-K1-H5
ctctgagttgccgagtggcgtgcgaaactcatcataaccaagccccaggagatctggtgcttcaaccctgtttggagggcttgggtttctaaggaactacaccagctgagatgtatgtgctcagataggtgtttttttttcccaaggagaccagcagtttgagctgtatatgtaggtagtaggtaatagggcagttgccaaaaggacggctcccttttcctattgggaattgcgaatttttgtaggaactaataccttgcagagcaatgcctcgatgccaagatacaaactttaaatttaatgttgggttagatgctggaagagaaacatcctattgtatattgcagtggaatgtactgctggaatacatgtttgggaaggagcaattacaactaagtttgtgct

SEQ ID NO: 12087 - DNA, 270 bp, Zea mays; identical to SEQ ID NO: 12084
  Clone ID: LIB3157-021-Q1-K1-H8

SEQ ID NO: 12088 - DNA, 52 bp, Zea mays
  Clone ID: LIB3157-021-Q1-K1-H9
aaaacaaagaaaaggagaagaaaaaaaaaaaatagaagtaaaaaaattacct

SEQ ID NO: 12089 - DNA, 84 bp, Zea mays
  Clone ID: LIB3157-002-Q1-K1-B7
aaaaaaaaaaaaaaaaaaaaaaaaaaaaaaaaaaaaaaaaaaaaaaaaaaaaagaaaaaaaaaaaaaaaaaaaaaaaaaaaaaa

SEQ ID NO: 12090 - DNA, 388 bp, Zea mays
  unsure (1)..(388): unsure at all n locations; Clone ID: LIB3157-002-Q1-K1-B8
ggcgccgccgtccatgtggcaactccacacccagcaaaaggcaagaccattgtaaacaatgacaaatcggtcaagtctccaaaatctgcgccaaaatctggtgtcccttgcaaatcgtgcagcacgtcattcatcagtgagacggcacttcaggctcactcgaaggcgaagcatgggggcaagtgagtcgcaggtccaatagagtcaacaacaaatgcgaaacatgggagaggagggtaagcgagagtctcgaaagagtgtcggtggaagtaggcctaaccttattttgtttagagacgggctatgcgttcgatgtagcaaaacaaggctgtggtttgtgtacttcaatatttgggttgtgtgttnnanaaaaaaanaaccataaaaa

SEQ ID NO: 12091 - DNA, 84 bp, Zea mays
  Clone ID: LIB3157-002-Q1-K1-C2
aaaaaaaaaaaaaaaaaaaaaaaaaaaaaaaaaaaaaaaaaaaaaaaaaaaaaaaaaaaaaggaaaaaaaaaaaaaaaaaaaaa

SEQ ID NO: 12092 - DNA, 67 bp, Zea mays
  unsure (1)..(67): unsure at all n locations; Clone ID: LIB3157-002-Q1-K1-F1
naaaaaaaaaaaaaaaaaaaaaaaaaaaaaaaaaaaaaaaaaaaaaaaaaaaaaaaaaagaggaaaa

SEQ ID NO: 12093 - DNA, 267 bp, Zea mays
  Clone ID: LIB3157-002-Q1-K1-H9
cttctagatcgcgagcggccccctttttttttttatattttttttttttttatggttttttttttttatattatttattttttttttatttaaatttttttttttattattttttttattaattttttttttggcaaaaaaaaaaaaaaacttacccttttaaaaatttttataaaaaaaaaaacatttttttttttaaaaaaacacaaataaaattttctttcaaattttttaaaaaaaaaggtgcaataaaaatattttcccacc

SEQ ID NO: 12094 - DNA, 269 bp, Zea mays
  unsure (1)..(269): unsure at all n locations; Clone ID: LIB3157-003-Q1-K1-A4
cggacgcgngggcggcccnccacnnaggaaggcagaganagagnacnacgccaagcaggccaaaganagcgggcaccannnccacggaaacaagggggancnnggcactgccggcggcaaggactacagggggggctgcctcagtatcatcgacccaggtgactcggacatcatcagtaccacccctggcacccagggagccagccccggcacccaatgcagctgcttcgcctttctcaaaaagagatgagatgtagcgctccggccct

SEQ ID NO: 12095 - DNA, 52 bp, Zea mays
  Clone ID: LIB3157-003-Q1-K1-A5
aaataaaaaaaaaaaaaaaaaaaaaaaaaatttttttaaaaaaaaaaaaaaa

SEQ ID NO: 12096 - DNA, 237 bp, Zea mays
  Clone ID: LIB3157-003-Q1-K1-B10
tcgctgatgctgagcagaatagagatcttagatttgttcaatgcttactcataaggacaagaaataatacagtgcccaaatgtccattgtttcgggaaaaaaatctcaattccactgttcaacattttgatgatgcctgaatttcttgtttacagacacaagattgatatttgctgttaaatgtgcagttgatggaatattctttctccctgtctgatggtgccctttatctcattt

SEQ ID NO: 12097 - DNA, 229 bp, Zea mays
  Clone ID: LIB3157-003-Q1-K1-B5
tcgtgcagctgctggggtccaccgtggcgtgctttctgttccgctactcgacgggcgggcaggccacgggcaccttcgggctgacgggctgtgtagtgtgggaggcgctagtgctggagatcgtgatgaccttcgggctggtgttcactgagtacgccacggctgtggacctcaagaaggtcatgctgggctccatcttccccattgacatctgcttcatcgtgggggc

SEQ ID NO: 12098 - DNA, 158 bp, Zea mays
  Clone ID: LIB3157-003-Q1-K1-B7
ggcaaacttatctgaatctttttgataattggctagatcttctgttctggtgttatgaactcatgtggctattgctgttggcgtcaaaagattttttttattaaaaaaaaaaaaaaaaaaaaaaataaaaaaaaaaaaaaataaaaaaaaaaaaatag

SEQ ID NO: 12099 - DNA, 141 bp, Zea mays
  Clone ID: LIB3157-003-Q1-K1-B8
gattattttcacgaactcatgtattcacaatgttaggggaacgtcaattaagttggaatctgaacatttcatatgttagtcatttgataaaaaaaaaaaaaaaaaataaaaaaaaaaaaaaaaaaaaaaaaaaaaaataaa

SEQ ID NO: 12100 - DNA, 284 bp, Zea mays
  Clone ID: LIB3157-003-Q1-K1-C6
cggacgcgtgggctgaggaagagattttcgcagtctggtatcgaggagaaggccagtcgcaataaatcttagcgtgattggttaataatgccttgatggtggatgactctgatttgctatcggtgcggaatgtgcactattgaagaattttgtgtttgatggatcagttgtgtttttgttttctccgacaagacatctatgaaatatgtggcaggtgtcaataaagttatctcatacagcagaccggttactcaaaaaataataaatgtcatcttttatattat

SEQ ID NO: 12101 - DNA, 124 bp, Zea mays
  Clone ID: LIB3157-003-Q1-K1-D10
attcgctttgacacgtggtccgacgaatttgtcatatattgtacctacccatgatgttcagggaggcgtacgcgcgaaatgtgcaccagctaggaatcagagtcgatacaggggcatatgagtg

SEQ ID NO: 12102 - DNA, 80 bp, Zea mays
  Clone ID: LIB3157-003-Q1-K1-D11
taaaaaaaataaaaaataaaaaaatttttttttaaaaaaaaaaaaaaaaaaataaaaaaaagggtggtctttctattggt

SEQ ID NO: 12103 - DNA, 92 bp, Zea mays
  Clone ID: LIB3157-003-Q1-K1-D8
tatcgttttgtataatttaggaccgtttttttgggctaaaaaaaaaaaaaaaatagggggtgattattatacaaaaatttataaataaatat

SEQ ID NO: 12104 - DNA, 54 bp, Zea mays
  Clone ID: LIB3157-003-Q1-K1-E12
aaaaaataaaaaaaataataaaattttaatataaaaaaaaaaaaaaaaataaaa

SEQ ID NO: 12105 - DNA, 159 bp, Zea mays
  Clone ID: LIB3157-003-Q1-K1-F2
ttatgctttaaattctatagttggatctgcgtgtgatggacattagagtttaaaaaaaagaaaataaaaaataaaaaaaaaaaataaaaataataaaaaaaaaaaataaataataataaataaattaataataaaatataataaaaaaataaattaagg

SEQ ID NO: 12106 - DNA, 296 bp, Zea mays
  Clone ID: LIB3157-003-Q1-K1-F6
ctgctctgcagttggacagctgcaccacggtgaggagaatctgaaaataatggctagattctgcgctttccagatcaggaagaccctgtcagacaacatattttcctgggacagcgtaacgatgttgaggctctactactcggtagatctcgccgtggcggcagatgcagtgtccggagcatttacctaggccttggccgatctagtccaagacaaccctttcatgagaactgactttcctttttacatcgttgtgccacgtaccggagcttgtcgttcttcgtgtgccatcgaca

SEQ ID NO: 12107 - DNA, 352 bp, Zea mays
  Clone ID: LIB3157-003-Q1-K1-G6
tcggcctcatgaactccttcatcaacgacttttttaaaagctctcccggtgcccgcagctggcccgtctacaaggatgcccccttacctcccggggatccagacctccgccgcttgtctccccgggagctgccaagcacgccgtttggagggtcctggccgtcaccaatttacctttttttccccctttagaagcttcgttgttgtggtttctaagcaagcctgtgattggccccttttaagggtataatgagtgggttggctgtgtttgttaaattgggccaagggcctttttgccctgggttttgaaatttagtccatggtgggaattgcattgcttttgggtttttttg

SEQ ID NO: 12108 - DNA, 198 bp, Zea mays
  unsure (1)..(198): unsure at all n locations; Clone ID: LIB3157-004-Q1-K1-A10
cggacgcgtgggcggacgcgtgggcggacgcgtgggcaacaatttgttttggatggagacttagatctccaaacactcgtaactatcctactaggtggtgacatcagtccccaaaaacgtttatggtcatagagtctgcccttcgtttgtcagtcgggcaatttttcttgcatacaatgccttcgtttaagtatcana

SEQ ID NO: 12109 - DNA, 202 bp, Zea mays
  Clone ID: LIB3157-004-Q1-K1-A11
gggatggctacttatccgactacgtgatcggagtccgagccgcgaggttctccggggttcggtttcgtgggtgagcggatcgagatggcggggtcggacgttgatataccattcattcttacgtaggctcgcatgcgccacggacgaccactatatgacaacgaatttaaaacctacggcgaggtgcttaaaaccaagatta

SEQ ID NO: 12110 - DNA, 60 bp, Zea mays
  unsure (1)..(60): unsure at all n locations; Clone ID: LIB3157-004-Q1-K1-A7
naaaaaaaaaaaaaaaaaaaaaaaataatttaaaaaaaaaaaaaaaaaaaaaaaaaaaaa

SEQ ID NO: 12111 - DNA, 208 bp, Zea mays
  Clone ID: LIB3157-004-Q1-K1-A9
gtggcgtcgcttgcatgcaacaaaataactctcttttaaaggcacttaaaacctactgagtgggcgtcgattaacacattatcctggatcgaaacacgcagaggtcccacggattcagcttggtcaccttctccacggaggaggcgatgcagaacgccattgagggcatgaacggcaaggagctggacggccgcaacatcaccgttaa

SEQ ID NO: 12112 - DNA, 315 bp, Zea mays
  Clone ID: LIB3157-004-Q1-K1-B10
aagcctgcccactaccggtactaggcggtttgcagctcactcgggccgttgtgtgctatgaagttcgctacactggcctgtcagttatcttttgcatgcatatgcattatcatatacgcagtcgcgtagcaggttttctgtcagttatcgcttgagctgagggggagggaaggagctgtttgcttttgctgaagaataatggtgtagtcggctgggttgaggcgatgtgcgttgccagatacagttttgtcttgttgactctacttatctgattatcatttgtaagcgatttgctcaagttatttgtcgtttatg

SEQ ID NO: 12113 - DNA, 268 bp, Zea mays
  Clone ID: LIB3157-004-Q1-K1-B2
ccggaagcatgcccccggaggtgctgttcacagaagccgtgaagattttggaagagaagtgcgcgagggtcatatctgaactatcctgagaggcggccggcggcactgtgcagcactggagttagagtaaaccagctcaggctgcagtatctgctgtttttgctggagactagtgtgcgccattaaacatttttttggttgtgttggatatttgggtcagcaaatgtaagctgtttatatatcatgtaacgcagtgtaatgttagatt

SEQ ID NO: 12114 - DNA, 195 bp, Zea mays
  Clone ID: LIB3157-004-Q1-K1-C5
tcgttccgcgttttatacctttatgtgtttggtttgaaatgcagaatgaacttggcgcttggttgcattttggggccgtttgcaggtgccaactgagattaaaaaaaaaaaagggggcgttaagtcacttactcctgctgcagcatcttttatggtactaaattaattactggcgcgtttacaacgcggatggaa

SEQ ID NO: 12115 - DNA, 130 bp, Zea mays
  Clone ID: LIB3157-004-Q1-K1-C8
gaaaggccgggccgacccacgcgtacggggagctctctgcttcctgtgtattcttttttttccagtattccctgttattctgctatgaaatcatccatcgtgccacaaagaactgatggttcctgatgtc

SEQ ID NO: 12116 - DNA, 262 bp, Zea mays
  unsure (1)..(262): unsure at all n locations; Clone ID: LIB3157-004-Q1-K1-D11
accgctgattacggacctganatcatgagatggggattgatggattcactcctttttgcacatttatannttttcgtgattttgtactggttctgtactcggtaattgnnatttgtgcgaaccagataccctcagaacaaaagcatgtacanagagattcttaactgtatctgaacttatgaacgacgttctaaaatattgaagctggcattatcttcaattggcgaanaaaaaaaaaaaaaaaaaaaaaaaaaaanannnt

SEQ ID NO: 12117 - DNA, 326 bp, Zea mays
  Clone ID: LIB3157-004-Q1-K1-D12
aaaaaaaaaaaaaaaaaaaaaaaaaaaagggctgaaaatataaaaagaaaacaaaataaaaaacgcgtacatgcaaaaataataaatcttatatagtgtaaaaaaaaaaaaaatgggcggcccttttatggaacaaaagtttaactgcgaaaacttgcgacgaacaacatttttttttgggttgccctaaattcaatttatggccggtggtttaacaacgaagagactggaaaaaccctggctttacaaaatttattcactttgaataaaaaacccttttcgccatgtggcgtaatatcaaaaaggcccgctccggtggcttttcc

SEQ ID NO: 12118 - DNA, 109 bp, Zea mays
  unsure (1)..(109): unsure at all n locations; Clone ID: LIB3157-004-Q1-K1-D3
naaaaaaaaaaaaaaaaaaaaaaaaaaaaaaaaaaaaaaaaaaaaaaaaaaaaaaaaaaaaaaaaaaaaaaaaaaaaaaaaaaaaaaaaaaaaaaaaaaaaaaaaaaaa

SEQ ID NO: 12119 - DNA, 265 bp, Zea mays
  unsure (1)..(265): unsure at all n locations; Clone ID: LIB3157-004-Q1-K1-D5
cacncacncacanggcacacagccacacnggaaccgcngcccgcagcggagggagcnggcacgggccaacgcacacanaacacaagcncgncgncgaaggcgcggggggcngcggngcnggcgcnggccgcggccacggccaacgccgnggcgnccgnggcgggcggcgacangagcgcggacaagacggagggcgcggaccaacnggngggccnggcgccgagccngcagnacgngcaggggcaggcccgcgcgccgacgaccg

SEQ ID NO: 12120 - DNA, 346 bp, Zea mays
  Clone ID: LIB3157-004-Q1-K1-D9
agggacgacctattcaatatcaacgctggcatcgttaagaacctcagcaccgccatcgccaagtactgccccaatgcccttgtcaacatgatcagcaaccctgtgaattcaactgtaccaattgctgctgaggttttcaagaaggctgggacatatgatgagaagaagttgtttggcgtgaccacccttgatgttgttcgtgctaagactttctatgctgggaaggctaatttaccagttaccgatgtgaatgtccctgttgttggtggtcatgcgggtatcactatcctgccgttgttctcacaggccacccctgcaaccaacgcattgtccgatgaagacatta

SEQ ID NO: 12121 - DNA, 277 bp, Zea mays
  unsure (1)..(277): unsure at all n locations; Clone ID: LIB3157-004-Q1-K1-E12
ggcgacgccgcagaggctgctcgctgccggagcaccagggacagggcagccggacgtctagctagtcaggatgattcaggacgaggtcttcccggcgtaacggggcggcatgggctgcgcggggtgtctgcttccgtttcttgtaaagtgcagtggcgtgcgtgcgtggctggccagcacacgagagcctgatggcgtagcgtaggtacagagtatgtaacgggcaataacacgcaggttcgtgtctggacctgtggtctctcgttcgtgccccnnt

SEQ ID NO: 12122 - DNA, 176 bp, Zea mays
  Clone ID: LIB3157-004-Q1-K1-E4
atcctttaccattttttctgattttctgcaattataatcagacgaacattgtgttcatttaaattactgttttcaacagtgttgagtatctaaatttaaatatttagattgcttattatatatgtaattgtacatacttgtctgtttttagtataaaaaatgcagacttgttagtg

SEQ ID NO: 12123 - DNA, 65 bp, Zea mays
  unsure (1)..(65): unsure at all n locations; Clone ID: LIB3157-004-Q1-K1-F2
naaaaaaaaaaaaaaaaaaaaaaaaaaaattaaaaaaaaaaaagggaggacaatataaaaagaaa

SEQ ID NO: 12124 - DNA, 136 bp, Zea mays
  Clone ID: LIB3157-004-Q1-K1-F3
cggacgcgtgggcggacgcgtgggcggattcttttgcggacgcgtgggaaaaaaaaaagggaggaatgtattaaaaaaataaaaaaaaaataataacattataaataaaaaaaaaaaaattaaaaaaaataaacag

SEQ ID NO: 12125 - DNA, 247 bp, Zea mays
  Clone ID: LIB3157-004-Q1-K1-F8
atcagatgctgatatactttgctttgttttgttctggcccaccgaactgtggcaagaagctgtgtcttacaggctggggttagaactcttgaactgatagtcggcttaggagggtcttattgtgcacacagttggttggatgtttttgtgtggtataaaaacgatttcgcgcgtagaaaaaaaagatacaaacaaaaaaaaaaatacagggcggccgccctctattttttattttttaaataaaagg

SEQ ID NO: 12126 - DNA, 327 bp, Zea mays
  Clone ID: LIB3157-004-Q1-K1-G10
ggagaagcgccagagccaccatgaccggcttttgcagattttccccaactcggttgacaacgctgacgtggtgctgcaccgggacggcgacctctggaagcacattgccgcgttgcggcggcaccggaggacgtttagctacgtcaaggagagagggacgtagaagcgtagcatatagccttcgggtgaattggcaattggcatggcacgtactagtgtttaggagagaattagcaaaagcaaaagattaatgtgtacatatatttaagctagatcatagatgggtgtggcacaacacgacatttcatttaaaccaaatacttttac

SEQ ID NO: 12127 - DNA, 113 bp, Zea mays
  Clone ID: LIB3157-004-Q1-K1-G12
ccgaccgagtctcactgtatttgcattaaaccatttccaacctttccatacctataccaaaaaaggctcgtttgtcaaatatataaaatacaataaaaaaaatcgtcggtctt

SEQ ID NO: 12128 - DNA, 226 bp, Zea mays
  Clone ID: LIB3157-004-Q1-K1-G6
ttgagtttgtggcgacaaatgcatttcttgtatcgctaagagtcttagctgggaacttagttctcacttctgtgtgactgtgatcaaaggacttgtgtatgatcaaaggagatccatcagttggtaccgaagtgtattttatgtcttgttggttacctggaatttaattaaaaccatcacttgtatccttttgagaattgggcaattgatgtgtcgttttttgttc

SEQ ID NO: 12129 - DNA, 55 bp, Zea mays
  Clone ID: LIB3157-004-Q1-K1-H11
atcatccttccgttcacatatactaaatatatacacatttacagggtgtttggtt

SEQ ID NO: 12130 - DNA, 302 bp, Zea mays
  Clone ID: LIB3157-004-Q1-K1-H7
acggtaaatgactctagtttgtaatattattacttactctttattaatattcgaagcattgtgactaaaaaaaaaaaaaaatataaaaaaaaataaaaaaaaaaagaaaaaagacgactactaaaaaaagcaataaaccgggggctgcaaacaggggccaatacaaggatcgaatggtggcctaggcaaaaatattgggcgagaactggcggtagaagcagagagctgctaaagggagcctggattttacgaacggatgcgggtaacgtcagtcactcaaaaactgtttaacccgtgcgtgc

SEQ ID NO: 12131 - DNA, 222 bp, Zea mays
  Clone ID: LIB3157-005-Q1-K1-A12
ctagtccagagggtttatcttcgttcgtctcgtttgttgttgcccatctgtgtttttgattgcaaggtcgctctgtgtcagttgttagtgctgtgttcatcctcggctccagcagacccatgcatcaaccagcatggactgcggatcgatggatgctgttacccccgtcaggctttgttctaagttaatcataaggaaaaaatggtgcttctttgtgctgca

SEQ ID NO: 12132 - DNA, 209 bp, Zea mays
  Clone ID: LIB3157-005-Q1-K1-A2
gaaagttatttggcaattgtattggtcgttgctgtatatattccctatagtttgttagcagatgtgtagtttgtaattccataaaaatgaaggacgcgttactgctatttcttaaaaaaaaaaaaaaaaaaaaaaaaaaaaaaaaaaaaaaaaaaaaaaaaaaaacaaaaaaacaaaaaaaaaaagaaaaaaaaaaaaaaaaaataagg

SEQ ID NO: 12133 - DNA, 91 bp, Zea mays
  Clone ID: LIB3157-005-Q1-K1-A3
aaaaaaaaaaaaaaaaaaaaaaaaaaaaaaaaatttaaaaaaaaaaaaaaaaaaataaaaaaaaaaaaaaaaaaaaaaaaaatataaaagg

SEQ ID NO: 12134 - DNA, 104 bp, Zea mays
  Clone ID: LIB3157-005-Q1-K1-A6
gaccaagtttggttcccaaaaggatagtgtatacatagtactatgaaaacaatgctggagtgattagagaaaccaaagggagagatgaaaaggcatatgacatg

SEQ ID NO: 12135 - DNA, 284 bp, Zea mays
  Clone ID: LIB3157-005-Q1-K1-B3
cggctggtggggtctatgtggttgcaagttgtttattttatatcgcaacaatttcccggttgtcgttgggttattctgtgaagcagccaaaccaggctattgttatgaaaatttgtcgtctgtaagcatgtgaacttccgacgttgccacatgctggatcagtctgaataagtaagtatgcagctctaggtggtcagctgcgtctaccacaatgagcatgtacgtatggagaaatatctgtgaacccattttgtttatgaataagatttgttttttttcgagtt

SEQ ID NO: 12136 - DNA, 153 bp, Zea mays
  Clone ID: LIB3157-005-Q1-K1-B7
cgtgtgtactgtctgatggagagtgatttttactgtgtgtattaggtctggatccgatcggcctgatgtatgaaaaggatgcctacgtactatatatagatggaaaatcgctttaaacaaaagaaaagtaaacacaaaaaaatacaacaaata

SEQ ID NO: 12137 - DNA, 128 bp, Zea mays
  Clone ID: LIB3157-005-Q1-K1-B8
tctgtgtgtttttggtatggatccgatgggtcttgtgtattaaaaggatgtttacgtactatatatagatggaaaatcgtttattctaaaaatcggggcaaaattaatataacttggatttgaacggc

SEQ ID NO: 12138 - DNA, 207 bp, Zea mays
  Clone ID: LIB3157-005-Q1-K1-C10
cggacgcgtgggcaataatgagtccctctccggaccttggtagctgcttgcttgtggtgagtgagagtgtgagactgagggagaagaggtggtgggcgtggggccggctacgtcgagagaggcgtgttcctgtactcgcttcgttttctctgcatgcgtgtataaattgtgttcaataataagtgagagcggtgtgatgtgtggctc

SEQ ID NO: 12139 - DNA, 365 bp, Zea mays
  Clone ID: LIB3157-005-Q1-K1-C12
gactagttctagatcgcgagcgccgccctttttttttttttttttttttttttgttttttgtgtttttttttttttgaaaacgggattccggcttggactatttttattcccataaagaaacagcgtcggcgaattcttcgttacagtattattcaggtacactcgaccgcagtttatggcctatggatttgagtctggccaacaaacaagaacgaaacagcggagccattcactttcaaaaaatttatggtggccgccaaaggaatggcttacgcccaccttacttttgcaagaacagtggggccattttacgcaacattctccatcaactgcaggagatgggcattattgatgtggatcccaa

SEQ ID NO: 12140 - DNA, 306 bp, Zea mays
  Clone ID: LIB3157-005-Q1-K1-C5
gtttaactactgtgaaacgtgcgaaatttgagaaggcgatgattgaatataacaggaaaaaggaaagctgaacatttgtctgttccaaattcccgacggttcactgtaactggatgaatcaatcacctgtatattacagaacttagatttctagtggaatccatagataccactattggaaccgtcagctcacgcagatatgtatgttatgtagtcgacttgcatattttgatgacaccgagtcttttactggtggttttcatctggatataatttgaagttccgcgctccatatagcttttccaa

SEQ ID NO: 12141 - DNA, 93 bp, Zea mays
  Clone ID: LIB3157-005-Q1-K1-C7
aaaaaaaaaaaaaaaaaaaaaaaaaaaattaaaaaaaaaaaaaaataaaaataaaaaaaaaaaaaaaaaaaaaaacatataaaataaaaaaaa

SEQ ID NO: 12142 - DNA, 64 bp, Zea mays
  Clone ID: LIB3157-005-Q1-K1-D1
aaaaaaaaaaaaaaaaaaaaaaaaaaaaaaaaaataaaaaaaaaaaaaaaaaaaaaaaaaaaaa

SEQ ID NO: 12143 - DNA, 335 bp, Zea mays
  Clone ID: LIB3157-005-Q1-K1-D12
gtgctacaaaggagcaaggaaacatagcagttgggaattattcagagaacagactcttggttattatgcttcttcttccttagcgtcttcctcttgtacccagatccacatttcctgtgcttctagattcttctagtgtctttctctagtatctgatcacctgcttgctgtctatcctatattctgtctcaaatcatagtttgtgttggagtgaattgagtgtgagttcgtcctaaaaaaaaaaaaataaaaaaaaaataaaaaaattaaaaaaaaaacctataaaatttattattatagaaattcaatctataattgttaaatcaaaaaacaag

SEQ ID NO: 12144 - DNA, 179 bp, Zea mays
  Clone ID: LIB3157-005-Q1-K1-D3
tttgagttttggccgcctcgttgttagttgtaatatacagttcattttatattgtgaggtaagctatatgccatgtgtaaacatgagagctcaggaatgttgggtagcatcatgagtgtagctaggcatcgaactatcggccaataaaatgtctgatcgataaagaggtatagttgttt

SEQ ID NO: 12145 - DNA, 298 bp, Zea mays
  Clone ID: LIB3157-005-Q1-K1-D4
taagggtgctgggcacacagttcctgagtacaaaccacaggaagcactagctttctacagccgttggcttgccggtgctaaactgtgaggaggcctattttgtgtgcaaaggtcatgcagtactgaatcaaacagaagttggataaagcatgcagcaataaggcagtcgaaggatcaaagtatccaacgcgccaactacaatgttgcattcattttcacatgttataccaatgcagttgctaattacctgcattgttcatgagttcacagtccatctaattggttgaccacaccgtct

SEQ ID NO: 12146 - DNA, 279 bp, Zea mays
  Clone ID: LIB3157-005-Q1-K1-D7
agtcacggccgtccggcctagaattactgtacacaagggacttcagatatgcgaggtgaggcttgctgccatgtgtaaaccatgatagctcatgatagaagcggtggatcaagtgagtctcttggcattgcactattaaaccataaaaggcgggtgcggcaaagtggtatagatgtttaaaaaaaaaaaaaaaaaaaaaaaaaaaaaaaaaaaaaaaaaaaaaaaaataaatattagggattctttatttgggggcgggcgctttaaaggatcaaactt

SEQ ID NO: 12147 - DNA, 102 bp, Zea mays
  Clone ID: LIB3157-005-Q1-K1-E9
aaaaaaaaaaaaaaaaaataaataaaaaaattttaaaaaaaaaaaaaaaaaaaaaaaaaaaatagaaaaattgaaaaaaaaataaaaaaaaaaaaaaaaaaa

SEQ ID NO: 12148 - DNA, 241 bp, Zea mays
  Clone ID: LIB3157-005-Q1-K1-F1
gcaaagtgtaatcgtaagtccaatgtaaaccccttttataccaggttacgttaccttgctcattttattttgtgggcacagataaatgctcgttaattaggcaggggttgatcttactctaaaaaattgtcctaaggctcagaaataacgatgtttgaagatgcatttgttgcaaaaaacgatgttgggatcagattttgatgaatttattttcctaaataaaaaattatacatataaaat

SEQ ID NO: 12149 - DNA, 286 bp, Zea mays
  Clone ID: LIB3157-005-Q1-K1-F2
cggacgcgtggggttttctggatcatattcataattctatgtaggctgtgacaggaatctctatagtagagccatgatttttttttggttgggtttcagcctgcgttggagaatatgcccaatttttttttttggagaatatgccttatctggatggataaggcactaaacatttgaagattatatttcggagggtggagaatatgacaatttgatttatatcactaaaaaaaaaaaaaaaaaaaaaaaaaaaaaaaaaaaaaaaaaaaaaaaaaaaaaaaaatag

SEQ ID NO: 12150 - DNA, 198 bp, Zea mays
  Clone ID: LIB3157-005-Q1-K1-G11
aagggcaagagcacaatagcttatagcattcttatggatcgacatgcaccgaaatgtgtgtggtgatcagtacactctcttggttagccgcttcaagttcatagcgtaatgccatattataagacctggtcggcacacttgtatataaaagctattgaacgtctacataaaaaaaataaactttacattaataatggc

SEQ ID NO: 12151 - DNA, 222 bp, Zea mays
  Clone ID: LIB3157-005-Q1-K1-G2
cggacgcgtgggcagaagtgagagcactgtttggtggcctcttcaaacaagaaacggtgtatgtggatgatgactaaaacgaggagcgccaatttatcctctacgtgattttctttcttttgttttttttttgtttgtccagtgccttggtgtactcttgaaataggaacgcttaaagttgtacaaaaattggctatatataagaaccaatgatcatgtgtt

SEQ ID NO: 12152 - DNA, 87 bp, Zea mays
  Clone ID: LIB3157-005-Q1-K1-G3
caataggcaaattctgcaaaacgagttcgccaatatgaacaataaataaagaacgctgtgataaaataaaagcagattttctggtgc

SEQ ID NO: 12153 - DNA, 64 bp, Zea mays
  Clone ID: LIB3157-005-Q1-K1-G4
caaaaaaaaaataataaaaaaaaaaaaattttaatttattacaaaaaaaaaaaaaaaacataaa

SEQ ID NO: 12154 - DNA, 184 bp, Zea mays
  Clone ID: LIB3157-005-Q1-K1-G6
ttttcaaaccagaaacggggggtgtgggtgatgactattacgaggagcacctatttatccgctacatgatattctttctttagttttatttttgtccgtccaatacctcggtgtactcttgtaattggaactcttaaatgtaaacaaaaattgggtatatttaataaccaatgatcatgtgttc

SEQ ID NO: 12155 - DNA, 292 bp, Zea mays
  Clone ID: LIB3157-005-Q1-K1-H1
ctggcgtgctacaacgaaaaactccaaacctttccgcagacttgttacagatggatggcacagcatactcctatagaaccatggtgtgtttgtttactttctagattatataagttggattatggtggaagggtaatatggtaaaatatcactttaggactgtaaagctgaaataatctaacattgggtagtttatttctaaaaaaaaaaaaagaaaaaaaatacacactacacaaaattaaaaaatattcttttcatgaacataaaaaaatactaaaaaaataaaaattgg

SEQ ID NO: 12156 - DNA, 407 bp, Zea mays
  Clone ID: LIB3157-005-Q1-K1-H4
ctcgacgcctatctctctttccccgagctctctaaaccctaggtgcgtgccgaccggcggcggcggcgaggtgatggcgatggacccggacgcggtggcgaaagccttcgtggagcactactaccggacgttcgacaccaaccgcgcggcgctggtggggctgtatcaggagacctccatgctcaccttcgagggccagaagttccagggcccatccgccattgccggcaagctaggatctgttcccttccatgcctgcgagcaccagatcgtcaccgtcgactgccagccgtcggggccccagggaggcatgctcgtcttcatctccggttccatccgcaccggccccgaagagcaccccatcaagttctttcagcattccatttgctgccggcagctgggtcctt

SEQ ID NO: 12157 - DNA, 96 bp, Zea mays
  Clone ID: LIB3157-005-Q1-K1-H9
gttgaattggaaactaaatttaagttactagattctatgatcattgtgaacatacaacttaaatttagtttccaattcaactgattttatttcttc

SEQ ID NO: 12158 - DNA, 244 bp, Zea mays
  Clone ID: LIB3157-006-Q1-K1-A10
gccctatgcacgggaggaaggaggagacgcgctgcggctgccgcatcggtcggtgtgcagttagttgtcctgttagtctatgctacgttgtctgcactctgcaataacggacgtgacccggggaaaaaaactgtttcgtcacgggtagctagagaatcacgtaatggctcttgttttcgtttgtgtcctataatgtatggctattggcctgtttcgagaggttaaaatttggaggtgctgcatc

SEQ ID NO: 12159 - DNA, 80 bp, Zea mays
  Clone ID: LIB3157-006-Q1-K1-A12
aaaaaaaaaaaaaaaaaaaaaaaaaaaaaaaaaaaaaaaaaaaaaaaaaaaaaaaaaaaaaaaaaaaaaaaaaaaaaaaa

SEQ ID NO: 12160 - DNA, 296 bp, Zea mays
  Clone ID: LIB3157-006-Q1-K1-A7
ctcctgcttccttgggtccttgaagcttaccggcaattgcgagccaccacctggccgtttgaccgaggttcgagcctgctaggtggatcagctatggtttccgcatctgtttttcgctctttgtacatcggcagagtgtaattaccggcataagtttgcacagcctgcggaattccctcgggacagaactgtatgttgtggcatgtgggtggcgagataaatttggctatcgggagccgggagaaaaaaaagaaacaacaacaccttcaaaaccgaattacaaaaaaagaagagac

SEQ ID NO: 12161 - DNA, 411 bp, Zea mays
  Clone ID: LIB3157-006-Q1-K1-B11
ctcgctagtcgctacagctacagctagtacgtactatactatactaataaaagctacagtttcgtccggttctaaaaaaaaaaaaaaaaaaaaaaaaaaaaaaaaaaaaaaaaaaaaaaaaaaaaaaaaaaaaaaaaaaaaaaaaaaaaaaaaaaaaaaaaaaaaaaaaaaaaaaaaaaaaaggggcggccgttttaaagaatcaaagttaactaacccgtgcatgcaacgtaaaagtttttttatggggccaccaaaattaaattaactggccgtcttttaaaaacgtgggaactggaaaaaccctggggtaaccaaactaaatggctttgaaaaaaatccccttttcgcaagttggcgtaaaacaaaaaaggcccaaaccagacgcccttccaaaaaattgcccaacct

SEQ ID NO: 12162 - DNA, 142 bp, Zea mays
  Clone ID: LIB3157-006-Q1-K1-B2
gttttgtcctcgtgatctctgcaactgtatttattttaatggatggtatacatggagatatgatcatgataataacaataaggtgattacaaaaaaaaaaaaaaaaaaaaaaaaaaaaggggcggccgctcgcgatctgaac

SEQ ID NO: 12163 - DNA, 75 bp, Zea mays
  Clone ID: LIB3157-006-Q1-K1-B4
acggagatcccagataaatatgatcaaaaaaaatatctctgaaataaataataacaaaaaaaaggtacactaagg

SEQ ID NO: 12164 - DNA, 238 bp, Zea mays
  Clone ID: LIB3157-006-Q1-K1-C11
gagctggttaactagctaggtagatagatatatcatatatgggtatgatggtgtggatgagaataaaaaaacaaggtacgtagtccatgtctctggtcttggggagtggctgtgagcctgtgagatcctgggaagttcatgcatggcatggctcaagagggagatctgaaacttgtgtagccactacgaacttgttttccagaaatcttgtaagtaggggagcctgtgaataatctag

SEQ ID NO: 12165 - DNA, 172 bp, Zea mays
  Clone ID: LIB3157-006-Q1-K1-C5
gttgccagttaatgttggcgtcagtcgcaggggatcttcggccatcgtcgccgcatcagaagcaatgcgcagctccagtggcctcgaccgaacaggacaagaaataggtctagttggatttcttttcgcctttgggtttttgtttaaaaagaaagagaacttgattttcctt

SEQ ID NO: 12166 - DNA, 321 bp, Zea mays
  Clone ID: LIB3157-006-Q1-K1-C7
cacttgagtgtttttgtcctaatataatagtggtcgcaatgtctagattgccctgatataacttggtgagacggaaattctgtgggataagtatttgcttgtgtaaaaaaaaaaaaaaaaaaaaaaaaaaaaaaaaaaaaaaaaaaaaaaaaaaaaaaaaaaaaaaaaaaaaaaaaaaaaaaaaaaggggcggccgttttaaaaaaggggggcttccttacaaagtatatgcaatctcttcccttttttatggggtaaaaaaatttaaattgggggccctaaattaaaaaacatggggactggaaaaacactggagtatct

SEQ ID NO: 12167 - DNA, 248 bp, Zea mays
  Clone ID: LIB3157-006-Q1-K1-C8
gccacacaaccatcacaacaaggagcaccagcttatgattgaagttgccatacacggtcgatgacatacactgcatttctttctttcttttttatgccgagcgtaatagtggatgtttcttgccggccaaacatttgcagagagaatgtagctagatgtgctcattacaaggaagaagatatagagaaagaagatacacagggtgctgatgtgaataagagaaagctccaaatggcggtccaccgttt

SEQ ID NO: 12168 - DNA, 310 bp, Zea mays
  Clone ID: LIB3157-006-Q1-K1-D12
gttctagatcgcgaggcccagtatcttgaaaggttggggagccgcgaagtctgaagtctgaacggtgaaaggctggctgacgctgtggggaggaaggggcagggacgtgctgttggttttattatattggtatttatgttattatatatgtggtagcagcagcgtggaaccgcattaataatggggaccttaacacctctattttactgtcgttgctttgttgtcgcgtgctaggttatattctgaagtggattcctcaataccgcataccgtactgctacgcctgttgactttgttaaaaaaataaaaa

SEQ ID NO: 12169 - DNA, 261 bp, Zea mays
  Clone ID: LIB3157-006-Q1-K1-D8
aaaaaaaaaaaaagaaaaaaaaaatttattttagaagataaaaaaaaaaaaaaaaaaaaaaaggaaggtcatgaaatgtgatattaggggtacctaggtttgcttccctggccgtcgttgttctgctcgcgtctgggggacccctgtttggtccccggttattcgttttgcaacatgttctcctgtggcgccctggcgttttaacgggaggcgcgttccaaccgcccttcctatcaggtgcttgcgctgaatggcgaatgg

SEQ ID NO: 12170 - DNA, 148 bp, Zea mays
  Clone ID: LIB3157-006-Q1-K1-D9
aaaaaaaaaaaaaaaaaaaaaaaaaaaaaataaaataaaaaaaaaaaaaaaaaaaaaaaaaaaaaaaaaaaaaaaaaaaaaaaaaaaaaaaaaaaaaaaaaaaaaaaaaaaaaaaaaaaaaaaaaaaaaaagggggggccgttttaag

SEQ ID NO: 12171 - DNA, 278 bp, Zea mays
  Clone ID: LIB3157-006-Q1-K1-E10
aaggcgctcacagaactcagtgtgtcttctcctttatgttgtttaccgccagactaattagagtgtcgtgaagttttacttatctggtttttattcgaattcgtgtctggaagatgaaagcctgtgaatacacctttatagagccgtgtcatcgatgctaacattttttgaagcagagttttgaggtgaatgtgaggcgctgtgctgccctgattggcattaacgaaaatgcacaagtttgaacttttattgcataaaggtaatggagtttgttaggg

SEQ ID NO: 12172 - DNA, 218 bp, Zea mays
  Clone ID: LIB3157-006-Q1-K1-E11
cgttttttgtcaaagcggttcctgtgctgtataacatgttgcatgagtattggcgcaacttataagacaatgtcaaatgggtttttgggagtcccattctggtttcttgagtcttcttcattggtctattgggtaacatgtacacaggtttggggttcgtcttgtcttggctggtgtatttgccaccgttgtctggaagttgttgcatgcttatctag

SEQ ID NO: 12173 - DNA, 306 bp, Zea mays
  Clone ID: LIB3157-006-Q1-K1-E6
gcggcgtgctcaagatcttcctggagaacgtgatccgcgacgccgtcacgtacaccgagcacgcgcgccgcaagaccgtcacagccatggacgtcgtctacgcgctcaagcgccagggccgcaccctctacggcttcggcggctaggctatgccggtcgcgctcgcgcctcgctgtcgtcgctgcggttcttgtttctgcaattcgcaaggtgtggcttgacggggaaaatgctggttaatgtagcactagatcaagcatgttgtgcgtgtctgaagaaatgccaattgtgacttgctgtttgttc

SEQ ID NO: 12174 - DNA, 303 bp, Zea mays
  unsure (1)..(303): unsure at all n locations; Clone ID: LIB3157-006-Q1-K1-G1
gccttccggagacccgcggccggacgctggaggagatgggcaagctgttcggcatgccggacacggacgacatggctgaagcagaggacgctacagcaggcaaggagaaggtggcggaagtggaaatgtgcatgccaagtaagatgtaaagcgcggctgcggctacagcgtcttcgtccccgggcagaggtcaactggaatagacggacaagattttttttttttttttggagcaaatggtaaccagatgggcaggaataagattggcctacgaggtcggtgactcggtgccgtcgtccanaa

SEQ ID NO: 12175 - DNA, 156 bp, Zea mays
  Clone ID: LIB3157-006-Q1-K1-G11
atttagccgtttgtgactggttgtagctagcggtggtgcggtggtgatgttcttgaggcatgaataatgctacatgcatgtgatgtatccatgttttgtgtgtggtaaacctgttgtttgtataagctgtatgcatgtgggtctttaatttgtttt

SEQ ID NO: 12176 - DNA, 119 bp, Zea mays
  Clone ID: LIB3157-006-Q1-K1-G12
aaaaaaaaaaaaaaaaaaaaaaaaaaaaaaaaaaaaaaaaaaaaaaaaaaaaaaaaaaaaaaaaaaaaaaaaaaaaaaaaaaaaaaaaaaaaaaaaaaaggggcggccctaaatcgcga

SEQ ID NO: 12177 - DNA, 306 bp, Zea mays
  Clone ID: LIB3157-006-Q1-K1-G7
cggacgcgtgggtggtgccattgaggtctgcgccgagctgaggcccaccgtcgacatctctgtgcctgccaacgccgactttgtgcgcccggagctccggcagtcttcctagattgaggcagtgagcggagagggagagggagagagaaagagaggatttcgtgtcccgagttagaacagagtgctgtatgttttgtgcgactgtttgtaagtcaagtctgaactgtgaacctatgtttgcttctatcagaggacccggagaaagcctgggcatctgtttccggaataaaatgggtccttcggaat

SEQ ID NO: 12178 - DNA, 260 bp, Zea mays
  Clone ID: LIB3157-006-Q1-K1-G8
gtactgtacaagcttgagctggagtgcggacggaagcaccctctacactggctacaccgatgggtctatcagggtttggaagatctccgggtacggctacgcaggctagatgttgaaatcagcttggtctaggcagtctttcgggggaaaacattgtaatgtttgtcaagtttttgatgtcgtgagctatattgtctcttcgctactttccggtcgcccaaccattttaatcttactatggaagaatcttgttttgcact

SEQ ID NO: 12179 - DNA, 267 bp, Zea mays
  Clone ID: LIB3157-006-Q1-K1-H11
gtacgtaattcattgtaggtagctgcgggtttttttttttggttgttgttgtaacgggcgaaagcggaccaccattttaggtagtgtctgtcagccggtgccggtgaagatgatggagaaggatatggtgtgagcggtgatgtattcttttgtgcggtaaatgtgtggaggtggtcatcttgttgtgccgtaaaaaaaaatattataaaagaaaaaaaaagaaaatatactagaaactcaacatcaaatggaaaaaaaaaataataa

SEQ ID NO: 12180 - DNA, 226 bp, Zea mays
  Clone ID: LIB3157-007-Q1-K1-A11
tagaaatcgggggcctcatgatgtgggtgcaacccataaaaaaacggggggttagtttggaaccgaaaattttttctgtttttgcgccacgagaggttctggaggcatactctccagcaccgtggctaataacgcattgttccaattcagtctggccttgtcatgcatgcaaaaaaaaaagagaggggttcccctgtttaaataccaaaaaaaaaaaaaagggggg

SEQ ID NO: 12181 - DNA, 108 bp, Zea mays
  unsure (1)..(108): unsure at all n locations; Clone ID: LIB3157-007-Q1-K1-A3
ntaaaaaaaaaaaaaaaaaaaaaaaaaaaattaattttataaaaagggcggtcaattcttgaggggcgtgatcttactaacacattcatgcgacctcctctctatata

SEQ ID NO: 12182 - DNA, 247 bp, Zea mays
  Clone ID: LIB3157-007-Q1-K1-A4
cggacgcgtgggcgctgcttgacgagtgctacgtctccgggagccgtggctctgttgaatgagctcgagttgggcgtcgccagcacattgtaactaaactgcgtttgccacgagctgatctgagcacagcgaaccttacagtatgtctgaaaagaattggaactacacaacagatcttttgtctggattgtatctataaataccagtgaaagcgctttggggaaaaaaaaaaaaaaaaataaaaatg

SEQ ID NO: 12183 - DNA, 371 bp, Zea mays
  Clone ID: LIB3157-007-Q1-K1-B1
agatcagctaaataccacatgtttgtggactttatttacatgtaatattttttttgtgattccgcagatgagaactcttcaaagtttaaaccgtcgatttagccttaaaaaaaaaaaaaaaaaaaaaaaaaaaaaaaaaaaaaaaaaaaaaaacaaaaataaagagctagaaatggattaacaacttaaatgagttccaaaaaccttgaaaaccgtattgaaaaaagaaaagaagggtcttctgagcaagttctggggttgaaagggggccttttcttaagattaagttcattgtcccattatttgatatgctttgttctttaacggtgtaaaaaaaaaaatttctgtgtctgccttttagattggtgaaa

SEQ ID NO: 12184 - DNA, 337 bp, Zea mays
  Clone ID: LIB3157-007-Q1-K1-B10
aggtgaggtagccgaatctatgttcatgctaatgggcaagccatgcatgtttatgcagagatgtgtgtgtagtgcaaagataaataaggacgtcgagctaaatctatacaaccctcgacgtggagtgataagtattttgtatatgaatcttgtgaagcatgtgtgtgtgttatgtactcagaggacttcgcgagtcacaagaagcggtctaatacaaggattgactcagataagtgtttgtaatctcttattacatatcatgatataagttgaaagatgattgatccacaaattgttgggatgatgaataatattgagttgtatggttgaatgcatg

SEQ ID NO: 12185 - DNA, 117 bp, Zea mays
  Clone ID: LIB3157-007-Q1-K1-B4
aaaaaaaaaaaaaaaaaaaaaaaaaaaaattaaataaaaaaaaaaaaaaaaaaaaaaaaaggaaaaaaaaaaaaaaaaaaaaaaaaaaaaaaaaaaaaaaaaaaaaaaaaaaaaagg

SEQ ID NO: 12186 - DNA, 244 bp, Zea mays
  Clone ID: LIB3157-007-Q1-K1-B6
gcgacttgtacaatcaactatgggagcgagctacctctagcccagggaatcaattgtggttaatcctgcagaaatgttgcgcgtggatctcggtgttttctgcagacgtggatgccgtatggaaagaactgatgcaaccgcatttgagatctcagcagacttgagcagcatttattggcgtcagttgtgaaacttaaactgcaggagcatcttgttcataaataaaataagatgtttgttgctt

SEQ ID NO: 12187 - DNA, 133 bp, Zea mays
  Clone ID: LIB3157-007-Q1-K1-B7
ggcgcgtcatacgtggaatgaacttgtatcaagctatacctcaatgcttctctacccctgccgccgccgccgcagcagcaccccgtatgatatgatgatacacagctgggatggtatactgatattttgggtt

SEQ ID NO: 12188 - DNA, 257 bp, Zea mays
  unsure (1)..(257): unsure at all n locations; Clone ID: LIB3157-007-Q1-K1-C11
cgggncgaccccgcgtccggagctggttaactagctaggtagatagatatatcatatatgggtatgatggtgtggatgagaataaaaaaacaaggtacgtagtccatgtctctggtcttggggagtggctgtgagcctgtgagatcctgggaagttcatgcatggcatggctcaagagggagatctgaaacttgtgtagccactacgaacttgttttccagaaatcttgtaagtaggggagcctgtgaataatctag

SEQ ID NO: 12189 - DNA, 345 bp, Zea mays
  Clone ID: LIB3157-007-Q1-K1-C12
cgggacgcgtgggcggacgcgtgggcaaaagtatttcggctcaagacagcgtttcaagatcggtggtttacaaccagactagcagaagatgctctctatatctaccgtcgccttgtattattagtagctgaagtaagttcatgtgaatgttgtcgtgttcccgcagctgcgacgccatggcgtgcgacgtgcgcgttcttggctgtcgcagctgctgaaacttttgatggtttttaacctgtaagctgggggggatgaagtaaattattttgttctacaaaaaaaaaataataacctgtaaggaagggaaatataaatggtaattaacataaattttttttaata

SEQ ID NO: 12190 - DNA, 158 bp, Zea mays
  Clone ID: LIB3157-007-Q1-K1-C3
gacccacgcgaccgcggacgcgtgggtattaattcatttgtagcaccttgtgtacagctgccggcgaacttaaacctgctgcgccatattttattcatttttttcaccacgggtttgccgtgcttgtgaattgctgaaaaaaaaaaaaaagataaaaa

SEQ ID NO: 12191 - DNA, 72 bp, Zea mays
  Clone ID: LIB3157-007-Q1-K1-C8
gaaaaaaaaaaaaaaaaaaaaaaaatttttattttaaaaaaaaaaaaaaaaaaatgggggggcggtctttat

SEQ ID NO: 12192 - DNA, 231 bp, Zea mays
  Clone ID: LIB3157-007-Q1-K1-D11
gaaaaccggcccgagcgagcggaagaaaacgcactggctgaagccgctattcgttttagaccctctgctgccacccttatggtgattgtgccgtccaacctccttgcttcccctgtgtgaatctgaacggatttttgtgttctgaaaaaaaaaaaaattcctattataataataaaaaataaaaaaaaaaaaaaaaaaaaaaaaaaattcaaggcacagtgtataaatatg

SEQ ID NO: 12193 - DNA, 290 bp, Zea mays
  unsure (1)..(290): unsure at all n locations; Clone ID: LIB3157-007-Q1-K1-D3
ggcatatattagacaattggtggctttgatctcggatcggtggaagcccatgcaacaatctcgctgggagcaaccgccaccacagagatggcttggagggcgaacattcttncttgttctaccattattttaggatcttggactccgtcaagtcatcatggagcgcctgtagtttttagaatcttttgatgttctggttcgtagaattgtagctgcttccctgtgatcaaacttgtaatgatttgaggtcgctggtgtatattcatgtcactctaattaagctctttcgt

SEQ ID NO: 12194 - DNA, 77 bp, Zea mays
  unsure (1)..(77): unsure at all n locations; Clone ID: LIB3157-007-Q1-K1-D5
gcgtncgggacgcgtgggggacatggnacattcaatatttgattttatgagaaccaaagggtggagatgtttctttc

SEQ ID NO: 12195 - DNA, 108 bp, Zea mays
  Clone ID: LIB3157-007-Q1-K1-E3
aaaaaaaaaaaaaaaaaaaaaaaaaaaaattttattaataaaaaaaaaaaaaaaaaataaaggaggggggctgccgttttattgcatctcagctttcatcccccttct

SEQ ID NO: 12196 - DNA, 411 bp, Zea mays
  unsure (1)..(411): unsure at all n locations; Clone ID: LIB3157-007-Q1-K1-E8
cggacgcgtgggcggactcntgggctcttttgtgcccttcagcggcggctccagggggggcgttcgctccttcggccccgccgtccccgcgggcaacttcgccggaaactgggtctactgggtcggcccgctcgtcggcggcggcctcgctggcctcgtctacggcgacgtcttcattggcggctcctaccagcaggtcgcggaccaggactacgcctaatttattcaccactccatctccgctctggatgaatggattcaaaaccgtcgtcgtttgcttntgctcctcgccacgttcaattaatggttgtgtatgcatgtatgtgccaatatgatgtgcctttgccctggtccaatcattccctttcttttttcggggcgaaatagaagtaaagatctcgtcttgcctgc

SEQ ID NO: 12197 - DNA, 75 bp, Zea mays
  Clone ID: LIB3157-007-Q1-K1-E9
aaaaaacaaaaaaaaataaaaaataaaattttaaaaaaaataaaaacaaaaaaaaaaaagggggaaaaaaaaaaa

SEQ ID NO: 12198 - DNA, 110 bp, Zea mays
  Clone ID: LIB3157-007-Q1-K1-F3
aaaaaaaaaaaaaaaaaaaaaaaaaaaaaatttaataaaaaaaaaaaaaaaaaaaaaaaaaagaaaaaaaaatataaaaaaaaaagataaaaaaaaaaaaaaaaaaaaaa

SEQ ID NO: 12199 - DNA, 358 bp, Zea mays
  Clone ID: LIB3157-007-Q1-K1-F7
ttgtggttatgtaatgttactggatactgtatagctagttggtgcatcctcctcaacttgcttttcatttctgttagtttcgtcaccaagttcgttctcaattgctatttggttgtaacccagctgtaggatgcctggcttgcctgtaaccgcctgagcgtgatttggttgggaactgacggtttcacctggtgagacatgcctgcgaaccaaatctgcccccttggctgccgtatgtgtgataccaaaatctgttgttgtcttgtaggtttaaaaaaaaaaaaaaaaaaaaaaaaaaaaaaaaaaaaaaaaataaaaaaataaaaaaaatataaaaaaaaaataaaaatataaatat

SEQ ID NO: 12200 - DNA, 154 bp, Zea mays
  Clone ID: LIB3157-007-Q1-K1-F9
tttacacaccagtagtggtgcatatgtctttttattggctgtggatatataaagcttcggggatagttctattacatctgtgttgaacgagtactggaactgtacctacttatttctcattttcaatgattagtaattcaacattgcgaccagc

SEQ ID NO: 12201 - DNA, 156 bp, Zea mays
  Clone ID: LIB3157-007-Q1-K1-G11
atttagccgtttgtgactggttgtagctagcggttgtgcggcggtgatgttcttgaggcatggagaatgctacatgcatgtgatgtatccatgttttgtgtgtggtaaacctgttgtttgtataaactgaatgcatgtgggtctttaatttgtttt

SEQ ID NO: 12202 - DNA, 247 bp, Zea mays
  Clone ID: LIB3157-007-Q1-K1-G3
cggacgcgtgggaaaaactgtagcttatgtgtgtcttggcggattagctggttatcttgaactgacgttcatgtgacatggcaatggcacatgaacatacgtttcatgagtttgattgttaattggcgcttgcagcactttgatcaaaaaaaaaaaaaaaaaaaaaaaaaaaaaaaaaaaaaaaaaaaaaaaaaaaaaaaaaaaaaaaaaaaaaaaaaaaattataaaaaaaaaaaaaaaaaataaa

SEQ ID NO: 12203 - DNA, 257 bp, Zea mays
  unsure (1)..(257): unsure at all n locations; Clone ID: LIB3157-007-Q1-K1-H11
gcccaagcgangcgtacgtaattcattgtaggtagctgcacctttttttttttggttgttgttgcaacgggcgaagggggacctccattttaagtagtgcctgtcagcccgcgccggtgaagatgatggacaaggatatgaaaatagcggtgatgtattcttttgtgcggcaaatgaggggaggtggtcatcttggtgtgccaaaaagaatggctattgtgctggtttgaaaagttaaaaatttggagggctgtctc

SEQ ID NO: 12204 - DNA, 207 bp, Zea mays
  Clone ID: LIB3157-007-Q1-K1-H12
aaacagttgaaagttttggtggctattgtttttttttttcttctccattaagtatggtgggcatgtctgctgcatgtggttttgtagtccaaataatgtacagtttccccttaaatagatgtaaatttgtcgggtgaaaaaaaaaaaaaaaaattaattaataaaaaaataataaaaaaaaaaaataaaaaataaaaaatttttaag

SEQ ID NO: 12205 - DNA, 212 bp, Zea mays
  Clone ID: LIB3157-008-Q1-K1-A4
tgaacaacttatggctgcttttttttatatattattactaagacacaagctacagcagatatagtgcttgtgaaaaaagaaacttctgagctcttttgagggattgatactagattggattgtgtttttgtttttgggtcgatatcatcgcctgttcggttccacaaaattgactgtcaactatatttacctatgttcggagattgtatgat

SEQ ID NO: 12206 - DNA, 65 bp, Zea mays
  unsure (1)..(65): unsure at all n locations; Clone ID: LIB3157-008-Q1-K1-B1
naaaaaaaaaaaaaaaaaaaaaaaaaaaaaaaaaaaaaaaaaaaaaaaaaaaaaaaaaaaaaaaa

SEQ ID NO: 12207 - DNA, 52 bp, Zea mays
  Clone ID: LIB3157-008-Q1-K1-B11
aaaaaaaaaaaaaaaaaaaaaaaaattatttaaaaaaaaaaaaaaaaaaaaa

SEQ ID NO: 12208 - DNA, 193 bp, Zea mays
  Clone ID: LIB3157-008-Q1-K1-B5
aaactatgttcgatttcatgttcgaagtgtgttaaatgttaataatctgttttagttaaagcattgatgtagtttgcaagtcacagcaaatttcgtgcccgtccccaccttgatcaggtggtcgttctctcgttgagggcggagcaggaccagattttcccagggcacagaaccaccgtaacactccctacac

SEQ ID NO: 12209 - DNA, 175 bp, Zea mays
  Clone ID: LIB3157-008-Q1-K1-B7
gggggctgctttatagaacccactcttatgatcccacccatgcgaaatacattgtccttttttgcgcaccctaaatacaaggaaaaccccgccgttttcccacttaatcctgttaaaaccatgccttttccccgcctttttgttttaccaaaataccctttccgccatgcgttta

SEQ ID NO: 12210 - DNA, 398 bp, Zea mays
  Clone ID: LIB3157-008-Q1-K1-B8
gcgtcgcgtgccaggttccatttcctgttggttttcattgggctgtgccttttggcctgcgcgtgctttgactacttatacagagatgactatgtttacctctttgttcttacccaatcgatcatgtatttcgcgattgggtttcagttcgttggtctcaatgtctctgaagactgaccaattgcaagacaactgaacgttttggttgcgatattatgattgctcgggtcaaggttcttgtatcgatggtctacagaacggcaggtttgtgtgcgatctattatatacgtcatacttcaagagaggataatcacacgctggaggttgagacgaatctattataatccagtaggtgccaaaaaaatgcatttaaaacctgttgacgtttctggaaaaca

SEQ ID NO: 12211 - DNA, 218 bp, Zea mays
  Clone ID: LIB3157-008-Q1-K1-C8
atgcgtccgttcattctaggagattaacaatcttttgtctattgtcacggaagctgcgaaagagggaggtttgtatagttgagattgcagcatctaattacgctgacatagcatggactaaattttgcctgtctttatgtaaatcaattaaaaaggattttttatctatcgagaaaatgcgccatttgttccaaaaaaaaaaaaatatataaaaattt

SEQ ID NO: 12212 - DNA, 260 bp, Zea mays
  unsure (1)..(260): unsure at all n locations; Clone ID: LIB3157-008-Q1-K1-D1
cggacgcgtgggcggacgcgtgggttgaaacggttgccctgtcaatcggtgaatggaataagccaagtctgttctgggttgtttgcttgttcagtgatgtgtcttctatgacgaaagttgagtgcctatgtgtgagcatgcttgcttgtaacgagaccttgaattgttcggaaatgagcattcctgtgctcttctttaaaataaactttgccttaggttcctcaggaaaaaaaaaaaaaaaaaaaaaaaannnnaaaagg

SEQ ID NO: 12213 - DNA, 285 bp, Zea mays
  unsure (1)..(285): unsure at all n locations; Clone ID: LIB3157-008-Q1-K1-D2
ttctagatcgcgagccgccgccctttttttttttttttttttttttnnntttttttggggggggttttttttttttttttttccccttctcccttccccttttttctcgcataaacacaacttattcccttcttttttcccatacaaaaccaaaataaaggtttttaatttttacttccttccactcccccccaaaaaaaatctttttccaattttttaaactcaaaccccctttctctaactaataaccctcttcccacaaaaaaaaaaaaaccttcccatccc

SEQ ID NO: 12214 - DNA, 55 bp, Zea mays
  Clone ID: LIB3157-008-Q1-K1-D3
aaaaaaaaaaaaaaggaaaaaaaaaaaaattaataaaaaaaaaaaaaaaaaaaaa

SEQ ID NO: 12215 - DNA, 285 bp, Zea mays
  Clone ID: LIB3157-008-Q1-K1-D4
gcacggcacgatacgtcgatgcctcagcttatatagtccacactactgtacgtgcgcgtaggccgtagatgccggcgtgtaaatggtcgtatcgtagagacattgattcgattttgctaccgtctggggtccatggtgcagtgaatttggatccccgtgtgctgaggaattgtatacgtacgagtaaagcagcgcgcatggggggcaggcgggcagggcagtttcgcggccttgcagttgcagcacacgttgcggagattaatgtccgatcctaggcatttgatt

SEQ ID NO: 12216 - DNA, 337 bp, Zea mays
  unsure (1)..(337): unsure at all n locations; Clone ID: LIB3157-008-Q1-K1-D5
cattgatgagctcgaagagttagaaagcacacaccttaataacgaattggatgaagcagcaagctcaggcctcgacaggagtgtattggacgatgcagcttctggagaccttgaatatatgtagatcagagcttccatttggtttttttttgtgcctgcttaaccaaagcggtctagagcaaattgaactggtaacatactctctgttctgatttgacatcctagaacccgtgtcgtcatacttccnaaaaaaaaaaaaaaaaaaaaaaaaaaaaaaaaaaaaaaaaaaaaattaaaaaaaaaataaaaaaataaattaaaaattaaaaataatttg

SEQ ID NO: 12217 - DNA, 185 bp, Zea mays
  Clone ID: LIB3157-008-Q1-K1-D7
ctgatcccagctcatgtcacctcttttcatcctttgaacggcttgatctctgcgcgaggggttttctctcattaactgcattgctcgaaagacgcctgtcattcattgctgctgataacttttgatgggcttaatatcgaattactacatcttaaaaaaattaaataaaattataaaaaaataat

SEQ ID NO: 12218 - DNA, 116 bp, Zea mays
  Clone ID: LIB3157-008-Q1-K1-E3
ggctggagcctggagggagggacgatgatccatcagatgggctatgttactctgtagaggatcgagatgctaattggctgagctgcactgcacaagagacctaattaacatcgcga

SEQ ID NO: 12219 - DNA, 161 bp, Zea mays
  unsure (1)..(161): unsure at all n locations; Clone ID: LIB3157-008-Q1-K1-G6
cggacgcgngggccagcggccacggacctggngaagccggccgaccaggacggcgggacgccggacanggaggcgnnggncgngggccaccncgacacgacggagaggagacccagacacccanacacgggggcgcacagncncaagccaggggacgacgc

SEQ ID NO: 12220 - DNA, 335 bp, Zea mays
  Clone ID: LIB3157-008-Q1-K1-H9
cggacgcgtgggctaggaagctacatgaaaattgatttaaagctccagcaaattgagcagtgtggatgttgcatttctcagttcattttttcccagttttcaacaaagtatagatgacagccatatcccctcgcggcatatgccttttcattattccaataaagctagcggctggttcgatgagcacgatttgtgatcgagtatcccgtttaataagtacggtgtttgctttttttcaaaaaaaaaaaaaaaaaaaaaaaaaaaaaaaaaaaaaaaaaaaaaaaaaaaaaaaataaataaaaaataaataaataaattaaaaaataaaaataatg

SEQ ID NO: 12221 - DNA, 253 bp, Zea mays
  Clone ID: LIB3157-009-Q1-K1-A2
gacctcccgatcaagatcctgcagttccttgtgcccattatgatcctgggccttgcatttggtatacggcagtacaccaaatcagagtagtaactattcttagaggcttgcctttggagcctgtcttatggtaatggttcgaataaaaacagttcaataattgtgcattgtatttgtcaggtggatattgtctcattagtcacatgctactctgtattatggacatccatgttgaaatgtgcgcttttccccc

SEQ ID NO: 12222 - DNA, 228 bp, Zea mays
  Clone ID: LIB3157-009-Q1-K1-A3
caagtggctcctaatggggggtttatttcccagctggagaagtttcagaaatccttgcaagtggagcaggaacggagaatgcaacctgtgcagcactgataattatactagtgttataataggtgcagaaggcctcatatgttgtgaaggcgtatgcgttgtaagagcgtcttgaccgcgtattatggcatctggataacaagcgaggccttggcaaactttatgatg

SEQ ID NO: 12223 - DNA, 78 bp, Zea mays
  Clone ID: LIB3157-009-Q1-K1-A4
ggaagagtttgcccttttactagtgtcgatgttgatctggtataccttgctatgaactggttaaagtttgtgctggtt

SEQ ID NO: 12224 - DNA, 421 bp, Zea mays
  unsure (1)..(421): unsure at all n locations; Clone ID: LIB3157-009-Q1-K1-A7
gaccnnccaancaagacgtgcggcggaagtgctcctggcactggagtacttgcacatgctcggtatcatataccgcgatctcaagcctgaaaatgtccttgtccgggaggacgggcacatcatgctctcggacttcgacctctctcttcgttgtgctgtcagtccaacactgatcaggtcctcaaaccctgacgcagaactgcagaagcgctcaggaagagcagccaaggctactgtgttgagccagcctgtgttgagccgtcctgcatcactcaaccgtcgtgtgcagccccaaccacctgcttcggcccacgcctgttctcctccaagtccaagaccaagagagaccggtaaccaaaaccagaagttgccaccccgatcagcccttggcctgagctcatagcggagcccagcgatgcac

SEQ ID NO: 12225 - DNA, 77 bp, Zea mays
  Clone ID: LIB3157-009-Q1-K1-B1
tgtttttacaggcagattgttgagtgctgtaagcttggcgaccctctatgaataaatgaaatatgtgtttatgtttg

SEQ ID NO: 12226 - DNA, 327 bp, Zea mays
  Clone ID: LIB3157-009-Q1-K1-B10
tcgaaaaaaaaaaaaaaaaaaaaaaaaatttattttttaaaaaaaaaaaaaataaattatgaagggggttaataaaaataaaaaataaaaaaaaaaaaaaaaaaaaaataggggggggcctttttaaaggattaatatttatttacgcttttttgtaaagtaatatttcttttatggtgtaacctaaattaaattaattggccgtttttttaaaacgtgttgattggaaaaaccttgggtttactaaatttatattttttgaagaaaattcttttttcagaagttggtttaataataaaaaggtctttattgtttgtttttttaaat

SEQ ID NO: 12227 - DNA, 243 bp, Zea mays
  Clone ID: LIB3157-009-Q1-K1-B6
gtttaatatttcttaaattactaggtaagtgcccgtgcgttgcaacggaataatataataccacgataacttatgaaaaaaaaaaaaaaagaaaaaaaaaataaaaaaaaaaaaattaaaaaaaaaaaaaatggggcggcctatctagatttaaaacgttggcataattgatttttcttgcggggagggtaaatggagggcacctggaaagccctttattaaaaaaaattaaatatccttgag

SEQ ID NO: 12228 - DNA, 57 bp, Zea mays
  Clone ID: LIB3157-009-Q1-K1-B9
aatctgatggcttccattgtgacacttgtaggcggctgcaataaacttacttgatgc

SEQ ID NO: 12229 - DNA, 130 bp, Zea mays
  Clone ID: LIB3157-009-Q1-K1-C5
cggacccgtgggcgcgagcggtcgttcgttttttataactagtcttaaatgttaaaagtgcccgggttgtgtcaaaaaaaaaaaaaaaaaaaaataaaaataaaaaaaaaaaaataataataaataaaaa

SEQ ID NO: 12230 - DNA, 78 bp, Zea mays
  Clone ID: LIB3157-009-Q1-K1-C6
attgaattaattgaagggtcaatttgtaattttattaacaataaatgtaatgaattgaaaattcggaaggggccattt

SEQ ID NO: 12231 - DNA, 168 bp, Zea mays
  Clone ID: LIB3157-009-Q1-K1-D11
aatagaagctcgggcgatccttgtttatttttttagtctcttcaccccacaccaaggtgggcatgtctctttattcgtctctgtactcttccgtgtagctgctctttggtcgtgtatgctgtgatcttgtcccgaaaattgcctggaagttcgaagactttgcttaat

SEQ ID NO: 12232 - DNA, 151 bp, Zea mays
  Clone ID: LIB3157-009-Q1-K1-D4
cacaaacctcttgtttgttattctactgtgtaattttttttaaagtaggctgacccaaatttggatggccatgatcataatcctttggcgcatggaacatttgctgttgtacacagtactgttcaacacatagccatttgtccgatttttt

SEQ ID NO: 12233 - DNA, 94 bp, Zea mays
  Clone ID: LIB3157-009-Q1-K1-E11
aaaaaaaaaaaaaaaaaaaaaaaaaaaaatttataaaaaaaaaaaaaaaaaaaaaaaaaaaggggaaaaaaacataagggcgggtccattcaaa

SEQ ID NO: 12234 - DNA, 209 bp, Zea mays
  Clone ID: LIB3157-009-Q1-K1-F10
attgcctgcaaagtgatgtcatcttatccataaacatgcatgccggtggtttcacggtgagatcagtcagtgcaaataagatcacatacacttgtcctgttatatttttattatagatcatcaatgaatttgctctcagggccctgggcgattgagagagagaaaaaaaaaaaaaatatgaaaaaataaaaaaaaaaagaaaagaacaa

SEQ ID NO: 12235 - DNA, 132 bp, Zea mays
  Clone ID: LIB3157-009-Q1-K1-F3
gggtttaaatcttttttaacctcctttaattcccttggtacccgaccagccggccttaggaggagggcctggccactcttaattatttggaaggccatgtggttggggaattcaggtttgcccttccatttc

SEQ ID NO: 12236 - DNA, 253 bp, Zea mays
  Clone ID: LIB3157-009-Q1-K1-F5
gtcgttggtgctgaaagggattgaattgaatgtgtcggggtggtctgctgggtctcttcggagcgttttaggcttgggattggtggttaaaattggctgtgaataaagaagagtttgagagggacagcagaggaggggattgtattgtaggtgcagggatatatcatatatctgggtgtatagagaagtttcagctcagttgagttcagtcagacatcaaagtttagaccaataaatttccagtgcccgtttt

SEQ ID NO: 12237 - DNA, 180 bp, Zea mays
  Clone ID: LIB3157-009-Q1-K1-F8
gaccaagccagctcttgctaggctgatctttgtgtaccgcagcctccaggttgccaggtggggtgtcaagaagaagaacaggcagtcctaagcgctaagtttgtgttctgtcagggggcatgttggtgctcgtagtcccagcttatatttatctatgttccaacagttttgagacttgtt

SEQ ID NO: 12238 - DNA, 96 bp, Zea mays
  Clone ID: LIB3157-009-Q1-K1-G7
aaaaaaaaaaaaaaagaaaaaaaaaatttttttaaaaaaaacaaacaaaataaaaaaagccccgctatttttcacattcatatcggccttccccct

SEQ ID NO: 12239 - DNA, 240 bp, Zea mays
  Clone ID: LIB3157-009-Q1-K1-H10
cgtacgaggatagcgcgggaagacaacatttttaggttttatctcgagaaccaccagctgcggcgcgactgaaacaagaaacaaaacacatacaccacatatcctaaaaacaaacaaactttcctgcagcaagcttaaaaaaacacactagctagctagagtgctgcatcagcatgtatacttaaactgtaacaacatgtaactgccgcgcatttacaaataaataaataaagcgggaat

SEQ ID NO: 12240 - DNA, 73 bp, Zea mays
  Clone ID: LIB3157-011-Q1-K1-A1
aaaaaaaaaaaaaaaaaaaaaaaaaaaaaataaagggcggacgataataaaagaaacaaaatgaaaaaacacg

SEQ ID NO: 12241 - DNA, 186 bp, Zea mays
  Clone ID: LIB3157-011-Q1-K1-A10
ccttggcagatctttttattcttgtctttattgctgggagcactgtagctttaaacctacaagtagtgcttgaatgagatgagattcatatcatctcctgtggtggaatgtgaaattgtatgtgacctttagactaattaaaaagtacaatacagcgctaagcatactgcttgtattatgttgtgc

SEQ ID NO: 12242 - DNA, 191 bp, Zea mays
  Clone ID: LIB3157-011-Q1-K1-A6
acggccttgctgttattccatgttgtttgtttcagcgagctccgagctcccattttgttgttgtgatatcacatgttttgtgtaaccaaggtagtgacgctgtggataaataatagacgttatgtgttgtatttaaaaaaaaaaaaaaaaaaataaaaataataaaaaaaaaaaaaaaaaaatattattat

SEQ ID NO: 12243 - DNA, 135 bp, Zea mays
  Clone ID: LIB3157-011-Q1-K1-A8
cggacgcgtgggtggaataacccgttgttatctccgtttggcaaataacataaaaaaaaggggggaataatatatttagagtaaacaaaaaaaaaacaacatgggatgaaaatttaaccgttacgtgttgaataa

SEQ ID NO: 12244 - DNA, 216 bp, Zea mays
  Clone ID: LIB3157-011-Q1-K1-B1
ggcttttggccttactgacatgttggacgctacttactatggcgcttggtgtgaagcagtcgtagacttttttttgttagaagagatgcaccagcgtttatagtgtaccgccgtggatgtgtatagaacctgagctttggattctaattgttgacattattggtattggcttgcttttgaacatggaaaaaaaaaaagaaaaaaaggggggcgtct

SEQ ID NO: 12245 - DNA, 230 bp, Zea mays
  Clone ID: LIB3157-011-Q1-K1-B10
gtacgtcaaatcgcactagatacagtctgtcagtatctggaagttgtgttcaacagtacattttgcacctgagtttaaatatgtgtttggttcttgggctttgctaggagattagaacagttttcaagtgagcctaggatccatgtgaacgatttgaatatctcgcctcttgtcttgcaagtgttctcatctgctgttaatacaaaatcagcaagagctagtattttgtt

SEQ ID NO: 12246 - DNA, 137 bp, Zea mays
  Clone ID: LIB3157-011-Q1-K1-B2
cggacgcgtgggtggtttaacccgttgttactccgtttggcaaataaaataaaaaaaaaagtaaaataaaataaattaaaataaaaaaaaaaaaaaaaaatagggataaataatataaagttaacaagtttaattaa

SEQ ID NO: 12247 - DNA, 284 bp, Zea mays
  Clone ID: LIB3157-011-Q1-K1-B5
atctgcttgctgtggcatccagctacacttatgaagagggagaaaaaacgcatgagcctgacgctatatttatccggacagtgaatgaagtcgaggtgaagccgaagcccaaggcactggcagccccccagtagtgctgtgacctgttctggaggctagatgacccgtacttctctgcgttgatgtcaattacattagttgaccgagtgcttgtttgtgttgaaagagctgaaacgcctgtttcttaatctggaaccctcttctcccgttttacttgtccgtgg

SEQ ID NO: 12248 - DNA, 313 bp, Zea mays
  Clone ID: LIB3157-011-Q1-K1-B6
acgagaggatgtacggacccattccataccccagcaggcccccgctgtacaggagcgtcagggcccgagacttcatcgcaaagttcaacaccataggactcgatggccgcgcgctcgaccacttcaggctctagctacctggctacgtttcagattcgtcctttcatttgctttggtctctaattaataattccaaataataagcccgcggatggacctctgtctgtctgtctgtaatttagtttccaagtttagtttgttgtggtaattcctgtatcaattatgtcataaataaaagctagggaaccttgat

SEQ ID NO: 12249 - DNA, 371 bp, Zea mays
  Clone ID: LIB3157-011-Q1-K1-B7
acgggcttctactcggtgcacgtgcaggagcttacggtgctggtgcagaaggcgctgcagcgcgacccgctcaactacccgttctgaaagaaacgaggcccctgtagattcttggaattggggggccttttgaatttgatataataccaatatagagagaacaggccttaaattttatctgtgcagccatttggtgaaataatcgtttcgactctgcagtaccgcatgaaacaaaccgttgtaagtttggaaaaactccatctcgcaaaaaaaaaaaaaaaaaaaaaaaagggcggccgccctttttttttttttttttttttggtatcgccagctcactttgcatagaaatttctcaaatacacgcacca

SEQ ID NO: 12250 - DNA, 415 bp, Zea mays
  Clone ID: LIB3157-011-Q1-K1-C1
ggcttctactcggtgcacgtgcaggagcagacggagctggtgcagaaggcgctgcagcgcgaccccctcaactacccgttctgaaagaaacgaggcccctgtagattcttggaattggggggccttttgaatttgatataataccaatatagagagaacaggccttaaattttatctgtgcagccatttggtgaaataatcgtttcgactctgcagtaccgcatgaaacaaaccgttgtaagtttggaaaaactccatctcgcaaaaaaaaaaaaaaaaaaaaaaaagggcggccgccctttttttttttttttttttttgttatcgccagctcactttgcatagaaatttctcaaatacacgcaccacggcacagagtcttccaagctacaatatacagttgcgaacgaactac

SEQ ID NO: 12251 - DNA, 60 bp, Zea mays
  Clone ID: LIB3157-011-Q1-K1-C4
taaaaaaaaaaaaaaaaaaaaaaaaaaaaattataataaaaaaaaagggcagtcaataaa

SEQ ID NO: 12252 - DNA, 314 bp, Zea mays
  unsure (1)..(314): unsure at all n locations; Clone ID: LIB3157-011-Q1-K1-C5
acgccaccaagttcgcaccagggtcttaagctagctaccgggccgcggcgtgccaggacattgtgttgtacactactcgtttctgtcgtgatctgtaccatgaacgattgcaaatattattgtgctctcccagaaggaacgaactggactagttttgctcttccattccatgtatgctctgtttcagcatatatgtagttgtgtctactgtttttttgcagttgttaactgatttgcgtccattaacaacatatngcaaaaaaaaaaaaaaaaaaaaaaaagggcggccgcccttttttattttattttttatt

SEQ ID NO: 12253 - DNA, 53 bp, Zea mays
  Clone ID: LIB3157-011-Q1-K1-D1
gagagagagagatagtacattgttcggtgattattttaggtggttgttgcagc

SEQ ID NO: 12254 - DNA, 154 bp, Zea mays
  unsure (1)..(154): unsure at all n locations; Clone ID: LIB3157-011-Q1-K1-D2
cgacccacgcgtacgcgagggagaaggtggcaactacaaactgttttcaattgatcatggttattgcttgcctgggaagttttaagatgttacatctgaattgcaatactggccccaaccccgtgngcctttcagtgatgaaaccattgttaac

SEQ ID NO: 12255 - DNA, 117 bp, Zea mays
  Clone ID: LIB3157-011-Q1-K1-D4
aaaaaaaaaaaaaaaaaaaaaaaaaaaaattaaaaaaaaaaaaaaaaaaaaaaaaaaaaaaaaaaaaaaaaaaaaaaaaaaaaaaaaaaaaaaaaaaaaaaaaaaaaaaaaaaaaaa

SEQ ID NO: 12256 - DNA, 147 bp, Zea mays
  Clone ID: LIB3157-011-Q1-K1-D5
aaataaaaataaaaaaatttaaaacaaaatatttatttaaccaaaaaaacaacaaagggggaggggggaatttaaaaaggaaaaagggccacacaaacgaaaggcaaaaaaaaaaaaagggggggccgaaaaaaaaaaacaaaaatg

SEQ ID NO: 12257 - DNA, 317 bp, Zea mays
  Clone ID: LIB3157-011-Q1-K1-D8
tcgcggacgcgtgggaaaaaaaaaaatttaattataaaaaaaaaaaaaaaaaaaaaaaaaaaatataaaaaaaaaaaaaaataaaaaaaaataaataaaaaaaaaaaaaatattttattatgtaaaaataaattgagtttactgttctttgtttttcaactttctttatttgtatttccctggtgttaccttttttttttggcttgctaattataattcttttgtgtggctttcttattagctaatttgtataaaccttgtgtttttcctatcaattggtctgtctgatttgctaattttacgcgctttggtctttt

SEQ ID NO: 12258 - DNA, 223 bp, Zea mays
  Clone ID: LIB3157-011-Q1-K1-E6
aaaaaaggaacgagccacgcgtacgattttgtttgcaacccgtttgtatacaattttttttttttatgtgcttgctaactaattggttgggggcccaccgtgtctaaccgataataaaatattcacctttttctttcaaacaattattaacatgttttctattttgcttgacaaaaagttatttccataataacattttataaaaatggggcggccttttata

SEQ ID NO: 12259 - DNA, 274 bp, Zea mays
  Clone ID: LIB3157-011-Q1-K1-E7
ggaagacccggcccgacccacgcgtccgcaaaaaaaaaaaaaaaattaaacattaatatctataacaagcacaaaaaaaaaaagggaagggcaacttttaacgggagcctcaccagctccctgaaaccaaagctgcagcaggacgaaagggggggaacatcatatggcccccgctgctctgcacccccatgatgaacaaaaactcctcctaggttacacctgatgcgtgtgaatgcgcaaaaaaaaccaacaaatcactggggaaaaccatagt

SEQ ID NO: 12260 - DNA, 87 bp, Zea mays
  Clone ID: LIB3157-011-Q1-K1-F1
aaaaaaaaaaaaaaaaaaaaaaaaaaaaattaaaattttaaaaaaaaaaaaaaaaaaaaaagaaaaaaaaaaaaaaaaaaaaaaaaa

SEQ ID NO: 12261 - DNA, 249 bp, Zea mays
  Clone ID: LIB3157-011-Q1-K1-F11
ggaaaacccggcgcgacccacgcgtccgaaaaaaaaaaaaaaaaaaccaccaatttatattaaacgaaccaagcaaacagacgcgggcaaccaacaaaaacgcgcgggccaccccgacacctgaatccaacatacgggcgcacgttacacacccccggcaccgggaaaaccagggccgtacccagctgagtcaacaagcaccacatgccccttgcctaagcagacgagacagcaaagaagcccccaccg

SEQ ID NO: 12262 - DNA, 153 bp, Zea mays
  Clone ID: LIB3157-011-Q1-K1-F5
aaccaataaggatgtttgtagacttgctttttatgagggcgatgaattgcaacttaatttgcttcaaaaagaaaaaaaaaaaaaaaaaaaaaaaaaaaaaaaaaacatacttgcaaaaatataaatatatatataaatggggcggcccttttt

SEQ ID NO: 12263 - DNA, 417 bp, Zea mays
  Clone ID: LIB3157-011-Q1-K1-F6
tcgtacagatattttgggtagcgaaaagtgctgctgtactgcagggaaaaaaaatctgcgcgtgtgcaaactactttacggttccttccaaaaaaaaaaaaaaaaaaaaaaaaaaaaaaaaaaaaaaaaaaaaaaaaaaaaaaaaaaaaaaaaaaaaaaaaaaaaaggacgaaaaaaaaaaaaaaaaaaaaatgggggggccgttttaaagaacccaagtttacttccccgggcttgcaaaaaaaaaatttttttataggggcaccaaaattaaattaatgggccaacctttaaaaaccccaaaattggaaaaaccctggccttccccaattaaatcgcttgggaaaaaatccacttttccccacctggcgaaataacaaaaaggcccgcaccaataacctttaaaaaaaattgccc

SEQ ID NO: 12264 - DNA, 206 bp, Zea mays
  Clone ID: LIB3157-011-Q1-K1-F8
gcagtaggttggcgcattcataatacaaaatggacagctgcacgctaagagagaagccatgcatctgtttgtatcctgcatcatcataacaatgcgctacaagtcttgcatgttcgtgttgtttgagcattatcgcgagaacatattatttttatattccaacccgttgtctgaactgtagagaaaaaagaaggctaacctacaag

SEQ ID NO: 12265 - DNA, 264 bp, Zea mays
  Clone ID: LIB3157-011-Q1-K1-G1
gtcgacccacgacgtacgcggacgcgtgggcggacgcctgggtgctttcattatatatgtcctatttgagcaaacgtcataggtatggacatcaaattaatggaccggtacatgtatgatgctcaataatttatttgtgcaatactagtaaacgcatagactgtttgaacgagtacttggtttctccggcaaacaaatgaaatgcaaaaaaataaattttttatagggaaaccaaaataaaaaaaaaatggcggggggtccgca

SEQ ID NO: 12266 - DNA, 82 bp, Zea mays
  Clone ID: LIB3157-011-Q1-K1-G10
aaaaaaaaaaaaaaaaaaaaaaaaattaaaaaaaaaaaaaaaaaaaaaaaaaaaaaaaaaaaaaaaaaaaaaaaaaaaaaaa

SEQ ID NO: 12267 - DNA, 234 bp, Zea mays
  Clone ID: LIB3157-011-Q1-K1-G8
gtcgaattatcagtagcacaacataaccctttgatttgttcgtggtttatccgtggtttgtgaatgtgtagacttctgcgttgaagctcgtgctactgtttgttttccattgtttgttcacaccaacagctatatgcagatacatggcttctcagtgttacgccggcagatgaataagcttggggaaaaaaaaaaaaaaaaaaaaaaataaaaaaaaaaaaaaaaataattttg

SEQ ID NO: 12268 - DNA, 184 bp, Zea mays
  Clone ID: LIB3157-011-Q1-K1-H6
gtcgaattatcagtagcgcaacataaccgtttgatatgttcgtggattatccgaggtttgtgaattgtcgacttctgcgttgaagctcgagctactgtgtgtgttgcattgtcaggtcacaccaacagctatctgcagattcatggctttttatggttacacctggagatgaattcgcttgggg

SEQ ID NO: 12269 - DNA, 224 bp, Zea mays
  Clone ID: LIB3157-011-Q1-K1-H7
acggccttgctgatattccatgttgtttgttttagcgagcgtccgagctcccattttgttgatgtaatatcacatgttttgtgtaaccaaggtagtgacgctgtggataaataatagacgttatgtgttgtattaaaaaaaaaaaataatttaaggcctaaataacagagacgtgtggaactgaccatgaaaaaagaaataaccaagttagagaaaaaaaacag

SEQ ID NO: 12270 - DNA, 59 bp, Zea mays
  Clone ID: LIB3157-012-Q1-K1-A1
gtttatataactttatttagaagacttaccttgaataaatattctgatgtatggcaaaa

SEQ ID NO: 12271 - DNA, 212 bp, Zea mays
  unsure (1)..(212): unsure at all n locations; Clone ID: LIB3157-012-Q1-K1-A10
ngaacaacttatggctgcttttttttatatattattactaagacacaagctacaggggatattgtgcttgtgaaaaaagaaacttctgagctcttttgagggattgatactagattggattgtgtttttgtttttgggtcgatatcatcgcctgttcggttccacaaaattgactgtcaactatatttacctatgttcggagattgtatgat

SEQ ID NO: 12272 - DNA, 67 bp, Zea mays
  Clone ID: LIB3157-012-Q1-K1-A2
aaaaaaaaaaaaaaaaaaaaaaaaaaaaataaataaaaaaaaaaaaaaaaaaaaaaaaaaaaaaaaa

SEQ ID NO: 12273 - DNA, 240 bp, Zea mays
  Clone ID: LIB3157-012-Q1-K1-A3
taaaaaaaaagaaaaaaaaaaaaaaaaaaataatataaaaaaaaatatatatataggtactaaaaagaaaataacgacatgaggtgtaaattagcagagaatctgcctgttctgttccactaccagccagcgtatacggccgtgcgcatgtgacttcgtttcttgcacccggttccaacgtgcgatgatataataacactgctgttgggaagcctaatttaatcacaaataatttgcttt

SEQ ID NO: 12274 - DNA, 197 bp, Zea mays
  Clone ID: LIB3157-012-Q1-K1-A4
gtggatgcgtgcccaatgaatcgacctattctatacttattcgaggcttagcaggtgagggttttgtaaaggaggcccatcagatgttgactgtcttgtgctccaaaggtgctctaagaaagcacttgatgaagcattttggtattgtatgaagtataaactgatagttactgtttgcaaaaaaaaaacaactaaaa

SEQ ID NO: 12275 - DNA, 230 bp, Zea mays
  unsure (1)..(230): unsure at all n locations; Clone ID: LIB3157-012-Q1-K1-A5
ctgggtgatgcgaaatgtttgctcctacactaagttcatatatatatatagctactagagagaagatacgtactgtggtgtaaattagcagagaatctgcctgttctgttccactaccagccagcgtaaacggccgtgcgcatctgacttcgtttcttgcacccggttccaacgtgtaatgaaataataacactgctgttgggaagcnnannaaaaaaaaataaaanaaa

SEQ ID NO: 12276 - DNA, 234 bp, Zea mays
  Clone ID: LIB3157-012-Q1-K1-A6
ctgggtgatgcgaaaagtctgctcctacactaagttcatatatatatatagctgctagagagaagatacgtactgtggagtaaattagcagagaatctgcctgttctgttccactaccagccagcgtaaacggccgtgcgcatctgacttcgtttcttgcacccggttccaacgtgtaatgaaataataacactgctgttgggaagcaataacaaaaaaattaaaacataaacc

SEQ ID NO: 12277 - DNA, 251 bp, Zea mays
  Clone ID: LIB3157-012-Q1-K1-A9
ccacgcgtccgagcatttcccgtgctcctctcgttcctgtttttcggagcacactcatccacaaggggagggtggtgctagccccaagcactagtccctgatggagaagctcgccgtcatgctccacgtcagcagaagtaaggccgactcctactcctactcggactccgacagtgacgagcggtccagccccatcagcaccgactgccgacgagctaaggcataccttcttaatcgacgccgcctccact

SEQ ID NO: 12278 - DNA, 227 bp, Zea mays
  Clone ID: LIB3157-012-Q1-K1-B4
agaaaagatgcatgcaacttaatagactatttaaaagaggaacataagggcagtcgtttggggggatcaatgcaaccgtcgggcgtgggaaaaccctgtggttctcatactgtagctacctaagatcaacttactgtttccggctgctgacggtatggcatggaaaaccgctctggtcgcccttcttaacagttgcgcagactaaacgctttttgggacgcgcccta

SEQ ID NO: 12279 - DNA, 228 bp, Zea mays
  Clone ID: LIB3157-012-Q1-K1-B7
taccattcagaaaaaaagaaactaccggtatgacatactcggtacatgtcaaagttcacccgaacctggcttttgatgctgtactaggagtaagagatttaaataatgcactggctagctgatagttgaggggggaataataaatgctgttactcgaaatgtactccctgattcgcttaggaattcacgagtacttttacttggccgacgtctgaaagttataataaa

SEQ ID NO: 12280 - DNA, 283 bp, Zea mays
  Clone ID: LIB3157-012-Q1-K1-C12
cggacgcgtgggcttactcatccaccatgtataatctttgctgcagtggagcttggtgtcggcgaacaatgcaaacgttgtacttctttcatgcgattgagtagttgatgttttacttctgttgccaccaacagttgaacgctgtacttgcagattgataagatctccgtgcttcctttctaaaaaaaaaaaaaaaaaaaaaaaaaaaaaaaaaaaaaaaaaaaaaaaaaaaaaaaaaaaaaaaaaaaaaaaaaaaaaaaataaaaaataataatatttatat

SEQ ID NO: 12281 - DNA, 205 bp, Zea mays
  Clone ID: LIB3157-012-Q1-K1-C7
gcgaaactattgaaacttttaaccccctttctttaatcatgagtttaaggcagtcagggtcctttgtatcttgaacaaaatccctgtgtgctccttccaaacttaaagataactggaagatttcccgacaaaatatcttcttagtttgttaccaaatccgggcgccctcctcaattgacccacggttaataacactttaacatct

SEQ ID NO: 12282 - DNA, 335 bp, Zea mays
  Clone ID: LIB3157-012-Q1-K1-D2
aagcagcccaacatcactattggcattttggtctccgttgtcatcgtgttcgttaccgttctcttcaagatcctttttggtggcaagaagccggtggcacctgtgaaacctgcagctgaggcgaagaagcccaaggccgcggagacggacggtgctggaagcagtggtgacaaggatgagaaagaggatgaaaaggaggagacaggcccacgtcggaggacccgaagggagacatagacctgtttttgacgtgttttagctcttctggcgtctgcttattttgagaactcttaatatttgtgagtgtataataggagcttaaaaaaaaaaataaa

SEQ ID NO: 12283 - DNA, 65 bp, Zea mays
  Clone ID: LIB3157-012-Q1-K1-E8
aaaaaaaaaaaaaaaaaaaaaaaattactttaaaaaaaaaaaaaaaaaaagtaaaaaaaattaaa

SEQ ID NO: 12284 - DNA, 213 bp, Zea mays
  Clone ID: LIB3157-012-Q1-K1-F12
aaagaggaagcgttctatgaaagatggatttcattttgataatttcgccattatgcctgtttcatgtttgaacatactttttttcatctattttctgggtatgatgccatgtaaggtgtcacaagttacagtttcagcatcatcaaactgcactgttacattttcatatgtgaaatacaagtgctgatttattctattttagaatacaagtgt

SEQ ID NO: 12285 - DNA, 63 bp, Zea mays
  Clone ID: LIB3157-012-Q1-K1-F3
gttttatctaaaaaaaaaaaaaaaaaaattttttttaaaatatataaaaataaaagggggttt

SEQ ID NO: 12286 - DNA, 307 bp, Zea mays
  Clone ID: LIB3157-012-Q1-K1-G10
tcggactcttgggaaaaaaaaaaaaataattttataaaaataaaaaaaaaaaaaaaacatatatatttatattaaaaaaactaaccaaaacaaaaataaaattaaaaaatctaatttctacattaatatttaattaataaaaaaaaaattgtcctcccccttttttttttaaatttaattttccctttccttcccttctaatatttttttttttatcacccctccttaaattatcttcccttccccttcctcacaacctccttttttaaacacctccctttcccccacccatatatattttctattc

SEQ ID NO: 12287 - DNA, 75 bp, Zea mays
  Clone ID: LIB3157-012-Q1-K1-G11
aaaaaaaaaaaaaaaaaaaaaaaaaaaaatttaaaaaaaaaaaaaaaaaaaaaaagagaaaaaaaaaaaaaaaaa

SEQ ID NO: 12288 - DNA, 281 bp, Zea mays
  Clone ID: LIB3157-012-Q1-K1-G5
caaggggatgctgccgtccaggcccatcgtcgtcaaggccaagctcatctccaaggtcgccgagaagaagatcaaggctgccggaggcgccgtcctgctgaccgcttaggtccttttgcatcttgtttcaactatctgcgctaagaaatattctatcttttttgggtggatttatgaggccctggttttgagcacttggtaacgaatatgagttcgattatatcgatgctccacatctcttgctgcatgtattattcattctatgcagttcatgttttggc

SEQ ID NO: 12289 - DNA, 110 bp, Zea mays
  Clone ID: LIB3157-012-Q1-K1-G6
aaaaaaaaaaataaaaaaaaaacatttatttaaaaaaaaacaaactaatataaaaggtaaaaaaaaaaaaaaaacaaaactaccaaaaaaaaaaaaaaaaataaccaatg

SEQ ID NO: 12290 - DNA, 69 bp, Zea mays
  Clone ID: LIB3157-012-Q1-K1-H10
aaaaaaaaaaaaaaaaaaaaaaaaaaaatatattaaaaaaaaaaaaaaaaaaaaaagaaaaattataaa

SEQ ID NO: 12291 - DNA, 140 bp, Zea mays
  Clone ID: LIB3157-012-Q1-K1-H11
cacagggagtccttgttgggcctgctggactgtaaaacttaattagatggatttggtgtaaaagatgaggaccgatgtgaactgaagtagtttctttgtcacctcttcgggtgctgcagcaatccaagtttttgtttgtt

SEQ ID NO: 12292 - DNA, 115 bp, Zea mays
  Clone ID: LIB3157-012-Q1-K1-H7
ccacgcatgcgaacaaagtgtactccgtaacaaagttcgttttttcaaaacataaaaaacaaaaaaaaagataaataaaaaagtcaacaaacacaaacaaaaacaaacacacaaa

SEQ ID NO: 12293 - DNA, 312 bp, Zea mays
  Clone ID: LIB3157-012-Q1-K1-H8
gttttgctcttttaatattattttttttttttataaataatttataaaatgggggggggggtttaggggtttttggattactcgtacgcgtgcatgcggcgtgattggttttaggggggggtctcctttatggcttttcccttgccgccggccgccgtctgtctgcctggtgttttctttggcggcccccttttttttcgttttgcggctttttccactttcgccttttggcgtttttcggggtgggcccgctccttttgcccttggcacttctttccttttccgcatggtgttttggacatgggcccgccc

SEQ ID NO: 12294 - DNA, 262 bp, Zea mays
  Clone ID: LIB3157-012-Q1-K1-H9
ctcatgtgaatatatattatcttaacaacttaatgttgtacgggtttttgacccggcacctgatcccttcagccacgtccagttattcttatcactgtagtatccatcaacaagtcctgtaattatgaggatggtgttacagagtttctagcaagcatttccatcgagggaatggccctgagttgatccatgtagcaagaaagagaacatgcttacaagcaatatatttgctgtgaaaagggcacgcccctggatcttcctg

SEQ ID NO: 12295 - DNA, 290 bp, Zea mays
  Clone ID: LIB3157-013-Q1-K1-A10
aaaaaaaaaaaaaaaaaaaaaaaaaaatttttataaaaaaaaaaaaaaaaaaaaaaaaaaaaaaaaaaaaaaaaaaaaaaaaataaataaaaagggcggccgcccttttagatcaaacattattaccgcctccttcctacgtcttaattttttttttatagcgccaaaattaaataaaccaccggccgtttttaaacaaactgacttataaaaaaaccccgttaccccacatattaatcttttagaaaatcccccctttttcagctgtcgtaataataaaaaagaccccc

SEQ ID NO: 12296 - DNA, 293 bp, Zea mays
  Clone ID: LIB3157-013-Q1-K1-A11
gatgtttaaagaagagctaccacttcagagataatttgtgacttgcttgcattttttggacggatttgttcgtgtattaataattttgcagtgacgataaataaaaaaaataaatatttatataataaaataaaataataatattttaaaataaatgaaaaaaaaaaaaaaaaaaataaaaaaaaaaaagggcggcccggtaaatggttaaaatatgggtaaaatttaaagccaaggttaatttttgtattgaaatttaaaaatggtttttgttgccttttaattttctaagc

SEQ ID NO: 12297 - DNA, 271 bp, Zea mays
  Clone ID: LIB3157-013-Q1-K1-A12
cttgagttctacatgtagaagctacagttttgaagggcaagagcgctgtatcttatagcggtctcatggattgtcttgcaccgaaatgtgtgtcctgatgagtacacttttttttggttagtcgtcttaagtacagagcgttatgccatgttttcagacctgaatagtacactgttttctaaatgcgattgagctctagtccaatgtattgataaataaatttaataactatttttttttttgtttttattaataacttatataataattc

SEQ ID NO: 12298 - DNA, 336 bp, Zea mays
  Clone ID: LIB3157-013-Q1-K1-A4
agagattaaacgtgaggcagcacgtagtgcttaagttcagccttctgatgaacatctttttgtaaggtctggttacagccagtcgatggatcgaagggaacgagatgtgctgattgagccacgggacggtgtcttgtacatcactgcagtacgtggatttggatctctgaaagctacagctgatacctgataatctttttgctcttctgtaaaatatgaactttcctcatggatgcgttagggtgctggtgccatttcttgtcatggtttaggtgtggttgatagggaaaacggtgttctttttttttgtagtggcgaatataatgtatcttcatc

SEQ ID NO: 12299 - DNA, 292 bp, Zea mays
  unsure (1)..(292): unsure at all n locations; Clone ID: LIB3157-013-Q1-K1-A6
cagagaaggaagagcctgtgaagaaagaggctacaacattgtcgcggcaaggaagcagtgaagtatgttagcctgctgataatggcatcctttcgaagcattatagccgtagctcttttatgtaccttttcaggctggtaccgataccggggatctggatttgctatgttttgtactgtgctcgagtgtaaggtcagttcgtaatacaatcaatctgcgtggaacaatttgatatccttgaatatgttagtgagatcatttcgnctcataaaaaacaatatataatataaaa

SEQ ID NO: 12300 - DNA, 222 bp, Zea mays
  Clone ID: LIB3157-013-Q1-K1-B1
ttcccccagtgtatctacgcatgctccttgtgtatatataataatcttcattggccgtcatttgggctaagctgcagtagttcttggaatgtatgaatgtttttcattggccgtcatctgctagtgtaatagtgatatttttctaaaaaaaaaaaataaaataaaaataaaaaaaatatttataaaaaaaaaaaataatattaaaaaaataataatattaag

SEQ ID NO: 12301 - DNA, 231 bp, Zea mays
  Clone ID: LIB3157-013-Q1-K1-B8
gagaaaaaggagtcctcatgattttgctaatgcctgctgttgttaaaccatgccattagaagggacctgttgagaactctgacctaccttatttgtgcctgtgggactggttatgtcatgatcgagaatttggtagggcgtgctggtgggattttacatgaagtatgcctctttttttttcaaaaaaaaaaaaaaaaaataaaaaaaaaaaattaaaaaaataaaaaatat

SEQ ID NO: 12302 - DNA, 87 bp, Zea mays
  Clone ID: LIB3157-013-Q1-K1-C11
aaaaaaaaaaaaaaaaaaaaaaaaaaaatataaaaaaaaaaaaaaaaaaaaaaaaaaaaaaaaaaaaaaaaaaaaaaaaaaaaaaaa

SEQ ID NO: 12303 - DNA, 305 bp, Zea mays
  unsure (1)..(305): unsure at all n locations; Clone ID: LIB3157-013-Q1-K1-C4
tcgctgacgcgtgggtccgcaggcgcctcaccaacaccagctctccttgaagaccgagagggaaaagaagcgtgagaagtatttccccatgaggaagtacgctatcaaggcctagatcagtgaaagaacatttatcctgtcaagttttgctcagaagttacttgaatttgagacaaatctatctccatccaagtactatgtagctgatcaactgcatgatgaaaaacgagtactttttgcttgtttaaacgtgctttacattttcagttntnataaaaaaaataaataaaatttatataattaat

SEQ ID NO: 12304 - DNA, 315 bp, Zea mays
  Clone ID: LIB3157-013-Q1-K1-C9
tcgtacgccaagcgtgccttcgtgcactggtattcggtgagggtatggaggagggcgagttctctgaggcccgtgaggatctggcagcgctcgagaaggactacgaggaggttggtgctgagtttgatgagggtgaggaaggtgatgatggtgatgagtactagaagtatcctgatgcggtcatcgtcaggcttgtgtgctgctcttgtccccgttgtggtttgcaacacctgatgttgtaagactttctggttatttccgccccgctttgccactgggttattaagaacgtcgttatggatggttgtctacact

SEQ ID NO: 12305 - DNA, 129 bp, Zea mays
  Clone ID: LIB3157-013-Q1-K1-D1
ggcgcagaaaaaccatccatcctagagcagcatagcctgctgcatttgtaatatattcgaaatccgtattttttttcttcacaagcactactctatatacgatgaataaaagggcgacaatacagtgtc

SEQ ID NO: 12306 - DNA, 261 bp, Zea mays
  Clone ID: LIB3157-013-Q1-K1-D10
cctggtgaagcaagagtgccctggacgtccattgttgggttatttggcaaagaactgctgcactgaatgagaggacaaagattgcagtagtacatggtttggtggtgaggtgttagtgctaggctgctagctgctagccatagcatcatttgcagcaatagcattggttttattaataataccaccgaatgtgacatgcataataaaaataatgttcaataagttccattcagcgattttctttaaaaaaaaaaaaaaata

SEQ ID NO: 12307 - DNA, 321 bp, Zea mays
  Clone ID: LIB3157-013-Q1-K1-D12
cggactcgtgggcggacgcgtgggtggaggacacaagaaagaccgagggacgcggagcaaggagtagtagggctgctgattgaaggtccgtctatcgggagttatgtcgtcctggagcggtctatcaggttcagagaatattagggtccgtatgtatgtatgtgtgtgtcgcacctagcaccagtagtatgtatgtatgtatgcgtatgtaggttcagagaatattagggtccctatgtatatgtatgtatcaggattgctatggtcttttggattggaagatctgagatttgctggtgcaatggccagtatctgacatcc

SEQ ID NO: 12308 - DNA, 126 bp, Zea mays
  Clone ID: LIB3157-013-Q1-K1-E7
gcctgtgcaaccttgttagcccagggccacttcgattttgtctattggttcttttagagagcaaccaccccgagatgcgacgacactgtagctctcttagatagttagattccacgagcttgatgc

SEQ ID NO: 12309 - DNA, 273 bp, Zea mays
  Clone ID: LIB3157-013-Q1-K1-E8
cttgcatgtctactactactactgaataaataacctctccgcgcacgtcgtccttgtgtctgtgtgtgtgtgagagagagaggagagccggccatgtccttttggctgtttggtttatttttgagttcatgcggtctttatttatttccatgtacccagtacccaccttgtaccatgcatgttccttatgatacactcacctctttttgttaaaaaaaaaataataaaattttatttatatataaatttatattatttttttataatatttat

SEQ ID NO: 12310 - DNA, 72 bp, Zea mays
  Clone ID: LIB3157-013-Q1-K1-F11
cggacgcgtgggaaaaaaaaaaaaaaaaaataaaaaaaaaaaaaaaaaaaaaaagggcagagggtgttgaaa

SEQ ID NO: 12311 - DNA, 297 bp, Zea mays
  Clone ID: LIB3157-013-Q1-K1-F2
agaaccgctcatcatgaggaatgtaaagggccgttcgcgagggtgacatcctcaccctgctcgagtccgagagggaggccaggaggctgcgctgaaaccctagcgttcttggtgggctcttgtatggtctttggtgtcttggaatttgtgctatgtttgaacttctgtgaccctgttttaagagtagtaagcctggttataagattgcagttttgtttatcttggttgaaagtgcaattggtgttgagacatggttatccttgctatattatctataaaacgacgcatgcattgaat

SEQ ID NO: 12312 - DNA, 92 bp, Zea mays
  Clone ID: LIB3157-013-Q1-K1-F3
cggacgcgtgggaaaaaaaaaaaaataaaattttaaaaaaaaataaaaaaaaaaaaaaaaataaaaaaaaaaatttaataaaaaaaaaaata

SEQ ID NO: 12313 - DNA, 142 bp, Zea mays
  Clone ID: LIB3157-013-Q1-K1-F5
gtatgaacggcatcggtgtgcttattactgttgttcgatatatgttgcattgtttctagtttcaaagcccatttatttacttatctatgatttctaaaaaaaaaaataaaaaaataaaataaaaaaaaatataaaaaataaa

SEQ ID NO: 12314 - DNA, 207 bp, Zea mays
  unsure (1)..(207): unsure at all n locations; Clone ID: LIB3157-013-Q1-K1-F7
ttttgattaacacattatgattgctgggttcatgtagcgaatgtttaaagtgggtaccgtatgcaaatcatgtatgtactgtactagtttttacaccatctgaccaatcagcacccttgaggacagagactatttttaaatgtctttattgaactctgagcggcaatggcatcttcgccggtgtnaaaaaaaaaaaaaaaaaaatat

SEQ ID NO: 12315 - DNA, 193 bp, Zea mays
  Clone ID: LIB3157-013-Q1-K1-G2
gttcttgaagacttgcctttggagtctgtttttggtaatggtttggatgagaacagttcagtaattgcttagtgtatttgtcaggtggatgttatctcattggtcatatactatgtattatggacatccatgtgttgccgaaatgtgctcttttccccatgaaaaaaaaaaaacaaaaaaaaaaattaaaaat

SEQ ID NO: 12316 - DNA, 315 bp, Zea mays
  Clone ID: LIB3157-013-Q1-K1-G3
tgttcaagccatcgtcaccggcaagggcccgtcgagaacctcgctgaccacatcgctgacccagtcaacaacaacgcatgggcctacgccaccaacttcgtccccggcaactaagctcaacggctatgctatgcaacttcattgtctttcggatcggagagggtgtacgtacgtggattgattgatgctgcgagatgcatgtgtgtcttttgtttcacgttgcattgcataggcaagtcgagatgatgagttggcgttgtacactaagatgaaccatgtttgtgcaatagtggggggttttgtttcctgctggat

SEQ ID NO: 12317 - DNA, 126 bp, Zea mays
  Clone ID: LIB3157-013-Q1-K1-G7
gcaatattttttgttatgatgggttatattgcttaaaaaaaaaataaataaaaaaaaatagaattaaaaataaataaataattaaaataaaaataataaaaaaaatataaaaaaaattaaaatatg

SEQ ID NO: 12318 - DNA, 92 bp, Zea mays
  Clone ID: LIB3157-013-Q1-K1-G8
ttaaaaaaaaaaaaaaaaaaaaaaaattatttaaaaaaaaaaaaaaaaaaaaaaaaaaaaaaaaaaaaaaattaaaaaaataaataaaaatg

SEQ ID NO: 12319 - DNA, 360 bp, Zea mays
  Clone ID: LIB3157-013-Q1-K1-H10
gttggagacagaggaggctgaagtcattcagcatcgacgacgcggactcgtctgaaggtgccacgaccacgacagaggtagtcgagccctctgaggtcaggacagagagcgacccgtggaaggattagatagttctgtatgcaaggattatgccctggtggtgtatgagcaccggatgtaacgaaagtacgaaccagagccaggatagagaaatacagcgtttgataagaacactggtgctaaaagtgtagatctctggtttgggttgtgctgataaatttttgtaggctatagccatccaatgaaaaatgccctctgcgctttcgtgcataataaaaaaaataattataattataattt

SEQ ID NO: 12320 - DNA, 237 bp, Zea mays
  Clone ID: LIB3157-013-Q1-K1-H3
ctaatttttagtccctatattttattctatttagttccaaaattgtaaaatatagaaactaaaactttttttttgtcacttagtgggtgtttggtttctagggactaatgtatagtaccatataaattcaagctatacacattatctctattacttatttaaaaaaaaaaaaaaaataaaaaaaataaaaataaaaaaataaataaaaaaaaaaaaaaataaaaaaaaaaataaaaa

SEQ ID NO: 12321 - DNA, 188 bp, Zea mays
  Clone ID: LIB3157-013-Q1-K1-H5
cgacatatctcacagagggaaagctcttgcttggtgaaagaacacttcgcatctgctagctatacagttcagagcaacgactcagcttaaagtttgacttggattcctagacgaatgaactgtcattctggaatgtaaactgaactactacttttagtccggtgcctattatacttgcgagttgcgac

SEQ ID NO: 12322 - DNA, 97 bp, Zea mays
  Clone ID: LIB3157-013-Q1-K1-H6
aaatataataaaaaaaaaaaaaaaaaaaaattataaaaaaaaaaaaaaaaaaaaaaaaaaaaaaaaaaaaaaaaaaaaaaaaaaaaaaaaaaaaata

SEQ ID NO: 12323 - DNA, 202 bp, Zea mays
  Clone ID: LIB3157-014-Q1-K1-A10
aaaaaaaaaaaaaaaaagaaaaaaaaaatttttaataaaaaaaaaaaaaaaaaaaaaaaaaaaaaaaaaaaaaaaaaaaaaaaaaaaaaaaaaaataaaaaaaaaaaaaaaaaaaaaaaaaaaaaaaaaagggggcggcctttttaaaggttccaactttacttccccgtccttccaacgtattactttttttttagggccc

SEQ ID NO: 12324 - DNA, 227 bp, Zea mays
  Clone ID: LIB3157-014-Q1-K1-A6
cgccactatatatgtatgtacaaaatgcctgctttgatgatggcacaatcgctcgacaattataaatctgggacttattattattcccattccctctgttagacgccggcgtaaaaaatgccagacctggagttgatgtattatttgttttgtagtcaaataaaggtgtgattatctggcacacaaaaaaaaaaaaaaaaaaaaaaggggcggccgttttaaaggat

SEQ ID NO: 12325 - DNA, 73 bp, Zea mays
  Clone ID: LIB3157-014-Q1-K1-B3
aaaaaaaaaaaaaaaaaaaaaaaaaaaaaaaaaaaaaaaaaaaaaaaaaaaaaaaaaccaaaaaaaaaaaaaa

SEQ ID NO: 12326 - DNA, 82 bp, Zea mays
  Clone ID: LIB3157-014-Q1-K1-C10
aaaaaaaaaaaaaaaaaaaaaaaaaaaaaaaaaaaaaaaaaaaaaaaaaaaaaaaaaaaaaaaaaaaaaaaaaaaaaaaaaa

SEQ ID NO: 12327 - DNA, 356 bp, Zea mays
  Clone ID: LIB3157-014-Q1-K1-C6
cgcgagtggccgccctttttttttttttttttttttttttttttttttttttttttttttcctcattttatttccagcatatatagagagagactgatgatgcacacaacgtacattattccaactgaattacgtatatagtactcaggtagtgacatgtcgcagctgcatgccaatcgacataaatagggtttatcatatggcggcataaacgcctgcggccatagcagtatttatatcatcatcatcatttgctggggcagcggccaactgtgcaaagttgatgggatccgcgtactcctgcgggccgtagaagatggcgaccaccccacgttcatttgttgcctgcgtaggat

SEQ ID NO: 12328 - DNA, 240 bp, Zea mays
  Clone ID: LIB3157-014-Q1-K1-C9
aaaaaaaaaaccctccaacagccgtggaggtctagcttagcctttaatttaggcactgtagaagattgactgctttgggattgggtacgctcgcgtctgcgtggcgtttgtttcttgatttgagggagacgtttcacgtatgtatgtacgtacgatacgaggccacggggggtacgctcccctgtatcctctcctctgtatagaatccactgaatcagaatgcaacgcgtgacccgagcc

SEQ ID NO: 12329 - DNA, 107 bp, Zea mays
  Clone ID: LIB3157-014-Q1-K1-D1
aaaaaaaaaaaaaaaaaaaaaaaaaaaaattatttaaaaaaaaaaaaaaaaaaaaaaaaaaaaaaaaaaaaaaaaaaaaaaaaaaaaaaaaaaaaaaaaaaaaaaaa

SEQ ID NO: 12330 - DNA, 261 bp, Zea mays
  Clone ID: LIB3157-014-Q1-K1-D3
cggacgcgtgggcggacgcgtgggtttttttttttttttttttttttgtggaggcattggcatcgttaatcagtgttccgcttcatatcaaaccttctccgatagatattatagatagataaataaaatagaaaaataaaccatgacaacatacacactacatcttcagctgagttcatcacatcttcgttcaagagaaaagcagacaacaaaaacacaaggccggccggcgacagccaccacactcttctggttccgcga

SEQ ID NO: 12331 - DNA, 69 bp, Zea mays
  Clone ID: LIB3157-014-Q1-K1-D7
aaaaaaaaaaaaaaaaaaaaaaaaaaaatttaaaaaaaaaaaaaaaaaaaagggaaaaaaaaaaaaaaa

SEQ ID NO: 12332 - DNA, 272 bp, Zea mays
  Clone ID: LIB3157-014-Q1-K1-D9
cagccgtgggttcaaggtttaagaaagttgtggtccatcagcatagctatcacttcctaccgagtagtaacacattttgatgacttggcttgtctactgaaggatcaccgtgccttgtctactggctactgtattagcaagaagacaatgttcttttgcacctctttttattggtcggcatattatgcgctgagattggaactgtgatgggttatgtgctggatgtacttactgcatcacctagaaaggtggctggtgccatttgcaatcat

SEQ ID NO: 12333 - DNA, 93 bp, Zea mays
  Clone ID: LIB3157-014-Q1-K1-F4
tcgattattatggaataataatagtgagcgtggtggaatccttgtgggtgcagactgtatgtatatctatttcactaacactccttgggtttt

SEQ ID NO: 12334 - DNA, 227 bp, Zea mays
  unsure (1)..(227): unsure at all n locations; Clone ID: LIB3157-014-Q1-K1-F7
gcgnggacgcgtgggaaaaaaacaatgtttttttaacaaaaaaacaccagaacaaagggcttcgtaaaaagagaggaaataactacatgcacgcactttttaaaaatccggggggcgcaaaaataggcgccnaggggtttcctctcttcccgatctaaggttacaattctatttccctgggacaaaacagcttttttatggggacccttaaataaaagtttttgggg

SEQ ID NO: 12335 - DNA, 158 bp, Zea mays
  Clone ID: LIB3157-014-Q1-K1-F8
cggacgcgtgggcgactacgctacgacggtgcatggccaaaaaaaaaaaaaaaaaaaaatgataaataatataaaagttaaatataataaaaacaaaggggtgggctcttttaaggctcctatcttgcgtcctcattcatacgaaatgatacgttttt

SEQ ID NO: 12336 - DNA, 106 bp, Zea mays
  Clone ID: LIB3157-014-Q1-K1-G5
aaaaaaaaaaaaaaaaaaaaaaaaaaaaaaaaaaaaaaaaaaaaaaaaaaaaaaaaaaaaaaaaaaaaaaaaaaaaaaaaaaaaaaaaaaaaaaaaaaaaaaaaaa

SEQ ID NO: 12337 - DNA, 77 bp, Zea mays
  Clone ID: LIB3157-014-Q1-K1-G6
aaaaaaaaaaaaaaaaaaaaaaaaaataatttaaaaaaaaaaaaaaaaaaaaaaaaaaaaaaaaaaaaaaaaaaaaa

SEQ ID NO: 12338 - DNA, 124 bp, Zea mays
  Clone ID: LIB3157-014-Q1-K1-H1
gtggtataagacggtatgcgcgagagcattgttgtgagttctaatctcagcataacatatacgtttgattataaatattgatgtgaaatgatagggcaccggttagaattaaaaaattgtttaa

SEQ ID NO: 12339 - DNA, 313 bp, Zea mays
  Clone ID: LIB3157-014-Q1-K1-H11
gaaaaaaaaaaaaaaaaaaaaaaaaaaaattttatttaaaaaaaaaaaaaaaaaaaaaaaaaaaaaaaaaaaaaaaaaaaaaaaaaaaaaaaaaaaaaaaaaaaaaaaaaaaaaaaaaaaaataaaaaaaaaaaaaagggggggggcgtttttaggggttcaagttttttttccgggggtttggaaggtaaagttttttttttggggccccaaaaaaaaatttaggggggggtttttaaaaacgggggggggggaaaaacctgggggttcccaaattttatttttttggaaaaaattccttttttcaaggggg

SEQ ID NO: 12340 - DNA, 85 bp, Zea mays
  Clone ID: LIB3157-014-Q1-K1-H2
aaaaaaaaaaaaaaaaaaaaaaaaaaaaatggatataaataataaaaaaaaaaaaaaataaatacgcatgaatgcaaactaatag

SEQ ID NO: 12341 - DNA, 325 bp, Zea mays
  Clone ID: LIB3157-014-Q1-K1-H6
ctacttttctctcgatgacgatgaagaagaggccgcagagatggtgctccgagaagaggaattcgagctatgaagagatgcagcgactcacaaagagtctccatgccacgtcactccctgtgatcttgatcatacctcaaatgcccggacacagctcatagtgttgtatgtaccgaagggatgtgagatcgttttgtccgtcttctagaattcagattttagtattttactgatgaaacacagattacttaacttataccatgttcaagaagttttcttgcttgcaatgcaatcagagaagcaactcctgttttggcttagtttg

SEQ ID NO: 12342 - DNA, 63 bp, Zea mays
  Clone ID: LIB3157-015-Q1-K1-A11
aaaaaaaaaaaaaaaaaaaaaaaaaaaaaaaaaaagaaaaaaaaaaaaaaaaaaaaaaaaaaa

SEQ ID NO: 12343 - DNA, 207 bp, Zea mays
  Clone ID: LIB3157-015-Q1-K1-A2
atgatacccaaggaccagactcagggctggctctcgtgatgccgccggacccgacgcctctaacgcatagttgcttttacccggcggactgatgatcttggtctccacgactcagtgtaatctaatcgcagaactggctataattgagagttttttcgttgtcctgggtgtaaatgcatggatgtgacggttgccgattgatgtcct

SEQ ID NO: 12344 - DNA, 105 bp, Zea mays
  unsure (1)..(105): unsure at all n locations; Clone ID: LIB3157-015-Q1-K1-A3
nnaaaaaaaaaaaaaaaaaaaaaaaaaaatttaatattaaaaaaaaaaaaaaaaaaaaaaaaaaaaaaaaaaaaaaaaaaaaaaaaaaaaaaaaaaaataaatta

SEQ ID NO: 12345 - DNA, 218 bp, Zea mays
  Clone ID: LIB3157-015-Q1-K1-B1
atattactgcacattatgcttttgttggtgctgctgagggatgaaggttgctatgtggcccgtttcgttgtaaaggaggaagctttgtcggtcgtgtaatcgtggtaataagttggtcctgtggaggattcttgtgtatattcttgtaatcgttcaaagacatggttctgtctgaagtcccaacagcgcaaaattaccagagtctcggtttgtttgtt

SEQ ID NO: 12346 - DNA, 149 bp, Zea mays
  unsure (1)..(149): unsure at all n locations; Clone ID: LIB3157-015-Q1-K1-B2
gtcgagattatatattaaatatatatgtgaaaaaatgacatacattagaaccaccattcctacactcgtaaaaatcatgtaccttttcttatacactagatatgttgctctattagatattataaatattagttttttttaccggnaat

SEQ ID NO: 12347 - DNA, 78 bp, Zea mays
  Clone ID: LIB3157-015-Q1-K1-B4
ttaaaaaaaaaaaaaaaaaaaaaaaaaaaaaaaaaacttaaaaaaaaaaaaaaaaaaaaaaaaaagaagagttaataa

SEQ ID NO: 12348 - DNA, 290 bp, Zea mays
  unsure (1)..(290): unsure at all n locations; Clone ID: LIB3157-015-Q1-K1-B6
gtagatgccgtctcgaacccgttccatgttccatggaagaagattgcttcaagaagctttggtgcaagagtaagcaccatcgttaaatccttcggttcagggaccagttgatcgaatgctacttttgtcagactttctgtaatcaaacatatgtgttctctccctgtttgacaaaattactccctaccgtgtacttgtctggtgaacgagatgctattggtactgattgctgaacaaagaaaaatagtggtttattcnnaaaaaaaaaaattttatttaaattaaaaata

SEQ ID NO: 12349 - DNA, 328 bp, Zea mays
  unsure (1)..(328): unsure at all n locations; Clone ID: LIB3157-015-Q1-K1-C2
tcgnaaaaaaaaaaaaatatatattaaaaatatttttttttaaaaaataaaaaaaaaaaaaaaaggaagagtaatttaaaaaaataaaataaaacttaaataacgggcgccctctttataggacccattctttctttcccgttcatgcatctttatatctttttttttttttcccctaaattaaatccattgccccccttttttcaccttcttcacttgaaaacccctgtctttccctaactaaatctctttgcaaaacatcccccttcctcccgctcgttttttaccaatttaggctccttacttgatcttctttttccaacttttt

SEQ ID NO: 12350 - DNA, 261 bp, Zea mays
  Clone ID: LIB3157-015-Q1-K1-C4
aaacaccttggagtactttgacacaaggggtgtgttcacagtgggatctccccagtttcttgaatgcagaaccgtatccgttgtatttgttccttcttgtcgtgagtgtaaatctagcgtgtccgaagttcggttttagattgtaggtgtaactgtagcagggattatctggtgttaagcccaacgagaaaatgattcagtgtaactgttactgtaaggaaagaagttattcagtgtagatttatggttaacacaagaggc

SEQ ID NO: 12351 - DNA, 242 bp, Zea mays
  Clone ID: LIB3157-015-Q1-K1-D12
cggacgcgtgggtgcacgcgcaagctatacgcgtgccaagctaaatagctgctgcgtatatatactactactactgccgctgtgtacatgtgcgtgtatgaactgtgtgtgtgtgtatggtctcaagtcactgtgttcgtggctgctttccagatcggtcagtgtgttttctcggtttgcttggatctgcacatcaagttgttgtatcaccagctaccagagggaccatgccctttgctttg

SEQ ID NO: 12352 - DNA, 103 bp, Zea mays
  Clone ID: LIB3157-015-Q1-K1-D4
aaaaaaaaaaaaaaaaaaaaaaaaaaaaataaaaaaaaaaaaaaaaaaaaaaaaaaaaaaaaaaaaaaaaaaaaaaaaaaaaaaaaaaaaaaaaaaaaaaagg

SEQ ID NO: 12353 - DNA, 109 bp, Zea mays
  Clone ID: LIB3157-015-Q1-K1-E2
ttcatactatcatagaaaaaatgttaattcatacattgtgtaatggattaagttgtggatgatattttataacgacactactatttttaatatagactgattccagatt

SEQ ID NO: 12354 - DNA, 148 bp, Zea mays
  unsure (1)..(148): unsure at all n locations; Clone ID: LIB3157-015-Q1-K1-E6
tcgttctagatcgcgagcgttncttttttttttccaagtcatgttacataatttagggcagcgtgacaacagactaccatgttcttatattggtaaatatgaagcatgtaccttctatctgctaaaaaaaaaaaaacaaatttaaaaa

SEQ ID NO: 12355 - DNA, 250 bp, Zea mays
  Clone ID: LIB3157-015-Q1-K1-E8
cccgatttgggctctgggtgagtaccggtgtcgagtcttgggggctggcaagccttggcggtgaacgggaggtgtgtgtgtgtgtgtgtcatggatcagcttttgtgagtagccatgtggaagttggaataatgtagctacgttacgttcagggggttgcgttactagtggtcctagtaataatagtgatggtgatagtaatgtactcctcattattacaatctcaaagcggttcatgccattgccatgc

SEQ ID NO: 12356 - DNA, 95 bp, Zea mays
  Clone ID: LIB3157-015-Q1-K1-F1
ctctattatatatgtatatatgtgtggcctgcagtgcgagttgcttcaatccacctacttgttcacacagtttaatggttttggtgcctgttatg

SEQ ID NO: 12357 - DNA, 254 bp, Zea mays
  Clone ID: LIB3157-015-Q1-K1-G10
ccaggctcggccgcgtcggcgtcaagaccgacccgtcgctgggggacgtccgccgcgactgcgccttcctcaactgaaaaaggatggagacctggtttagagaaatttgccattatgaaacacggtgcgggcggcttccacgaaatggaggctaaggagagggattcgctgttatgaaaaggcagagcaaagcctacactctgaaatggacatgaagcctccgttaataagttcagaccggtatcagtgtcgtt

SEQ ID NO: 12358 - DNA, 58 bp, Zea mays
  Clone ID: LIB3157-015-Q1-K1-G4
aaaaaaaaaaaaaaaaaaaaaaaaaaaaaaaaaaaaaaaaaaaaaaaaaaaaaaaaaa

SEQ ID NO: 12359 - DNA, 202 bp, Zea mays
  unsure (1)..(202): unsure at all n locations; Clone ID: LIB3157-015-Q1-K1-G6
ggttgatttctctgtggcaaacttcccgttctgtttggggctgtaagctgtctctaaatttcacggcaagtcgtgtgcctgaaccttcatcttaagttgttgtcgtatcccttcgtcttgtttcgtttgcaccccgtgatggtatggattggttgctgaccacttgatctatctattctgcattttcctttgnaaaaaaata

SEQ ID NO: 12360 - DNA, 326 bp, Zea mays
  Clone ID: LIB3157-015-Q1-K1-H10
aaacggttaaaaaaaaaaaaaaaaaaaaaaaaaaaaaaaaaaaaaaaaaaaaaaaaaaaaaaaaaaaaaagggcggcacgaatttaagagatcaaaaattacaaacacatacaggcggcgccttttctattctatagtgtcaccaacaattgggggcgccgccctttgttttacaacgttttcccttgggtaaactccgccgttttccattttatatagggtggcctaaataaacccttttgcccgctgttgtaatagccatgagggggaaaccccttgtccttcccaacattattcccttttgaacttcccccgtttcccccccc

SEQ ID NO: 12361 - DNA, 290 bp, Zea mays
  unsure (1)..(290): unsure at all n locations; Clone ID: LIB3157-015-Q1-K1-H7
nacgacacgccgggacaagggcgacgccgaaaacnncaggcnccgagncacgggncncncaggggcaaaccaaaacccaagggcacaagggcacgnagcaagacaaggccccaccagaaaggcggcnncgncagccccaaaacaaagcaagagaaccnccgcaaaaccgagaaggcagaangcnaagacgggcccggaaaaaaaggncacagcnggcnncngaccgncncaggcacagcgaaagaancaagaancagcccagncngangggnncaaggcgcagagcaaac

SEQ ID NO: 12362 - DNA, 152 bp, Zea mays
  Clone ID: LIB3157-016-Q1-K1-B10
aattttgctggctttgtcgttttggttttttgaacgttgtcgccgaggctatatagccaggactgttcgtcttgtacgagcgcgcgctctctctctctctctctctgcggacttggcgaatccttttatgaataaaagctactgtcctgttc

SEQ ID NO: 12363 - DNA, 139 bp, Zea mays
  Clone ID: LIB3157-016-Q1-K1-B2
atcctgtgattgaatcggcatcttatcattgtagtgttggtggggtttgggagattttgtcatcgccgaatcagttttgtgaaatcagacagaacaatgaacatcagtggtgtgtttcctattatgtgtggagttttgt

SEQ ID NO: 12364 - DNA, 409 bp, Zea mays
  unsure (1)..(409): unsure at all n locations; Clone ID: LIB3157-016-Q1-K1-B5
tcgggccggttggctcccagatccaagtgaaatgaagttttcgaaaacaagccatgttggatgtggtcttgttcttggttcagatggcaagcggttccgaacccgcagtactgaggttgttcgattggtagagctacttgatgaggctaaatctcggagcaaatcagaactactacaacggctcactgaaaatggcaaaattgttgactggacggatgaggaattagagcaaacttcagaggctgttggatatggtgctgtgaagtacgctgatctaaaaaataacaggctcactaattacacatttagttttgaacaaatgctgagcgataagggaaatactgctgtgtaccttcagtatgcacatgctcgtatttgttccattattcngaaatccaacaagaacgtg

SEQ ID NO: 12365 - DNA, 297 bp, Zea mays
  Clone ID: LIB3157-016-Q1-K1-C1
gacgagtactagagaagtttgctgatgacgcagcatcaggccagtgtgctgcccttatcccgtgatctgccgtgagttgctcctgctatcgtgttatgtgtgtctgttctgaagtattttgtggtttacaacacttgatgttgtatgagttgttaattctcccctgcattgctaccgggttattgagaataattatggctgtttacgttgttgcttcatctcggagatgctttacatttaccaccttgttcatcttttgtcatcagtaaaatcgagtcggcggatgattttcttgcg

SEQ ID NO: 12366 - DNA, 279 bp, Zea mays
  unsure (1)..(279): unsure at all n locations; Clone ID: LIB3157-016-Q1-K1-C12
ggagcaacgaccagaagaacgcgcccaagcaggcagccgacgacaagagcaagagcgaggacgccaacgacgcgggcgccagcgggcgggacgccaaccagcnagacgaggcggacgacgacgaagacaagaagaaggagcgggagagccaangcaaccccagcaccgccaagaagaaccaaggcgcgggggccgacaggggaggccccagcggaagggacgaggacgcaccggccggaagcggaggcccgggccccaagagcgaggaggcggacaaag

SEQ ID NO: 12367 - DNA, 317 bp, Zea mays
  Clone ID: LIB3157-016-Q1-K1-D12
gcgccaacgtgctcgccggcgggcccttctccggcgcgtccatgaaccccgcgcgctccttcggccccgcgctcgtggctggggtgtgggccgaccactgggtctactgggtcgggcctcttatcggtgggccgctcgctgggctggtctatgacggcctcttcatggcccagggcggacacgaaccgcttcccagggatgacaccgacttctaggcagtaggtgtgtgttctcctgaataatttgaattgaaaacacatgtattgaagcctctaatgtttcggtttcgattcgaatggaatggaagcagcagtatc

SEQ ID NO: 12368 - DNA, 181 bp, Zea mays
  Clone ID: LIB3157-016-Q1-K1-D2
ggttgctgcattccatgcaatgatgcaataaagggtaaagacaggtttgcacctatgaaaaaaaaactaaaaggaattgatcgaggaaaaaaaaaagcagaatataagaaaaaataaaacaaaaaagaaaaggcatatataattcaaaggcacctaaaaataaaaaaggggggggcccttt

SEQ ID NO: 12369 - DNA, 77 bp, Zea mays
  Clone ID: LIB3157-016-Q1-K1-D9
ctgacgcgtgggtttgattttttgttttttagttgtactaagtaatcgattttgtgcaggtatgattgtacttgctc

SEQ ID NO: 12370 - DNA, 349 bp, Zea mays
  Clone ID: LIB3157-016-Q1-K1-E12
gcgccaacttgctcgccgtcgggcctttcttcggcgcgtccatgaaccccgcgcgcggggtgtgccccgcgctcgtggttggggtgtgggccgaccactgggtctactgggtcgggcctcttattggtgggccgctcgctgggctggactatgacggccttttcatggtccaaggcggacacgaaccgcttttcagggatgacacctatttctatgctgcaggtgtgtgttctcctgaataatttgaatttgaaacacctgttttgaaaccttttttgttttggtttcaatttcgaatggataggaagctgctgtttcaaaaaataaaaaaaatgggcggatcgctttt

SEQ ID NO: 12371 - DNA, 326 bp, Zea mays
  Clone ID: LIB3157-016-Q1-K1-E4
caaacatagttccagcccgtttggtggggctccagaattgtcgaacctggcgaagctgaaggatctgtacggcgatgcgacaaacgtgaagaatgatgctggcgacgatagggcgcacagggattctggaacggaagaggtgatccgactgggaggggcaaggtggaggtgagtctcatgttaagggacagtgggacaccacggtgatgcatttaggtccatgaatgaatccaaacagcatcagtggaggaaatgatgggctgtatgtcttaacttgaacctacgatttcaatgctttattctgaaggttttcctctcattatgct

SEQ ID NO: 12372 - DNA, 407 bp, Zea mays
  Clone ID: LIB3157-016-Q1-K1-E9
tcgatttacattgaaatgctgccggctgtacatgttttttctgagtactacacctgctgggggggcttatgtgacggtgcagtattgtgcctttaatatcaacctaaaaaaaaaaaaaaaataaaaaaaaatataaaaaaagacaacaaaaaaaaatttatagatttaaaaaatatacgaaaagcaaaattgaacaaaaacttaaattgggggctttttttaaaggaacaatttttattttctcatggttgcgaataattagctttattaaagtgtccccaaaaataaatttaagggatgtgttttaataacgtggtgactgataaaaccctggcgaaacaaaataaatttgtattgaaaaaaaattcctattaaatagagcttttaaaaaaaaagagcctcaaaaa

SEQ ID NO: 12373 - DNA, 191 bp, Zea mays
  Clone ID: LIB3157-016-Q1-K1-F11
gtttcggttttttgaacgttgtcgacgaggctatgtacccaggactgctcgtctggtacgcgcgcgctctctctctctctctgcggactttgggaatccttttatatgaataaaagctacagtcctgttctacagaggcaaaaataaaaactacaaaacctataaggagtgaaaagctgaaccaaaaaggg

SEQ ID NO: 12374 - DNA, 136 bp, Zea mays
  Clone ID: LIB3157-016-Q1-K1-F12
atgccagcagcagatcttaatttgtctcttttaaaaaaaaaaataaaataattatggaggggatctttaacaaaaaatataaaaaaaaaaaaacaaaattaataatataaaaataaataagggccgcccgttttta

SEQ ID NO: 12375 - DNA, 310 bp, Zea mays
  Clone ID: LIB3157-016-Q1-K1-F3
cggacgcgtgggttttttttttgagagaatcattgtgtacgtagtaatccctaacgaggccgaacatcgatgcatccacatcaaggcctgattgttgtgtttcctagagattctgactcactaggtcggattcctgatggtcatgcgatctcgctgttctttcttcaaacgtgaagaatcacattgtctttgaaaagtttcagaaaaaaaaaaaaaaaaaaaaaaaaaaaataaaaaaaataaaataaaaaaaaaaataaaaaaaaaacaattagaaaataattataataaaaattaaaattaaaaatgg

SEQ ID NO: 12376 - DNA, 362 bp, Zea mays
  Clone ID: LIB3157-016-Q1-K1-F5
gtgttcttacagttgggtttcaggaagtttgttaaccgcggtaactcgtcatgcggaactgctgccttgccccccgcgcctttctcttacatgtttgctgctacaatcttgttgttgggcattgcagagcacggtgcacacttgtgtagcccgcctcgagaattcctgcctctgcatctggtcagatctaaaatgatttgcatgttggctatgttgtgtaagctctatttatggtggtctcgctgagacgggtatttggctttgcagttatctagctatgtgatgtactgctgacttgtccctgggcattatatggtacactgcagccagtaatagtaatctgcacctgtgcgttaaattgt

SEQ ID NO: 12377 - DNA, 76 bp, Zea mays
  Clone ID: LIB3157-016-Q1-K1-F8
atccatattaaaggtaaaaacgggctgttgtctttaatgatccaagcatacgaacgggggggagcttctgcaatat

SEQ ID NO: 12378 - DNA, 304 bp, Zea mays
  unsure (1)..(304): unsure at all n locations; Clone ID: LIB3157-016-Q1-K1-G10
angagcnannggggagcgcgaagggaganaanaacaggacagaaagcgaggaagggggaggaggaaggaacggagcaaacgcgacgngacaaaccagcaaaaccggagacgggaaagaaacaaggccccagggccgcnaaaaacaaacaacaaggacaaagccgaggacggcacaccgaacaaaagaggggaaaccaanaggcccagcacggcgaggcccacaccaaagaaaaaaaagaaacaaaaaacaaaaaaaacagaaaacagaaaaaaaaacaaaacgaaaaagaaaaaaaggacaaaa

SEQ ID NO: 12379 - DNA, 140 bp, Zea mays
  Clone ID: LIB3157-016-Q1-K1-G5
cgggcgacccacgcgtcggaaaaatgtcccaagaacgcaagctttttatgctcactattgttattgcagtgtcattgctaaaacaccaaaccttttgaccataaacaaagtcgaaaataacaaaggggcggtacctctgc

SEQ ID NO: 12380 - DNA, 297 bp, Zea mays
  Clone ID: LIB3157-016-Q1-K1-H4
gttctgtgtactacaaagttaagtaagtcttgtaaacgtgcacatcctccaggagggttttgtttcaaaaaaaaaaaacaaaaacaaaaaaaaaaaagacaaacaaaaaaaaaaaaaaaaaaaaaaaaaaaaaaaccaaaaaaaaacaaaaaaaaaccaaactaaaaaaaaaaaaaaaaaacaaaggggccgccccctttaaaaaacccaaccttactaccccgtccatccaacgaaaaagttttttaataggggccccaaaattaaatccccggccccccgtttaaaaaccctgga

SEQ ID NO: 12381 - DNA, 391 bp, Zea mays
  unsure (1)..(391): unsure at all n locations; Clone ID: LIB3157-016-Q1-K1-H5
gnngggngcaccaaaaagaaaagaaaggacagaaaacgagcacagaaacaaggagggaaggggggcaaagaaaaaaaaaaaaaaaaaaaaaaaaaaaaaaaaaaaaaaaggaaaaaaaaaagaaaaaaaaaaagaacagaaaaaaaaaaaaaagaaaaaagagaaaaaaaaaaaaaaaaaaaaaaagggggggcggggcaaaaaaaaaaaaggaaaaaaaagaaggaaagaagaaaaaaagaggaaagaggggaacaaaaagaaaacgagagcaggcgaggaaaaaagaggaaagagaaaaaaaggaagaaaaaacaaaaagccggaaaaaaaaaaaacggaaaaaaaaaggggaaaaaaaaaaaaaggggaaaaaaaaagacaaaagaaa

SEQ ID NO: 12382 - DNA, 58 bp, Zea mays
  Clone ID: LIB3157-016-Q1-K1-H6
gtgtgtgcactacaaagttaagtcagttttgtaatcgtgcacatactccccgagggtg

SEQ ID NO: 12383 - DNA, 178 bp, Zea mays
  Clone ID: LIB3157-017-Q1-K1-A11
tgattttttgggcgaggatttgctgtagattgatcgcgcacacgcacaaaaggcagagagagagagagagagataggaaacgtcagctttggttacacgaatgcctcatggtctcgatgtgttgctttgtacattttttatttatatttttccacgctatgtcatcagaagttcctcc

SEQ ID NO: 12384 - DNA, 331 bp, Zea mays
  Clone ID: LIB3157-017-Q1-K1-B2
cccacgcgtccgccaggatgttgcccaagtgttgtatatggacgagtgtctatgacatggagtctctacgagtaggaccagaggtggacatcttctgatgagtgcccagaaggatgcgtgtcaatgcgatgattgaggaccaggagccctttgagggcgaggccttgcttgacgcgaaatgcttcaagtgagtgtgcttgcctggagacagaactgtttagcccttgaatttgcctatggaagagtttgcccttttactagtgtctatgttgatctggtataccttgctatgaactggttaaagtttgtgctggtttgggattttttgtgc

SEQ ID NO: 12385 - DNA, 413 bp, Zea mays
  Clone ID: LIB3157-017-Q1-K1-B8
gcggtcgcctgtagagtgcggggagcaggagccggcggagccatggcgaccactctttcggtatcctctcccctcttcctcggagctccggccagagctagagatgtggttccgtacggagtgacttgggctagtgtatcactgaggactctaaatgtgccaggcaagggttacacgagtagagttcgttgtcgggagcagcagcgacgaacggcaatagtatctatgcttggaaggaaatcaacggctagagccactgttgtcccagaccccgactataggttgccaatcgctatacttgggattgctagtgcttttgcatatgccgacaatcttctagctgctgcacctgtaggactgctggggcttcttcttttgttccagactacaagagtgaggaggtgaaggttgga

SEQ ID NO: 12386 - DNA, 205 bp, Zea mays
  Clone ID: LIB3157-017-Q1-K1-B9
gcgggcaccgatggagtaggtgtatacagcactttgccagattaaatttatgcaggccgttggggtatctatgcaaactgtcttgctcaaacaacaaggtaataatgcattcactcgtcgtgttatgtaaaacatgttctccagaacaaagctcaaatttgcagagaatatattcctgaattcaagttcgaagggcaaaactaat

SEQ ID NO: 12387 - DNA, 407 bp, Zea mays
  Clone ID: LIB3157-017-Q1-K1-C1
gagctaacgtggtggagggtgcttgcctaattgggcttcccaagtttaaggatttctataagctcaacgggaaaccggtttacatcctggtggagtcccgcaaataggacccagtaaatggtcaaacaaaaaagctttctagtttcccgtccaaagaagctcacaacttcactcatttgcacgcgcaagcaaggtggtatgggggcaccgagaaactccgcagtaatctgtgttgaggccacggccagatgatgctatgtatcttcatggagagggtgatggactgggtgaaacgtagtcactgtacctttgtagcacgtcatgtctagtgtttcttagtagccatggctgaagagagtttgtagctattcccggcttcctgcagccaggaacatcagtgttaggca

SEQ ID NO: 12388 - DNA, 424 bp, Zea mays
  Clone ID: LIB3157-017-Q1-K1-C12
acgaggagcgcttagtcatcggcgggccccacggggacgccggcctcaccggccgcaagatcatcatcgacacctacggcggctggggagcccacggcgggggcgccttctccggcaaggaccccaccaaggtggaccgcagcggggcctacgtcgccaggcaggccgccaagagcatcgtggccagcggcctcgcccgccgctgcctcgtgcaggtgtcctacgccatcggcgtgccggagcccctgtccgtgttcgtcgactcctacggcaccgggaccatccccgacaaggagatcctaaagatcgtcaaggagaacttcgacttcaggccagggatgatcaccatcaacctcgacctcaagaagggcggcaacaggttcatcaagaccgccgcatacggccactttggccgtgacgacgc

SEQ ID NO: 12389 - DNA, 93 bp, Zea mays
  Clone ID: LIB3157-017-Q1-K1-C7
gcgtaaaaaaataataaaactaatataaattattttttataataacaaagataaaataaaatgggtgcggatataaaaaatataatatattat

SEQ ID NO: 12390 - DNA, 141 bp, Zea mays
  Clone ID: LIB3157-017-Q1-K1-C9
gtacgaataaaaatttagtggaaggagaagatgaattttttttaagggagagagaaaaggaaaatataataaaggggggggggggtaatataaaggggggaggacgtaaaagaaactaggtatacgggggggggctggggg

SEQ ID NO: 12391 - DNA, 115 bp, Zea mays
  unsure (1)..(115): unsure at all n locations; Clone ID: LIB3157-017-Q1-K1-D1
naaaaaaaaaaaaaaaaaaaaaaaaaaaaaatttaataaaaaaaaaaaaaaaaaaaaaaaaaaaaaaaaggggtggacgtttatatatttggggcggcctttatagggtgcccgc

SEQ ID NO: 12392 - DNA, 264 bp, Zea mays
  Clone ID: LIB3157-017-Q1-K1-D10
acgggttgtgtcaccctcctttgcttcctctactttacacccaaataagcaactgaagtgacgtcggctatgcctgctcccaaactacatgactgaagaaactagtggcctgtgaaacgcgaatgcatcataacgccaatgttgtggcttctgtgtgagtgaaatgatgggtcctccctgtacggttgagtggatgcattctggaggtatcttgttctgaactgaagctaacgattgcgcgggcaactgttcatgagtcattgt

SEQ ID NO: 12393 - DNA, 185 bp, Zea mays
  Clone ID: LIB3157-017-Q1-K1-D11
acgtattattgcatgcagaggctgcttgtcgaataaaacgtactatatgtacgattgtattgtacatgtgtgtcaatgcaacaagaggcacgtttgagactcaataaaaaaacaacaaatgggcctacacaaccaaactaataaccaggaaactaaactaaaacgaatataactataaaaatacg

SEQ ID NO: 12394 - DNA, 344 bp, Zea mays
  Clone ID: LIB3157-017-Q1-K1-D3
cgggcggatatggatggtaagtgcccgcgtttggaggggaaggcggccaccgtgacggcgttcacgatggggatcgggctcagcatccccgagcgcctctgtctggagggcgccgccgtcctcattttctcccgcaagcacaagaacttgaacgaggcggtggaggggctcagggccaagggtatcacccccgttggggccgtctgccacgtctacgacgcacagcagcgcaagagccttatcaagacggccgtcaagagctttgggcacatagatattcttgtctacaatgctggcgcaaatccttctgttgatagcatacttgaaatgaaagagtctgttct

SEQ ID NO: 12395 - DNA, 82 bp, Zea mays
  unsure (1)..(82): unsure at all n locations; Clone ID: LIB3157-017-Q1-K1-D4
nagaagaaatgggttgttgcgcaaatgataattttatattattgactcattgctggatcacctgtggactccaatgcacatg

SEQ ID NO: 12396 - DNA, 196 bp, Zea mays
  Clone ID: LIB3157-017-Q1-K1-D7
gtcgacgagccgtcaagatggcccgtatcctaggtcagtggcccttattgcactccgagggtgtgctggcttaccatatcccaactggagagttgacttaccaatttgttgtcaaggggttacgcttctccacggaccctgctcaaaaaaactaaactaaacagctatgctatgcaacttaattgtctttaggatc

SEQ ID NO: 12397 - DNA, 186 bp, Zea mays
  Clone ID: LIB3157-017-Q1-K1-E1
cggactttgttgcggccggtgactctgacgagtgaagattgtagtcatccgtactttggctgcaacaatatccagtttgtgtcgttgcatgtgacaatttgataatgcatttcttgtgcgttgtatgtgttcgttgcgttgttcagaactgttgccaagagctcaagacaacctggttaactggtt

SEQ ID NO: 12398 - DNA, 400 bp, Zea mays
  Clone ID: LIB3157-017-Q1-K1-E12
gtactgtttgttccaattgtttgcttcattgcgatccagatatccaatgacataattgttatggtttaaaaaaaaaaaaaaaaaaaaaaaaaaaaaaaaaaaaaaaaaaaaaaaaaaaaataaaacatataaaaatggaaaaaccataactataacaaaactaaattcgaaaaaaaaaaaaaaaaaaaaagggcggcccttttaaaaaaacaaattttacttacccttgattgcaaagtataattttttttatttggcaccctaaattaaattcactgcccgtgttttaaaaactttttaactgaaaaaaccctggcttaaccaaaataaatccctttaaaaaaaatccccttttcccaatttggtataataaaaaaaagccccaaacaaatcccctttc

SEQ ID NO: 12399 - DNA, 329 bp, Zea mays
  unsure (1)..(329): unsure at all n locations; Clone ID: LIB3157-017-Q1-K1-E8
cggacgcgtgggcggacgcgtgggcggacgcgtgggcggacgcgtgggcggacgcgtgggcggacgcgtgggcagaaaaccaaggacaagacagctgcaaagtagagctccaggaatggaagcctagacactgcgagaagtaattttggtggatggaaaatatgtttgccttgtgtcgagcatttagcatgtgagacatgcctgttgaagtgtttgagtttagagaccggaatccctttcacctttgaattgttgctatgtcgggacatctgctcccctagttgctntgttatgaattgagatcatatctgggtaagataatcttgtct

SEQ ID NO: 12400 - DNA, 202 bp, Zea mays
  Clone ID: LIB3157-017-Q1-K1-E9
cggacgcgtgggctgccgtcccggccgtctaatttactagcgcgttcgtcccatgtgtttagcaccaccagcaggagtatcgtgcgggtatgtaatggtattgcaactatatcggatgtaaacccatactaaatgagaagaaatatgcgtggtaggaaaatatgactgcctcgaataaagcatttaacatgttatacatgcg

SEQ ID NO: 12401 - DNA, 162 bp, Zea mays
  Clone ID: LIB3157-017-Q1-K1-F10
gatcgctctcgtgtggcggtgttgatgtacatgtcagggtcgtgttggatgcgctgggatgggagattacataagatgctacagagatcgattcatacgtagaaagaggaccggactccgccgtgtttccgtgtgttctggtctcagatctgttcgtggcag

SEQ ID NO: 12402 - DNA, 94 bp, Zea mays
  Clone ID: LIB3157-017-Q1-K1-F8
aaaaaaaaaaaaaaaaaaaaaaaaaaaaaaaaaaaaaaaaaaaaaaaaaaaaaaaaaaaaaaaaaaaaaaaaaaaaaaaaaaaaaaaaaaaaaa

SEQ ID NO: 12403 - DNA, 88 bp, Zea mays
  Clone ID: LIB3157-017-Q1-K1-G7
aaaaaaaaaaaaaaaaaaaaaaaaaaaaaaaaaaaaaaaaaaaaaaaaaaaaaaaaaaaaaaaaaaaaaaaaaaaaaaaaaaaggggg

SEQ ID NO: 12404 - DNA, 215 bp, Zea mays
  Clone ID: LIB3157-017-Q1-K1-H1
gttggggttggatgtctgggaacatgcttcctacctgcagtacaagattgttaggccggtttacctgaacaacatctggaaggggatgaactggaaatatgctggagaggtgtacgaaaatgttctggctggaatttcctaaccggacattacacatctgcgcgcgcggttttcggctgtttgatcaatgtgaaataaagatggacctgtctagc

SEQ ID NO: 12405 - DNA, 270 bp, Zea mays
  unsure (1)..(270): unsure at all n locations; Clone ID: LIB3157-017-Q1-K1-H3
cggacgcgtgggctagaagacgccttcacatcacggagtagagctctcagcaccaacagtgcaacgatgtttggactttggttcacatatgggagtgtttaaactcctgcacctagatttagaaacaccaccatgtaaaatagacaaggcggtgcttttgcaaacatgatgctgccacgagacccgaacttatgtatggccaaacatgttaacatattttgaatgtcatgggctgttccaganaaaaaaaaaatttttttattataaaac

SEQ ID NO: 12406 - DNA, 443 bp, Zea mays
  Clone ID: LIB3157-017-Q1-K1-H5
tgacagacaaccgattttaaggaaggatccaggagacttgagtggaatctaaagaagattgttggtggttctgagcacaccctccgtgcaaagctgacattttctcaggagtcacatgggaatatcacaaaggaagctggcccagtgaacatgaatttcactataccgatgtacaatgcatcaaagttgcaggtcaggtatcttcagatcgcaaagaaatcgaaggcatacaacccttatagatgggtgcgatacgttacacaagccaactcctacgtagctcgtctatgaggaatcagcatctgtactcttgtttccagtccattttttttgggtgtaatatttgagcgttatcatggacatagtggcgtgtattgtgtaactgtatattgaggttcgcataccgctcagctcctgtagtaacaattggtttttcgtcgtgc

SEQ ID NO: 12407 - DNA, 165 bp, Zea mays
  Clone ID: LIB3157-017-Q1-K1-H8
gcgctttgagatttgtttctcttggtgaaacccaataaacatgcaacttctttgacctgtgagaaaaataagaattttgtcaaatattggtaatttttaaatttttaaattataattttaaatcttatatttaaaatttaaaaaggtgtattttaaaagtggggg

SEQ ID NO: 12408 - DNA, 282 bp, Zea mays
  Clone ID: LIB3157-017-Q1-K1-H9
ctggcttttcgtcatatcctcgcatttcaactttcccatagagagttaagaaggatccacacgttcagcagcatgtgtgggcttgtaggagctttatgatttgaggcaattagggacaactcttatgtcattgttgcttgcttctgtggagtcgaacagatgtttcgctaacataattcgacttgagtgacgaaagcctccagattgaattaaatatatgaaaagtgttgtttcttctaaaaataaatattataattataataaaaaatatattatttattg

SEQ ID NO: 12409 - DNA, 113 bp, Zea mays
  Clone ID: LIB3157-018-Q1-K1-A10
aaaaaaaaaaaaaaaaaaaaaaaaaaaaaaaaaaaaaaaaaaaaaaaaaaaaaaaaaaaaaaaaaaaaaaaaaaaaaaaaaaaaaaaaaaaaaaaaaaaaaaaaaaaaaaaaa

SEQ ID NO: 12410 - DNA, 338 bp, Zea mays
  Clone ID: LIB3157-018-Q1-K1-A12
ggaaaacccggcccgacccacgcgtccgagacgatggatggtcagtttttaatgtttttctgaataactacgtatagtactgtagtggtactcggagtacgccagaatgtggtgtggtgtcagtctcaccatcaatctggatttgccaagtgtttctattttttcttcggtttgcccgagtgtttgtgattgttaagaactactttattactgatcgtcaaatccgttcccttctgtctcgtctatagtttagacgcgagataatattaaagacacgttttccattccatattcatttatttttattttttatttctattttaataggttgtttcttt

SEQ ID NO: 12411 - DNA, 102 bp, Zea mays
  unsure (1)..(102): unsure at all n locations; Clone ID: LIB3157-018-Q1-K1-A6
gccgccccacgcgtccgnaaaaaaaaaaaaaaaaaaaaaaaaaaaatttttttttaaataaaacaaaaataataaaggggggggggtcttttaaaagttctc

SEQ ID NO: 12412 - DNA, 230 bp, Zea mays
  Clone ID: LIB3157-018-Q1-K1-A7
cacccgtccggaaacagagttattcagatcgctatctctatctctgcatgtttggcgtcagtctttgtgctcatgtacgtgtgtctacatgcatgttggttgatccgattgcgtctgctgtaaccatatattaattggtccaaaaaaaaaaaaaaaaaaaaaaaaaaaaaaaaaaaaaaaaaaaaaaaaaaaaaaaaaataaaataaataaaaaaaaaaaaaaaaaatag

SEQ ID NO: 12413 - DNA, 272 bp, Zea mays
  Clone ID: LIB3157-018-Q1-K1-B10
cgagctgatgggtacatccttgagggtaaagagcttgagttctacatgaagaagctacagaggaagaagggcaagagcgctgtagcttagagcattctcatggattgtcttgcaccgaaatgtgtgtcctgatgagtacacttttttttggttagtcgtctcaagttcagagcgttatgccatgttttcagacctgattagtacactgttttcaaaaagcgattgagctcttaaaaaaaaaaaaaaaaaaaaaaaaaaaaaaataaaataaa

SEQ ID NO: 12414 - DNA, 255 bp, Zea mays
  Clone ID: LIB3157-018-Q1-K1-B11
caagctgatgggtacatacttgagggtaatgagcttgagttctacatgaagaagctacagaggaagaagggcaagagcgctgttgcttagagcattcttatggattgtcttgcaccgaaatgtgtgtcctgatgagtacacttttttttggttagtcctctcatgtacagagcgttatgccatgttttcagacctgattagtacactgttttcaaaaagcgattgaactctaattaaaaaaaataagcctttaac

SEQ ID NO: 12415 - DNA, 87 bp, Zea mays
  Clone ID: LIB3157-018-Q1-K1-B6
tagcgctgggggtcaaccgtttggtttaggacctagagttcgacatgaagaagctacgggggaagaaggacaagagccctgatgctg

SEQ ID NO: 12416 - DNA, 366 bp, Zea mays
  Clone ID: LIB3157-018-Q1-K1-C10
atgccttaaattttatctgtgcagccatttggtgaaataattgtttcgactctgcagtaccgcatgaaacaaaccgttgtaagtttggaaaaactccatctcgcagcgttgattttgtgttcctaaaaaaaaaaaaaaaaaaaaaaaaaaaaaaaaaaaaaaaaaaaaaaaaaaaaaaaaaacaaaaaaaaaaaaaaaaaaaaaaaggggcggccccccttttttttttttttttgggaaagaagcccacatgcccatttttttttcccccccttacctcaaccgtaattaaaaagggtttggggggcctgtaaaaaaaagcaattattgcgttctctcctaaaaaaaaaggagttaaaaacaaaa

SEQ ID NO: 12417 - DNA, 315 bp, Zea mays
  Clone ID: LIB3157-018-Q1-K1-C3
tcgcttcgagctatgattgaactgttacaagcccgaaattaagtagcatgtggatgattcattctttcaagtgcagggtcccaccaaatgtccatatttccattagttttgggtggataggtgcaccgatttctgattttggagtgtaaagtttgtatgacctaatgttttctgttatgcaccgggtatatgctgagtgccatgttttttgcgggttgctactgtatcacagcgagccgacattttacaacaggtatatgtaatggtctgtagtgatacaataatgcctattctgggtgatatgtaatttttttt

SEQ ID NO: 12418 - DNA, 408 bp, Zea mays
  unsure (1)..(408): unsure at all n locations; Clone ID: LIB3157-018-Q1-K1-C4
gaaccagcccgccggcaagtacgggtactccgagaccgagggggtcaccgccaccggcgagggcaagtacaagaggtccaagaaggaggagaaggagcacaagcacaagcagcaccttggcgaggccggcgccatcgccgccggcgccttcgcactctacgagaagcacgaggcgaagaangaccccgagcacgcgcacaggcacaagatcacggaggaggtcgctgccgcggcggccgtcggcgctggcggctacgtattccacgagcaccacgagaagaagaaggaccacaaggacgccgaggaggccagcggcgagaagaagcaccaccacctcttcggctgaccgtagtaacggccggcacgcgaccgagctagctagcttcggcgcacacaaccacacacctg

SEQ ID NO: 12419 - DNA, 68 bp, Zea mays
  unsure (1)..(68): unsure at all n locations; Clone ID: LIB3157-018-Q1-K1-D2
naaaaaaaaaaaaaaaaaaaaaaaaaaaaaaaataaaaaaaaaaaaaaaaaaaaaaaaaaaaaaaang

SEQ ID NO: 12420 - DNA, 121 bp, Zea mays
  Clone ID: LIB3157-018-Q1-K1-D3
ccgtccgcggacgcgtgggaaaaaaaaaaaaaaaaaaatataaaaaaaaaaaaaaaaaaaaaaaaaaaaaaaaaaaaaaaaaaaaaaaaaaaaaaaaaaaaaaggggcggccgttttaaag

SEQ ID NO: 12421 - DNA, 96 bp, Zea mays
  Clone ID: LIB3157-018-Q1-K1-E1
ggttacttcgttacaatagaatgctacattagttatccaaatatacaatgacgtcgtccgttctggaggaaaacaaaataaagggcgcgcccatct

SEQ ID NO: 12422 - DNA, 107 bp, Zea mays
  Clone ID: LIB3157-018-Q1-K1-E11
gtaataaatgatgttctcgtctattttattttgctactgctaggtttaaaaaatactgcggatatataaaaattatattataaactcatttataaataatttataat

SEQ ID NO: 12423 - DNA, 285 bp, Zea mays
  unsure (1)..(285): unsure at all n locations; Clone ID: LIB3157-018-Q1-K1-E2
gaagaaacagaggttatcttagcttttgtgaccgcatcggaccccacctgaggcaatcgttctgctggacagaggtcctagtttgttgggctagtaaatgtaatgttatcttangtggtacttactaatcgggccagtaatgttgaattctagctggaacgcggtaatgtttgatgcaccgaagtcgcttgcagtaggttccgatggcccaagccaccaaanacttgtttgctccatgaacctcgcaatcctgttaggtgataatataatatacattgtgttgcc

SEQ ID NO: 12424 - DNA, 98 bp, Zea mays
  Clone ID: LIB3157-018-Q1-K1-E3
cggaaagttcatctgttattaaaagttcatctgttgtgaccatacccatgtaacacagatgctgtagtttcagcaagtaaaaacctaccggcgttatt

SEQ ID NO: 12425 - DNA, 326 bp, Zea mays
  unsure (1)..(326): unsure at all n locations; Clone ID: LIB3157-018-Q1-K1-E4
gacttcgccggcgtttttgtgaccggcgtccccgagtgcactgcattggtgtactggtctgtctgtaaaaaaaatggatctgtacttctatagtgtgtattcaaccattgttcttagttgtgatgttactcgtgctgcnnaaaaaaaaaaaaaaaaaaaaaaaaaaaaaaaaaaaaaaaaaaaaaaaaaaaaaaaaaaaaaaaaaaaaaaaaaaaaaaaaaaaaaaaaaaaaaaaaaaaaaaaaaaaaaaaaaaaaaaaaaaaaagggggggccgttttaaaggttccaattttacttccccttgcttgcaaagtaatattttttt

SEQ ID NO: 12426 - DNA, 298 bp, Zea mays
  unsure (1)..(298): unsure at all n locations; Clone ID: LIB3157-018-Q1-K1-E7
gtgatgtgccctccatggttgatcgtagctgaactcaggcttccaggacatgtgttgccagtaataccttttcagcgttactcatccttcatctgtatttccagtaatccagcttgtggcgagtgacataatgctaataagtgacataaataaccatttgctgatatgctgtatatgttggtcttgtggatggagcgctctgaagattatatccattgccagtaataaatcgtggctttatctgaccnannaaaaaaaaaaaaaaaaaaaaannnnnaaaaaaaaaaaaaaacccccc

SEQ ID NO: 12427 - DNA, 225 bp, Zea mays
  Clone ID: LIB3157-018-Q1-K1-E9
gggacgcgtgggcgattaggaggtctgattggatacatggcaacgccgagtggaacggcggagagcttctttatcagtagcagagcatgctactctatgtacttttggaacctaagctattagacctgtcagtgttggatgtctggatcttgcatttttggagaaataccaatttaccttggtcaaggatgcaaagcactattaaaatgatatccattgacatgt

SEQ ID NO: 12428 - DNA, 238 bp, Zea mays
  Clone ID: LIB3157-018-Q1-K1-F4
cccacgcgtccgggccagcgtttcacccaaaaaaagcagagctagcggtgattcccgtatgtcatccgtttcattttttacatgaatgagaagcgtggtaataaaagctttgtagttgcgtgcgcgccgtgtattccttggtgtactggcgctggcggtaagccggtaaccacttattaccagggatccttgtaatttttcctgttggtttcccaataatgatgtgaatatattggtc

SEQ ID NO: 12429 - DNA, 75 bp, Zea mays
  unsure (1)..(75): unsure at all n locations; Clone ID: LIB3157-018-Q1-K1-G1
aaaaaaacananaaaaaaaaaaaaaaaaaatttttaaaaaaaaaaaaaaaaaaaaaaaaaaagggagaaaaattt

SEQ ID NO: 12430 - DNA, 401 bp, Zea mays
  unsure (1)..(401): unsure at all n locations; Clone ID: LIB3157-018-Q1-K1-G6
gngacttcccgatctccggcgatggccgtgctttgcctcggatcccccgcatctaggtggctgcgcccgtccgcgctgctcctcctggtcgcctctgctctcctctcggccccgtcgccggcccgggccctccggttcgacctcgagtccggccacaccaagtgcgtctccgacgagatcaaggtcaacgccatggccgtcggaaagtaccacatcgtcgggcccgaccccaactcacccgacgcccagctccccgagtcgcaccgcatctccctcagggtgacgtcgccgtacgggaacagcatgcactacgcggagaacgtgcagtcgggccacttcgccttcacggcggcggaggccggcgactacctggcctgcttctgggctcccgaccacaagcc

SEQ ID NO: 12431 - DNA, 291 bp, Zea mays
  unsure (1)..(291): unsure at all n locations; Clone ID: LIB3157-018-Q1-K1-H1
attatggcaggctgagggttggcttcgcagagtcgacctagggatatggtttggcagcaacccgtccagaggcaaacgcgtaatttgtgtgtttatgcgaccggcgatgtgtgtatatatgctactacatgtttagtcatgctttccgagacctgagacaacgcccgtctgttttaacgtggcgcaagaataattatggttctcgatgtattctccgtacacaaaggcgtgtctgatgcaatggtgaccatcttgcggttgcgtgtttgaaaaanaaaaannnnnnnnnna

SEQ ID NO: 12432 - DNA, 120 bp, Zea mays
  Clone ID: LIB3157-018-Q1-K1-H4
cgccctttttttttttttttttaaaagcataataatcatttttttccgtccatttctatgaattccaaccgatcgatcctgcatgtttaaaaaaaaaaaaaaaaaaaaaaaaaccccctt

SEQ ID NO: 12433 - DNA, 374 bp, Zea mays
  unsure (1)..(374): unsure at all n locations; Clone ID: LIB3157-018-Q1-K1-H6
acgggcgaaanggtnaanctnnnntcttttttttttggctgcccaagaaaaagggaaccgagaggaggccgccaatggcaaaaaggctgttcccgtcgttgaaccgggtgctggtggaaaagctggtgcaccccaagaaaaccgccggcggattcctcttcccggaaacatccaaccagctgaatgctgctaaagtggtggctgttggccttggtgagcgcgactaggcaggcaatctgatcccagttgctctgaaggaaggcgacactgtttcttttgnccgagtatgggggatctgaagtcaagcttgcggctgataaagaatcgcgggcaaccgggtggtgagatgcgtangatttgaagctgggaacaaa

SEQ ID NO: 12434 - DNA, 59 bp, Zea mays
  Clone ID: LIB3157-019-Q1-K1-A5
aaaaaaaaaataaaaaaaaaaataataactttttttttaattaaaaaaaaaataataaa

SEQ ID NO: 12435 - DNA, 351 bp, Zea mays
  Clone ID: LIB3157-019-Q1-K1-B12
gcaactcggcgggcaccgtgacgaccttgtacctgtcgtcgcagggcgacgcgcacgacgagatcgacctggagttcctgggcaacgtgtcgggcgagccctacacgctgcacacgaacgtgttcacgcgcgggcgggggcagcgggagcagcagttccgcctctggttcgaccccaccgccgacttccacacctactccgtggtgtggaacccgcggcacgtcatcttcgcggtggacggcacgccggtgagggacttcgccaaccgcgaggcccgcggggtggcgttcccgcggacgcagcccatgcgggtgtacgccagcctctggaacgccgacgactgggccacgc

SEQ ID NO: 12436 - DNA, 71 bp, Zea mays
  Clone ID: LIB3157-019-Q1-K1-B4
aaaaaaaaaaaaaaaaaaaaaaaaaaaaaaaaaaaaaaaaaaaaaaaaaaaaaaaaaaaaaaaaaaaaaaa

SEQ ID NO: 12437 - DNA, 55 bp, Zea mays
  Clone ID: LIB3157-019-Q1-K1-B5
aaggtactgtaccccctggatgttaaatttttagtacaatttgtggttcgttctt

SEQ ID NO: 12438 - DNA, 249 bp, Zea mays
  Clone ID: LIB3157-019-Q1-K1-D3
ctctggatgtacatttaatcaccgctatgttaagttcaatccaagagaggttgaaaatgcaacttggatgctaactgtttttcattgttttgggcagtacttttgcttgcactttgaggcatttcagcttggaatggcaccagtatacatggctttcctccggtttatgggcgatgaaaatgatgctaggaactacagctattgtctttaggttggtgcaaatggcaggaagattatatgggagggaac

SEQ ID NO: 12439 - DNA, 176 bp, Zea mays
  Clone ID: LIB3157-019-Q1-K1-D7
gctgattccgtgtcgggttagtgggcccagtgtcggtgctgatgtggcctacctttacagcacatcggtgggactgggccgttgagctcctgtgtcgtttaatatgtgtacggtgtacccatctagtatgtgtttcgagtgtgtagtaagtatatttgtgtcccatccatctttcg

SEQ ID NO: 12440 - DNA, 310 bp, Zea mays
  Clone ID: LIB3157-019-Q1-K1-D8
ggcggcgcgtcggacgggcaggagttcaaggtcgtgtcgcggcttaagaagcggccgacgatcggcgaggtggagtctatgctgtacaacatcatggccgcgaactcgccggtgaccaaatcggccaggttcctccgtgagattgtttccaatgtgactggagcaaagtccaaggcacagtgacagtgagtcaccctgcctgcgtgagcgtgagattcgtcggtctggattttgttggagtgctctgaatttctttgtgccacgcaacgaaaaatgagctgcccctgaacacggtgagctaattttggtc

SEQ ID NO: 12441 - DNA, 251 bp, Zea mays
  Clone ID: LIB3157-019-Q1-K1-E10
cggacgcgtggggcagcagctcaacgaggacgtacgacgaccctttccagctgcctggcgtcgccatggacaactgatacaccgtaccgtcgtctctgtttgcgtttctgtcaagtgtgcatggaataatactgtaactgtgtttcctgccgggcaatgcactgtgatatgatgcccaacgaataaatgtcgcttttatttttattaaaaataaaataaaaaaaaaaaaagtaaaaacatattgatattac

SEQ ID NO: 12442 - DNA, 122 bp, Zea mays
  unsure (1)..(122): unsure at all n locations; Clone ID: LIB3157-019-Q1-K1-E11
gctgtnttgccgcgagggggataatttgttttcacaagattgtgtaggatgaggatgtgcgggtttttggtagattggcacctaactgtggaatgaatatacataggtctttttcttctgct

SEQ ID NO: 12443 - DNA, 382 bp, Zea mays
  Clone ID: LIB3157-019-Q1-K1-F11
gtcagcggcaaatctgcggagatgaacggcgggagcgagtgcgcgcgtgccgtctgaagctgccggacttgtgtcctcaacaaaccatatgcatgcgatccgtacatgtgattcggttgagactgttgccgcgcgcaacggcctgtgatgtgtcgagcaccaaggagacggcatgttgttcgtcgtcgtcgttctctcattcatgtggggttataggctagccgcgcgccgtcgtagctgatgctgatgtactaggaaaaccttcgttgcatggatgacacggaacccataccccacgcggttcagttgctttgctgctcttggtgctcgacaagttgacagtgtgtgccactacaacacatattccaagtcggctttatct

SEQ ID NO: 12444 - DNA, 249 bp, Zea mays
  Clone ID: LIB3157-019-Q1-K1-G2
gaagtttttggatggtatctatgtgagcgacaagggtgtgatcgaagaggagcagtgaaggacaagttatcgtttgagttggaattatcgtttggtttgcaattttctcagggtgaactttgtaatcggttaggatgtgttgtggaccattatcttatcctacaatattatcgtatctgtttaagaattaaacacaaaaaaacaaaaaaaaaaaaataaaaaaaagaaaactaaaataaaaaaaatgag

SEQ ID NO: 12445 - DNA, 78 bp, Zea mays
  Clone ID: LIB3157-019-Q1-K1-G6
gtagggcatgcatctatttatacttaacatattctttgtgtgcttaaaaaaaataataaaaaagaaagaaatataaaa

SEQ ID NO: 12446 - DNA, 338 bp, Zea mays
  Clone ID: LIB3157-019-Q1-K1-H1
gcaatgccatccaggccatcctcgcggagcgtgggacggtaacgaacaaggagctcgtgctgaaagcgcgcaagatgctgtcgaaacagggctacacccaacagcctgggctctactgcagcgatgagaatgccagtgcggcttttatatgctgatgatgattcattgggtttgtcctgtggattgcaatatttgtattttgtctctaagtgcatgtgagttggactggtggttatgttttttcgctgagatttgggaatgtatcgtttctttcgcaggatgacaaaaaaaaaaaaaaaaagggcgccgctcgcgatctagaacgttctagatcgcga

SEQ ID NO: 12447 - DNA, 229 bp, Zea mays
  Clone ID: LIB3157-019-Q1-K1-H10
tcgaaggttttatgccgtctatgttgttatcttttgccaacgttgtaacgtcgtatgatgcgtggatggcctgtttcttgacatgcacactctaaatttgatctgttggtttgcatgaggttgatttgtatctcatactaatcgagcgtgagatgtcatctaaaggcttaatgaaggcaactgttgtatgaatcaaactgttaattttattataatttattaaatattg

SEQ ID NO: 12448 - DNA, 342 bp, Zea mays
  Clone ID: LIB3157-019-Q1-K1-H11
accaaaccaaattgagttagggtgctaccttctttggtcgatggaagctgatggaatgagactgtgaagcggcgtttcccccctctgttcctgacagaaataagttcagcctgctgctcccatatacatggacacagactcacatgtagacactcaagttttgagagctgtgatcctgtttcatttaatcaaaaacaattttgtttttttttccatcttgtcatggcaaatgttacaccagctgcaaaataattacaataattgatcttgatccagcgtcgcgtgtttcaaaaaaaaaaaaaaaaaaaaaaataaatataaaatattataaataataatttt

SEQ ID NO: 12449 - DNA, 219 bp, Zea mays
  Clone ID: LIB3157-019-Q1-K1-H3
aaaaaaaaaaaaaaaaaaaaaaaaaaaaaaaaaaaaaaaaaaaaaaaaaaaaaaaaaaaaaaaaaaaaaaaaaaaaaaaaaaaaaaaaaaaaaaaagggggcggccgttttaaagaatcaaagttaacttccccgtgcatgcaacgtaaaagcttttttatagggccaccaaaattaaattaactggccgccgtttaacaacgtcggaattggaaaaac

SEQ ID NO: 12450 - DNA, 91 bp, Zea mays
  Clone ID: LIB3157-019-Q1-K1-H6
atcgttcgaattgataaaatcgggggtcgtctattattgcatgcagaggctgcttgtcgaataaaacgtactatatgtacgattgtattgt

SEQ ID NO: 12451 - DNA, 225 bp, Zea mays
  Clone ID: LIB3157-019-Q1-K1-H9
gtagctgtggaaccttaacttggctatagctgaattttcttgtaagtccctgtagtgcttagccagttgtaacttaaagagttctgtttaggttgccttcttgcggccacaatcatgtagcagaatgtgcgtgtgtttcaggttagcgtgggggtatgtgcatctgtccaaagagagtctgcaatttggcaaccggatattttgttatcaatttcagttacttcg

SEQ ID NO: 12452 - DNA, 287 bp, Zea mays
  Clone ID: LIB3157-020-Q1-K1-B5
gttttgagaaaccattgttactgtatccccttgatgtcaaactttttagtacaatttgtggttctgaaaaggttggttgaatgttgcaaaaaaaaaaaaaaaaaaaaaaaaaaaaaaaaaaaaaaaaaaaaaaaaaaaaaaaaaaaaaaaaaaagggcggctttttataaagaaatcaatatttaattacgcatgcatgcaacaaaaataactcttctatagagtaacctaaattaaattcatttgccgaggtttaacattttcataaactgagaaaaaccttgttt

SEQ ID NO: 12453 - DNA, 242 bp, Zea mays
  Clone ID: LIB3157-020-Q1-K1-C11
ccaaggccgatatcaacactacctcgtcctaggttgcgcagcctccggttgcaggcttgtctcgtatgttcacgcgtcatgatgtaatcatagtgctgctgtgtctggtctccttctgtagcaactgttatctgatggaacagtaacaatgcttatttaatccagctagttgcttatttgtggatcctctctctttgttgttggccaccttttgaaaaaaaaaagagttaaaatagtaatgg

SEQ ID NO: 12454 - DNA, 177 bp, Zea mays
  Clone ID: LIB3157-020-Q1-K1-C9
atgaattccgatgtatgtgcccgaacttgattctagggttggtctcgtaagttaatcgggaaaggcgggtgcagacactactgatgagccgtaacgtacccgtcagatcccccagatacaataaaacgagtctgtaatgtggcttttgcatcgtattttctgcatcgtgttaagaag

SEQ ID NO: 12455 - DNA, 70 bp, Zea mays
  unsure (1)..(70): unsure at all n locations; Clone ID: LIB3157-020-Q1-K1-E12
nnnnaaaattaaaaaatttaaaaaaacaattatttaaaaaaaaagtcttaaaaaaaaaaagggaggatat

SEQ ID NO: 12456 - DNA, 126 bp, Zea mays
  unsure (1)..(126): unsure at all n locations; Clone ID: LIB3157-020-Q1-K1-F1
ccggaccggnaaggaatggccggacccacccgtgcgtncggagaaattcaattaaatcaaaaaaaaaaaaaaaaaaaaaaaaaaaaaaaaaaaaaagaaagaagataatataaaaaaaaaatnaaa

SEQ ID NO: 12457 - DNA, 64 bp, Zea mays
  unsure (1)..(64): unsure at all n locations; Clone ID: LIB3157-020-Q1-K1-F3
naaaaaaaaaaaaaaaaaaaaaaaaaaaaaaaaaaaaaaaaaaaaaaaaaaaaaaaaaaaaaaa

SEQ ID NO: 12458 - DNA, 191 bp, Zea mays
  Clone ID: LIB3157-020-Q1-K1-G1
cggaacgattctcctcctccgtccgcgtagctctcggtttcggcgatgtcggggcgcggcaagggcggcaaggggctgggcaagggcggcgccaagcgccaccgcaaggtgctgcgcgacaacatccagggcatcacgaagccggcgatcgaagctggccagagggcgggtaagccattctgggtattaca

SEQ ID NO: 12459 - DNA, 147 bp, Zea mays
  Clone ID: LIB3157-020-Q1-K1-G10
gttctagatcgcgagcggtcgcccttttttttttttttttttttttttttttttttttttttggctacctagctccccgccctggtttttttttttaagctctatgagttctgttggtataaattgcgcagcgatcatgcttttcct

SEQ ID NO: 12460 - DNA, 123 bp, Zea mays
  Clone ID: LIB3157-020-Q1-K1-G11
aaaattgttgtgagttgtgactcttgtgtactctttgcttccgaagaacttctctatggtctctccgacgaacagttgcagttgcttgggtttggaccgactatttatcatgtgattgcgaac

SEQ ID NO: 12461 - DNA, 367 bp, Zea mays
  unsure (1)..(367): unsure at all n locations; Clone ID: LIB3157-020-Q1-K1-G6
cccggcccgacccacgcgtccgcaaggccgcggcagatctggccgctcatggtaggcagaattaagtgaaaaatagacataaaattcatccttgcagttactaaacatgaggacgaacaccttcaagtgatgttgcttgatgtatatttatgacacacaacagtgtcgtaaattaaaaggagacgaacactgcgtttggaacaaattgtttgctctgataagtttgattattgcaaatgtagtcaagtgatcgtgcttntaaaaataaaataaaaaaaaaaataaaaaaaaaaaattttatatttttttaaattatatatttaataaaatatataaaattttaaaaagggcggccgtttttaaggat

SEQ ID NO: 12462 - DNA, 190 bp, Zea mays
  unsure (1)..(190): unsure at all n locations; Clone ID: LIB3157-020-Q1-K1-G8
gctatttcagttgatcntagaaagaagacggttaaaagctcaaacaacaagaaatgacgtcaactgaatctaacagctggtgagtttaggctgttttttccccagcctgttttgacactgattactgtatacttgaactgcggtttggaaatgctccagctgttagattcagttgacctcattttttgtt

SEQ ID NO: 12463 - DNA, 244 bp, Zea mays
  unsure (1)..(244): unsure at all n locations; Clone ID: LIB3157-020-Q1-K1-H11
tcgggcttnttttttttttnntttttaattttacaacgagttggtaaactaagtggtttgtctcgattttaaacatgttattgaatgtgtaaattgtagaaaaattggtttgtttttaaaaaaaaaaaaaaaaaaaaagggggggcggttttttagagaacaaatttttttttacggcggggtttgtaaaaaataaattttttttttttttttgaaacaaaaaaatgtggggggtccttttttt

SEQ ID NO: 12464 - DNA, 165 bp, Zea mays
  Clone ID: LIB3157-020-Q1-K1-H2
gttgtgcgcgcgtacgtatgtatgcgctcgtgtgatgcacgaataagcgtggctacgtaatctatcgtatgtatacgtgtgtgtatgcatgtgcttgtgtatgatcgtggtacgaggaccgaaaaaatgtatgcaactctgatttacttacatgtttagttgttt

SEQ ID NO: 12465 - DNA, 211 bp, Zea mays
  Clone ID: LIB3157-021-Q1-K1-A1
cggccggattcccggtcgacccacctccggctatccttcatgcggtaacgccatctggatgacgtgcataaaataagtctctgaggccgaactaaatctcatgcgcggatggaccggccactgtaaagtcagcgcgtggctacagacttgtaaacactgggctgacgatctagcagagccaatcctccgtactcatggtcgcccggcctgt

SEQ ID NO: 12466 - DNA, 234 bp, Zea mays
  Clone ID: LIB3157-021-Q1-K1-A4
caatttacaagaaaaacgggaactacatggtcctgtgacaaacttgcccgcgtagtctgggaaggggatatgcctcagctgtgtgtgtatatatctatctatacgatggtgggtgactttggactatggtagcaaagttgttggctggtgtgcatgtgctcattttggggattgggcagaactagcagatgtacgaacgtgtgtttggagttgggatcctttctgtcatctcgt

SEQ ID NO: 12467 - DNA, 307 bp, Zea mays
  Clone ID: LIB3157-021-Q1-K1-B10
actaggctccctactacgccaagatcttctatggagtcgagcacgggttcccctgctggggcaacaccaccgaccctttcgccgtcaagaccgtatagacggccctcgcctacatggtcagctggttcaacaagcacctcaactgaatgaagcctgcactgcacccaccatactgaatttaataaaccacagcactgctgtgatattttgtttctattcatggttccccagattgatttgtcatggctaagacctctactactgtaatttcccttattaaaaaatataaatattctaatattacggt

SEQ ID NO: 12468 - DNA, 125 bp, Zea mays
  Clone ID: LIB3157-021-Q1-K1-B11
tgctactcatgtacttttggaacctaatctattatacctgtcagtgttggatgtgtggatcttgcatttttgtggagaaataccaatttacctcgttcaaggatgcataaaaaaaaattaataaa

SEQ ID NO: 12469 - DNA, 367 bp, Zea mays
  Clone ID: LIB3157-021-Q1-K1-B2
caatgtctcgtctgtgatcactggagccaccaaagaaagccagattgtggagaacatgaaggccctagatgtcatcccactgctgacgccggaggtcgtcgacaggatcgaggcggtggtccaaagcaagcccaaacgcaacgtcgagtcatacaggtgaaaattcggtgttcatccgacggagttcaggcctcctccacgaaacttcatccatgatccgtgtgtattctgggcgtggtgctgtgttcacaaacacaagtctgtcagtcctgtgttgtgtattctgctttccgatacagattttggaccaattcaatcctgcattgtgttgcttgcgagcagaaagatttgttggatgaccatgatc

SEQ ID NO: 12470 - DNA, 89 bp, Zea mays
  unsure (1)..(89): unsure at all n locations; Clone ID: LIB3157-021-Q1-K1-B7
naaaaaaaaaaaaaaaaaaaaaaaaaaaaataaaaaaaaaaaaaaaaaaaaaaaaaaaaaggggaggggcggacgcattaaaaagaacg

SEQ ID NO: 12471 - DNA, 67 bp, Zea mays
  Clone ID: LIB3157-021-Q1-K1-B9
gttgaactctgacctaccttatttgtgcctgcttacggttatgtcatgaacgagaatttggtagtcc

SEQ ID NO: 12472 - DNA, 105 bp, Zea mays
  unsure (1)..(105): unsure at all n locations; Clone ID: LIB3157-021-Q1-K1-C1
ctcgcaaggcggcgttgtgtgggagtccttttggcctgcaagtgttttgctagttttgnaaaanaaaaaaaaaaaaaaaaaaaaatttattantntttttatttt

SEQ ID NO: 12473 - DNA, 377 bp, Zea mays
  Clone ID: LIB3157-021-Q1-K1-C11
ggtaagggtcccacctgtcatatcaggccctaacgggctgcgaggatggggggtggaacataccctcccccatcgttaatggtttttgcccgtatctttccccacggggagtattttctccccattctcatcccctaatggcttgtttggtaccatagtattcaccctaattcacatgagttaaggggatttgggtataaattaaactaatttgcacccaaatcctcctcaacccatgtgtattggcgtgaatagtagggtatccaaatatagcctaatggaggaattccccgccagagataggggaatggggccattgccatccctacttgttgatgtaatgtacatgatatttttaatttaagcttccattattg

SEQ ID NO: 12474 - DNA, 199 bp, Zea mays
  Clone ID: LIB3157-021-Q1-K1-C3
gcatgggactgatgaggcacagagctgaagtgaggtgcctcactccattgctaatttgctactaggtgttggtgtgcggcttcagggagttgaagactgggaagtggaggaagcagtgctttttcccgcccattgtcgtcaatgcatgtaccagtgcgattaagattatataaattatattgacagtattttgtgtgtc

SEQ ID NO: 12475 - DNA, 52 bp, Zea mays
  Clone ID: LIB3157-021-Q1-K1-C5
aaaaaaaaaaaaaaaaaaaaaaaaaaaaaaaaaaataaaaaaaaaaaaaaaa

SEQ ID NO: 12476 - DNA, 158 bp, Zea mays
  Clone ID: LIB3157-021-Q1-K1-D10
tttaacaaaggggcaaaactgccagaactcaattgattcttcgcagttcatatacagcccgagcttaggagcataagagcaccggtcagaaacaaatttgtctattcctttgtacagtgagcatcatttccatgcctggtacagtgattgtttgtact

SEQ ID NO: 12477 - DNA, 272 bp, Zea mays
  Clone ID: LIB3157-021-Q1-K1-D11
tgacttttcactgtcaagcccattcggtggaggccccgcaggaagggtgaagagaaagaatcagaagaaggcaagcggtggcggggatgctggtgatgaggatgaggagtgaggatgatggacaagtagtgttacccaatataataatattatctagttttcttgaacttgttcgaatgatgagtgcttagctgtgtgatctgacgcagagtcccctgtgctgactctgtgtcatggatggtccattttatcttgtggtattatcagccttt

SEQ ID NO: 12478 - DNA, 69 bp, Zea mays
  Clone ID: LIB3157-021-Q1-K1-D7
aaaaaaaaaaaaaaaaaaaaaaaaaaaatatttaaaaaaaaaaaaaaaaaaaaaaaaagaaggaaaaaa

SEQ ID NO: 12479 - DNA, 391 bp, Zea mays
  Clone ID: LIB3157-021-Q1-K1-D9
gaatgaggccagaccatatgaggcggctgaacccgacgccttacaaggtaagcgtgagtgctaagctgtatgacttcatccatttcttgtggctcaacgaagcgcctgtcggagaactgcagtgatgaaatgaagtggcggtagggtcggatcccaaacctaactctaataagctgctccgcttatgggtgccgtcggagcaaataacaaactgttgccgccggtgcaatttctgcagtagttttaccatcgcctgcgctctagtcaaatgtgagtatgtgctggcgcatctgtcaaaacagaccatagctgaagtgttacgtattgggaacaagaggatacccataccgagttgtatgactgaactaattgcaatgaggagcaatcacta

SEQ ID NO: 12480 - DNA, 82 bp, Zea mays
  unsure (1)..(82): unsure at all n locations; Clone ID: LIB3157-021-Q1-K1-E10
naaaaaaaaaaaaaaaaaaaaaaaaaaaaaaaaaaaaaaaaaaaaaaaaaaaaaaaaaaaaaaaaaaaaaaaaaaaaaaacc

SEQ ID NO: 12481 - DNA, 61 bp, Zea mays
  Clone ID: LIB3157-021-Q1-K1-E2
taaaaaaaaaaaaaaaaaaaaaaaaaaaaaaaaattaaaaaaaaaaaaaaaaaaataaaaa

SEQ ID NO: 12482 - DNA, 234 bp, Zea mays
  Clone ID: LIB3157-021-Q1-K1-E6
gcgagggggtacggagcaacgcctaggcttactttgcctttgcccccgcccatccacagcaggggtagctttcattcaggtcaagagtgttgcagctgccggcaacggtagctagcgcaggcgtttgtgagtttgtgtgcggtgtggaaagcaagtgtgacttggtcagcgtctgtgtgtcctgttgggttgcagtcaatctaacttaataaagatggacgaatgcaagtgatt

SEQ ID NO: 12483 - DNA, 75 bp, Zea mays
  Clone ID: LIB3157-021-Q1-K1-E7
aaaaaaaaaaaaaaaaaaaaaaaaaaaaaattaaaaaaaaaaaaaaaaaaaaaaaaaaaaaaaaaaaaaaaaaaa

SEQ ID NO: 12484 - DNA, 93 bp, Zea mays
  unsure (1)..(93): unsure at all n locations; Clone ID: LIB3157-021-Q1-K1-E8
naaaaaaaaaaaaaaaaaaaaaaaaaaaaaaataaaaaaaaaaaaaaaaaaaaaaaaaaaaaaaaaaaaaaaaaaaaaaaaaaaaaaaaaaaa

SEQ ID NO: 12485 - DNA, 59 bp, Zea mays
  Clone ID: LIB3157-021-Q1-K1-F12
cggacgcgtgggaaaaaaaaaaaaaataaaaaaaaaagggcggacgataataaaagaaa

SEQ ID NO: 12486 - DNA, 304 bp, Zea mays
  unsure (1)..(304): unsure at all n locations; Clone ID: LIB3157-021-Q1-K1-F5
nggacgcgagggggcnggcgcacngccgacggaaccgggcgaccnncaaggggcccaagaagggggacaacacggacgaccggcccaagacggccaccggaaagaaccagcgccgcancgaggcgcagcacaacgagcagccgaccagagccagancgangacccaggagcnagccaagncaggggacgacggaangggaaaacgcaacacaagcgagcnagnnagccaggcggacccgcaaagcgnggcgaggaggacanggccagacggaaccngaanaaacaaacacaggcaacggcncac

SEQ ID NO: 12487 - DNA, 59 bp, Zea mays
  Clone ID: LIB3157-021-Q1-K1-G5
aaaaaaaaaaaaaaaaaaaaaaaaaaaaaaaaaataaaaaaaaaaaaaaaaaaaaaaaa

SEQ ID NO: 12488 - DNA, 100 bp, Zea mays
  Clone ID: LIB3157-021-Q1-K1-G9
ctgtcgcgtgggataaatattatattatttattaaaaaaataaataaaaattataaaaggtggaaaaaaaaaaaaaaataatataaaaaaaataataatt

SEQ ID NO: 12489 - DNA, 235 bp, Zea mays
  Clone ID: LIB3157-006-Q1-K1-F9.F1
atccaatacagtaccattttaacacaaaaatatccaaagtaaacatctttaggcataatgcaaaatcctggcagcgaccacaaaaactgagacaatgtttcaccatagtacgaggcaacaacacatccgttctgaaacacatgtcctttaacaatctaaagcacagtagacagataaacaacgaccggacacgtgggcggacgcgtgggcggggtaagaggcggacgtagagcgc

SEQ ID NO: 12490 - DNA, 221 bp, Zea mays
  Clone ID: LIB3157-006-Q1-K1-F9.F2
atccaatacagtaccattttaacacaaaaatatccaaagtaaacatctttaggcataatgcaaaatcctggcagcgaccacaaaaactgagacaatgtttcaccatagtacgaggcaacaacacatccgttctgaaacacatgtcctttaacaatctaaagcacagtagacagataaacaacgaccggacgcgtgggcggacgcgtgggcggacgcgtggg

SEQ ID NO: 12491 - DNA, 218 bp, Zea mays
  Clone ID: LIB3157-006-Q1-K1-F9.R1
cccacggtccgcccacggtccgcccacggtccggtcgttgtttatctgtctactgtgctttagattgttaaaggacatgtgtttcagaacggatgtgctgttgcctcgtactatggtgaacatgtgtctcagtttttgtggtcgctgccaggattttgcattatgcctaaagatgtttactttggatatttttgtgttaaaatggtactgtattggat

SEQ ID NO: 12492 - DNA, 102 bp, Zea mays
  Clone ID: LIB3157-006-Q1-K1-F9.R2
aacagcaactcacccgtctactcggtctgacacacgcaccttcacgcttgaaaatccttgagaacgggttcatcgagctaaaaaaagaaaaaaagacatgtg

SEQ ID NO: 12493 - DNA, 218 bp, Zea mays
  unsure (1)..(218): unsure at all n locations; Clone ID: LIB3157-007-Q1-K1-H4.F1
gcgaatctaaaaaagaagaaggagaagaagaagcacggcgngggccacgaccacgaccacgacggcgtccacagtagcagcagcagcgacagtcntgagatctggtgtcgcagcacaggtgcacacaagtatgcttgctggatggaggattcataccagctgatgctgatgtagtgtttcactggtgtcatgcatgcatgtatcgtgctattataatc

SEQ ID NO: 12494 - DNA, 560 bp, Zea mays
  Clone ID: LIB3157-007-Q1-K1-H4.F2
tcgcgatctaaaaaagaagaaggagaagaagaagcacggcgagggccacgaccacgaccacgacggcggccacagtagcagcagcagcgacagcgactgagatctggtgtcgcagcacaggtgcaacacaagtatgcttgctggatggaggattcataccagctgatgctgatgtagtgtttcactggtgtcatgcatgcatgtatcgtgctattataatcaaaaaaaaaaaaaaagggcggccgcccttttttttttttttttttgtaggacgaacaagtgaatctaccatataggaaaaggaggcaggccaccacaacaagggtagggtagggcaccaccaccaccacatgccatgcttctcttcagaagccatcccggcacggcggcactaatgactaatcggaagaagaagaagaaactaccacaaacaaaggtgaagccagcagcacgcacatcactacctagctagagagcccaccagttactggcagctggagctcctcccgggcccgccgtagtagaagtaggtgccccattcggcgttgctgccgctctgc

SEQ ID NO: 12495 - DNA, 393 bp, Zea mays
  Clone ID: LIB3157-007-Q1-K1-H4.R1
gcaggcgagctacttcaagggggtgcaggtggtggacagcagcaacaacctcggggcgcccaggggcgcctgggaccttcacggacagtccagctgctacacgtgcagagcggcacaacgcgactggggcactacttctactacggcgggcccgggaggagctccagctgccagtaactggtgggctctctagctaggtagtgatgtgcgtgctgctggcttcacctttgtttgtggtagtttcttcttcttcttccgattagtcattagtgccgccgtgccgggatggcttctgaagagaacatggcatgtggtggtggtggtgcctaccctacccttgttgtggtggcctgcctccttttcctatatggtagattcacttgttcgtcctac

SEQ ID NO: 12496 - DNA, 403 bp, Zea mays
  Clone ID: LIB3157-007-Q1-K1-H4.R2
gcagggcgagctacttcaagggggtgcaggtggtggacagcagcaacaacctcggggcgcccaggggcggcctgggcaccttcacggagcagtccagctgctacgacgtgcagagcggcagcaacgccgactggggcacctacttctactacggcgggcccgggaggagctccagctgccagtaactggtgggctctctagctaggtagtgatgtgcgtgctgctggcttcacctttgtttgtggtagtttcttcttcttcttccgattagtcattagtgccgccgtgccgggatggcttctgaagagaagcatggcatgtggtggtggtggtgccctaccctacccttgttggggtggcctgccttcctttcctatatggtagaatcaattgttcgtcctac

SEQ ID NO: 12497 - DNA, 435 bp, Zea mays
  Clone ID: LIB3157-019-Q1-K1-A10.F1
accaaccaaaaaaacatttttttacctcttaacacctcttacaatttccaaaaacaacacctccaccaatagactagacaactcaccaataaagatcgacccaagctcttgtgatgcatcactttgcatgcatgatctctctctctctctctctctctctctctctctatctatctatctatgtaaaaatataaaaataaatgaatgtgtgtgggagagagagagagagagagagagagagagagagagagaaaagagcacgcgactacataaagaaagagtgtatatatatagggatatgtgtgtgtgtgtgtgatgtgtatatatatatatatatgtacagagggagagaaaagcgagagggagcgcgcgagcgcgagggagagagagatgagagagagagagagagggaggtctatcttggcagggggagag

SEQ ID NO: 12498 - DNA, 524 bp, Zea mays
  Clone ID: LIB3157-019-Q1-K1-A10.F2
accaaccaaaaaaacatttttttacctcttaacacctcttacaatttccaaaaacaacacctccaccaatagactagacaactcaccaataaagatcgacccaagctcttgtgatgcatcactttgcatgcatgatctctctctctctctctctctctctctctctctctctctctctctctctctctctctctctctctctctctctctatatatatatagatatatatatagagagagagatagatgagaaaagaggcaccatgtggatatatatatagagtgctatatatgtatgtgtgtgtgtgtgtgtgtgtaaatatatatatatatatatacatgtagagagagagagagagagagcgcgagagagatagatatagagatagagagagatagggggagagaaaaagaaagctccatcttgtcagtgggagtcaggctgtgagaacatatatgagtgtgcgacgtgcatctgtgtgatatgtatatcccattttgtcgatctgggggtacatctctag

SEQ ID NO: 12499 - DNA, 520 bp, Zea mays
  unsure (1)..(520): unsure at all n locations; Clone ID: LIB3157-019-Q1-K1-A10.R1
agccacgctcagcccacggtcggccgacngnacctccgacctcctcttcaagggcgccgtgccggggctggcgcacatcgagcccaacaagctccggctctgctcgagctcgtgcagtcggcggccatggtcatgtcccgcgagacgcgcacacggcggtcaaccgtacaccatgtacggcgagccttccggcggcggcgtgtacagtgcgagcggcccagcagcacgagcttggtgaacctcaacctggacaacaagatggtgtacttgaacctagggatggacgcgcattcggcaagatgggcgacggcgatgacggcgggggcagggggccgtcttctttgttctccccgcatggctaccattgacaagatggagcggccggttgctgctctactatctccttgtaagcttagaactaattaattacatgttgttaatcatatccacattacaggagatgaagaagatgatgattggaaagatggcgagacgatcctttaattttttgcactctatc

SEQ ID NO: 12500 - DNA, 529 bp, Zea mays
  Clone ID: LIB3157-019-Q1-K1-A10.R2
cccacgcgtccgcccacgcgtccgcggacgcgtgggcgcacgctcacctccgacctcctcttcagggcgccgtgccggggctggcgcacatcgagcccaacaagctccggctctgcctcgagctcgtgcagtcggcggccatggtcatgtcccgcgaggacgcgcacacggcggtcaacgccgcgcccatgtacggcgagccttccggcggcggcgtgtacagtgcgagcggcaccagcagcacgagcttggtgaacctcaacctggacaacaggatggtgtacttgaacctagggatggacgcgcagttcggcaagatgggcgacggcgatgacggcgggggcagggggccgtcttctttgttctccccgcatggctaccattgacaagatggagcggccggttgctgctctactatctccttgtaagcttagaactaattaattacatgttgttaatcatatccacattacaggagatgaagaagatgatgattggaaagatggcgagacgatcctttaattttttg

SEQ ID NO: 12501 - DNA, 274 bp, Zea mays
  unsure (1)..(274): unsure at all n locations; Clone ID: LIB3157-021-Q1-K1-B10.F1
gagggaaattacagtagtagaggtcttagccatgacaaatcaatctggggagccatgaatcgaaacaaaatatcacagcagtgcgtttgtntaattgaattcagtctggtgggtgcagtgcaggcttcattcagttgaggtgcttgttgaaccagctgaccatgtaggcgagggccgtctctgcggtcttgacggcgaaagggtcggtggtgttgtacctgcaggcgaacccgtgctcgactccctggaagatcttggcgtatagggaactcgt

SEQ ID NO: 12502 - DNA, 275 bp, Zea mays
  Clone ID: LIB3157-021-Q1-K1-B10.F2
gagggaaattacagtagtagaggtcttagccatgacaaatcaatctggggagccatgaatcgaaacaaaatatcacagcagtgctgtggtttattgaattcagtctggtgggtgcagtgcaggcttcattcagttgaggtgcttgttgaaccagctgaccatgtaggcgagggccgtctctgcggtcttgacggcgaaagggtcggtggtgttgtacctgcaggcgaacccgtgctcgactccctggaagatcttggcgtagtagggaacctcgt

SEQ ID NO: 12503 - DNA, 77 bp, Zea mays
  Clone ID: LIB3157-021-Q1-K1-B10.R1
ctaatacgcactcatctatacgggaaagctaggtacgccttgcacgctaccggctccgcaacttcccggcgtcgacc

SEQ ID NO: 12504 - DNA, 275 bp, Zea mays
  Clone ID: LIB3157-021-Q1-K1-B10.R2
acgaggttccctactacgccaagatcttccagggagtcgagcacgggttcgcctgcaggtacaacaccaccgaccctttcgccgtcaagaccgcagagacggccctcgcctacatggtcagctggttcaacaagcacctcaactgaatgaagcctgcactgcacccaccagactgaattcaataaaccacagcactgctgtgatattttgtttcgattcatggctccccagattgatttgtcatggctaagacctctactactgtaatttccctc

SEQ ID NO: 12505 - DNA, 109 bp, Zea mays
  Clone ID: 73LIB3157-001-Q1-K1-F12-R1
gaaatcgtcaaatgaaggaaagtgaatggctttcctgccaacaacaaaaaaaccacagagtagcaaggaaacaggggcagccgatctatgagcgaacgaccttaggaaa

SEQ ID NO: 12506 - DNA, 88 bp, Zea mays
  Clone ID: LIB3157-007-Q1-K1-H4.F2B
gcgggcgttgcaggtttccctattctgcgtcttgtgagacctcgtagtgcttgtggtcataacggtcacctgtgtgtaattggtgacc

SEQ ID NO: 12507 - DNA, 157 bp, Zea mays
  Clone ID: LIB3157-019-Q1-K1-A10.F2B
accaaccaaaaaaacattgttttacctgttaacacctcttacaatttggcaaaaacagcacctgcaccaatggactagacaactgaccaataaagatcgacccaagctcttgggatgcatgactttgcatgcatgatctgtctctctctgtgtgtgt

SEQ ID NO: 12508 - DNA, 613 bp, Zea mays
  unsure (1)..(613): unsure at all n locations; Clone ID: LIB3157-007-Q1-K1-B8.F2
agcaagaatcttctggctcagatcgacatgccttggtaaaacatttaactaaacaacactaggtagctctcaaatgatcacatccgttactgctcaatacacctacgtagcacaggaattcaggtttaaacctacagtagagctacaaatttacctccctactcaaagcttctgacttatactactacataagaggatcatttccatggcatgatgctggacaggaacggcggctggtcgttgctactgctagcagccatgccttgatgcaacggcggcggcggtgggcttccggcgccaccggatgactcgctcaatgtacctcctcttgaaggggggctgctgctgttgggtcccatcctggttgttgtcggaggagcgaccttcagtggcgctggtgtgggtgctgaaggagcatgcttttttgcctcttttttgcctccagaattgaaacttcccagtactatctgaactggcgaagctgctacgaggagccctgcaactccaccgcccagcacacgaccgtngggaccagccaacgacacactgagccctccagttcgactgcgttgaccaccatcctncaccaagaggaatgaccccgacagtgaca

SEQ ID NO: 12509 - DNA, 524 bp, Zea mays
  Clone ID: LIB3157-007-Q1-K1-B8.R2
ggagctggatttacacctcatgttatcacagttcaagctggggaggacgtgtcatcaaagatcatgtcgttttctcagcacggaccgcgtgcagtctgtgttctctcagcaaacggtgccatatcaaatgtgacgcttcgtcagactgctacatcaggcggaactgtaacatatgagggtcggttcgagatactgtcactgtcggggtcattcctcttggtggaggatggtggtcaacgcagtcgaactggagggctcagtgtgtcgttggctggtcccgacggtcgtgtgctgggcggtggagttgcagggctcctcgtagcagcttcgccagttcagatagtactgggaagtttcaattctggaggcaaaaaagaggcaaaaaagcatgctccttcagcacccacaccagcgccactgaaggtcgctcctccgacaacaaccaggatgggacccaacagcagcagcccctcttcaagaggaggtacattgagcgagtcatccggtggcgccggaagcccacc

SEQ ID NO: 12510 - DNA, 317 bp, Zea mays
  Clone ID: LIB3157-016-Q1-K1-D12.F2
gatactgctgcttccattccattcgaatcgaaaccgaaacattagaggcttcaatacatgtgttttcaattcaaattattcaggagaacacacacctactgcctagaagtcggtgtcatccctgggaagcggttcgtgtccgccctgggccatgaagaggccgtcatagaccagcccagcgagcggcccaccgataagaggcccgacccagtagacccagtggtcggcccacaccccagccacgagcgcggggccgaaggagcgcgcggggttcatggacgcgccggagaagggcccgccggcgagcacgttggcgc

SEQ ID NO: 12511 - DNA, 317 bp, Zea mays; identical to SEQ ID NO: 12367
  Clone ID: LIB3157-016-Q1-K1-D12.R2

SEQ ID NO: 12512 - DNA, 54 bp, Zea mays
  Clone ID: LIB3158-001-Q1-K1-A1
aagaaagacactcttacgcactacctatacgttttatggtcacgcccactgtct

SEQ ID NO: 12513 - DNA, 418 bp, Zea mays
  Clone ID: LIB3158-001-Q1-K1-A10
ctaggatccccagggtgcagcaactgctccaggacttcttcaacggcaaggagctgtgcaagagacatcaaccccgatgaggctgtcgcctatggtgctgctgtccaggctgccatcctgagcggtgagggcaatgagaaggtgcaggacctgcttctgctggacgtcacccctctgtccctgggtctggagactgctggaggagttatgacagtgctgatcccgaggaacaccaccatccccaccaagaaggagcaggtattctccacctactcggacaaccagcccggtgtcctgatccaggtctacgaaggtgagaagacccggacacgcgacaacaacctgctgggcaagttcgagctctccggcatcccccctgcaccccgtggtgtgccacagatcaccgtgtgctttgaca

SEQ ID NO: 12514 - DNA, 429 bp, Zea mays
  Clone ID: LIB3158-001-Q1-K1-A11
gtgaaggccaattacaatgaagcgcagaaaggttcatgacaagctatatgcgctctgtttgggtgaggcttaggggtgactaaagtttatttcgtgtcacatcgaatgtttgaatatcgaatgtttaaatatcaattatgagtattaaatataagcttattatatttaataaatctgtctcgtttttttatttaatactcataattgatatttaaacattcgatatcattacatagactaattctcttgttcgttcactcatgcgtgatggcactgagtatgttacacgttactctcgaaagtctctccgagtcctgcgaagtgttggtgagccaatcaatcctagtgcatggagatggttctacaatactgttggggattccccgtgccctatatcagacaccttgtggcaaactgaaactggccggt

SEQ ID NO: 12515 - DNA, 438 bp, Zea mays
  Clone ID: LIB3158-001-Q1-K1-A12
acgcaagccactccgaggccaagtctagggtttgggaatctgtaggaggggagaggggagcgcgctcagggtcagggaggcgaagatgatcgaggtggtgctgaacgaccgcctggggaagaaggtgcgggtgaagtgcaacgaggacgacaccatcggcgacctcaagaagctggtggcggcgcagacggggacgcgccccgagaagatccgcatccagaagtggtacaacatctacaaggaccacatcacgctcaaggactacgagatccacgacgggatggggctcgagctctactacaactaggcgccctgaccccaaccgtgccctgatgtaaggttaatccgaattctgaagtcatgggtgcgcttccagtcacagcgtctttagctaacaagctcgcatacatataggcaacttgagtgagctatgtagta

SEQ ID NO: 12516 - DNA, 275 bp, Zea mays
  Clone ID: LIB3158-001-Q1-K1-A5
accgaattccctgctattcctctcccctcgtctgctcgtctccccctacttgagggtcggagaggaattttatagaggtccggctcatcctaattaattaagccttggagcacattgagtctgggtgccagtcccccgaattacccttcctttgcattaatatctgtggcttttttatcaattcatctaccattatcattttctctaatttctcacaacgagatcattactattcatgattcttgctcatctttcttcctcctctattgacatca

SEQ ID NO: 12517 - DNA, 104 bp, Zea mays
  Clone ID: LIB3158-001-Q1-K1-A6
gaatcccgatcgacccacgcgttcaacgaatttcttacaagcccacactcgagcttgctggaccccccctacaagatttctttaggcgaattttcaagaagccc

SEQ ID NO: 12518 - DNA, 450 bp, Zea mays
  unsure (1)..(450): unsure at all n locations; Clone ID: LIB3158-001-Q1-K1-A9
gatgaaccgaatggccgtcgacgacaagccctgctacggcggcggcgtgcggaagcaggcctgcaaggtggaggcgttccatgagcacgactaagcgtacaagggcgccgtggccgtgcagcagaagcactcctccttcaaggaggacaaggaggaggtgcgcggtgctgctgccgccgtcagaagctggcacgacgagttatacaaggaggaggaggaggagaagcacgtcgtcgacacggagtacggtgcccgctacgggggtggcgccgccgccgtgaagaagccgggctacaactacaagcagcacgaggcatacggngagaccgaaggtgcagggtacggctacngcgccggcgccggctgcgtgaagaagcaagcatgctacagctacgcgcatgangcgtgcggagagagctacngcggcgctcaccacggtggtgccggtgc

SEQ ID NO: 12519 - DNA, 441 bp, Zea mays
  Clone ID: LIB3158-001-Q1-K1-B10
tcggagcgcacacacacacaaccagatctcccccaaatccacccgtcggcacctccgcttcaagatgcagatctttgtgaaaaccctgactggcaagactatcaccctcgaggtggagtcgtctgacaccattgacaacgttaaggccaagatccaggacaaggagggcatccccccagaccagcagcggctcatctttgctggcaaacagcttgaggacgggcgcacgcttgctgactacaacatccagaaggagagcaccctccaccttgtgctccgtctcaggggaggcatgcagatctttgtgaaaaccctgaccggcaagactatcaccctcgaggtggagtcctctgacaccattgacaacgtcaaggccaagatccaggacaaggagggcatccctccagaccagcagcggctcatctttgctgggaagcagct

SEQ ID NO: 12520 - DNA, 413 bp, Zea mays
  Clone ID: LIB3158-001-Q1-K1-B11
cagttgtgcatgagcgtggaagccctgagaccttgagggatccacgtggttttgctgtcaagggctacaccagagagggtaactttgacctcgtgggtaacaacatgcctgtgtttttcatacgagatgggatgaaattccctgacatggtccacgctttcaagccgaatccaaagaccaatttgcaggagaactggagaatagtagatttcttctctcaccacccagagagcctacacatgttcaccttcctctttgacgatgttggcatcccactcaactacaggcacatggagggctttggtgtcaatacctacaccttgatcaacagggatggaaagcctcaccttgtgaaattccattggaagcctacttgtggtgtgaaatgcttgctcgacaatgaagctgtgact

SEQ ID NO: 12521 - DNA, 441 bp, Zea mays
  Clone ID: LIB3158-001-Q1-K1-B12
aaagaaagaaagcaaccatggcggcaaccgcaatgtgcccctccccctcgggcgcaataactggccacatccatgctcgtcgctcctgtgctgctgcttccttgtccctccgccgctcgggcttcctggggcgcgtcgtgctggccgcggtgccggtggccgtggacgccacccggcgccgccgcgtctccgtgtcggtgcggatggcctgggacggtccgctctcgtcggtgcgcctcatcatgcagagcaggaacgcgaagctgagcgagaagctcaaggagcacatcgaggacaaggtgggtcgggcggtgtccaagcactgccacctggtccgggaggtagacgtgcgcctctccgcgcgcggcggcgagctcggccggggccccaagacgtcgcgctgcgagatcaccctcttcaccaagcgccatggcgtcctgc

SEQ ID NO: 12522 - DNA, 413 bp, Zea mays
  Clone ID: LIB3158-001-Q1-K1-B9
tctgcaagtctcgctacgtagcagtgcaataaaaggagcagccgcgggggcgagcagcaccatggccctctcctccacggccttcgccggcaaggccgtgaacgtgccgtcgtcgtccgccttcggcgaggcccgcgtgacgatgcgcaagacggcggcgaaggccaagccagcggcggcgtccgggagcccgtggtacggccccgaccgcgtgctgtacctgggcccactgtccggcgagccgccgagctacctgacgggcgagttcccgggcgactacggctgggacaccgcggtgctgtcggcggacccggagacgttcgccaagaaccgggagctggaggtgatccactcccgctgggccatgcttggcgccgctcgctgcgtctttccggagcttcttgcccgcaacg

SEQ ID NO: 12523 - DNA, 410 bp, Zea mays
  unsure (1)..(410): unsure at all n locations; Clone ID: LIB3158-001-Q1-K1-C10
ccgcttcccggacagcttctgggcgggccgcgtggtggcgcgcacgggatgcagctccgggcattcccggtgcgagacggggagcgcagcgccggcgacggtggtgcagctggtggtgcacgcggaggggcaggacctggcgtcgtacagcgtgagcctggtggacgggttcaacgtgcccgccgtggtgagcccgcaggcggtgggcggcgggcagtgcccggccctggggtgcgcggcggacctcaacgccgggtgcccgccctcgcagcgcgtgctgggggccgggggcggcgtggtggcntgcaagggccccgcgggctacttcaaggagcggtgcccgctgacgcgcaccacgcccaccgacgtggagcccgtgccgcagcggtgcttggcgcccggcgagctca

SEQ ID NO: 12524 - DNA, 408 bp, Zea mays
  Clone ID: LIB3158-001-Q1-K1-C11
cgatcatactggtggaaacttggaattgaaggcaaaatatggtgcaaaggtgattggttctgagaaggataaggacagaatacctggcattgacatcactcttaaggagggtgacacatggatgttcgctggccatcaagttcttgtactggaaactcctgggcatacaacaggtcatgtgtgctattatttcgctggttctggagctatatttacgggtgacaccttgttcaatctatcatgcggaaagctttttgaagggactccacagcagatgtattcctcacttcagaaaattacagctctacctgatgatacaaaagtatactgtgggcatgaatataccttgagtaatgcaaagtttgccttgagtgtaaaaccgggaaataaagcattgcaggaatatgc

SEQ ID NO: 12525 - DNA, 432 bp, Zea mays
  Clone ID: LIB3158-001-Q1-K1-C12
ctcttggcctccggctcagagcaattcccggagatgtacagggcgtatcaatacctcaggctgaagaactgggttgtaaggtcgggactgcagtacggggcagactttgttgcttaccgtcatcatccggcacttgtgcactcggagttcacggtggttgtggctccagaagggaaagcattcggcaccaggtgtgcccgcatggaggtctggtctgaagtactctgtgcgcttcgggcctctggaagtgtggccaagacgttacttgttcttaccatcagcaccaagagctgcgagctgggatccttggattgtttggagcagatgattgttcatgagaggacgatcacgagatggataccacagcagtgcagtgagcaacaagacaaaccatgtagagaagaaaccaacagggatggacaaagacaaaaa

SEQ ID NO: 12526 - DNA, 432 bp, Zea mays
  Clone ID: LIB3158-001-Q1-K1-C5
cggacgcgtgggctcggatctgacacgagactagttaccatctaataccaactggggaacggggaagttaccatgtaatcccaactcctccttcaccgcatctcgttagactggtatccggccgaccaccccaggccggcttagatcaaagaagatggcagctgtcaacacattcctcttcacctcggagtctgtgaacgagggacaccctgacaagctctgtgaccaggtctcagatgccgttcttgacgcttgccttgctgaggaccctgacagcaaggttgcttgtgagacctgcaccaagaccaacatgggcatggtctttggtgagatcaccaccaaggccaatgttgactactagaagattgtcagggagacctgccgcaacattggattcgtgtcaaacgatgttgggcttgacgcctaccactg

SEQ ID NO: 12527 - DNA, 312 bp, Zea mays
  Clone ID: LIB3158-001-Q1-K1-C6
cggacgcgtggtctcatatctgacacaagactagttaccatttaataccaactggggatcggagaatgtaccatctaatcccagcttctccttcaccgcatctcgttacactgctattctgccaaccacccttgcccgtcttaaatcaaagaaaatggcaactgacaacacatttctcttcacctgggattcttcgaacgagggacacccagacaagctctgttaccagttcttagatgccgttattgacgcttgccttgctgaagaccctgacagcaaagatgcttgtgagacctgcaccaatacctacat

SEQ ID NO: 12528 - DNA, 439 bp, Zea mays
  Clone ID: LIB3158-001-Q1-K1-C9
cggacgcgtgggttcggcagggtgttcgggaagtccaaggagcagagccaggcgaccgcgctggcctcgctcgacaagctcaacgagacacttgaaatgttggaaaagaaggaaaacttgctagtgaaaaaggccaatcttgaggtcgagaaggctaagaattttaccaaagccaagaataaaagagctgcaatacagtgcttgaagaggaaaagactatacgagcaacagattgagcagcttggaaatttccagcttaggatacatgatcagatgattatgctggaagcagcaaaagctacaacagagaccgtggatgcattgagaactggagcatcagcaatgaaagctatgcataagtcaacaaatattgatgatgttgataaaaccatggatgaaattaatgacaatatggagaacatgagacaaattcaggatc

SEQ ID NO: 12529 - DNA, 432 bp, Zea mays
  Clone ID: LIB3158-001-Q1-K1-D1
cccatccgcacctctctccatctccctgctcctccgccttcttcttgatccagccaagccagggatcggcatgtcggactcggaggagcaccacttcgaatcgaaggccgacgccggagcgtccaagacctacccgcagcaggctggcaccgtccgtaagaacggcttcatcgtcatcaagaaccgcccctgcaaggttgtggaggtttctacctcaaagactggtaagcatggtcatgccaaatgccacttttgtgccatagatatattcaacgggaaaaagctcgaagaaattggttcttcgcacacaactgtgatattccgcatgtgaaccggactgagtatcagctgattgatatatcaatagatggatttgtgagccttcttactttataatggaacacttaagatgatcttagacttccaactggt

SEQ ID NO: 12530 - DNA, 430 bp, Zea mays
  unsure (1)..(430): unsure at all n locations; Clone ID: LIB3158-001-Q1-K1-D10
cggacgcgtgggctccgctcggcagtcggcactggaaggacagcatgtcggtctcggcgtcgtcaccggcggcggcggcgggcgatgagaagcaggaggcggcgcccgtcaggcgctgcaagggcgtcaacgacctcgacaaggtcgttctccgcgaggtccggggcagctccgcagaggtgtacttgtatggtgggcatgtgacatcatggaaagatgagcatggagatgaattactttttgttagcaataaggctattttcaagcctccaaaagctatacgtggaggaataccaatatgctntccgcagttctccaactttgggaatctggaaccacatggatttgcaaggaataggacatggagtgttgatgatgatcctccaccatttccagtgccaacctccaatagcgcttatattgacttgat

SEQ ID NO: 12531 - DNA, 336 bp, Zea mays
  Clone ID: LIB3158-001-Q1-K1-D11
cagacgagagtggaagcggggcacagacagagaagccaatggcgctgtccgtctccctcgcgcgccccgcgcccctcgccgtttccgccggcgcaggagccaggaagctacccgcagccagcctcgcattcccggcgaaatccttcttcggcgcgccgctggccgccaccgcggcctccgtcgcgtcgccgctcccgcgcaagccggccaccttcaccacctcgctcgaggtcgtcgcggcggggaagaagggctacaagatgaagacgcacaaggcgtcggcgaagcggttccgggtgacggggaggggcaagatcgtgcggcggtgcgccggga

SEQ ID NO: 12532 - DNA, 396 bp, Zea mays
  Clone ID: LIB3158-001-Q1-K1-D12
aagaaaggagggtgctctgccggcggcggagcggagatgtccgagaggaggcgcggcgccggcgccggcaccggcacccgcaaggatgaggtggtgacccgcgagtacaccatcaacctccacaagcgcctccacggatgcaccttcaagaagaaggcaccgaatgccatcaaggagatcaggaagttcgcccagaagaccatgggtaccaccgatgtccggatcgatgtgaagctcaacaagcacgtctggagcagcggtatccggagtgtgccgaggcgagtccgtgtcaggattgcccgcaagaggaacgacgaggaacacgccaaggaggggcagtactctctggtcacagtagctgagatccctccggagggtctcaaaggtttgggaact

SEQ ID NO: 12533 - DNA, 358 bp, Zea mays
  Clone ID: LIB3158-001-Q1-K1-D2
cccatccgcacctctcttcatctccctgctccttcgccttcttcttgatccagccaatccagggatcgcggtgtcggactcggaggagcaccacttctaatcgaaggccgacgcctgagcgttcaagacctatccgcatcatgctggcaccgtcctgaagaacggcttcatcgtcatcaataaccgcccctgcaaggttgaggaggtttctacctcaaagactggtaagcatggtcatgccaaatgccactttgtcgccatatatatatttaatgtgaaaaaactctaatattttttttcctttttctcacaacttttatattttctattttaacccgtcttgagtttcattttgatt

SEQ ID NO: 12534 - DNA, 427 bp, Zea mays
  Clone ID: LIB3158-001-Q1-K1-D5
gtcccgtctgccggacgagcagggcccaagggcccaccttaccatggctaccgcgactgcgggccccgtccccgccggcggtcacccgtaccgtcgtgcccgcactcgctgtggcccaccgcgcctgcaccgcctgcgctttccgggcgcatcagcagcacgcttcgtcttccctgcccgccccgtcgtccatgctgccaccgctgccagatggaggcggtcggctggaggcggagctggtgtgcgcgttcaacgagctcacggagcggatgggggaggacctggcgacgtactactcgtcgagcctgctcttccgtgtgctgaagctggcgctccccgacctccgcgacgtggagggcgggcggacactctcacgcgcgctcggcggtctcgtgaccctcgctgacctccagatggatgctgaaat

SEQ ID NO: 12535 - DNA, 223 bp, Zea mays
  Clone ID: LIB3158-001-Q1-K1-D6
gtcctgtctatctaactagcaagacccaaggtcccaccttaccatggctaccgtgactgccggcgacgtccccaccggctgtcacccttaccgtcgttcccgcactcgctgtagctcaccgtacctgcactgtctgctctttcctatcgcatcagcatcacgctttttcttcccttccctacccgtctgtcatgctgccaccgctgtcatatggatgctttct

SEQ ID NO: 12536 - DNA, 439 bp, Zea mays
  Clone ID: LIB3158-001-Q1-K1-D9
ggaaaaggaatacagacacaaaaacggagtgcattggctcgtcaacgtagccaggacatcacgtcagaacagaaaacgcttaccatcccctcaactaaggatcaaatgaatggttcaatgcacgaaaatgatgactattctgctcatgacattagacgttctgttcgtgaagctgctttatctaagccattgaagaatacagagagaccacaagataaaaatagtgatgatggttcggaacacttctttattccgctgtcaattagtgctgcgaagaaggaaatggattcggtggcaaatcgatgtaaccaaagattaggtttgtcacctcagatgaagttcccaaagagcacaagctacaatgcagataccccaatcaacaaaagtccaattctgttaagtgaactcaatggacatgattcgatcagtgccatgagtt

SEQ ID NO: 12537 - DNA, 450 bp, Zea mays
  Clone ID: LIB3158-001-Q1-K1-E1
gtgcagatcgccatctctgcttgcaacaccgtcggtgcatgggacaatgccaagaattacagcgaggcgggtgccagcgagcacgccaggaccctcggtcccaagggatccgactgccacaaggccgctgtgatcggagacaccattggtgaccctctgaaggacacctccggcccgtacctcaacatcctcatcaagctcatggccgtggagtccctcgtgtttgcccccttctttgccacccatggtggcctgctcttcaagtacctgttaaagggacaacaccaagcacacagtagaagtatacgatcttccgaccgaccgtggacaatattgaataacttctgccaaattgccaattccttttgtgtactgtgcgctagccgacgtctaacttcactgatatattttttttttaggattgttgttgctgttctaattcaaattttg

SEQ ID NO: 12538 - DNA, 437 bp, Zea mays
  Clone ID: LIB3158-001-Q1-K1-E10
cgacgatatagcccatgagttcgagggctttatcaggaggcacggacgggcatcggctctgcgccgggtgctcgacagcatccaggacgaccttagagccgacagggaaagggacaactccgtcctcatcaacgccttcaaccaagccctcgcctcgcaaggctcggcgctgctggatgccgacgaggcccgagacggccgaggtggatccagcaacagcaacgacgatggcttgctggaagagtatgatgtcctgggggctgggctgagcctactgcttcagcatctggccgagaacgacccgaaccggtacggcacccctccggcgaagagagaggcggtcgaagctctgcccactgtccagatagcggaagccgtcagctgttcggtctgcctcgaccatcttgagcttgggtccccggcgaaacaaatgccct

SEQ ID NO: 12539 - DNA, 447 bp, Zea mays
  Clone ID: LIB3158-001-Q1-K1-E11
catgaacccaccaaaggctggggatgaatccttcgaatccttcaggttagagagggatggtggcctttcatcgttgggtcgccgtgcaaaggctttggaagaagcattcaacagtttagaaggtattacatgcaataaagccgaaggcgcgatgtatctgttcccacgccttcacttaccccggaaggcgattggagctgcccaagcagccggcactgccccagatgcttactacgctaaacgcctgctagaggccactgggatcgtcttcgtccctggttctggttttggacaggtccccggaacatggcacatcagatccacgatactgccgcaggaggacaaaatacctgggatagtatctaggttcaaggagtttcacgacaagttcatggatgaattccgtgattattgagtgtccatctcagttcagtcattgcatgaatt

SEQ ID NO: 12540 - DNA, 440 bp, Zea mays
  Clone ID: LIB3158-001-Q1-K1-E12
cggacgcgtgggttccttccggccgcccattccgatccgatccccggccggccacctaccaggggtcagccccatcaaactctgaggcagcgtcagccatcaggcctccctcgtcgatctccccgccgccgccgctgctaataccataatggaggccggcgccgccgctgctgccactgccatctaccctctgcaccgatgcaaaaccatacacctggtgaggcatgcccaaggtgtccacaacgtggaaggcgacacggatcacagcgcctacatgaaacccgacttcttcgacgcgcgcatcactcccttgggctggaaccaggttgacctcctgcgagagcatgtgaaggaatctgggcttgcggaaaagattgagctggttatttgttctcctttgtcgaggaccatgcagactgcagtgggagtttttggtggcg

SEQ ID NO: 12541 - DNA, 176 bp, Zea mays
  Clone ID: LIB3158-001-Q1-K1-E2
gtgcatatagccatctttgttttcaacaccgttcggtgcatgtgacaatgccaagaattacagggaggctgatgccagccatcacgccatgaccctcggtcccaatggttccgactgccacaaggccgcattgatcttagacaccattgttgaccctctgaaggacacctccggcc

SEQ ID NO: 12542 - DNA, 311 bp, Zea mays
  Clone ID: LIB3158-001-Q1-K1-E5
cgaagtcgaaaggctactccaccttcctccatacacattcttcttcatccatgcgcatgcggaagatggatctcctcgtaccggacgagcttcctcggacccaccttccccatctccatgtaccttgcggacagcgcttctaagacctactgatctactcaatccaccgaacaaagctgcttacctagatttagcttctcacgcatatgatccagctgaagctgatccacttaaattcttgcattcttcttctgaaaatgatgattattctcaatggataactgctagtcaaaggagccttcttgaagtta

SEQ ID NO: 12543 - DNA, 388 bp, Zea mays
  Clone ID: LIB3158-001-Q1-K1-E9
cataccaccgcgcctagactgtgcctgcatccctcatcgctcggctcgatcgctgatcagttgggcggccggcgacgtgtgctagctcacgacgacgacatgggctcggcggtgaagatcgggacgtggggcggcgacggcgggagcccctgcgacatcacggtggcgccgcggcggctggagagcatcaccatccgctggggcaaggtcctcgactggatcgccttctcctaccgggaccagagcggggagctgcacaccgccggcccctggggcggcaacggcaaaggagagggcacggagacgatcacactggaggcctcggagtatgtaacgggagtggcctggtccgtgggcccgttcaagttcaagaacgtggagcgctgca

SEQ ID NO: 12544 - DNA, 370 bp, Zea mays
  Clone ID: LIB3158-001-Q1-K1-F1
cagcgaagtgcgagcgacccacgtccacacgacacgaaccaccaccaccaaccagcagccgcgccacgcgggcagcgcatagcgatggcgtcgctcaccatgatggcgtccttcgccgccgtggcggtggccgcgccctcgcgccgcggcaccttcgccgtggtcaggtccgccaaggtcgaccgctgccaggagcccgccacgctagcagcaaccgaggccaggcccgccggcgacggacgccgtgccgtcatgctcgcggctgctgcggcggccgtggcagccatcggcggcgccggcgccgccatggcgggccccaagaacgggacccccgaggccaagaagaagtacgcggccatttgcgtaacca

SEQ ID NO: 12545 - DNA, 435 bp, Zea mays
  Clone ID: LIB3158-001-Q1-K1-F11
ctcgaggaaggattgagaatgtctacatcgagaaccaatgtcagtggcacacgccgccagtctattggtggtgctgatggtttgtctaaggccaacggcttcctgtcaaaacgcccatcattccagatgagatcaccagtgtctaccacaacgactttagtgaaccatgcaaaaggagcgtccaagtcgtttgacggaggctgtagatcacttgaacgctataagggccatgtaaacgggaatggtatgaacgtatctaccgattccagtgaagataaagattcaaacaactcagatgagaagtgtaacgagtttgcatctgctgagtcggaggactcggtgtcaggtgttctatatgatatgttgcaaaaggaggtcatttctctaaggaaggcgtgccacgaaaaggatcagagcctgaaagacaaggacgac

SEQ ID NO: 12546 - DNA, 385 bp, Zea mays
  Clone ID: LIB3158-001-Q1-K1-F12
cggacgcgtgggctttttggtaaatctgcctatgcatgccgtgattcttcttgtagtgatgggactactgaaggactaattaaggtaagagatgcatacccttttggtgtggaccctgtttggcatggtagccgcagcgagctgccgtttctcaattcactgaagatgaagatgtccattcttcttggagttgcacaaatgaaccttgggattgtgatcagctacttcaatgcaaaattttttaggaacagtcttaatgtgtggtaccagttcattccccagctgatcttcttgaacagcttatttggttacctgtccttgcttattattattaagtggggcacggggtcaaaagcagatctataccatgttatgatctacatgt

SEQ ID NO: 12547 - DNA, 291 bp, Zea mays
  Clone ID: LIB3158-001-Q1-K1-F2
caacgaagttcgagcgacccacgttcacactacacgaaccaccaccaccaaccagcagctcgggccacgcgaccagctcatagcgatggcgtcgctcaccatgattgcgtccttcgccgccgtggcggttgccgttccctctcacctggtcaccttcgccgtggtcaggtcctccaatgtcgaccgctgccagtagcccgccacgctagcatcaacctaggccaggcccgccgtcgactgacgcctcgccatcatgctcgcggctgttgctgcagccgtggcatccatctg

SEQ ID NO: 12548 - DNA, 322 bp, Zea mays
  Clone ID: LIB3158-001-Q1-K1-F5
cggagactttcgccaagaaccgcgagctggatgtgatccactgccgctgggccatgctgggggcgctcgggtgcgtgttcccggagctgctcgcccgcaacggcgtcaagttcggcgaggccgtgtggttcaaggccgggtcccagatctttagcgagggcgggcttgactacctcggcaacccgagcctgatccacgcgcagagcattctggccatctgggcgtgccaagtgggtgctcatgggcgccgtcgaggggtaccgcatcgtcggtggcccgctcggtgaggtggtctaccctctttaccctggcgggtagtttt

SEQ ID NO: 12549 - DNA, 251 bp, Zea mays
  Clone ID: LIB3158-001-Q1-K1-F6
cggagactttcgccaagaaccgcgagctggtggtgatccactgccgctgggccatgctggtgtcgctcgtatgcgtgttcccggagctgctctcccgcaacggcgtcaagttcggcgaggccgtgtggttcaaggccgggtcccagatcttcatctagggctggcttgactaccttggcaacccgagcctgatccacgcgcagagcattctgtccatttgggcgtgccatgtggagctcatgggcgccttc

SEQ ID NO: 12550 - DNA, 442 bp, Zea mays
  Clone ID: LIB3158-001-Q1-K1-F9
agctctctcacttgctgcctcgtcgtgcgtcatcagatcctcggtcggagagcagagcgccggtggacgaagagatctacgtcccctgcgacgagcgcgtcggcttcgccagcatccccgcgccgacgcttccgccgctgggcgggcacttcaggtccctcgccgatgtctaccgcctcttcggcctcgacgacctcggccggctcccggaggccaaggcggtcatcaacagcggcgcgccgttccccgtcgtgcctcaggtcatttcagtgaacccgacacattggcggaaggacgaagagttcgcgcggcagatgatcgccggggcgaacccggtgtgcatcaagcgcgtcaccaagttcccgctggcgagcgagcttgaccgcggggtgttcggcgaccaggacagcaagataaccaaggaccatgtcgagaagaacat

SEQ ID NO: 12551 - DNA, 227 bp, Zea mays
  Clone ID: LIB3158-001-Q1-K1-G1
gaccacgcgtccggagaacttataaacactgttagctccctagacatttaatgatgctttaatatacgaggattgacacttactttctatttaccaacccatcctttgagctcgaaatatcctttcatgatgattggtttacctttttgggttggaaatcaccgaacagtatatttttaaaacaaattaccgtatgcaccatgatgcttgcgccttttgattgctct

SEQ ID NO: 12552 - DNA, 340 bp, Zea mays
  unsure (1)..(340): unsure at all n locations; Clone ID: LIB3158-001-Q1-K1-G10
ccctggtgaagctgatgaagcgcctgatactgtcactggagacattgtagtcgtcctccaggagaaggatcactccaaattcaaaagaaagggtgaagatctcttctatgagcacaccttgtctctgaccgaagcactatgtgggttccaatttgttcttacacatctggacaacaggcagcttctcatcaaatcagaccctggtgaagttgttaaacctgaccaattcaaggcgattaacgatgaggggatgccaatttaccagaggcctttcatgaangggaagctgtacatccatttcacgggtgagttccccgactcgctggcaccagagcagtgc

SEQ ID NO: 12553 - DNA, 440 bp, Zea mays
  Clone ID: LIB3158-001-Q1-K1-G11
ggcttttcaaaagaacaaagtgaaaacttgttaacaaagagtgttcagattgcactggaagcgggtgagatgttcttgaaggaacatttggagaaatccactcctatacagcatcctattctggttgcagcagctctagggagttatggggcttatcttgctgatggctctgagtacagtggggattatggtgaagctggtacgaaagagttcctgaaggactttcatcggcggaggcttcaggttcttgctgaagcaggcccggatttgattgcttttgaaacgatccccaacaaattggaagctcaagcatatgttgaactccttgaggaatgtaacattaatatcccttcatggctttccttcaactcaaaaaatggagtgcatgttgtgagtggtgattcgttaattgaatgcgctactattgctgacaagtgtgc

SEQ ID NO: 12554 - DNA, 202 bp, Zea mays
  unsure (1)..(202): unsure at all n locations; Clone ID: LIB3158-001-Q1-K1-G12
atttattcttcaatcgaagtagtacatgatcacttgatcaggattgntggtgtactcgatggcggggagatactctccccgagcgattacatcttaaacactcttatacatcattccatcctgctcggtccgttgctacctagacatggctcttttcttgattttgactccattgaccgaccaccttgtagagggggtgctt

SEQ ID NO: 12555 - DNA, 144 bp, Zea mays
  Clone ID: LIB3158-001-Q1-K1-G5
aagaaaatcactatcacgaactttaacttgcttatgaataacacacaccgtaacggaatttcgcagttttcaaacttcgataatgttactcatttattcatctacaactacaaaccacttactccttatcggtttggcattaat

SEQ ID NO: 12556 - DNA, 84 bp, Zea mays
  Clone ID: LIB3158-001-Q1-K1-G6
taattataccaccatatttatctataactttcttattacctccacacactttagggcatattcgtgagtataaaacctacaata

SEQ ID NO: 12557 - DNA, 190 bp, Zea mays
  Clone ID: LIB3158-001-Q1-K1-G9
gcttttaataattggcgtcatctaagccatgcaagcatgtgtgctttataagtaatcatcttgcgctacgctcgtctgtttatttgtatacgtaagtactgtacattgcatgcacatgcactctcatcacctgtaatgttttacttgaaatttattcaaaaataaataaaggctgtctttgccacttgtt

SEQ ID NO: 12558 - DNA, 58 bp, Zea mays
  Clone ID: LIB3158-001-Q1-K1-H1
ctcttttttatcaacctcttacatcctcattcttaaattatctacactactaaatact

SEQ ID NO: 12559 - DNA, 387 bp, Zea mays
  Clone ID: LIB3158-001-Q1-K1-H10
gcagaaagcacttccagatctcctcaaggaatatgacatgccagcagggctcttcccacggggcacgactaactatgagttcaatgaagagacaaagaagctgacagtgtacatcccgtcagcctgtgatgttggttacaaggactcgtcagtgctgcggttcttcacctgtgtgaccggctaccttgaaaaggggaagttttccgacatcgagggcatgaagaccaaagtgctggtctggaccaaggtgactgccatcaagaccgagggcccaaaggtccatttcactgcaggcgtgaagaagactcggagccgtgatgcctatgaggtcgtcagagatggtatcaccatagacacgttctagagcatataccctgcatgaaaaat

SEQ ID NO: 12560 - DNA, 431 bp, Zea mays
  unsure (1)..(431): unsure at all n locations; Clone ID: LIB3158-001-Q1-K1-H11
gcacggcaggatccgccgacgccggagaagtacgagcaggcgggtgcgcccaggcacggccggtccggctctctgaaggcgagtgcctctctctctccctgtgtgttgcaaggtttcttcgtgcatcgtgatggtggtgacgatgggtgtggtgtggtgcggtctgtgcaggcgaactcttcgaggacaccgggcggcgagaggctgggcagggagaggtcggaatcctgcgggaggaactggctggaccgctgggtggaggagaggtacatggacgacgagaagaacgccaagattctcgaggtggacaacggcaagccacggcgccggtatgcttccaagaggcgcggcggcggcggcggaaaccaccaccaccaccaccagtcgncgtgctcgacgacgatggggtccgagcagaaacagccgagcta

SEQ ID NO: 12561 - DNA, 265 bp, Zea mays
  unsure (1)..(265): unsure at all n locations; Clone ID: LIB3158-001-Q1-K1-H12
cgccgtggcggtgcggtaccacctctacgtttcgtacgcgtgcccctgggcgtccccgtgccgcncctttctcaagctcaagggcctcnaccacaccatcggcgtcacggccgtgaagcctatcttcgagcggaccaaggagagcgacgagcatctgggctgggtgttccccgccaccgtctacgaggagcccggcgccgatcccgaccctttgaacagcaccccgagcgtgagggagctatactagatcgccagcttcaactac

SEQ ID NO: 12562 - DNA, 173 bp, Zea mays
  Clone ID: LIB3158-001-Q1-K1-H4
actcttttcatcaacctcttacatcctacatttgaaatcatctataatactaaatacgttaggattcattgccaactttcataagtcaacattaatacatatttaaacctaacacttaaaaactacattatattaagactttctttaatcctatcatatccatattctcaaca

SEQ ID NO: 12563 - DNA, 269 bp, Zea mays
  Clone ID: LIB3158-001-Q1-K1-H5
gggacgcgtcggttcctatctttctatcaagtacatagagctggaagttaactaggtagcgggacatgccacatcaaaaacacaatactcacttaggaggacataatacttgtgcaagtatcgatagttaatgcaaccgacaacaaccacatgcttgaatcccataattatagagtgtccatcttagacaagacatcgcatgaattctgccatgagggcatactgatattttgtcgcgaaacgcatctattgctaccatgctatacaca

SEQ ID NO: 12564 - DNA, 384 bp, Zea mays
  Clone ID: LIB3158-001-Q1-K1-H9
caggcatctatgggatggacttctacgtcgtgcttgagcgtgctggctaccgcgtcgcgcgcggcaggaggtgcaagtcccgtgttgggattcagcatagggtgaccaaggaggactccatgaagtggttccaggtcaagtatgaaggtgtcatcctcaacaaggctcaggccagcacgatttaaacctcacctgtggggcaaaacagctctcgcttcatctccatgtgaacgcaagatcaccttccaaggtttttgtttgagttgtatcctctggcctgactttttagtctactagcagagctataatcactatatgaattattttttgtgcccttaccatactcttgtgttgcttgagaatatgttattagtctgtcctagc

SEQ ID NO: 12565 - DNA, 347 bp, Zea mays
  Clone ID: LIB3158-003-Q1-K1-A1
gagcccgctcccgtaggtgccgccgccaaggtccccaaggacaggctccgccaccgccgccaccaccgcgagaagagcggggaggtcgcctacggcgccgcccatcacgacctgaagcccgcggaagcgaagcctgccgattacagcgatccgagctacgatccgtacgtgaggagcaagtatgccgccgagagtgggtacaggtattgacgtgtcgctagctgtcctgtcctctcctgccgggggaaacagcggaatgaaaacctttcgccggcgtctgcctggcaatgttgtaagtgtgaagctatacagcctccacaagcgcaaagcgaggcgcaaacaaagct

SEQ ID NO: 12566 - DNA, 419 bp, Zea mays
  unsure (1)..(419): unsure at all n locations; Clone ID: LIB3158-003-Q1-K1-A10
cctggtattccggagaatgagctgcttgtcccactgaaggctgctctcctagatagggggaaagaaaggaaggaagcatggattanttgggtacagacttatattgaagagctggtggagagcggcgttcctgatgaagaaaggaaagccgcgatgaactctgttaatccaaagtatattctccgcaactatctctgccagtctgctatcgacgcagctgagcaaggcgattacgaggaggttcggcgggtgcttanggtaatgcagaatccgtatgacgagcagctcggaatggagaagtatgcacggtttgcaccagcctgngcatacagacctgagtgtgatgctgcctgctctcggaccccatgatcaaacgtgacattacaaaatgctgggctatagcttctctgatagggtca

SEQ ID NO: 12567 - DNA, 160 bp, Zea mays
  Clone ID: LIB3158-003-Q1-K1-A12
tcggtaatgccaactttcttaacatacatgcctcaccgacatagcgcgggttctatgacaagaggggtgccattcatagaaatgataggaggttcgccatggaaggtgatgccttacgcttatagccaccgctacatccctcccacctagctgagttcca

SEQ ID NO: 12568 - DNA, 336 bp, Zea mays
  unsure (1)..(336): unsure at all n locations; Clone ID: LIB3158-003-Q1-K1-A5
ccgtccgcggacgcgtggaacccaccaagctcaggccccaagccttattgccaccgggccgaacgagagggccaacccggcggaccaccgtccacttaaggaggaggaggccgcggcggccgccaaggataaggacaccggcgcccaagtcgggcccatcgtgaagctggaggaggtcgccgntaccactggagaggaggacgaggacgcgcctctggacatgaaggcgaagctctaccggttcgacaaggaggggaaccagtggaaagagcgcggcacaggcactgtgaagctgctcaagcacaaagacaccgccaaggtccgcctcgtcatgcg

SEQ ID NO: 12569 - DNA, 364 bp, Zea mays
  unsure (1)..(364): unsure at all n locations; Clone ID: LIB3158-003-Q1-K1-A6
caccgccggtaatgcgaactgacagaccatacatgcttaaccgcaataacaccggaggccatgacaagaggggtgccatgcaaagaaatgagaggaggtgcgccatggaaggtgatgcctcaggcttcgagccaccgctacatccctcccacctagctgagttccatacagtagaggaacttgtgggcagaaggaagtatagggagcggagaccatatcttcattcaacggtgagtgacgaagacgagatgctcctctaccgcacggaggatgacantgagtttgctgaanngaggtgctgtccacgagagcacaacggcggcttcaggaaacaggatgggcacaaacaggcacgaggggaaca

SEQ ID NO: 12570 - DNA, 378 bp, Zea mays
  unsure (1)..(378): unsure at all n locations; Clone ID: LIB3158-003-Q1-K1-A8
ctcggcaactgtctgaataatttctgtttctaatgatggaactgtttttcagtaacaaagtgatatgattacaacaattcatctttgggagaatttccctgcaaaccttgttccagttcttacaagactgctatgttactggctatgataatcaggaagataccttgctctgtcgagccttgagcggagagattgatgtgctgcgagctcaagtaaatgtttcatgttgtatggttctgaactcgtgcgtgatgttattcgtacctgctataatttccagtgagttatgtagactccncncactttgccnncnngnncnnacangagaagtacctngcccaactgcttgcngagaggcagaagcttggaccggtcgtc

SEQ ID NO: 12571 - DNA, 316 bp, Zea mays
  Clone ID: LIB3158-003-Q1-K1-A9
ctcgcaaactgactgaataatttgtgcttctaatgatggaactgtttttgactaagagggtgatattattacaacaattcatctttgggagaatttccttgcaaaccttggtccaatttttacaagactgttatgttactggatatgataattaggacgataccttgctctgaccaactctatccggatagattgatgtgctactagctcaaataaaagtttgatgttcgtatgggtatgacactcgtggcgatgttaatctcaacctgctatcatatccagtgagttatgtattctgatacaagatcaccaatga

SEQ ID NO: 12572 - DNA, 310 bp, Zea mays
  unsure (1)..(310): unsure at all n locations; Clone ID: LIB3158-003-Q1-K1-B1
ctcgacgaaggaccgaccggccaggtggttgcacaaaaccgccatggctttcgcgcccaaaacgtcctcctcctcctcgctgtcctcggcgttgcaggcagctcagtcgccgccgctgctcctgaggcggatgtcgtcgaccgcaacaccgagacggaggtccgacgcggccgtcgtcgtccctagagctgcggcggctgctgtcacggttcccgccgccccgccgaggcgccggcgccggcgccggtgccgncaaagcaagcggcggcacccgccgagaggaggagccgtccggtgtcggacaccatgg

SEQ ID NO: 12573 - DNA, 388 bp, Zea mays
  Clone ID: LIB3158-003-Q1-K1-B11
gttctttctttcacagagagttacatatatcagttagatgcttcaaatgaagactgtttgcatgtagtcccagatgacaacacttcaaaagtgttgggaaagaaagaagaatctctcaatgagacatccttgtctcaaatgattgaaccccttgaagggcttcttcagtgccaaggattaatgacagaccgattgcgaactgaactcaaatcaggcattcagtattggtctctagagaggaagctctgccaagcattactaagaaatgagaagatctcgattgaagatgttatgatggcaatccatctgaaatcatttgactatcgagttcttaacctgttgatgtttcaacttactggtcagcgtgtcaatgaattgcatatggact

SEQ ID NO: 12574 - DNA, 243 bp, Zea mays
  Clone ID: LIB3158-003-Q1-K1-B2
gaagaatgttgctgtcaaggatttaaacctgggtttgggggcttcaacttcaaaggtgaaccttgccaaggaggttgccactttaacttccaaggtattaataataaacaaccttgggcaaatgggcaccggttttccccttgggttgaattgccaaacttccaaaatggttgtaaagttggttaacttaataacaaaaaccaacagggcttttgccaaggacttgaaaaaggacccaaagtt

SEQ ID NO: 12575 - DNA, 371 bp, Zea mays
  Clone ID: LIB3158-003-Q1-K1-B3
cggacgcgtgggtttttatggctctcgatcctgtaaattaaaatgggattaatatctggtctgtgggagatgctctacctaaggaatcctttggctttaatgcttccttccaatcccagccaaaatgtcttcggggatacaatctgcggttcgcgccgttgtcagtgcaggacaaggccgaagctagtcctgaccagaagcaggagcgtagcaccaagagagatgaatctggcgatcaagaatccgaagctgtcggcaatgcggtgccatgaaagggtgcttgcaaatatgtacaaaacataataacatgtgtacgtattgtgaatgagtttgtgtggtgcttatagatgtttatgtgatgtggatctatc

SEQ ID NO: 12576 - DNA, 400 bp, Zea mays
  unsure (1)..(400): unsure at all n locations; Clone ID: LIB3158-003-Q1-K1-B4
cggacgcgtggntttttatagctctcgatactgtaaatttagataggatttatatctaggctgggggagatgctctaacttaggaatccttttgctttcatgcctacttcccatcccagccaaaatgtcttcggagatacaatctgcggttcgtgacgtcgtcagtgcaagacaaggccgaagctagccctgaccagaagcaggagcgtagcaccaagaaagatgaatctggcgatcaagaatccgaagctgtcggcaatgcggtgccatgaaagggtgtttgcaaatatgtacaaaacataataacatgtgtaggttttgtgaatgattttgttgtggtgcttattgatggattatgtgatgtggatctatcattgtgcantncttnganaaaaaagac

SEQ ID NO: 12577 - DNA, 299 bp, Zea mays
  Clone ID: LIB3158-003-Q1-K1-B5
gcgtatgtttacccagcttgacgaggtagccacacgtctacagtcggcatgttccatggcgctacatcgacccgcgcccatgtagctacacctgcatgccctcctacaagcggctattagcaacagggatgccacgcttacaccaactggaatggctcctgctcttccaccaccgcttactacgcggtaggttcagtcaaggaaacgaagacaatcgctgatgaatgacatgacaacaactggtgatgccaacgactcgaaacccgctcaatggccctgttttgtagcgactgactaca

SEQ ID NO: 12578 - DNA, 301 bp, Zea mays
  unsure (1)..(301): unsure at all n locations; Clone ID: LIB3158-003-Q1-K1-B6
acacaccttcgggccaaccttggaccaatggatttgaatgggggccagggatcgacgtcgttggctaaaagtggcatgtgtggcctacctagcgtggttggcagtcccgccttttggtttctacagaataaataatagcttaattggggtatgaatactaattggggaatcggttagtatcatataaatggatgattggagtgtgcgtggtttttaatatgcatgttctatgatgtcctttattccttttaaaatattattatttatatgtagaagttaaaaggtttacagttnanaaaaa

SEQ ID NO: 12579 - DNA, 360 bp, Zea mays
  unsure (1)..(360): unsure at all n locations; Clone ID: LIB3158-003-Q1-K1-B7
aagggccggcccgcgcgtcccgaagaatgttgctgtcaaggatctcaagcgtgggtttgtggcctccaactccaaggatggggcggccaatgaggctgccagcttcacctcccacgtcatcatcatgaaccaccctgngcagattggcaacggctatgcccctgtgctggactgccacacctcccacatcgctgtcaagtttgctgagctcattaccaagatcgacaggcgctctggcaaggagcttgagaaggagccaaagttcctgaagaacggtgatgctggtatggtgaagatgatacccaccaagcccatggtggtggagacattctcagcgtatcctccccttggtaggtttgc

SEQ ID NO: 12580 - DNA, 270 bp, Zea mays
  Clone ID: LIB3158-003-Q1-K1-B8
ctcactgttaactatcaagttgactaacgcttgttccgacagagttgtatcacttgagtgctccaataacaaatgttatcgacgatgacttatgcaagccatatcacggtatattattgactgtctggaatatctctttactatgcgctcttcattgttatagcatattgcacagatgttgatctaatgtattgccaccagacaaatcagctatgcaattgcattcagatcgcgtgcgacctgaaccgcgtgagcgcgtactgcgccacg

SEQ ID NO: 12581 - DNA, 371 bp, Zea mays
  Clone ID: LIB3158-003-Q1-K1-B9
gttggcttctcctccccctccggttcgggttcgggttcgtgaggttctccggggttcgggttcgtgggtgagcggatcgagatggcggcgtcggatgttgagtaccgctgcttcgtcggcggcctcgcctgggccacggacgaccactccctccacaacgccttcagcacctacggcgaggtcctcgagtccaagattatcctcgatcgggagacgcagaggtcccgcggcttcggcttcgtcaccttctccacggaggaggcgatgcggaacgccatcgagggcatgaacggcaaggagctggacggccgcaacatcaccgtcaacgagggcccagtcccgcggcgggccgtggaaggcggcggcggcgg

SEQ ID NO: 12582 - DNA, 357 bp, Zea mays
  Clone ID: LIB3158-003-Q1-K1-C1
ccgagatcgcgaggctgcggaagctcaacaccttcaagggccacgtggagtcggtggtcaaggtcaagggcctgaacatctacaccatccagcaaaactacacggggtgagatgtgtgctgtgatgtcgacaaaaacacctttggccatgccatgccaccattgttgttcttgcggcgacggagtcatgtgattgttacagaaaaaaagaagaaaattttccggtgatgtgattggagacaatagaagcgtgtacgtacgtacgtgtggctgatccctgaccccgagcagagcagacctaggtgaggtgaccattgccaccagatatatacacgtctttctagcttagctagggagc

SEQ ID NO: 12583 - DNA, 317 bp, Zea mays
  Clone ID: LIB3158-003-Q1-K1-C10
cggacgcgtgggcgcgccccccggcagcagcgcggcccaagggctgctgtcattccggggcggacccggatctggggtttgaggcggcggagggcaagatctggtagggttcttgggctcgacaggttcgtattaagctggaaattgtgtggatctagtcttgtagcagtagcttattgcttgcccttccctcttcatgtacctacagatctactggcttagtggtggtttcgattgatgcaccggctgctgcgaagattagcaaattcatcgagattgtaccatatggctgaatgtagtgcccagtatcgagtaat

SEQ ID NO: 12584 - DNA, 348 bp, Zea mays
  Clone ID: LIB3158-003-Q1-K1-C11
ctgatttccagtacgaatacgaaccgtgaaagcgtggcctatcgatcctttagaccttcggagtttgaagctagagatgaggaagaagtcatggaaggtacagggatactttggtctgtgcttggagatgcagtgggagcagaagaacaactagagctgcgtagaagtgcaagggtaagagagctcaatgaagaagagtttgagtccgaagaagaagagtttgatgaagatgaggatgagtatgagatggatgaaacctaagtgtgaaccagcttcatgtcatgttttagcttttattatgcatccatgtatctttaacttgtgaacttagaactcctgttgtgcgct

SEQ ID NO: 12585 - DNA, 339 bp, Zea mays
  Clone ID: LIB3158-003-Q1-K1-C12
gtcgacaaggcggaagaagaaaaaagaaaggcccgagctgcccgatttgcagaagcgtgtggtggatcagcagctcgggaaaacggcaaagacagctcgaagccggacgcagccgctgttaccggcacagcttgatttgagcactctgccttggacgaggttcgttaggcaatgctgttaccctcccagaacgacgttttccttaccgagacctgctgctgcagtttccctaacatgaaaagaatcgacttggtctcctgcaagtctcagatatattatctcctaggagactttggtgaagccatagcttttgtacaccactaaccgcatggacggggg

SEQ ID NO: 12586 - DNA, 327 bp, Zea mays
  Clone ID: LIB3158-003-Q1-K1-C4
cttccggccgcagaaaaaacacactcatccgcttaaatttcggagtaagcatatagttaaagttaggggcaatgccaaagaaatgaaaacggccatgagtgggaatcatgattcagtcgtggatcatgccagaatacatgataagagtaaacggcatgaagatcctgcacgttcagcaaatgcccaaaatgccacgaaatctcaaaagctcacattctactgaaaagatgatggactcggtaatctgcacatcggcatgtatctattctagttcaactccatctatgttactaatgactgcttctgaaagactccttgtccatatat

SEQ ID NO: 12587 - DNA, 339 bp, Zea mays
  Clone ID: LIB3158-003-Q1-K1-C5
gatggaatggcagaacccgtcgaggtgcaggatcttattctgtccgggccggccgggaaaaaaatccgcggcgttgggaaaaaggtatggaggttcacagatctgttggttacctggattccggtattgatggagaatgaaggttcagatctcggtgatgaacactggctgtttagcagtaaaaggaacttcgatgctatcatggttcaaagcagacctactgatagttcactgccgatccatccaatggtgcatcagaagccttctgtacaacccagggcaccatttttgccggaccttaatatgtaccagctggcatatgtcgtaccattttaaaca

SEQ ID NO: 12588 - DNA, 315 bp, Zea mays
  Clone ID: LIB3158-003-Q1-K1-C7
gactgccaaggctcttgctctgaaagaagggttgttggttggagtctcttctggtgcagctgcagctgcggcagttaggcttgctaagaggccagaaaacgccggaaagctatttgttgtcgtgttcccgagcttcggcgagcgctacctctcctcggtgctgttccagtccatcaagaaggaagcggagagcatggtggtcgagccctagagcacacagttctgggcttctggcaaactatttcctgagacgttcatcatttccatcacagaaaaataaagctcgggtgccttctgttgatttcgacgtacatt

SEQ ID NO: 12589 - DNA, 387 bp, Zea mays
  Clone ID: LIB3158-003-Q1-K1-C8
cctgaggaggctagatgggaattctttttgttgtaggtgaggatggatttgcataagttatgtctctgttcattagcttcttccgtgccggtgctgctgcggactaagaatcacggagcctttctaccttccatgtagcgccagccagcagcgtaagatgtgaattttgaagttttgttatgcgtgcagtttattgttttagagtaaattatcatttgtttgtgggaactgttcacacgagcttatattggcaatgctgttatttatacacaaagactacattctttggaatgtgagcaaacaatcagaacactgtaatctattagcacaactatataaagcagcttgtgtatcatctctattggttctgatgggccctgtgatatg

SEQ ID NO: 12590 - DNA, 303 bp, Zea mays
  Clone ID: LIB3158-003-Q1-K1-D10
ggggccaacgttggtgctctcttagtcgatggtcttggtgatggtgtattccttgaggcggctgaccaggaatttgagttcctgagggacacatctttcaacttgctccaaggttgcaggatgcgcaacacaaaaactgaatatgtgtcttgtccttcctgcggccgaacactctttgaccttcaggaaatcagcgctgagattagagaaaagacctctcatctgccacgtgtttcgatcgctatcatgggttgtattgtcaatggaccaggagagatggctgatgccgatttcggatacgtt

SEQ ID NO: 12591 - DNA, 319 bp, Zea mays
  Clone ID: LIB3158-003-Q1-K1-D11
ggagctcatcttcaagttccctggctgcaagaccttaatcacgtcaaggtgcaagttccgggggggggttaaacacacgtatgagatccacttgctgcactagccggcggactctgaccgactgctgccgcactacggtcaccagcattgggttgcagaggccggcggacagacatggctcaagcaagtctgtgcagagctcagaggtctctatctagctctgatgtcatcggcgcgtcagttcaccaccagtcatctaagatttggattatcacccaataccagatgtctctacgagaggacatttctgactgtcatg

SEQ ID NO: 12592 - DNA, 330 bp, Zea mays
  Clone ID: LIB3158-003-Q1-K1-D12
gaaaaagctcgaagatattgttccttcgtcacacaactgtgatattccacatgtgaaccgtactgagtaccagctgattgatatatcagaggatggatttgtgagccttcttacttcagatggcaacactaaggatgatcttagactcccaactgatgaaactcttgtggcccagatcaaggaagggtttgaaagcggcaaggatcttgttgtgactgtccagtctgctatgggggaggagcagatctgcgcgctgaaggatgttggccccaagtaacttccctgccttggaatactgtatctcaaaacctaaatcgaaaaaagaagtgt

SEQ ID NO: 12593 - DNA, 170 bp, Zea mays
  Clone ID: LIB3158-003-Q1-K1-D2
catcgagatagctatgcgggagttaagggcctggttcgaggggttccagtccttgacctacggtggcggtaccttcggggatgacaagggtgccagggccattgtcaaagccttccaacccttaaaaggcactgggctggcccttcccaaaatcatggccaccaaaccgg

SEQ ID NO: 12594 - DNA, 338 bp, Zea mays
  Clone ID: LIB3158-003-Q1-K1-D7
gccacacccacccatggcgctcctcctctccccgaccgtttccttcctggtctccccgggtgctccacgccctcgagctctctccgctgccgccaatgtatcctaccccgcctcaaggctgcaatgcaagaacctgtcctcccaacagagccctctgaatgtgactgctacctgtgcttctttcgctgagaagaggctggttcttgtccatgccacggcagagggttctgaggctggtgcggagcagccagaagagccgaaaccagcaaccaagatcgaagaaatgccgctcgagtccaagcagaagatgatcatggagcaaagagcgcggatgaagc

SEQ ID NO: 12595 - DNA, 339 bp, Zea mays
  Clone ID: LIB3158-003-Q1-K1-D8
gttggcttctcctccccctccggttcgggttcgggttcgtgaggttctccggggtgcgggttcgtgggtgagcggatcgagatggcggcgtcggatgttgagtaccgctgcttcgtcggcggcctcgcctgggccacggacgaccactccctccacaacgccttcagcacctacggcgaggtcctcgagtccaagattatcctcgatcgggagacgcagaggtcccgcggcttcggcttcgtcaccttctccacggaggaggcgatgcggaacgccatcgagggcatgaacggcaaggagctggacggccgcaacatcaccgtcaacgaggcccagtcc

SEQ ID NO: 12596 - DNA, 384 bp, Zea mays
  Clone ID: LIB3158-003-Q1-K1-D9
ctcgccacccgcctcctccccagggggttcatctggcccgtcgccgcctaccgcgagctgatcaacggggacctcgtcgtcgacgacaaggacatcggctactactagctgcgcttgttcacctgcttgcactgtgcatatatattgctgctgccgaggcaagaccggatcccatgctggctagcgactcacaagcttcattttttttactgctctggttttgcattgatggtaaccgatcatggaagatttagttaattaatgtgtgcctttgtggtcttttgcagctgggcgcttggatagtacgtggggaaacatggatggcttttggtgtaggagctgcatgctttgctagggctatcttgtcatgtaggaaatggaagc

SEQ ID NO: 12597 - DNA, 200 bp, Zea mays
  Clone ID: LIB3158-003-Q1-K1-E10
cccacgcgccccggcaaatattttccagtgccaacacctgcactatctacctaccaagtcgctacacttccactgaatgcttttattgaaattgacttcatccctactctctaatcagaacatccaacccctcatttaatcatcaataatcacaccataatcagcggaagacctacctgtaccacgacaattttttaaaa

SEQ ID NO: 12598 - DNA, 346 bp, Zea mays
  Clone ID: LIB3158-003-Q1-K1-E11
gctttctgtatttgggagacttgccgctggtgcttgcgcgggcatgacatctacactggtgacttacccactggatgttctccggcttaggctagcagttcaatctggacacagcactttatctcaggatgaagaaatctgtaccagagaagtacaagaatagaccagaaacatctctagcaaccgctcttctttcagcaacatttgcaactttgatgtgttatccgctggacactgttaggagacagatgcagatgaaaggcacaccatacaatactgtttttgatgctattccaagcattgtggagcgtgacggtctaactggtctttatagaggttttgtgcc

SEQ ID NO: 12599 - DNA, 275 bp, Zea mays
  Clone ID: LIB3158-003-Q1-K1-E12
gacaaccgcaaccgcagcagctagaccgacacgcactctactctcgcacacagccggcgggcggtcacagtgacgcggccacgcgggcgccggagctagggtttccctgatccggcagggccggggagccgccggaaaccgttgctcgatttcggcgccggaggcgcggcatctgtgtctccgaggacggcgggcgcgaggcgggctggggagctgaggcgcggcgccgagggctcagatctggtatgaccgacggcggcgaagacgggaatgct

SEQ ID NO: 12600 - DNA, 205 bp, Zea mays
  Clone ID: LIB3158-003-Q1-K1-E2
ctcgccttcccttcccaaccagcccgcctttttttttttttggccttttttctggaagcgggggccacctggcagaagcaggcaggcccgaccaaatggcgcctttaggaaacggcggaactgctgccgcgggggcgtccaacaccctgtgggtgtcgttcggcgagatgctgatcgacttcgtccccgacgtggcccggctgtc

SEQ ID NO: 12601 - DNA, 397 bp, Zea mays
  unsure (1)..(397): unsure at all n locations; Clone ID: LIB3158-003-Q1-K1-E5
tttttggtgggaatgcaaaaccagttcaagtgcaagatactaacctctcccggtcggacgggaggaaaatccgcaaagctgaaaaaaaagataagaagttcaaagatctgtttgttacctggaatccggttttgatagagaatgaaggttaagatcttggtgatgaagactggctgttcagcagtaaaaggaactccgatgctatcatggttcaaagcagagctactgatagttcagtgccgatccatccaatggtgcagcagaagccttctttacaacccagggcaacatttttgccggaccttaatatgtaccagctgccatatgtcgtaccattttaaacatctggcgaggtagatgagaattagatgagatngttggagagagctgtgtggat

SEQ ID NO: 12602 - DNA, 409 bp, Zea mays
  Clone ID: LIB3158-003-Q1-K1-E7
ctaactgtagtggttggtgtattgattttttttggaaagggagtgtgtgcgagttgtctatttcaagaatagattggatctatccggctgcactttagaatatttttagtattttttttgataaataagaaaaggtgcacgatctcgacgaattacttctgaataacttcagaaatcatatggaagaaccatagcatttcgcgattcattggtaaatttactttgattctctatagaccaataatgtgagaccattaacacggttaaagctaaactgcttgaagtccgggcaaaaaggggtactctttctacaactacattagtattagtctcgaaatgctttaaacgggaaatagctagtgtagaatttatctgatataagacactcatatcgataaataatttgaac

SEQ ID NO: 12603 - DNA, 353 bp, Zea mays
  Clone ID: LIB3158-003-Q1-K1-E9
gcacagtcatccacactaacgaacgaactcttgctccgatcacgagctagctgaggtcgaggatggcggctgtgctgaacagcaggaagacgccgcaggcggtggtggccgtgctggtggcggcggcgctgctggcttcgtccgcttcggcggcgatcacctgcgggcaggtggggtcgtcgctggcgccgtgcatcccgtacgcgacggggagggccagcgcgctccccgcgtcgtgctgcagcggcgtcaagagcctcaacagcgcggcgcggaccagcgcggaccgccaggcggcgtgccgctgcctcaagagcctcgccaacagcgtcaagagcgtcaacatgggcacc

SEQ ID NO: 12604 - DNA, 338 bp, Zea mays
  Clone ID: LIB3158-003-Q1-K1-F10
ggtcaagtttggcgttctcttcaacgacgatcggtgtgcaaatatctttgaagcacgaggtggcaccttgagggccgccaagaagaggaagatcttgacctacgaaggcgagctgcttctgcaaggtgtccatgacaacgtggagataaccctgttgcccccacctgcagttgctgccgcttgaagcgaagagcaacaccaagttctcgattccatacaactcgtatgcttgtattctgccgtgcctatattagattctctcgaaccatttggtgttccttgaaaactgctatcgtgtgatgtatgaaattgtggtgctcaagaaatgccttgcttgc

SEQ ID NO: 12605 - DNA, 288 bp, Zea mays
  unsure (1)..(288): unsure at all n locations; Clone ID: LIB3158-003-Q1-K1-F12
tatgcaatcgttgtgtaagtgagttctgatcataacacgtacatggttcgcaaaagagacgggtttnttgaacaaaaaataaaataaaaaaaaaaaaaaaaaaaaaaaaataaaaataacaaaaaaaacatacacatacattatcccttattctccgttcccgcttcttattttcctttcattcgctcgcctcctttctacttcatcctcacttacttacccttgcgtgcccccttttttaagcttctattttttcatctccccttcattccaactttccctttcttt

SEQ ID NO: 12606 - DNA, 261 bp, Zea mays
  unsure (1)..(261): unsure at all n locations; Clone ID: LIB3158-003-Q1-K1-F4
gaaaaaaaagccggccgaccgggcggtcgggtcaagttcttgttatttaactttttaatcaagactaccttacaacaccgccgcccttttctaaaaaactacccccttcntaataaatttccacacattctccaaccattatatccccaaaatccataacaacttataaataaccctgttgcccccaccttccaattctgcctcttgaaaccaaaagcaacaccaaattctcgattccatacaactcgtatgcttgtattc

SEQ ID NO: 12607 - DNA, 325 bp, Zea mays
  Clone ID: LIB3158-003-Q1-K1-F7
gcgccgccagtcgcgccgtctccgatggccgcgcggcgcgggccccacgtcatcaagcggcacgatcccaacccgcccctcctcggccgggcgccggggaccgtaccggccggcatccccgcgccgtcgcgcgatgagggcatcctcgcgcagcaccctcgcgccgtcccctcgagcgcattcgcctcgcacccggccttcgcccttatcgaggagcgcctcgtagcccgggaccaggacatccaggagctcctcgtcgacaaccagcggttcgccgtcacgcacgtggcgcttcatcaacagcttattggggtgcagcacgagc

SEQ ID NO: 12608 - DNA, 350 bp, Zea mays
  Clone ID: LIB3158-003-Q1-K1-F8
ctctcccctcgcctcctcgtctccccctaggggatcgtcggagaggaatcgcaaagagggccgtctcatccgagttaaggaagccatggagcacaaggaggctgggtgccaggcccccgagggacccatcctctgcatcaataactgtggcttcttcggcagcgcggcgaccatgaacatgtgctccaagtgccacaaggagatgataacgaagcaggatcaggccaagctggctgcctcctctatcgacagcatcgtgaacggcagcgacgccgtcatggagccggttgttgctggcagcaacacggtagtagcttgtgcccaagttgagttgcaaacaatgaacgtgc

SEQ ID NO: 12609 - DNA, 175 bp, Zea mays
  Clone ID: LIB3158-003-Q1-K1-F9
caaatattcgagaacggacggaatccttgtcggctgcagttcatttttcggagaggtggcgcggtcaccttttattcttaattggcgtcaaaagaatgtaaaataccttattctggatttggatagtcaatagtggtggcgttatttgcacatgaaggaataaagacattagaac

SEQ ID NO: 12610 - DNA, 275 bp, Zea mays
  Clone ID: LIB3158-003-Q1-K1-G1
ggagaagaggagggaggggaggaaatacgtgaaaaaaaataaaacctgtacacgtgtctgtccagatcgtgccgtcgatcgctcttcgttgttgatttttggttgtattgatcgatccgtatgtgtgcgtgcgtgtgtggcgttgctctttcttcttttgtgtagctgtgccctgccaccggccgacgtgcgtgcatgccatggtggcgggcagcgttttctaaggtcatatactgttgttgtgtttaagtacatcttgcgtactcaattccttc

SEQ ID NO: 12611 - DNA, 232 bp, Zea mays
  Clone ID: LIB3158-003-Q1-K1-G12
atgttgggcacctaaataagccatctatttaggctcttatccatgggctgaatagagacggctactttattgcaatcaattaccggaaaaatgagctcgacgagaaaatgctgttgaacttgcacaaaaagaaatggaccgatgggctaattttgaagaggtttgacactcactcgaaaaccaacgagctgactgtccaggaaatgctaaacctagccattaagtacaacaa

SEQ ID NO: 12612 - DNA, 301 bp, Zea mays
  Clone ID: LIB3158-003-Q1-K1-G3
cttggattgggaatcctttgcggggctgtgggtttttgggcctcaacctttttggggagggggatctccagaattttcaaaggcgactaacctgggtttaggctcttagcatgtttggtaccaatttggtccaaagtattaccttgaccttttgattgacttcggaaatacacaggaggtggctttccttttcggtacttcttttcatcttttttgggcctatctttctggacgtgtggaactgcccatgataaatgtatacctagttggagaattagtcagagtactggaaagtacatgt

SEQ ID NO: 12613 - DNA, 240 bp, Zea mays
  unsure (1)..(240): unsure at all n locations; Clone ID: LIB3158-003-Q1-K1-G5
agggtgaaactcctacctacatgaccgcatttgatataataatccttcaactggtggggggggcagttgtccctagtcaatcttgaccgacaaaaaagctggctagctagccgtctcgatcgtattatgtactgattaatctgcagattgaataaaaactacagtacgcatatgatgcgtacgtacgtgtgtttaaaanaaanaaanaaanaaaaaanaaaaaaanaaaaaaaaagggaa

SEQ ID NO: 12614 - DNA, 336 bp, Zea mays
  Clone ID: LIB3158-003-Q1-K1-G8
gttttattatatctctaacaacacctcttatgtagcccaccctacttcaacgcacgggggacatgatctctttcgtatgggcctacctaaagaaactgcacttgccttagattctcaacctctgaactatcctaatcacaccgatacccaactgaatttactcgtaacacatgcacattatgacaattaccatcatgccattgcagcactgatccatgcgtcttacgctcatccaaccaaccttgaagttctttttgctcttcccgttaaccacacaaattaatcggagcatggtgaagcattaagacatctttataggtcgcttgacaatcaacc

SEQ ID NO: 12615 - DNA, 451 bp, Zea mays
  Clone ID: LIB3158-003-Q1-K1-G9
ccacgcgtcgcgcttcggattgaataatactattgcggtagctcgttttattattttgaggctccaccactattttgtgacccgccgtctacattaaatatcataatgcgactaatacttggtctaggctgcttgcatgtcttgtcacaatatggtgcagagtaataccttgagcttctgattgacttcggaaattacacaagaggttgctctccctttcgttactcttttcatcttttttggcctatcttcctggacgtgtggaactgcccatgataaatgtatacctagtttgagaattaatcaaagtactggaaactacatttaggtttttttggtgctggcctctctctgttctattgtaaggagttccattccttcaaatattacttgcagctgcacattccaaattcgccttaaattttgcctcctctttattaacttgtttttc

SEQ ID NO: 12616 - DNA, 239 bp, Zea mays
  unsure (1)..(239): unsure at all n locations; Clone ID: LIB3158-003-Q1-K1-H1
cccacccttccgaaaaaaaaaaaaaaaaaaaaaaaaaaaatttaataaaaaaaaaaattaaaaaaaaaaaaaggggaaaaaaaaaaaaaaaacaaaaaaaaaaaatataataaaaaaaaaaaaaatatcaattttattgggcccgggcttttttaaaaaaatacaacttaaaaaccccccccttttcannantacaacctttccccccccccccccccacaaattacctttttttttgg

SEQ ID NO: 12617 - DNA, 195 bp, Zea mays
  unsure (1)..(195): unsure at all n locations; Clone ID: LIB3158-003-Q1-K1-H12
acatttttttggtgctagagtaccagaaaacgtagggtacaaacattgggaggcaggatgagagctgggtttcctaacgaaaactctgattcatttgtggcggtgctataacagttcagagctcacgggtgtagttccctgctgacatcgttcctccgatacggtgtaatatgcttttatatctatcgcctaana

SEQ ID NO: 12618 - DNA, 333 bp, Zea mays
  Clone ID: LIB3158-003-Q1-K1-H5
gtttcggaaacagcatcctaatgttgttgcctatagttactgggggtacaggcataatgcccggaagacaaacaaaggttggcgcctggattactttcttgtgtccgaatcaatcacagaaaaagtgcatgattcatatattcttccggacatctctgccagtgatcacagtccccttggtctcgtgctgaagctgtaggctgtatcacacaggctatgccaaacattcagtctgaagcctgtgccatatttctcagacagcgatgtttattcctgatggtttctggttcgtgcagatccctggcaggaacaacgacttttgtcagactatta

SEQ ID NO: 12619 - DNA, 182 bp, Zea mays
  unsure (1)..(182): unsure at all n locations; Clone ID: LIB3158-003-Q1-K1-H6
gtgcgagcactgaaggtgtggtaggtcgtctacttcntggccagcgagggcgggtgcttggctcgagcatgaaaacattggagcttgttaacatggacgtgttttgacggtgattatgatgcgcctgaggtcagcgccgctgtggctggttgggccggctgagtgagtttgggcctgatatt

SEQ ID NO: 12620 - DNA, 324 bp, Zea mays
  Clone ID: LIB3158-003-Q1-K1-H7
cggacgcgtggggttgaaattcggatgtacaaagtaatctatgatttgattgatgatttggggagggccatggaaggtcttctcgaacccgctgaggaggaagtaccaattggttcggcaaaagttcgagctgtctttagtagtggcagtggaaaggtggccggatgcatgattacaacaggaaaagttgttcaagattgtaatgtgcgggttattcgtaaagggaaagaagtatatgtgggttcgcttgattccttgagaagggtgaaagaaactgtgaaggaagttggtgctgggctagagtgtggtattggggtagatgac

SEQ ID NO: 12621 - DNA, 88 bp, Zea mays
  Clone ID: LIB3158-003-Q1-K1-H8
attattacaacacgaaaagttgttcaagattgtaatgtgcgggttattcgtaaagggaaagaaatatatgtgggttcgcttgattcct

SEQ ID NO: 12622 - DNA, 324 bp, Zea mays
  Clone ID: LIB3158-003-Q1-K1-H9
tagccgccgccatgtcgaagcgaggcaggggaggttcggcggggaacaagttccgcgtggggctgggtctgccagtggccgcgacggtgaactgcgcggacaacacgggcgccaagaacctctacatcatctccgtcaagggcatcaagggccgcctcaatcgcctcccgtccgcctgcgttggcgacatggtcatggccaccgtcaagaaggggaagcccgacctcaggaagaaggtgatgcccgccgtcatcgtccgccagcgcaagccgtggcgccgcaaggacggggtctacatgtacttcgaagataatgctggagtga

SEQ ID NO: 12623 - DNA, 153 bp, Zea mays
  Clone ID: LIB3158-004-Q1-K1-A1
cgtccgaattcccggtcgccaacctcctttacctcctcgctgccgtcaggaccccaatcgtggagaccctgtcccggggctcaggacagggatgaaaacaccccgtcaaacaaaccgcccgcaggcacccttaagcctctctctcgcacggac

SEQ ID NO: 12624 - DNA, 426 bp, Zea mays
  unsure (1)..(426): unsure at all n locations; Clone ID: LIB3158-004-Q1-K1-A2
gcgtttcctccagaagaaatgttccgcggaaatcgagaaggcgaaggattacacaaaagcgaagaacaagaacgccgcaatccagtgcctaaagaagaagaaactgtacgagacacagatcgagcagctatcgaatttccagctgcgagtccatgaccagatcataatgctcgaaagcgccaaggcgaccacggacactgtcgacgctctgcgctcggggtcatctgctgtcaaggcgatgcagcaatcagtgaacgtggacgacatcgagaaggcgatcgaggaggcgaacgagcagacggagagcatgcgggagatgcagcangcacttgcgacgccgattggcgcttccgctgacttcgacgaggacgagctagaagcggagcttgaagagctggatgaggaggaggaggaggagggggagat

SEQ ID NO: 12625 - DNA, 360 bp, Zea mays
  Clone ID: LIB3158-004-Q1-K1-A3
cgacgattacggctcaaatcttcgtcgtcatcttctccggcaccgagcacccaaagagggtggtccttcaaccagatcggttcctgagcgagctgacgagcatgtacgagcggagcacggagaagggctccgtctgggtcaccatgaagcgatcaactctcaagggcaaggcacagttgcggaagatggagaataggtgcaggaggtagagcacaggtgcctcgtccgcgcctccaatggcaagaagaacatctccacctcgggttctctaaaggagtacacatagttccaagcttcatacgcaacagttcttaaggcccatatgcatgctctgaagaaaaggagaggaaagacaagaag

SEQ ID NO: 12626 - DNA, 404 bp, Zea mays
  unsure (1)..(404): unsure at all n locations; Clone ID: LIB3158-004-Q1-K1-A6
gtcttgccttatttcatacaactgtggtatccaacatttgatgtgtggggaagcctttgttagcagcttcttgttttcgtgaagccatgccgctcttctacaagcgaccccttttctggctccgtttntctgagtgcagcctgctagctctagaaaagggtctcctgtgtgcaaatggtgcttcctcattcaacgatgagattgaaatcaatgttgtggggtcaggacaatggaggcagttgattgtcaacccagtgaactcgagaagtaatttagattctgcaggtgtgactttaggcgaacataaaaaatttggtttcacttggatttgctagacagtgtctacaaaatgcgctgctattattggatgctactgagaaggaaaatgggtaatcgcatctgat

SEQ ID NO: 12627 - DNA, 137 bp, Zea mays
  Clone ID: LIB3158-004-Q1-K1-A8
ttagttatgaagggtgttgccatcaactttgtgacccgcgacgacttacgtatggggtgtgacatacataagttctacaacgtgctgattgatgagctgcctgccaatgttgctgaccttctgtgatcaatttgaat

SEQ ID NO: 12628 - DNA, 183 bp, Zea mays
  Clone ID: LIB3158-004-Q1-K1-B1
acaacaacccggagctcatgaaccggtgcggagcatggatcgtgccgtacgaactgctcaagcccttctccaagccgggagtcaccgggaggggcatccccaacagcatctccatttgacccgtccgtcctctccatccaatgggggtttgccttattgcgtgcacgctagctagctgcttgg

SEQ ID NO: 12629 - DNA, 410 bp, Zea mays
  Clone ID: LIB3158-004-Q1-K1-B3
ggcaagttatcgagccccactccatcagtgctggactggattaccctggcgttggacctgagcacagtttcttgaaggacatcggacgcgctgaatatgacagcgtgactgatcaggaggcactggatgctttcaagcgcgtttcccgtctggagggcatcatcccggccctggagacctcccacgcgctcgcctacctggagaagctgtgcccgaccctgccggacggcgtgagggtggtgctgaactgcagtgggcgaggcgacaaggacgtgcacaccgctagcaagtacctggacgtttagaacaccggagaggagggctgaatgagagttttgcatgccaatttttgaagggttcagcagttatgtagcgctggtttttttttgtgaatagagtacaaataacct

SEQ ID NO: 12630 - DNA, 117 bp, Zea mays
  Clone ID: LIB3158-004-Q1-K1-B4
ctgattacttacatgtttagttgtttaaaaaaataaaaaaaaaaaaaaaaataaccaggggtaaatttataaaaataaaattattaaataaatatataaattaaaatttttaataat

SEQ ID NO: 12631 - DNA, 261 bp, Zea mays
  Clone ID: LIB3158-004-Q1-K1-B6
tcttgattgcgtcgtggggctcctgatttccacaagtttgtgtcccctactcccctaccctaccttccactgatggggagtccggagttgtgacgtcgttgtcgtgtggctggttgcagtgtcaaccaaaacagttctcacacacgtgagttgttgggaggtaggtagcatgtactatcacgtacctaccccatcaagaatagtgcgtcatctgtcatcttgtgatgtcatcttgtaatgaaataaaaacagttgcatttt

SEQ ID NO: 12632 - DNA, 386 bp, Zea mays
  Clone ID: LIB3158-004-Q1-K1-B7
ccccatctgaaattgattatctagctaaaattccagatcctgatgctcagcaaaaggagttcgtaaaactatggactcttaaagaagcatatgtaaaagctcttggaagggggttttcaggcgcccctttcaacaaattctcgattatattggcagcaaatggcagaatccaaatttctgtggcaccaaaagtatcgaacggttctgactctatccatgactgtctgtccgagaattggcagtttgcacttgctgaactaaacagttctcattacatggcaatctgtatagaggatgactcaacaagttcagattctggaaacggtagactgccactaggattgaaagtatggaaaaccactccgttcgtggaaaatatacttgtt

SEQ ID NO: 12633 - DNA, 177 bp, Zea mays
  Clone ID: LIB3158-004-Q1-K1-C1
ctctgcctccctccctcagatcctccctaagattgccatggcggaccagctcaccgacgaccagatcgccgagttcaaggaagcattcagcctcttcgacaaggacggcgacgtataagataacatgttaaagctcaagcttctagttgattgcatgattggatttactgtggaggg

SEQ ID NO: 12634 - DNA, 411 bp, Zea mays
  Clone ID: LIB3158-004-Q1-K1-C2
cgtcgagctgcccaggctgcgcgccgtcggtaccttccaaccggattttttcgtctttgggacgaactcactctgcgcctttgcgctcaaccttgccgtcttcctgctggtcggcaagacctcggcgctgaccatgaacgtcgcgggagtagtcaaggactggctgttgattgccttctcgtggtctgtgatccgtgacaccgtcacaccgatcaacctgttcgggtacgggatcgcgtttttaggggtgggctactacaatcatgtcaagctgcaggcgctcaaggctaaggaggcacagaagaaagccacacaggctgatgaggaggccgggtcgctcttgcaagagcgcgatggacacagtgatcgcaagagcgacaatcatgcctagagggccagatctgatcctgg

SEQ ID NO: 12635 - DNA, 184 bp, Zea mays
  Clone ID: LIB3158-004-Q1-K1-C3
gcagtgttgaagcgacaaaagaggatgaagaaaagatgagcaaagatcaatcagcaaatgttcatgctgaactgccaaaagagggtcagataaaacttggcacagatcatccaattgttaaccatggcgaaccagcaaaagatggtgatgaaaatattgaacactgatcattcagaagctgttc

SEQ ID NO: 12636 - DNA, 246 bp, Zea mays
  unsure (1)..(246): unsure at all n locations; Clone ID: LIB3158-004-Q1-K1-C4
ccaatgtttagagttttttgagacctatatgccggttttggnttttcagtggcacaaattaaaaattactggaggtattggtagttggatttgggaaacaggaaatatgtttgggtggccctggtnttaaccgaaacttccaggttcttcttggtcaattttttcctttaattcttataggtctggtaattatttgtatgcccgtatgaagttatttgaagaaatgatttctgcattttttgaaaa

SEQ ID NO: 12637 - DNA, 282 bp, Zea mays
  Clone ID: LIB3158-004-Q1-K1-C7
atttaccacacctcttactagatatattaggaatagacaactgatgttcagttggcgaactactctttaccctctgatctgatgatgctattgtataccagactcttttgaagctctttaactcatctaagtagaaagtagcttttaatttgaaaaaaagtaatcttggttgggtttcctctatcaatgtaattatgttcatgtcaccagtaccattcaaaattcactaaccatctatatactggactaccatctaattcctcatactcatttttagtactt

SEQ ID NO: 12638 - DNA, 392 bp, Zea mays
  Clone ID: LIB3158-004-Q1-K1-D1
ccccgctccagacccaggggaacgacgacgtcgtcgacctgccgagatgggtgcactcggtggtccgggaggagtggacggccgaggtgtttgacgtggagctgatgaagcaccagaacatcgaggaggagctggtacagatgctgcagatagccatggtgtgcacggccaagtcgccagaccggcgcccgacgatggaggaggtgatcaggatgattgaggggctccgccagtccacctcggagagccgcgcgtcgtctgatgaaaaatccaaggagtcgaaccctccatcggtgtaaatcctgcgcagctcccttcgtccgcttgatcggttgttgttgccagttgcacctcatttgatttggtagctaatttatttatgattgagtttc

SEQ ID NO: 12639 - DNA, 382 bp, Zea mays
  Clone ID: LIB3158-004-Q1-K1-D11
cgctgctgttcaagacgcatacggccgaccagttctccgaccgcctcgtggccatcttcggccgcaccgtgcatgagctctactgcatgggggcgcgccgcgtcggcgtcacgtcgctgccgccgctgggctgcctgccggcgtccatcacgctgttcgggcacggcgccgccgggtgcgtgtccaggctcaacagcgacgcgcagagcttcaaccggaagatgaacggcaccgtggacgcgctggcgcggcggtacccggacctcaagatcgccgtcttcgacatctacacgccgctgtacgacctgtccacggacccccagtcgcagggcttcgcggaggcccggcggggatgctgcgggacgggcacggtggaaaccac

SEQ ID NO: 12640 - DNA, 209 bp, Zea mays
  Clone ID: LIB3158-004-Q1-K1-D12
gcttctcaaccggatatggtagcaccggatcatgtagaacgctgcacaatccccggggccgtctccaagatggtgaacgttcctaataccaagaagacgtactgcaagaacaaagagtgcaagaagcacacactccacaaggtgactcagtataagaagggcaaggatagcctggtctgcccagggatagcgcccttatgaccgcatgc

SEQ ID NO: 12641 - DNA, 413 bp, Zea mays
  unsure (1)..(413): unsure at all n locations; Clone ID: LIB3158-004-Q1-K1-D2
cgatacgggagggcccatccagcggcccatgtcacgctctcacgccacgcacgcatgctcccccgcctgctcaacgggccccaccgcctgctccttggcgggccccacgcctcgggcgccgcgcccctccaccgccgccgcgtcctcgccggccgccgggccatgtccgcctccgcctcgcccgcgtccgggccgaggcgtccgctgcgcggggtggtcttcgacatggacggcaccctcacggtgccagtcatcgatttcccggccatgtaccgcgaggtgctcggcggggacgccgcctacgccgcggcgcgcggctcngggggaggctccgtcgacatcctccactgcatcgaggactgggcgcccgacaagcagcgccacgcgtacgaggtcatcgcgcgcttcgagcg

SEQ ID NO: 12642 - DNA, 401 bp, Zea mays
  Clone ID: LIB3158-004-Q1-K1-D3
ctccacagctgcagccagagccacccaccttatcgtcatcctcgctcgctcctcatcgccagcgcctcctcctcctcctccttcttccccaccgctgccgacatggctgcgcaagaggagaagaccgctgttgctgctgctgccgccgatgtcgcgacagatgagcctgcgccggcggcggagcagcaacctcagccggctggggcggcgcgcatggcatggccatcggcacccggcggggctccgcccaaccccttcgacttctccaccatgatgaaccttctcaatgaccctagcatcaaggagatggcggagcagatcgccaaggaccccgcgttcacgggaatggcggagcagctgcagaagacggtggtgttctcgcggcagcagcagcaacagct

SEQ ID NO: 12643 - DNA, 315 bp, Zea mays
  Clone ID: LIB3158-004-Q1-K1-D4
cggacgcgtgggcggctgcaggccatggaggcgtcaacggcgcggcattggctgaaaacatcaaaccggccagggcggcggccgagcctgaactgcgctcgcctggcgacgcatctgggccgggtcacgccgtgccgtgcacagatagaatggtacaaggcgctgttcgacgcagagatggtgtactacgacgcgttcaagcagcggcggtcgcccaggaagtacaccaaggtgaacttaaaccgcatcaagctgggccagttctgggaccgagtgctgagcatgctcgacgccggcccagctcccccacgattt

SEQ ID NO: 12644 - DNA, 200 bp, Zea mays
  Clone ID: LIB3158-004-Q1-K1-D5
cccgagctggtcccccgcggcgatcaagtctgcgatcatgacgtcttcgggcactgttgaccacgcgggcgtgcctatcaaggacgagcagtacatgcgggcgagcttttacagcatgggcgccggcttcgtgaacccgttccgcgccgtcgacccggggctggtgtacgacctcggcgccggcgagttcattgtctacc

SEQ ID NO: 12645 - DNA, 397 bp, Zea mays
  Clone ID: LIB3158-004-Q1-K1-D6
cggacgcgtggggcaaaacacgcccaatgagcaaatggcaaaccaccataacgtcaatgatccagtctctgatggcaattgcgatggccagggtaacattgattcgaaaatgatcgatcttaatatgcgcccggctcgtactcatgggcaaggatcaaattcccagactcagggggtggatcttagtgtgaacaaccatgactctccaggggtggtgccaacaagtaattccgaaagagacgccatcaagtaaacattggaagattggaatgtacatttcaactacatattctgttctataggagctcctgggggcagaaatggggttattcagtggtctctctgttatcactagtaagcgtatttctggcagagttggagctaataactgcatctc

SEQ ID NO: 12646 - DNA, 328 bp, Zea mays
  Clone ID: LIB3158-004-Q1-K1-D7
aaaaaaaaaaaaaattaaaaaaaaaaaaaaataaaaaaaaaaaaaataaaaataagggaggggtttttatataatataaataaataaaaattattttttggggcggcctgtcttgaggttccttgctttcttcccctttcttgcctcttatttcttttcttttgtcgtccctctaattcaattctttgtcctttgtttacatcgttttatctgggaatttccttttttttcctttcttttatctttgttttatttatcctcttttctcctgtttggtgttttctctattttggcccttttctttttctccctttcctaactttttttc

SEQ ID NO: 12647 - DNA, 411 bp, Zea mays
  Clone ID: LIB3158-004-Q1-K1-D8
cggcaaggcagtgaacgtgccgtcgtctctcttcggcgaggcccgcgtgacgatgcgcaagacggcggcgaaggcaaagccggcggcgagctccggcagcccgtggtacggccccgaccgcgtgctctacctgggcccgctgtccggcgcgcccccgagctacctgacgggcgagttcccgggcgactacggctgggacaccgcggggctgtcggcggacccggagacgttcgccaagaaccgggagctggaggtcatccactcccgctgggccatgctgggcgcgttgggctgcgtgttcccggagctgctcgcccgcaacggcgtcaagttcggcgaggccgtgtggttcaaggccgggtcgcagatcttcagcgagggtgggctggactacctcggcaacccgagcct

SEQ ID NO: 12648 - DNA, 181 bp, Zea mays
  Clone ID: LIB3158-004-Q1-K1-E1
gcagggtcaaccctggaaaaaaaaggattccaatttcacttctaccaacacaggctcgacattcatttcgaaaatcgaaaatttggcaaagaatttgcggtggaatttgccaaaaaaggatgggggtttggtaaagatggagcctccaaaccccggaaggaagggggtaatggggatcgat

SEQ ID NO: 12649 - DNA, 268 bp, Zea mays
  Clone ID: LIB3158-004-Q1-K1-E2
ctgaactgacaattagttgtgtctttttttttctgaccgaaagagcatatatatagctagctcgcagaaacacaccttcaagtatactacagcactagagtactgcatcgattgatctcatcactcatcatcggtgtttgatttgatttcgcttcttcacggatcggatagatgtttgcattgcatggcgaagcatgtgttcgtggtgggtcacgactggggcgccatcatcgcgtggtacctctgcctgttcccggccggaccgggt

SEQ ID NO: 12650 - DNA, 370 bp, Zea mays
  Clone ID: LIB3158-004-Q1-K1-E3
cgccctgccccaggacacccagccctcccatggcatcctcttgtcccagctgctgccccactccagcaacagcctcagaccttcctctgcctgcatctgcgcctcgccgtacctctccatgttaaggtacacctgggcaagcaccaggtgtggttctcccacaaacgggttcttggcaatgctctgctggaggagctgctccaccttgagccagtccgacgccttatcgccgcataccgcctcccagtagaggtctcgtgccaccttctggtcctccgcgttgagcaatctggtgcagccgttgaacaccggggggatcaccaggtccatgtcctcgtcccggccatgtgtatctcgcgctcgctgcgtg

SEQ ID NO: 12651 - DNA, 303 bp, Zea mays
  Clone ID: LIB3158-004-Q1-K1-E5
ctcccacggcagccatggtcaccgccaccacctccccgctcttctccctctcctccctccgcgcgtccctcccttcccccacccgatttcacacgtctttctcgctccgagccctctccccacgtgctcgtctctctgccgccctccctttcgcctccccactcgtttcaggtgggtacgggacctgggcggcgacttcaatctcgtccgcgggaaggttgatacggctggggctggaagtggtgtgcgaggccacgactgggcggcggccggactcggttaagaagagggagcgccagaacg

SEQ ID NO: 12652 - DNA, 388 bp, Zea mays
  Clone ID: LIB3158-004-Q1-K1-E7
atagcaaccggtccaacactttcacgctcaggcgctcagctctagcaatggctgcctccaccatggcgatctcctccacggcgatggccggtacccccatcaaggtgggctccttcggcgagggccgcatcaccatgcgcaagaccgtgggcaagcccaaggtggcggcgtccggcagcccctggtacggccccgaccgcgtcaagtacctcggccccttctccggcgagcccccgagctacctcaccggcgagttccccggcgactacggctggtacaccgtcgggctgtccgtcgaccccgagaccttctccaagaaccgcgagctggaggtgatccacttcccgtgggccatgctcggcgcgctcggctgcgtcttccccgagct

SEQ ID NO: 12653 - DNA, 141 bp, Zea mays
  Clone ID: LIB3158-004-Q1-K1-F1
gtggagtcggcgtggctggggatgctgttcatgtgcgctaactagtaggagagggcggcggcggtgtctcgcgccctctaggcgctcgacgcgctggatggcgcgttccgggactgctccatggggaggccattctttggc

SEQ ID NO: 12654 - DNA, 350 bp, Zea mays
  Clone ID: LIB3158-004-Q1-K1-F10
gaaagctgatgggagtgaaatggatctttctactatcactagcgcttctccaaggtgccttctaccgccgcatgaggtggtcagtcttgaattcccgaaagctggtcctggatgtcgtcaactaatgactatcattaccctttttttattgaaatatgttgagccgtttaggagcattcaaaataatgagttggtggtgtacaattttgccactggggctaggttccatgcctagaaattatttttgtttctttactctgctgagctgcaaaagcatatcaccaagggagtacatttcacggtttttttaggtttgcaatgcctcaatatcacctgcaatcttttaactt

SEQ ID NO: 12655 - DNA, 234 bp, Zea mays
  Clone ID: LIB3158-004-Q1-K1-F11
ctttcttgcactggtacacatgctagggtatggatgagatggagttcaccgaggcagagggtttcttgaacgacctggtggcctaatatcaacattaccattatgccactgcctaggatgaggagtacgaggaggaggaggtagaatatgatgatacctatatcattctctgtaatgcttgtgacaaatataaaattccttgtatcgtcgttatgttctcatcagatataagtt

SEQ ID NO: 12656 - DNA, 386 bp, Zea mays
  Clone ID: LIB3158-004-Q1-K1-F2
tgacaacaactgatgatgccaacgactcgaaaccccgctcaatggccctgttttgtagcgactgactacaacggtaggttgggtacctcatcttccatgtccttaccaccgctactactagatgtgttgtctttagctctcgtctcatcttagtccgctaccgtaatttttttttactaccactactaaggaacctggatgtaaattatgtatggtatcagcgagactgtcgtcgcagccttatgtaattctgttcagaacttttgaaaaacgaaaaaaaaagaagaaaccagcatgtaatcctgaagtaccggtctaccggatgtaccgtggacttaattagaagtgttttttttatagtttacttgtttggtgttgatgtgtgt

SEQ ID NO: 12657 - DNA, 332 bp, Zea mays
  Clone ID: LIB3158-004-Q1-K1-F3
tccgtcgcgcattctcctagtgaggctactgggtgaccgccgcctctgccgccctacgccaggggccaggtcttcgtcactccctttcattatcttcgtcgtctcattcgccggcgacgagcacccaccagaaatcatagctgctttgggtatggaggcgctgtttgggagcaataaccatggcggccacaaggccgctgatttggcctcgcttataattacccatgttgccttggaggtgccaaggttacttgggctccttgccattattctgcattaatgaaatctttacatctggtggagaccagatttcgattactaggattctgggc

SEQ ID NO: 12658 - DNA, 55 bp, Zea mays
  Clone ID: LIB3158-004-Q1-K1-F5
gcgatactaaaccagggttacgtgtggggaaaaaaacatactactaggtcacaaa

SEQ ID NO: 12659 - DNA, 416 bp, Zea mays
  Clone ID: LIB3158-004-Q1-K1-F8
ggagcgaggacattcagctttgatgcaaatccatgcgattacttccagggtggcaagattaaagcaacgaccctctctttgtctgtcttggtggcaattgagatgttcaactcactgaatgccctgtcagaggatggcagcctcctgagcatgccgccatgggttaatccatggcttcttctggccatgtccgtttcttttgggctgcatttcttgatcctctacgtgcctttcctggctcaagtgtttgggattgtgcccctcagtttgaacgaatggctcttggtgatagcagtggccttaccagtggtgctgatcgatgaggttctcaaatttgtggggcggtgcctgacagctcgtgccctataacaatcatggaagaggaatgcagagtagatgctattgatcatcggtat

SEQ ID NO: 12660 - DNA, 328 bp, Zea mays
  Clone ID: LIB3158-004-Q1-K1-F9
cggacgcgtgggcgtggactgcgccgcgccgccgcccgacgcggaggagcccacggtgccgtccagccccagcccgcccaacccggacgcgctggagcccgcgtgggcgctggcgccgttcggctccgcgcccgccgtcgccgcgcagtcccccgcctccgcgccggccccggcgtcggcgctcctgctgctggccgtgccgtggctgctgctgctgctggtggtggtgtagcagttcggtctagcggcgtgcgcgacctgcctgccgtggaccacgccggcctctccacacagctgctgctcctcgtggatcattgtcatgtgcatg

SEQ ID NO: 12661 - DNA, 366 bp, Zea mays
  Clone ID: LIB3158-004-Q1-K1-G12
gcaacttcattgctcatgctgtgcgtggcgaaccccttactgtccagaagccaggaacacagactaggagcttctgctatgtcgccgatatggttgatggtcttattaggctgatgaatggaaacaacactggaccgattaacttggggaacccaggtgaattcaccatgctggaacttgctgagaatgtgaaggagttgattaacccagatataacagtgacgatgaccgataacactcctgatgatccccgccagaggaagccggacatcacctatgcaaatgaagttctagggtgggagcccaagatcgtcctgaatgacggcttggtgctcatggaagatgattttcgggagcgcctggccg

SEQ ID NO: 12662 - DNA, 318 bp, Zea mays
  Clone ID: LIB3158-004-Q1-K1-G3
ctgggcggcgcccccgacgcggcggtggtggacaagcacgcggagcagctcgccaaggtgctcgacgtgtacgaggcgcacctcgcccgcaacaagtacctcgccggtgacgagttcacgctcgccgacgccaaccacgcgtcctacctgctctacctcagcaagacccccaaggccgggctcgtcgccgtccgcccccacgtcaaggcctggtgggaggccatcgtcgcccgccccgcgttcccaaagaccgtcgccgtcatcccctttgccccgccggtcctctttctggcttggacctccctttgcgttgcgccg

SEQ ID NO: 12663 - DNA, 287 bp, Zea mays
  Clone ID: LIB3158-004-Q1-K1-G4
catcctgcaggtgcccatctgcaagtcgtacgtggagccgctggctctgtcggcgtggatgtggcgtcctgtccacgctccagtccgcgctgctcgtctccttcctcctgccggaccccagcgcctggaggatccactcgctcttcgagctctcctgctgcgtcttctcgggcgtgttcgggtccggcgtcacgttctacctgcagtcgtggtgcatctccgtgaggggcccgctctactccgccatgttcaaacccgctctgcaccgtgatcaccacccgtgttcg

SEQ ID NO: 12664 - DNA, 108 bp, Zea mays
  Clone ID: LIB3158-004-Q1-K1-G5
cggacgcgtgggcagcgccatggctacattggtgagttcgagtacgtggatgaccacagagctgggaagatcgtggtggagctgaaggaagatgaaaaatgtgggtat

SEQ ID NO: 12665 - DNA, 187 bp, Zea mays
  Clone ID: LIB3158-004-Q1-K1-G6
ccaatcttccgatctgtgtcttattctgttgatccttcaccgttccattctgcagatcaagctggggctaatatggttgtgactggaaactttgattctttttatgagatgggcattgagttctcctctgagcagatactgaagctatcatgggatacaaggatgatgcttccagacattacctttt

SEQ ID NO: 12666 - DNA, 159 bp, Zea mays
  Clone ID: LIB3158-004-Q1-K1-G7
ctccccggcggtgtgtgcgtgtctagcatggggcggccggtgtcgtacgagcaggccgtggcgttgaaggtcctgagcgactactacactccgcactgtctcgccttcatgttcgtcaactggtccttcatgtgagtgaggaccggccccctatcttat

SEQ ID NO: 12667 - DNA, 357 bp, Zea mays
  Clone ID: LIB3158-004-Q1-K1-G8
agtgattctatgaagacccaactggtaattgaaccaaggtttccattgtttggtgggtggcaaacaaccttcactgttggttatggtttaccacttgaagactttgttttctattctgatggaaagagatttctcaatatcacattttgttcttcattggaagaaattctcattgaaaagcttatcgtaaaggttgttctacctgataggtcaaaggatatcgaagttttaacttcctttccaacacaacctctacaagaggttatgttttcacaccttgacattgttggaaaaccaattgttgtcttggagaaacctgattttttttcagaacataatttgtattttcaggttttc

SEQ ID NO: 12668 - DNA, 114 bp, Zea mays
  Clone ID: LIB3158-004-Q1-K1-G9
gaggattgtcacttaaggtatcatgtattttaaaacttgtaaatgttttatacatgcaggttgtaatatttttgaatcaatttttttttgtaataaactccgatgatatatatt

SEQ ID NO: 12669 - DNA, 422 bp, Zea mays
  Clone ID: LIB3158-004-Q1-K1-H10
tgtcgtcgccggcatctcctacgccatcaacagcggataccattcgtggggcccggtctgcggcatgctcttcttcgccttctgggtcatcgtccacctgtacccgttcctcaagggcctcatgggcaggcagaaccgcaccccgaccatcgtcgtcttctgggccatcctgctggcgtccatcttctccttgctgtgggttcgcatcgaccccttcaccacccgcgtcactggcccggatacccagacgtgtggcatcaactgctatggaagtggaaggtttgtactttgtagaaacggaggaataccacgtgccatctgttgtctgttaagttatatatatataagcagctagtggctgttatttacagctacgtacagaccagttgatattgttaccacaaatttttacttgtgttaat

SEQ ID NO: 12670 - DNA, 156 bp, Zea mays
  Clone ID: LIB3158-004-Q1-K1-H12
aaaaacccaaagtcacgtttcctcctcaacaaaaaccctcgcaaaaatctgggatctatctagaagcaccactcaacaaaccctaggttgcctgatcggctgatcgctccatggcgatcatctccgacttcaaggacgacgaggcaccggagcatc

SEQ ID NO: 12671 - DNA, 137 bp, Zea mays
  unsure (1)..(137): unsure at all n locations; Clone ID: LIB3158-004-Q1-K1-H2
caaataataattttttcgggttgatttannaaaaaaaaaanaaaaaaaaaaaaaaataaaaaaaaaaaaaaaaaaaaaaaaataaaaaaaaaaaaataaaaaaaaaaaaaaaaaatatgggggggcccgtttaaaaa

SEQ ID NO: 12672 - DNA, 125 bp, Zea mays
  unsure (1)..(125): unsure at all n locations; Clone ID: LIB3158-004-Q1-K1-H3
tttgcattttctggttccagggattgacttcgtactcacagtttacttcacacagaaagtttatgtagccatcctgtgataacatctactttctttttgatccaatanattggttattcagcttc

SEQ ID NO: 12673 - DNA, 268 bp, Zea mays
  Clone ID: LIB3158-004-Q1-K1-H4
cgcatattttatcgatggctatgccggtgtagactgcggtgtgcatcgcgcgcaacgtgctctggctgctggacgcttgggtctggacgtgcgtgctcgccgccgatggcgccgcccgccttctccggtcggtcacgcactgatcgatcgatcgtcccccgccgccgattcacggccgtatgtgtctagatgcaaaacgaaagatatcatctgctccacccatatgacctcgtgagtcgatcgtccccttaatattatacagggctcg

SEQ ID NO: 12674 - DNA, 298 bp, Zea mays
  Clone ID: LIB3158-004-Q1-K1-H7
ggagagcctggacatgttcgttgatgcgctcctgcttcaagaagagatggacgccgtggggtatttggcgcatagctagattaaaccttgcaacattgattcacgtcatggacaaaatagagatcagcgaaaaacaataccgagcagtccactagtgaattgcctgtgcattgtgtcctgttttggcgtgtgctaagtttacataatgctgaaattttaaagtaagcatgtgttataatttggtgccgataaacgtgttgcttcattcaattctttttcaaaactacagttttttgct

SEQ ID NO: 12675 - DNA, 392 bp, Zea mays
  Clone ID: LIB3158-004-Q1-K1-H8
ctgactcttgggtcctgaactattttagagccttggaattgcacaaccaaagggtggtggcggctttatggacctccaggcacaggaaagacattgctggcacgtgcggttgctcatcacactgactgcaccttcatcagggtgtctggttctgagttggttcagaagtatattggtgaaagctcccggatggttcgggaactctttgttatggccagggaacattcaccatccattatattttatggatgaaattgactctatcggatctggtagaatggagtctggaactggcaacggtgatagtgaagtgcatcgtaccatgcttgaacttctaaaccaccttgtaggttttggaagcttaaaccaaaattaatgttttgttggctaca

SEQ ID NO: 12676 - DNA, 232 bp, Zea mays
  Clone ID: LIB3158-004-Q1-K1-H9
aattccctccaggtttttttttggtggggaggaatcaggtgtctgatgttctcgtctcggcaacgaaaaagaaagaaaaacggttcctagtgaaatactaggctattctgtatgccctagtataaaagtgtgcctctagtagaactgtagaagatgtagttatcagtatctcttttgtattattggcccatgtttacttctcaatcgaatatttatgcgagggatgtttgtc

SEQ ID NO: 12677 - DNA, 247 bp, Zea mays
  Clone ID: LIB3158-005-Q1-K1-A1
ggcaaggcatgagctacacttccgccgccgtggcgctcgagctcctcctggccctgctcggcggagggcagcgccaaaaggaccagctggacgccatagacgccggaaccgggacggagaactacaccgacagcgacgacgccgagtactggggcctctgtcagaaggcacgggccaactgatacggacagcccaacggtgccggccccgaagacaacagaggcgcatgcggattcaagcacacaaa

SEQ ID NO: 12678 - DNA, 307 bp, Zea mays
  Clone ID: LIB3158-005-Q1-K1-A10
tacggttgtccctaagatcaaagaagcaattgaggaccctgatgagcgtcttggcgctgatgttattcaaaaggcattggtagcacctgcttcattgattgcacacaatgctggagtagagggtgaagtggttgtcgagaagatcaaggagagcgattgggaggtgggctacaatgcaatgactgacaagtacgagaacctgatggaggctggtgtgatcgaccctgccaaggtgaccaggtgtgcgctccagaatgcggcctcggtagctggaatggtcctaaccacacaggcaattgttgttgag

SEQ ID NO: 12679 - DNA, 281 bp, Zea mays
  Clone ID: LIB3158-005-Q1-K1-A12
gtgcctcctccacgtactcagcgacaccttcatgtacaggcgtagacgcatgaacgccgccgaggacgcatcggtttatgacgatttaaagctcacaattgtgaaacactcggagtctgcaaacacgatgcttatcttcatatggtggattgaacattactattgcttgtctgcccgctgtaaacctttatcacatgatgctcctcatctctattgactgacaaatgacattctggcgcttgatatactctttgtgacattatatgttgccttggcttgtg

SEQ ID NO: 12680 - DNA, 51 bp, Zea mays
  Clone ID: LIB3158-005-Q1-K1-A2
accggaactgactgtcccgggtcgacgcgatgcggtgcgacagcaccccac

SEQ ID NO: 12681 - DNA, 409 bp, Zea mays
  unsure (1)..(409): unsure at all n locations; Clone ID: LIB3158-005-Q1-K1-A3
atgcagatctttgtgaagacactcactggcaagacaatcacccttgaggtggagtcttcggataccattgacaatgtcaaggccaagatccaggacaaggagggcatcccacccgaccagcagcgcctcatcttcgccggcaagcagctggaggatggccgcaccctggcggattacaacatccagaaggagagcactctccacctggtgctccgcctcaagggtggcatgcagaattttgtgaagacattgactggcaagaaccatcaccttgaggtggagagctctgacaccattgacaatgtgaaggccaagatccangacaaggaaggcattcccccagaccagcaacgtctgatctttgcgggcaagcagcttgaggatggccgcactctcgcggactacaaca

SEQ ID NO: 12682 - DNA, 280 bp, Zea mays
  unsure (1)..(280): unsure at all n locations; Clone ID: LIB3158-005-Q1-K1-A4
cgtccgatgcagatctttgcaaagacactcactgacttgtttatcaccctacaaaaccaatctacgccgtccgtttacaatatcaangccaccatccatcacaaacaatacattccacccaaccaaaaaacgcctcatcttctccctcaatcatctataagatttccgcaccctatcaccttacatcattcacaatgacatcactcttcaccttttgctacatcttattcctaccatgcataattttcctaatacattaactaacaataccatcaccctt

SEQ ID NO: 12683 - DNA, 165 bp, Zea mays
  Clone ID: LIB3158-005-Q1-K1-A5
gtaatatcttgtttggagttgtaatatcttatcttgcttgtgaaatcgaataggcctatatatgttatgctgtacgagtatgtggctccaaatttgtgagcccttctgtctgttatgaatccaatttgtgagcacacatgaatcaatttcgagattcgacatgtc

SEQ ID NO: 12684 - DNA, 357 bp, Zea mays
  Clone ID: LIB3158-005-Q1-K1-A6
gttcgattggcatacaggccagtgcacatgaacacattagacgatgaagtagagtccttcccgccgaaagcccgtgtctattgatcgattcgagcctcacaccctcgggaattccgtgtaaggtgttaataaagcagatgggcgttcctggctgagaacatgatctgaactcgtgacccccctttttctggggttctgtattttgtctgatttgctagaaataaaaggaacacatgctaatgcctgacagacgtttgtgtacatgaaattttgcatgggtttgttacttgttgatgctgtacctgctgttttgagctcgcatgattcatgaacgttgcctgattcacggtgcaaaaa

SEQ ID NO: 12685 - DNA, 288 bp, Zea mays
  Clone ID: LIB3158-005-Q1-K1-A8
ggaaccccgtgttttgcgtggagaaggcaagccgctcgatgctcgtcgatgttcgtagcgatgcacaaatcggaatcaccgtcgttcttgcaaacgccgtttgggtttgtttatggaccgagaggtgacgaccgtgcaagtaatgtggtgacaaccacaagatgcagttggtggacatactgaaagatggtggacttaaccagtggatgctcgccaagcgagtgccaccccgcaaacactgtctaagtgttaaattaaaagtactcattgatttggttgatggtgtga

SEQ ID NO: 12686 - DNA, 373 bp, Zea mays
  Clone ID: LIB3158-005-Q1-K1-B1
gatgagactgcactaaggctgatgaatgaatctgcatctttgatgatggagcaataccctgacattgtctttggctatggttttagcaatgagtatagttttgtgttccatgagaagagtgaactataccagagacgggaaagcctaatcctttcatcatgttcttcatatttcacttctctttacatgacgaaatggaaagagttcttcccctacacagaattaatgcagacaccacactttgaagcagatgctctatgttatccaaaactaaagatcatatgtgaatacttatcatggaggcaagcaaagtgtcatgctggcaaccaatacaacacatgcttttggatgctagtgaaatctggaaaaagcg

SEQ ID NO: 12687 - DNA, 290 bp, Zea mays
  Clone ID: LIB3158-005-Q1-K1-B10
tttttattttttagttgataatagaaataccgaaaggaaaccattgtctcagttccgatgtggcaaaccaataactgtttcttattaagtagacaactagacacatagtcataggcgaacgcaatcctggtttctttacactcgaataatcacctcaaatcacaggtttacatgttcactatggcatgccaagacatggataagcatcactccagccagcaacttgaattactagggtatgccaagatacagttagggatcacctgtcggactaactgtccgtgtaaaca

SEQ ID NO: 12688 - DNA, 308 bp, Zea mays
  Clone ID: LIB3158-005-Q1-K1-B12
ggcttgcttgattgttccaggtattcgcagtcgaccgtgtcctcggagcacgatgaagggggttgctgcctacctgcttgctgtcctcgctgggaatgccagcccctccgctgaggatttgactggcattctggagtcagttggctgtgaagttgacaatgaaaggatggaactgctgctgtcccaactgagcggtaaggacatcaccgagctcattgccgcgggcagagagaactttgctttattcccatgttgaccgcggcggtgtggctgttgcggcaagtgcacctgctgctggcggaactgct

SEQ ID NO: 12689 - DNA, 302 bp, Zea mays
  Clone ID: LIB3158-005-Q1-K1-B3
ctcccccctcttccgttccttcctcagccagaagggcggcgccgacaagaggaaaatggaggagcgtgaaccaaaggagcagaggcccaaggccaacgagaacaagcctgtgatgaacgaatgaatatctccagaagctttgttcaatgtgcaaccaaatgcgatgtccgtttgctctggttagcttaaaaccaacgcttccaataatcctattggtgtcttagtttccccttatagtgttatttgctcggcttgaacatggcaacggaaatgaaacttgaactacctatggtactgtcatc

SEQ ID NO: 12690 - DNA, 356 bp, Zea mays
  unsure (1)..(356): unsure at all n locations; Clone ID: LIB3158-005-Q1-K1-B4
cccacgccgtcacggcnnggcggcggcgtgagccaaacgcaggacgaaatgcttatggtgtgaaggggaaggaagccaccagccatgggtgcgactgtcaacttctactcgcaacctatgtgtaagaccgttcaaagaaaaccaagtgcgtcccttatgaagaaggagcccgtcttgatgcctgannactgaagactggttggtgaagtattgggcctgagtgtgccaagcgtgagcctttggaagggtccaagtatgcccactgagcaggatctcgtaattgcttgcaaggcactttgcttcactccttgacgaagaagaaacccccgtcgtatcttttgggggtgaggcacttc

SEQ ID NO: 12691 - DNA, 372 bp, Zea mays
  unsure (1)..(372): unsure at all n locations; Clone ID: LIB3158-005-Q1-K1-B5
gaagaagaaggaccacaaggacgccgaggaggctagcggcgaaaaaaaccaccaccacctttgcggctgaccgtagtaccggccggcgcgcgaccgagagctagctagctccggcgcacacaaccacacacctgtttaattctgtactgcatgcgtgtgtaatttgatggttcacaataatgagtccctctccggaccttggtagctgcttgcttgtggtgagtgagagtgtgagactganggagaagaggtggtgtgggcgtggggctacgtcgagagaggcgtgtttcctgtactcgctttcgttttctctgcatgcgtgtataattgtgttcaataataagtgagagcggtgtgatgtgtggctcccct

SEQ ID NO: 12692 - DNA, 221 bp, Zea mays
  Clone ID: LIB3158-005-Q1-K1-B7
gccaaccggagttgcctggcatcgagtacagattctgatgtggagaacagggcgcctggcatgaatcagtggcatctccacccaactctgatagcctgccacaagggtggaaaagagatcgcagtcgcaagaggaatatcatcctgccaacatgggtgagccgcgggcgcatcatactaaattactaattacgtttcttctctgctcgtccaccgccagtt

SEQ ID NO: 12693 - DNA, 373 bp, Zea mays
  Clone ID: LIB3158-005-Q1-K1-B8
cccacacgggcacacctgccctccccgtcgccgcggacccactcccatggcaaagctgccgcgtctaccctgctcgtttgccgttctcgcgctcatgtgcatcatcccgctcacagcgccgcggcctgcactgtcctcgcgcgcggccccaagggacggtgtctccttcgccggcgcaggcaacacgatacatcaacttcttaaagatcacggccttcccggaggactgctcccgcgcggcgtggagtcgtacaccctggacgagtcgaccggcctgctggaagcgcggctgtcggcgccgtgctacgccacgtacgacaacggcgaactggcctacttcgacaacgtggtgcgcggcaacctcaacaagggc

SEQ ID NO: 12694 - DNA, 445 bp, Zea mays
  Clone ID: LIB3158-005-Q1-K1-B9
gtctccctccccttccttcgctcgccatggccatggcgacctccaccttctccccgcgtcgggcaagcctcaggcccctgcgggcgggcggcaagcccgtcggactcctccccttcccgcgccgcctcgcctgcgccaccgccgccggggaggcgccgcccgtggagcagcgggacgaggcagagccggcccccgccgcggcctccaacggggccgccgtcaagtccgaggccccgccgccgcccgcgccagcgccggtcccggccttccgggacgccaggtgggtcaacggcacctgggacctcgccaagttcgacaagggcagcggcgtcgactgggacgccgtcatcgacgccgaggccaggagaaggagatggctcgaagactatccggaggcgactaacacagacgaggctgtcgtcttcgacactttcattattccatg

SEQ ID NO: 12695 - DNA, 190 bp, Zea mays
  Clone ID: LIB3158-005-Q1-K1-C1
gtttggaggcggatccgatgttgtcatgtgtaggttgtaagcgggcaatgtgattggctgtgtatctgcttcgctcaagttgctttatgtcattcctaatggaataggaaatgccgtgtttcttacgcctgcttttggttctgcattctactgaaaaagcgtacgataattaacacattcacctttgaag

SEQ ID NO: 12696 - DNA, 374 bp, Zea mays
  Clone ID: LIB3158-005-Q1-K1-C11
gctgagaagatcaaggactggagcaacgtagttgttgcctatgaaccagtttgggctggggggactggtaaagttgccaccccagctcatgctcaggaagtgcacgcctccctgagggattggctaaagaccaatgccagccctgaggttgctgaatctactaggatcatctacggaggctctgtaactgctgcgaactgcaaagagctagcagcacagcctgatgtcgatggttttcttgtcggtggagcttctttgaagcctgagttcatcgacatcatcaacgcggccaccgtgaagttcggtttaaatgttacgctgaagacaaacaatactttttttgctcaactgtgctatgtaagctagtagctttt

SEQ ID NO: 12697 - DNA, 188 bp, Zea mays
  Clone ID: LIB3158-005-Q1-K1-C12
cgcaccgcatccacctccaccgcgccgtcgttagagggggaggagggtttccgatggggggcggctaggatacgttcgcctcccccactgccaccgccgccgcggacttcgagatcttcatcaactgcagcgacagcacgcccaagcttcacaatttggcggacgagatggatgccctccgcgcggca

SEQ ID NO: 12698 - DNA, 376 bp, Zea mays
  Clone ID: LIB3158-005-Q1-K1-C2
ggaaagtgttcgtcctcatggcgccgccgcagccgaagtcgggcctcttcgtgggcatcaacaagggccatgtcgtcaccaagcgcgagctgcctctgcgcccgtcccaccgcaaggggaaagcaacgaagagggtgtccatggtcaggggcctgatcagagaggttgctggctttgctccttatgagaagcgtatcaccgagcttctgaaggttggcaaggacaagcgcgctctgaagcttgccaagagaaagcttggaactcacaagagggcaaaggaagaagagagaggagatgatgggcgtcctcacgaagatgagatcggctggtacgcacactgacaggaagaaataaagcatttcaaagtcatgaatgt

SEQ ID NO: 12699 - DNA, 276 bp, Zea mays
  Clone ID: LIB3158-005-Q1-K1-C3
cttaaggccaaggcacagaagggcgcgattgggggctcgggtctgaagaaaagtggaaagaaatgagactggtcacccgtctccaatacctagaggatgataaggcagctgtctatctgtgttgcgcttcactaagtgtgattgtaacagtggtacctcttgtgttctgtgttccgcgatgttgcagttggttgcttgatcgaaagatgtttcaacctcccatctgctagctatgatacagatggtcccctgataataatgatgacatattctgtg

SEQ ID NO: 12700 - DNA, 239 bp, Zea mays
  Clone ID: LIB3158-005-Q1-K1-C4
agcggccctcgtgaaggcatatgctgctgatgtcaatctcttcttccagcactttgcacagtctatggtgaatatgggaaacatctcgccactgacagggtcacaaggtgagatcaggaagaactgcaggaggctcaacaatgaccactgagggcactgaagtcgcttgatgtgctgaattgttcgtgatgttggtggcgtattttgtttaaataagtaagcatggctgtgattttatc

SEQ ID NO: 12701 - DNA, 401 bp, Zea mays
  unsure (1)..(401): unsure at all n locations; Clone ID: LIB3158-005-Q1-K1-C5
cagcgcggcgcggaccagcgcggaccgccaggcggcgtgccgctgcctcaagagcctcgccaacagcgtcaagagcgtcaacatgggcaccgtcgccaccatccccggcaagtgcggcgtctccgtcggattccccatcagcatgtccaccgactgcaacaagatcagctaagttacgacgaccaagctaataagcctaccgaacgtacacgtacgccccgcgcgctgcacgagtgatgaagccagggaagaaataaaataaagctagctgtattgccaggagcagcatgcattatttatcgatctatatatatatatactggactgnagnactctattatatatgtatgtgtggcctgcagtgcgaagtgcttcgatccacctactnngtcacacagttt

SEQ ID NO: 12702 - DNA, 338 bp, Zea mays
  Clone ID: LIB3158-005-Q1-K1-C8
cggagaacgtgcagtcgggccacttcgccttcacggcggcggaggccggcgactacctggcctgcttctgggcgcccgaccataagccaccggtcaccatcgggttcgagttcgactggaggagcggcgtctccgccaaggactatcccagcgtcgccaagaagggcaaggtcgatatgatggaattggagctgaagaagctagaggaaactataaaaaatatacatgaagagatgttttatctgcgtgaaagggaagaggaaatgcaggacctgaacaggcgaacaaactcaaggatggcttggttagggttcctctcccttggcgtatgcttatcg

SEQ ID NO: 12703 - DNA, 180 bp, Zea mays
  Clone ID: LIB3158-005-Q1-K1-C9
gctaaaaaaaacaatactctccaacaattttttacaaacctaaaaaaccaattactactgttcgtacttttaaactcctcaccataactcaacctaaacaattccactctttacttacttaatcattaaataccactaccaaaactaatccaccttaatctactatgatcatctacatat

SEQ ID NO: 12704 - DNA, 426 bp, Zea mays
  Clone ID: LIB3158-005-Q1-K1-D1
gctgaggcctttggcgtcttgttggtgaacgacgcgaagggcctccagatactgcgcagcaagaaccacacggaggtcggggcggctgtgagcggcaccgatggcggtggaccgtacttctggtgcgtcctgttcagtgacggcaagccgactaccagcttcaaggtggatggcgaagtgccgaaggcagccatccacccgggatgcttcagtggcaacaatgacgactgctcgggccccacaaatggcgccgttttgaccagtgctggtgcgctgaggctggtgacggccattctttttgctgtagctgctttgtgagcgtgtaagtaggtgtaatgttttctgccattattttgctttgtcaccatctcctgtctgtctgcagtggcacgctatatattctttgagcatatgaactatgtatgc

SEQ ID NO: 12705 - DNA, 339 bp, Zea mays
  unsure (1)..(339): unsure at all n locations; Clone ID: LIB3158-005-Q1-K1-D10
gagattttccagaggcaggtacctggtgctgaagcagctgcacaggatgatgacgacgtcggtgagcttgtccaaggagagacatttgaggaggctgcagagaaggagcctcaactggagcaggatgagaagaaagaatcgtaattttgttgtgaagggtcgtcggtttaattgttggcatcagccttgcgagagaccctacctgctcatctggcgtgcctctttacatgtgctccaactttgtgtcaagtgtgcttcgggttcgaaaagcattactgcattatgttttctgaagacagtgtangcatatattttcctcgagccatagtgagtttccgc

SEQ ID NO: 12706 - DNA, 406 bp, Zea mays
  Clone ID: LIB3158-005-Q1-K1-D11
cccgacctcgtgcggtgtgtatgtcgagagatagagagagagaccctaccgggcgggggagggccaggaagaggagggcgactatcgcgtccggctggagcatcaacgggaacaagggccgctgctacgacttttggctggagttcagcgagtgcatgagccgctgccgccagcccttcgactgcggtcttctacgcgaggactacctcgagtgcctccaccactccaaggagtttcagcgcacgaacaggatctacaaggaggagcaacgtcagatcagatcttctgctcgtaaggccaatgaagaagctgagggtgcccctgctgttgcaccacaccattagtcttcctgtctattttttgcgtggttgtttattgtaactcatctttggttcagttatgatgc

SEQ ID NO: 12707 - DNA, 197 bp, Zea mays
  unsure (1)..(197): unsure at all n locations; Clone ID: LIB3158-005-Q1-K1-D12
aaaaanggaacgacccacgcgtccagcctccctttccccttacctacctccctcttctcgcaggccaccaaatacaatctcgccgtcgcttccaccccgattatccctccccccacccaaattacctccaacaaacgcgaatcttaacactacactcatactcgcctctctaattcaacatgaaagcggccaaattc

SEQ ID NO: 12708 - DNA, 441 bp, Zea mays
  Clone ID: LIB3158-005-Q1-K1-D3
gctgcgtcttccccgagctgctctcccgcaccggcgtcaagttcggcgaggccgtctggttcaaggccggctcccaaatcttcagcgagggcgggctggactacctcggcaaccccagcctgatccacgcgcagagcatcctcgccatctgggcctgccaggtcgtgctcatgggtgccgtcgagggctaccgcattgccggcgggccgctcggcgaggtcgtcgacccgctgtaccctggcggcagcttcgaccccctcggcctggccgacgaccccgaggccttcgccgagctcaaggtgaaggagctcaagaacggccgcctcgccatgttttccatgttcggcttcttcgtccaggccatcgtcaccggcaagggcccgctcgagaacctcgctgaccacatcgctgacccagtcaacaacaacgcatgggcctacg

SEQ ID NO: 12709 - DNA, 242 bp, Zea mays
  Clone ID: LIB3158-005-Q1-K1-D4
gatccacaacctggagatgcggcagctgcacaagaccacatcggtagaccagaatcaactcggcatgcaacagcagaaccaccactcgtcggacggcagcgggaggccttcctccgaccttgaactccagggggccaagcaggcatgacagaaacctactctgggcaccacccacatcagacacagcttccaatgcccacgacatggaggacaggtgagcttggacagggctcccccggcac

SEQ ID NO: 12710 - DNA, 363 bp, Zea mays
  unsure (1)..(363): unsure at all n locations; Clone ID: LIB3158-005-Q1-K1-D5
gggttctagtgcgagtttggctggggatgatcctaatttggctgatgaaggtgttagtaaatgatgtccatgtgcaggtctgattctggcatgtccaaaggaagctctcactccttactaaagcgctctacaaatcaacatactactacatctcagtctgttcccgcagatctgtcagcaatcaggctgaagaaagcaggacttgcgtcctctgatgagaataagatggaagcaggatttgcctcagtagcccaaggtatggaaaggctgcgttcctagcaacaaagagacggnggcgtatggcatggccatcagccaccaacaatccagatgcctctggtcagtccttcagcgaagcgttga

SEQ ID NO: 12711 - DNA, 292 bp, Zea mays
  Clone ID: LIB3158-005-Q1-K1-D6
cggacgcgtgggcggacgcgtgggattttccggtgatgtgattggagacaatagaagcgtgtacgtacgtacgtgtggctgatccctgaccccgagcagagcagccctaggtgaggtgaccattgccaccagatatatacccgtctttctagcttagctagggagcttcttctttttcccctctcttgttattgtcaagtgtgtgcgcgtgttgtaatggttttactcgcctaactagccggtggtctcgcgaggcgaagaaataatgcaaccgaaagcattgctctcttca

SEQ ID NO: 12712 - DNA, 138 bp, Zea mays
  Clone ID: LIB3158-005-Q1-K1-D7
ggccattactgctagcgaatactgtgattttgctcttgcattttgggtgcttcacgctcgggtgcaattatcatgtcaaagaaattgttaccctcttgctccttttgttagagacttaatagtattgttttgactggc

SEQ ID NO: 12713 - DNA, 334 bp, Zea mays
  Clone ID: LIB3158-005-Q1-K1-D9
gcaatgatcgctgaggtgagaagcattgcgcaagcaatggagcttgcgccaagaatcgtgtgcgaaaacttgagaacaattagttactagtggctaggaatacccttgccatttctgagcaaacttgagcagtcaataagaaagcaaaagagagtcatcgactctcaattttattctctctacgctgtcttttgcctgtggcaatgaatagcgcattagcatcatagaagtattagcttggtcaatggaagttgttcatgcgcttcttcattgctgaaagtgttgtcatcttgtcgaactcacaataagcttagataagtgctgggtttgtggg

SEQ ID NO: 12714 - DNA, 334 bp, Zea mays
  unsure (1)..(334): unsure at all n locations; Clone ID: LIB3158-005-Q1-K1-E1
ctagggttttggcgtccgagaccaaaccaagctctttccggcgacggtgagggctcgatatcggagtccagtaggcggctcctgctgcttcggcggtccctaatccctctctcggcagtgtacagatggcgtccggcggtccggcgctcgagccgctcgtcgaccaggtcatctccgtcatcaccaacgatggccgcaacatcgtgggtacgctcaggggattcgatcaggccaccaacattatactcgacgagtcccatgagagggtctattctagaaagganggagtccaacaacttgttcttggtctgtacattatcaggggtgacaacat

SEQ ID NO: 12715 - DNA, 131 bp, Zea mays
  Clone ID: LIB3158-005-Q1-K1-E10
gatttaaccgaatgtgtgacatcttccaaaatactggttgcgtgtacttaacttgagcgctggaaacatactggtgtaccaggctacctgtgttgagacattttacttgtacacatggtcagttttcgttc

SEQ ID NO: 12716 - DNA, 357 bp, Zea mays
  Clone ID: LIB3158-005-Q1-K1-E11
ctaattaaacgaggggtctttagggggctaattataaaaaatcaagaggcaaactcttctcgtgaaaaaaaaaaaaaaaaacactataactaaaacaaaaaaaaaacaacaaaaataacctaccatacttcacaataataaaaaataaaaaaaaactacctaaacctaaaaaaccaacaaaaaaaaacacaaaagggcccccattttataaattcaaattttccctcccttcttttccaagatccattttttttttttgtccccccaatttactatcccccccccctgctttcacacttcgtgacttgaaaaccccccccgttacccaatttttttgcctttaaaaaaaaacccatt

SEQ ID NO: 12717 - DNA, 323 bp, Zea mays
  Clone ID: LIB3158-005-Q1-K1-E12
aggcaaacaatgcctatatcttcccagggtttggcctcggcgtggtgatgtctggagctatgcgcgttcatgacgacatgcttctggcagcatcggaggctctggcccagcaggtcacagaagaaaattttgagaaggggctgatttatcctcccttctcaaacatcaggaagatctctgcccacattgcagccagcgttgcagcaaaggcatatgaacttggtttggcaagtaggcgccctcggccaaaggacctggtgaaatatgcagagagctgcatgtacagccccatctaccgcaactaccgttgaattcggatcaac

SEQ ID NO: 12718 - DNA, 243 bp, Zea mays
  Clone ID: LIB3158-005-Q1-K1-E2
ggagctgccaaagcccgaggtgcctgaccaccccgttgtgccggacctgccgaagcccgagcttcctcctaacccaaccgggcctgacctaccaaagcccgaggtgccggagctgccaaagcctgaggtgcctgagcaccccgccgtgccggagctgccccacccggacgtgccagagcaccctgcttccgtgccggagctgccgaagcccgaggtgccttgagcaccccaaccgtgccggag

SEQ ID NO: 12719 - DNA, 408 bp, Zea mays
  Clone ID: LIB3158-005-Q1-K1-E3
gtgctgctcgaggaccccgccgcgcaggccaagcgcctcctcgagcagcgccgaaccgacaaggcggagcgcgccgccaagtccatctcccgcatcggcctcgacgtcgacaagctcgccaccaaggtgtcggcgctggaggccatcgtcagcaagggcggcaaggtggtggacgctgacgtggtcgccctcaccgaggcgctcatgaacgagctggtcaagctggactccatcgccgccgacggcgaagtcaaggtgcagcgacgaatgcaggagaagcgggtgcagaagtacgtggagacgctggacgctatccgcgccaagaacgcggcggcgcccaaggccaaggccaaggccaacggcgacatgaatgggcacgccaaggccgcgcgccgaaaactccgcggc

SEQ ID NO: 12720 - DNA, 98 bp, Zea mays
  Clone ID: LIB3158-005-Q1-K1-E5
ccaacgcgtccggtctaaatactgactatgcatgtaatttttttgggttttgaccgtttaaaactggattcaaaataatacctctgttttcaaatttt

SEQ ID NO: 12721 - DNA, 384 bp, Zea mays
  Clone ID: LIB3158-005-Q1-K1-E7
cttgggtggttcttggagccgtactattggttcagctggggatgttccactgcaaggcgacttctctgctgagcacatgatttttggagttgatggggttgatcctgtcaggcgagagaagctggttgatctgctagacattgatctgcagtggcgcatgcataaagtttcagatgggcagcgccgcagggtgcaaatctgcatgggtcttcttcatccatacaaggtgcttttgctcgatgagatcacggttgatctggacgtggtgaccaggatggacctgcttggtttcttcaaggaagagtgcgagcagagggaagctaccatcgtgtacgccacccatatatttgacggactcgagacgtgggctaccgactttgcgta

SEQ ID NO: 12722 - DNA, 356 bp, Zea mays
  Clone ID: LIB3158-005-Q1-K1-E8
aaaaaaacgagtgatcactgaaattaagctacatgtttctctccctctccgctctcccttcgcttccccctcctctcttctcccttctctagttcaagcggagtgcggcgacgatgctccgttggcgttgtccgtggtgtagtcggtggcgacggtgggcgccgaggaggcggcgccgttgatgttgaagccggtggcggccgtcggggacgaggtgaggacgggagggggaggggtgatcctggacgggttgaatgacggtgctgcagcagcgccggcgccggcgccggcggctggggtttggagcgacgcggcggcggccgcgggcgatgaagcgctgcggcgggcgctgtgcc

SEQ ID NO: 12723 - DNA, 339 bp, Zea mays
  Clone ID: LIB3158-005-Q1-K1-F10
gcacgtcaagtcgtctccggtgacgctgtcctcctacagcggcagccccatcctcaactggactctcggctgcgtcttcatcctcggccactgcctctcctggtccggatggatggtccttcaggtgccggtgctgaagaggtacccagccaggctctcggttctgtcactgacctgcatcttcgggctcctgcagttcctggccattgccgccttcaccgaggaggacctgagcaggtggaatgtccgctcaagaggggagctcttcaccatcctatacgctggccttgtggcatgcggggtagcgtatgctctgcagatctggtgcatcgacagggg

SEQ ID NO: 12724 - DNA, 253 bp, Zea mays
  Clone ID: LIB3158-005-Q1-K1-F12
gaaaaaccggagcgacccacgcgtacgctcatcacaaataaaaagagaacccacttttttttaactgaacaaacacaaacaatctgttgggtttctatcacattacccaacaacaacctttttgttttagatgaaaaaaaacatgcccgaacgcttctatcaaattttgtttgaccaaaccctccatgctattcctcttattacaaaaataaatacatgatcatatggtaaaacacatctctatcagacataa

SEQ ID NO: 12725 - DNA, 301 bp, Zea mays
  Clone ID: LIB3158-005-Q1-K1-F4
ctgacaacgtccacgacttcgtcttcaaatctggcaaaaatgtccttattgaattctatgccccctggtgcggacactgcaagaagctggcgcccatcttggacgaggcagccaccactctccagagcgacgaggaagtcgtgattgctaagatggacgcgactgccaatgacgttcccagtgagtttgacgtccaaggctacccgaccttgtacttcgtgaccccgagcgggaaggtgacatcctacgacagcggcaggacggcggacgacatcgtcgacttcatcaagaagagcaagga

SEQ ID NO: 12726 - DNA, 426 bp, Zea mays
  unsure (1)..(426): unsure at all n locations; Clone ID: LIB3158-005-Q1-K1-F5
attgatttgaaagatttcagcttgcaagattttggacagcaaggctgtctacttcggagcttacctacagatattgtgtttgacaacgctacaggcattagctttacatgcgatttgagtgacaatattgcagcaccatggccatcctcatcttctgtccaatcattgtcactttgtgctccagaaatgtcgctgcctgctttgcctgtctcgccgaaatcagaaagctcaggtccctccagaactgggatcggcgttttgttgctgcttgtattcctcactaccatcactatctgaagaatactttcatctagtgagccagaagcttcttacccctgttgcattttttccccatctgtgcaggcccgcgtgtaaattgtctgaattacattcttgtaaatgagcctnccccttgtgtctcttttt

SEQ ID NO: 12727 - DNA, 432 bp, Zea mays
  Clone ID: LIB3158-005-Q1-K1-F6
ctcgtccgtcagaagatgaagaggaaccctcgtaaggttaagtggacaaaagcatacaggcatttgcatggcaaggacatgacccaggatacaacctttgagtttgagaggaagaggaacaggcccgagcgctacgaccgcaatttgacggagcagaccctgaaggctatcccgcttattacaaagattaggcatgatcgtatggaaaaacacatctcaaacagacataaacctggtaaacgcaaggagatggaaaaggattccaaggagctggagcaggacatcgccatgctcccgaagaagcttattagcaaccatcttgcggctgaaaaaaacgaaagtcaaagttgaagttgttcagcagcagacagaagataacgcgatggaagagtagtgcgtggcattttgtgtgcttgtgtttcatgtctgatg

SEQ ID NO: 12728 - DNA, 317 bp, Zea mays
  Clone ID: LIB3158-005-Q1-K1-F7
ggaagaaggatcgtcctgactaccaacggatgcagaaagtacaacagtgagatcccatggagcttattattggcgggaacagaagaaagcaacatgaaacaacgaaatcgatcgaaagagaaaacgggatcgagtagacagcaacgcgggaggaggaccgatatgcttgaattgcgttgcgtgccgacgacctgcttgtgccagcaagcaaagcctaggctactactagcatatcttcttgcagaagcacttgcgcgtggcgccctccgccttgcactcgccgccggggaagttctcggtctggcacacgttggcgc

SEQ ID NO: 12729 - DNA, 185 bp, Zea mays
  Clone ID: LIB3158-005-Q1-K1-F9
aaaagggaacctggggcccaacaattttttaattttgcaaatggttaaacacgtttaaatattaacgggtgtaacatgcatgttgtcctgctttatgcatgattatttaaagggggtaccactggaccctactacttattatattatatatattggcaacattaaacgtgccggccggtgtattt

SEQ ID NO: 12730 - DNA, 388 bp, Zea mays
  Clone ID: LIB3158-005-Q1-K1-G11
gcaactgcctcaagagcatgacgggccggctcggcggcggcgtcagcatggccaacgccgccgacatccccggcaagtgcggcgtctccgtcggcgtgcccatcagccccaccgttgactgcaccaagatcaactgatcgatggaccgtagtggaggtagctatgcctctgcatgctcgttggatggcagcgtggccatcagcagcatgcggtcgtcgtcgtcgtcctagcagatgtcctagctacgtgtgtgtcctcagactggcactgtggcacataataaagaagtagatcatgcacccactaatcatcacttcgtctagtccctccgttcgctgtcgtcgtcgtcgtcgtcatcgtcgtcgtcgtgtacctcgtacgtgacatg

SEQ ID NO: 12731 - DNA, 395 bp, Zea mays
  unsure (1)..(395): unsure at all n locations; Clone ID: LIB3158-005-Q1-K1-G12
cgaagttaagccaccatgtggacgagggctttagcgacggtgctgctgttcgtggcaggcgccgcgctgctcggcgtcggcggcgccagcgcgcagcagggcgtgtggagcatcatcactcgtcccatgttccagagcatgctgagccaccgcggcgacagcgggtgccagggcgccttctacacctacgacgcgttcatcgaggccgccagcaagttccccggcttcggcaccaccggcgacgagcagacgcgcaggcgggagctcgccgccttcttcggccagacgtcccacgaaaccaccggtggatgggcgactgctcctggtggnaccgttgcctggggatactgccgggtgaaggaacagaacccgacggacccaccctactatggacg

SEQ ID NO: 12732 - DNA, 386 bp, Zea mays
  unsure (1)..(386): unsure at all n locations; Clone ID: LIB3158-005-Q1-K1-G2
gcgagccatcgtggctggcggagcccatggtgaaggcggcgttcgaaaagttcggcggcaggatgaaggaaatcgaggggttcatcgacgagtgcaacaacaacctggacctcaagaaccgctgcggcgccgggatcgtgccgtacgagctgctcaagcccttctccaagccgggagtcaccgggaggggcatccncagcagcatctccatctgatccatcctcagcatgcattagtccaattaattaaatcgggggttgtactattattgcatgcagaggctgcttgtcgaataaaacgtactatatgtacgattgtattgtacatgtgtgtcaatgcaacaagangcacgtttgagactttgagttaataccaattaaactagt

SEQ ID NO: 12733 - DNA, 378 bp, Zea mays
  Clone ID: LIB3158-005-Q1-K1-G4
cctcaacgcctaccaaacttacgcagcctctccataactgcgagctgttgctcctcctcccgagctaccattctccgtcgatctcctccaggctgtagcgcgctgccacgcccgcccatggcctcgggctcgaaaccggacagcgtggagaccgaccatcctggcggcggcctctccatcgccgtcgagcacaacccaccggagtcgcgcctgcagcagctcggcgtcaggtcctggcccaagtggggttgcccgccggggaagttcccggtgaagttcgacgcgcggcagacgtgctacctgctcaagggcaaggtgcgggcgcacatcaaggggtcgtcggaatgcgtggagttcggcgccggcgacctcgtcgtc

SEQ ID NO: 12734 - DNA, 424 bp, Zea mays
  unsure (1)..(424): unsure at all n locations; Clone ID: LIB3158-005-Q1-K1-G5
gccgtcaccgccccttccttcgccgcaccagcgccagcccgcgccgtggtcagaaggaggtccttcaccgtgcgcgcctctctccgcaaggccaccggcaccgccgccgtggcaatggctgccagcgccctgcttgccggcggtgccatggcccaagatgtgctgctgggcgcangcgacggcgggctcgtcttcgagcccagccagttcaccgtcaaggccggcgacaccatcacattcaagaacaacgccggcttcccgcacaacgtcgtcttcgacgaagacgaggtgccgagcggcgtcgacgccaccaagatctcgcaggaggagtacctcaacgcgccaggcgagacctacttcggtaaccctcaccgtgccgggaacctacggcttctactgcgagccgcatcaaggagccggaatg

SEQ ID NO: 12735 - DNA, 457 bp, Zea mays
  Clone ID: LIB3158-005-Q1-K1-G6
ccgcgaccagctgagctacttcttcactggcggcgaggccgtggcgcgcgccgtgtccgacctctgcccgctcctcgccgccacgctcgtcctcaacggcatacagccagtcctctccggcgtcgccgtgggctgcgggtggcaggcgttcgtggcgtacgtgaacgtgggttgctactacgtcgtcggcgtgccgctcggcgtcttcctcggcttctacctcgacctcggcgccaagggcgtttggagcggcatggtcatcgggggaaccttgacgcagacgctcatcctgctctgggtcaccgtcagaaccgactggaacaaggaggtggagaacgccaaggcgaggctggacaagtgggacgacaagaagcagccccttctaagagaagaatgaaggaagaatctagtagatcacgcaaggagtggcaatgtaacgcgtgctgatggatttttg

SEQ ID NO: 12736 - DNA, 363 bp, Zea mays
  Clone ID: LIB3158-005-Q1-K1-G7
tccatgacagtgaacaaagttagtcttgatggccaagcgaatcccaaagttgagctattttctcaagcacgtgattgtcttctcccaatgggcctcacatctgagaatgttgcacaccgttttggcataacacgactggagcaagatcaagctgctgttgagtcacatagaaaggctgctgccgcagcagcttctggtaaattcaaagaggaaaattgtgccagttcatacaaagattgttgatccaaaaactggtgaggaaaagaagatcgtagtctctgcaaatgatggaatccgagtggatacttctcttgcagtcctgtcaaaactcaaaccagcattttcaaaagatggcagcactac

SEQ ID NO: 12737 - DNA, 207 bp, Zea mays
  Clone ID: LIB3158-005-Q1-K1-G8
cggacgcgtgggcggacgcgtggggccggatgtggtggtgctatttatcctcgacaagaaatgatagaggcttaggttagtcgaaaaaaaactcactgtatctgcatcagtttctgaacttcgttcatgtatatcgcctcatgaactctgtaaaccattcacttgcaagacacgataatcagtttagggttttcgagccctccttca

SEQ ID NO: 12738 - DNA, 327 bp, Zea mays
  unsure (1)..(327): unsure at all n locations; Clone ID: LIB3158-005-Q1-K1-G9
gagatggccgactggggccccgtggtggtggcggtggtgctgttcgtgctgctgtcgccgggcctgctgctgcagctgccggccaagggcgggcgcttcgtggagttcggcaacttccagaccagcggcgcctccatcttcgtccacgccatcatcttcttcgccctcgccgccgtcttcctcatcgccatcggggtgcacatcaccacggactagccgtatagccatagccgggaccgggatctttcttcgttacagtctgcctgtatatacatacatacatgctcagtacgtacgctntaccactgggtcagtgagtatctcttt

SEQ ID NO: 12739 - DNA, 411 bp, Zea mays
  unsure (1)..(411): unsure at all n locations; Clone ID: LIB3158-005-Q1-K1-H10
gctcgccaagtggtatggtcctgacaggagtgttctacctgccggatgggctgttggaccggtcggaggtgccggagtacctcaccggagaggtccctggagactatggctacgacccttttggcctgggcaagaagccagaggacttcgccaagtaccaggcctacgagctgatccatgccagatgggccatgctcggtgccgctggcgctgtcatcccagaggcctgcaacaagttcggcgctaactgtggccctgaggctgtctggttcaagaccggcgcgctgctcctggacggcaacaccctcaactacttcggcaacagcatccncatcaacctggtggtggccgtgatcgcggaggtcatcctcgtcggcggcgccgagtactaccggatcaccaacgggactg

SEQ ID NO: 12740 - DNA, 351 bp, Zea mays
  unsure (1)..(351): unsure at all n locations; Clone ID: LIB3158-005-Q1-K1-H11
cgatgctgtcgaaaagggtcacctgatgagactgctcagtggtgtaagcaagcaacgatggacagagatgtggagtaggctcagagaggtggacagacattttgaataccagtatccatcccagaaggatgatgcggtccagatgatctggcggtccttgtctagaaaggtgccgtcaattaagctgaaggttcatagatctggtagattttcaagacctggtaggggaaaataaaacaggaaggtgcgcgtgtctatcttgtctcttgtggccaatctaatgtaacacatttcactgacgcangctgtcatgttttctcagctgtacaaaatagatagaatgttatattc

SEQ ID NO: 12741 - DNA, 355 bp, Zea mays
  unsure (1)..(355): unsure at all n locations; Clone ID: LIB3158-005-Q1-K1-H12
accggaactggaaggccgactccaaccgacgcgtgcggttggccaggccccagagaataacatgatcctggagtacaagtgagcgaagtggcgtggcctgcagctagatatggaggaggctgcacgaaggggagggactagagaggcgagattagctgtggagttgtgttggcttctcgtgttttcttttgcgttcttttcctggtcttcgctgtggcgcttttgtattttaattgttggacccgtaactatcaaggctctgctattagcgcttgaaacctgtaatggcatcgtatgatataatgtgatcgagggtgctagttccccgcattaaanaanaaaaaaaanaannnna

SEQ ID NO: 12742 - DNA, 320 bp, Zea mays
  Clone ID: LIB3158-005-Q1-K1-H5
ccgaacggaagtgccgacacacgcgtccgctgtaatatgagatgtgattttatttctagtctagctattgtatttttttttcggactctacatgtgtcagttcgatttgaacatgttatttttttcataaagatttgaagacatctaaaacaaaaaaaaaaagaaaaaataaaaaaaaaggcggactttaaaaacaccaactaataaaaaagaaaaggtcttatcacaggcgtgccttcactgaattgaacagaaaagaagtcactgagcgatctcggtctaactagcaaaacaagaagatctgttgctagaaaaactgt

SEQ ID NO: 12743 - DNA, 327 bp, Zea mays
  unsure (1)..(327): unsure at all n locations; Clone ID: LIB3158-005-Q1-K1-H7
ccgccagagccgccgccttacgtccagctgccacggtacttcatcgggccctttgccggtgcaggcggcgcancacccaccgcaccaggattctgattgctcttcattaggctataaatggcaggaaggcaccgggcaccccgacaataccatgatgaacctcgaggataccgtgatggtccaccacctccacttccacgaccaagacctctctcaccgcgtcgcatggcagaggaactgtctaggcgccgtgctgagatccgtaaaaatccatgaggacaatcagcgtctggcggatgaaattgttagtctcaagcaaaccatgcc

SEQ ID NO: 12744 - DNA, 288 bp, Zea mays
  Clone ID: LIB3158-005-Q1-K1-H8
cggacgcgtgggttttggcatgctcatcgccctgccgatcacgctcgtctactacatgctgctcggcctgtgaccgacccgtgggtgatggcaatggcatgccccgcattgctgtaactgtaaagaccgctgctgccactttccgttcaagggaggcaagtgaggagactgtctgctacgacatttgcttggcgcttcaaaaatgagaggctgggggctctctctcttctatctattttttattttttttctaaaactaggtgtgaggattgtatggatggaaagtgt

SEQ ID NO: 12745 - DNA, 150 bp, Zea mays
  Clone ID: LIB3158-005-Q1-K1-H9
cggacgcgtgggtgatcaactctggagcagctagagtgatgtagttgtgggcttttgaacaatagctggagtgatatgaaacattagtgatgtagttgtgggcttttgaactgcttcaagctggagtgatgtcactgtggtgcttttgtg

SEQ ID NO: 12746 - DNA, 412 bp, Zea mays
  Clone ID: LIB3158-006-Q1-K1-A10
gctgtcggtcatgacatcgccatcaagagaaataggaaagtttttataaaggtgatattgattttgtggctggtttcatttgttggaatgctcttcaactttcttacactcatttacattggtgtaatgctttctctgttggttccaccactctatgagaagtatcaggatcaggttgatgaaaaggttggcgtagcgcacagtataatattgaggcacataaataccattgttaccagggctgggcaatcagccaaggagaagaagactgaataaaagaattgttttgatgtattgtggaacatctctggttgtgaagtggagttgtgatagtgggcttttcatctttggactctccatatggccctccacttacattagttctccatatgctgatctgaggttttgatgt

SEQ ID NO: 12747 - DNA, 341 bp, Zea mays
  Clone ID: LIB3158-006-Q1-K1-A11
cctccccctccggttcgggttcgggttcgtgaggttctccggggttcggtttcgtgggtgagcggatcgagatggcggcgtcggatgttgagtaccgctgcttcgtcggcggcctcgcctgggccacggacgaccactccctccacaacgccttcagcacctacggcgaggtcctcgagtccaagattatcctcgatcgggagacgcagaggtcccgcggcttcggcttcgtcaccttctccacggaggaggcgatgcggaacgccatcgagggcatgaacggcaaggagctggacggccgcaacatcaccgtcaacgaggcccagtcccgcggcggccgt

SEQ ID NO: 12748 - DNA, 310 bp, Zea mays
  Clone ID: LIB3158-006-Q1-K1-A12
gacgacctcagggacaggggcgtctggtactacgagagcctcaaggccagcggctaccctggcgaggtggagctgctcgagtccatgggcgagggccacgtcttctactgcatgaacccgcgctgcgacagggcgcgggagatggaggagcgcgtcctcggcttcctgcgcaagtgagcgagcgacggagcgcgcgccttgctacgcgattgagatggaataatttcaccgtttccagatgtggaggcgtttgagcatgaggccatgagggtcttatttgtttgcttaagatcaattgattgaagtttcg

SEQ ID NO: 12749 - DNA, 463 bp, Zea mays
  Clone ID: LIB3158-006-Q1-K1-A2
cactcgccgaaccaagccacccaccccaaacccaatggcgtccaacctcctatccgcggtggcaatcgagaaggagacgccggagagcgagctgcccccgacgttcctccgcgaggacgggcgcggcgccgggtccgtgcgggcgcggttcgagtccatgatacggcgggtgcagggggaggtctgcgccgcgctcgaggaggcagatggcggtggggcgcgcttcgtcgaggacgtctggtcgcgccccggcggcggcggcggcatcagccgggtcctgcaggacggccgcgtcttcgagaaggccggggtcaacgtctccgtcgtctacggggtcatgccacccgacgcctaccgcgccgccaaaggggaggccggcaagaacgaggccgccgcggatggccacaagcctggtcccgtgccattcttcgccgcgggtattagctcggtgcttcaccccaaa

SEQ ID NO: 12750 - DNA, 394 bp, Zea mays
  Clone ID: LIB3158-006-Q1-K1-A3
gtgccgcgccacatccagcttgctgtgcgcaacgacgaggagctgaccaaactgttgggtggtgccaccatcgcgagcggaggtgttatgcctaacatccatcagcatctgctccccaagaaggctgcctcctccaaggccagtgtcgacgacgacgacaactgagactgcttcctgcagaaatgatccgaccaccgccttgttttgtaggaataggatgatgttgtcttcgatcggggaggagtcgggtatgctgggaaggagaattagattagtatctgtttttttgaatgggatgtgaacgtggctgtgaatctcacgattgtatgctcgttgagaaagaaatggaaagacttcgtgatgcacgatgttgatgccgcatcatattcagcgt

SEQ ID NO: 12751 - DNA, 128 bp, Zea mays
  Clone ID: LIB3158-006-Q1-K1-A5
cggacgcgtggggcggtttgggatgccagtactgatgtcagaggaggaaaagcgcagcagtcgcgccgagagatttgggactggctcttcaagtgtaaaggaggaagagaagaagaagtccagggctg

SEQ ID NO: 12752 - DNA, 372 bp, Zea mays
  Clone ID: LIB3158-006-Q1-K1-A6
aaagaagggcactggaggcattactatcaagaaaactggcatgtccttgattatcggtatctatgatgagccaatgactccagggcaatgcaatatggtggtggagaggctcggcgattacctgatcgaacagggcttctaagtttgtcataatgctattttggtcattgggcacttaagtttgcacctcatttggttctgtaatatgtgggcttgtgcatgtgcttggcgtattgcatgcagtgaataatttatcttcgcgttgggttggtgacaatgttgggaacggatttgaattggggtttatgcttgccatctcctcatatctcgaactcagctgctgtttcactgagtaatgtacatttccctggt

SEQ ID NO: 12753 - DNA, 383 bp, Zea mays
  Clone ID: LIB3158-006-Q1-K1-A7
cggaaacccacctatctacatcaccgagaacggaatcggggatgttgataccaaggagacacctctacccatggaggatgccttaaatgactacaaaaggctagattacatccagcgccacatcgctactcttaaggaatcaatagacttgggatcaaatgtgcaaggctacttcgcttggtctctgctggacaactttgaatggttcgccggcttcaccgaacgttatggcattgtctacgtcgaccgcaacaataactgcacgcgctacatgaaggagtctgccaagtggttgaaacagttcaacgccgcgaagaagcccagcaagaagatcttacccagcttaaaatcggggcctcatgatgtggtgcagccataaaaac

SEQ ID NO: 12754 - DNA, 282 bp, Zea mays
  Clone ID: LIB3158-006-Q1-K1-A8
aaaaaagaaagagagggggagagacacagaggcctcactccacacactgtcttgtctctcagtcccagagctttcttggatcgcgaggaatccactggaaattttgcaattgtagtagagaactgtatcgtccgacgaaggtgcatggtgttggccatgggtcacggcagggaacagagacgagcaggtcggcgctctccccccagctcattgatcctgtcctcgctataaggtagtcctgcggtggcctccgaatttcactcgatcgaacacgacatgaag

SEQ ID NO: 12755 - DNA, 474 bp, Zea mays
  Clone ID: LIB3158-006-Q1-K1-A9
ccgaaccggacgggtccgggtagagcccacgcagtccgttcggcaaaggcggtggtggtcttggcggaggttgtggctacggtgctggtggcggcgggggccttggtggtggaagtggacatggcatgggtgccggattcgtcaagggtggtggtattggcggtggcgatggccttggtggtggaagtgggcattgcatgtgttcctgatatagcaaggtgggtggtcttggtggcagccacgaaagacgtgatggtagcatcagcagtagatatggcataggatattgctctgggtttgacaaaggcatctgattctgtgttagggtcggcaataagatcgaccaacatggcaactaatgaattcgggatcattaatgatacgtgaagatgacacatacttcttcacaggaattataattcacgtatgcattcattcatgcgtcgtaccttgtcatgtctatgggtgatggtg

SEQ ID NO: 12756 - DNA, 405 bp, Zea mays
  Clone ID: LIB3158-006-Q1-K1-B1
agccgtactacatcgccgtcgctgcttcaattctgattatcgctgccgccgcgcgcggtgcagaggcaaaactagctacggccggccgcccagagtgcaacgcgtggcttttgagtcgggtaatctcatcgtctcccgcccctcacttcggtcatcttttgctcctgttcatgctgtcatcccgtctgaacttttaaccacgcaatgcaagcaagcctgcaagctaggatgaggatgatagattggattggataatacacaagtacgcagggagttgtgtaattttttttcaggttggggaagaagatcgaccaacatgtaaactaataagctcggttcaattaagcagatgggaagaacaccatagctacgtgacagtaataataatacatgcatgcgttcatc

SEQ ID NO: 12757 - DNA, 368 bp, Zea mays
  Clone ID: LIB3158-006-Q1-K1-B10
cacgaaaaccctaaaccctcgctacccggcggcggctacaagctcttcgtcggctcagcaccatgaggccaccggctagaggaggacgtggtgggaggggaggcaggttcgatggcggcggccgtgggggcggcggcggcggccgtgggtttggcggtggtagaggcgggagaggggacaggggagggagaggtggcaggacccccagaggcggccgtggcggcggtggcaggggtggccgcggcggtggcatgaagggcgggagcaaggccgtcgtggtggcgcacaagcacgccggtgtcttcatcttcaagtccaaggaggatgcgctctgcaccaagaacatggtccccgggagagtccgtgta

SEQ ID NO: 12758 - DNA, 320 bp, Zea mays
  Clone ID: LIB3158-006-Q1-K1-B11
ctgggcaagttccatgaccacgggctcaggtccggccgttctaagagatccggttcagcgaaggtgggcgccttcccgtcgctggacgtggtgccgctgatggtgacgatggtggagcacgtggacatgtcccgggactacgtcgtgaccaagtccatctggcatctcagcgacgcatgcctcaagagcgtgtataccttctacgccatgttcaccgtctggggagtctgcttcttcgcgtccatgaaggatcccttctacgacagcgagacatacacgagccagggtggcgacaggaccgtgcactggtactacgacag

SEQ ID NO: 12759 - DNA, 372 bp, Zea mays
  Clone ID: LIB3158-006-Q1-K1-B12
gcgcacgcctacacagattattttcttccgtgggacggtgacccggcaaaggtccgtgcggttgtttaagggatggtgtacacacacagcgagggtgttatgatgacgggcgtgtacgcttgcaaagaagaggcggagtagaatggcaacacgatcaactgcgaggggtggtggtttaagccctggttctaccagcacgctcatactgcgctgaacaggggcgagtttgaggagtacattcccacgagggagtactaccaccggcacacccggtgcctgtactgagaggggaagctgatcctgcccttccgaaccacatctgggaaagtttctgcttggctggctgatgccaccgaacgtgttcctgcttaa

SEQ ID NO: 12760 - DNA, 370 bp, Zea mays
  unsure (1)..(370): unsure at all n locations; Clone ID: LIB3158-006-Q1-K1-B3
gccagaacagtactggcagaccgcgggggagagggagggcgagaaccccatgatgacacccctgccctacatcatcatcttcggcatgtccacccccttcgtcatcctcgccatcgccttcgccaatggctggatcaaggtccctgtgcgatgaccgtaacgcgatcagccagcctggatcatagatgctgactcgtcagcctgcatcttatccagcgtgtgtcctgcgactttgtaccttcatatatagagacaagagttcttgcgtgtgagcataattgcatgatcgcgtggtgtatgtaacccgaaactgtttaccttttcgcaaaaacttcagtcttcattcaaagnaaaagagacgcgccctgta

SEQ ID NO: 12761 - DNA, 428 bp, Zea mays
  Clone ID: LIB3158-006-Q1-K1-B4
ggagttcttggcttgaatcccgagaccaggaagtttatctctgaaaatgttgaggagcaagctgagcaggttatgaaaaacatgggcgagatattgaaagctagtggtgctagctattcttcagttgtgaagacaacgatcatgttggctgatctgcaggatttcaataaagtaaacgagatctatggcaaatattttccggcgccagcacctgcacgatcaacctaccaagtggcggcgctgccactgaatgcccggattgagattgagtgcatcgctgctctctaatcagatcatccaaccactcattaaatcatcaataagcacccaggaatttgtggtagaggtacctgtaccagttcagtgtctgaaaactgcgggtaacaaacctttgtgtcccggataagtgatgtgtgtgtgtgtgtgtg

SEQ ID NO: 12762 - DNA, 332 bp, Zea mays
  Clone ID: LIB3158-006-Q1-K1-B5
tcccaaaaccgtagcgccctcgcctgctcgccgccgccgtcgttgcgagctccccatcttgctgcgtcaaccatggcgacccagatcagcaagaagaagaagttcgtcagcgacggcgtgttctacgccgagctcaatgagatgctgacgcgggagctcgcggaggacggctactccggcgtggaggtgcgcgtcacaccgatgcgcacggagatcatcattcgcgccacgcgcacgcagaacgtgctcggcgagaagggccgcaagatcaaggagctcacgtctgtcgtccagaagaggttcaacttccccgagaacggcgtcgagctcta

SEQ ID NO: 12763 - DNA, 294 bp, Zea mays
  unsure (1)..(294): unsure at all n locations; Clone ID: LIB3158-006-Q1-K1-B6
tttctttttctttttttttgataagttgccgacaaacgacagttgtatatttgtaagaagaaatggggaatgttgacctgagagctttcnnnnaaaaaaaaaaaaaaaaaaaaaaaaaaaaaaaaaaaaaaaaaaaaaaaaaaaaaaaaaaaaaaaaaaaaaaaaaaaaaaaaaaaaaaaaaaaaaaaagaaaacaaaaaaaaaaaaaaaaaaaaaaaaaagggggggccgttttaaaaaaacaaaatttacttccccgggattgcaaaaaaaataattttttataaggggaac

SEQ ID NO: 12764 - DNA, 453 bp, Zea mays
  Clone ID: LIB3158-006-Q1-K1-B7
caaatgtagatccagagttggcactcgccctgcggttgtctatggaagaagaacgagcaaggcaagaggctattgcaaaaaaggctgcagaagatacatctaataccgaaaatatcaatgcctcaagctcaaacagcgattctgttatggctgaagcagaacttgcctcaaatgctgctgctggtgacaagcaagaacagccaaaggatgatgacgatctactacagcaggcacttgcaatgtcaatggagggcggtgcttcacgatctgcagctgtgactgactccgctatggcagaagctggtgcagttgaccctgacttaacgttggctcttcaaatgtctgtccaggatgcaaacatgtccagtgacactgatatgagtaaggtgcttgaagacagaacgtttgtgtcatctatccttaattcgctttctggcgttgatcccaatgatc

SEQ ID NO: 12765 - DNA, 437 bp, Zea mays
  Clone ID: LIB3158-006-Q1-K1-B9
ggataatcctttaaaaatatggacacctggattcacatttgagattgtttttgtgggatggatgctgttgctgtgatgttcgcttgtacttgtagacacttgttaggacctggaatgctttgaattttgtgcagcttagcttgacgaagcctctgtaaccacacacttgaatatgtccagtttgcaagtatattaggtggaaaactggaaatcctgtccatgaagctccattgaatatttttctaaaaaaaattgaatcgtatttgctaaaatggtgttatcatattaccattgcttcttattgcagcatgtcagccatagacttctattgttcagttgataaggttgaaggggccgacggaaaagatcgtgtggtggtcacatttgatgggaagtatctgccttacactgaacagaaatctgaacatatgatgtca

SEQ ID NO: 12766 - DNA, 225 bp, Zea mays
  unsure (1)..(225): unsure at all n locations; Clone ID: LIB3158-006-Q1-K1-C10
cggacgcgtggggagttttgttttattcttatctcctttacgattttttttaattgtttgcttcatttttctccctgtcacaatcaaaccaattatcagtcagtatgcatagtcgtccgctattgctctgtatcttcagcttttgtatgaggatattatatcatttgttttggtatataaatcaaggaacaggccatgtttccagcaggcttgttctgaactnat

SEQ ID NO: 12767 - DNA, 362 bp, Zea mays
  Clone ID: LIB3158-006-Q1-K1-C11
gtgacttcgaggagggcccgtacatcatcccggggaccaagtggggcgtgctgatcccgtcgcgcgtggtggaggaccattcgccgcttccggggtggatggtggagtcgctcaaggccatcaagtacatcgacggcgagagcttcgccgtgccgcggggtcggcgcgccgtggagctgctggccgggagggagagcgcgatcgcgcaggtcatccgcaccgtgccggggcgacagtacgtgctgtccttcaccatcggcgacgccagtaacgcctgccgcggctcgctcatggtggaggcatacgcgggccgggagtccaccaaggtggcgtacgagtcggggggaaggcggcgtgagcgc

SEQ ID NO: 12768 - DNA, 457 bp, Zea mays
  Clone ID: LIB3158-006-Q1-K1-C2
aaagctgtctttgacagcttgagaaacaaccccaaagtaagctatgatgggaggcgtttctcttacaagtccaagcatgacctgaagggaaaagatcaactgcttgttttgattagaaagttcccagaaggtcttgctgttgtggaagtcaaggatgcatattcaaatgtattggaagatttgcaggctctgaaggctgctggtgaggtttggctgttatcaaacatggactcccaggaggacattgtatacccaaatgatccaaaagcaaagatcaaggttgatgatgacctgaagcaactcttccgtgaaatagagctgccacgtgacatggtcgacatagagaaggagctacagaaaaacggtttcaagcccatgacaaatactgccaaacgacgagcagctgcccagatcaatggcgtaaaacccaaggctaagcccaagaagaagcagcgtg

SEQ ID NO: 12769 - DNA, 422 bp, Zea mays
  Clone ID: LIB3158-006-Q1-K1-C3
gtttcgtcgctacgctagcttccagtcccgggcttagcaactgtgctgctgttgcactgcacccggcgcacgcagagatgcgccgtgtcgggacgggtgtgaggatgctttgcggcgcggcgctgtcggtgcttctgcttctcgcgggcggcgcggcggcgtcgcactcgcgctcgtcgtgccccgccacgcctccggacgcggggaacacgctgcaggtgtcgcacgcgttcgggccgtgctcgccgctgggccccgggacggcggcgccgtcgtgggcggggttcctggcggaccaggcgtcgcgtgacgcgtcgcggctgctgtacctggactcgctggcggtgcgtggccgcgcccgcgcgtacgcgcccatcgcgtcggggcggcagctgctgcagacgccgacgtacgtggtgcgg

SEQ ID NO: 12770 - DNA, 398 bp, Zea mays
  Clone ID: LIB3158-006-Q1-K1-C4
ggcaagaccatcaccttggaggttgagagctccgacaccattgataatgtgaaggccaaaatccaggacaaggagggtatccccccggaccagcagcggctgatcttcgccggcaagcagctggaggatggtcgcaccttggctgactacaacatccagaaggagagcaccctccatctggtgctccgcctgaggggtggtatgcagatctttgtgaagaccttgactggcaagaccataaccctggaggttgagagctctgacaccatcgacaacgtgaaggctaagatccaggacaaggaggggattcccccagaccagcagcgtctgatcttcgccggcaagcagcttgaagatggtcgcacccttgcagactacaatatccagaaggagagcac

SEQ ID NO: 12771 - DNA, 450 bp, Zea mays
  unsure (1)..(450): unsure at all n locations; Clone ID: LIB3158-006-Q1-K1-C5
gattcctgggacgagttcgtggagcggtccgtgcagctcttccgcggcgaccccaacgccacccgctacgtgatgaagtaccggcactgcgaggggaagctcgtgctcaaggtcaccgacgaccgcgagtgcttgaagttcaagacagatcaagctcaagacgcanagaagatggagaagctcaacaacatcttttttgctctcatgacacgtgggcctgatgttgatatcagtgaagtttcagggaaggaacaggcagagcaacagcaagcgaagaaaggtcggggaaggaggcaataatgcggtctgatccttatttgttacagaaaattcacaactggaatgatggattaacatttcattgactttatngtactctgaagaaagttttccagtccagaaccgagaacaaactanatgcactctatcatgaatgaatgcatgattgag

SEQ ID NO: 12772 - DNA, 362 bp, Zea mays
  Clone ID: LIB3158-006-Q1-K1-C6
ggcgcggaccagcgcggaccgccaggcggcgtgccgctgcctcaagagcctcgccaacagcgtcaagagcgtcaacatgggcaccgtcgccaccatccccggcaagtgcggcgtctccgtcggattccccatcagcatgtccaccgactgcaacaagatcagctaagttacgacgaccaagctaataagcctaccgaacgtacacgtacgccccgcgcgctgcacgagtgatgaagccagggaagaaataaaataaagctagctgtattgccaggagcagcatgcattatttatcgatctatatatatatatactgtactgtagtactctattatatatgtatgtgtggcctgcagtgcgag

SEQ ID NO: 12773 - DNA, 448 bp, Zea mays
  Clone ID: LIB3158-006-Q1-K1-C7
ggaacagcttaacaatctgaaagacaagcatgagatcatcggtgacgttaggggcaaaggcttccttcttggagttgagctggtgacagaccatgaaaagaaaaccccagccaaagctgagatctcacgtgtcatgaaccatatgaaagatatgggagtgttggttggtaagggtggtttctacgggaacgtttttaggataacaccaccgttgtgcttcaccaaagaggattccgacttcttcattgaggtgatggacattgcgctctcgaagctgtgaggcaagcagggcgaagatgatgtgcaaaccctggtccgtcgccatgggatttttgcccatgaataatattaagattaatgagacagcacctcgttgtctcttaatctaagacgatgccatgtcatccggtggcatggtattcctaatcctacctgccaaatcactggt

SEQ ID NO: 12774 - DNA, 451 bp, Zea mays
  Clone ID: LIB3158-006-Q1-K1-C8
gttggcttctcctccccctccggttcgggttcgggttcgtgaggttctccggggttcggtttcgtgggtgagcggatcgagatggcggcgtcggatgttgagtaccgctgcttcgtcggcggcctcgcctgggccacggacgaccactccctccacaacgccttcagcacctacggcgaggtcctcgagtccaagatcatcctcgatcgggagacgcagaggtcccgcggcttcggcttcgtcaccttctccacggaggaggcgatgcggaacgccatcgagggcatgaacggcaaggagctggacggccgcaacatcaccgtcaacgaggcccagtcccgcggcggccgtggaggcggcggcggtgggtacggtggtggccgtggaggcggcggctacggcggtggcgggcgccgtgatggcggcggcggctacggcggtggcggcggcg

SEQ ID NO: 12775 - DNA, 453 bp, Zea mays
  Clone ID: LIB3158-006-Q1-K1-C9
caggcatgctcaattcggcatatccttatcagatctccacctgaacaagctgcagccgggcctgtcaccgcacgggctccaccgccagctcgaccacggcgtgcaggtgcaggtgcagcagccgaggatcgccgccgggctcatcgtcggcggccacccggcggcccgagacgacgtctcgtgtctgctcaccatcggcaccccaaagagcaagaagccaccgtcagacgtcaagaaggcgtccacggcggcggcaccgcagctgatgctcttcgggaaagcgatcctcaccgagcagcagatatcgctaggcggcggcaatgtcgtgccggcgctggcgaagaagagcccctccgacgacgacgacgacgtggccgagaggacggtgagcaactcggacgtgtcgagccctgggaggagcaaccaggacggcacgtccagtggcggaggccc

SEQ ID NO: 12776 - DNA, 303 bp, Zea mays
  Clone ID: LIB3158-006-Q1-K1-D1
gtcagcttcatcgcctacaagcccccgggcagcgactagaccgcgcccgccggccgccccccgccggctagctatagctcctgcgtgagctagtagctagctagtgccatgcgtcgtctctgtcgttcggttttgcttcggggtcaccgtaccctttgcttgcttggtttcttctttcctttttcctttttttttcttttccccggccatggttcctttgctttccagttttctctgctggatgtgatgtatccattgttgcaagcatggccttgcattggctacctctatacctgctgctac

SEQ ID NO: 12777 - DNA, 396 bp, Zea mays
  Clone ID: LIB3158-006-Q1-K1-D10
cggacgcgtgggtggaggtggagtcgtctgacacaatcgataatgtcaaagccaagatccaggacaaggagggcattccaccggaccagcagcgcctgatctttgctggcaagcagctggaggatggccgtaccctcgccgactacaacatccagaaggagagcaccctccacctggtgctccgcttgcgaggtggtatgcagatctttgtgaagaccttgactggcaagaccataaccctggaggttgagagctccgacaccatcgacaacgtgaaggcgaagatccaggacaaagagggcatccccccagaccagcagcgtctgatcttcgccggcaagcagctggaggatggccgcaccctagcagactacaacatccagaaggagagcactc

SEQ ID NO: 12778 - DNA, 456 bp, Zea mays
  Clone ID: LIB3158-006-Q1-K1-D11
cacagctgcagataagggaggtgcaacccatgttgacatagcatgtgacaaagactgagtgaagcttgccatggatcttaccaatcttccgatctgtgtctcatctgtagatccttcagcgttccattctgcagtacaagcaggagctaaaatggttgagattggaaactatgattctttttatgagatgggcattgagttctcctctgagcagatactgaagctaacaagggaaacaaggaagatgcttccagacatcaccttatcagtaacagtttctcacacacttagtttgccagatcagatgaggctagcagagctactcgaagaggaaggagctgatataatccaaaccgagggtgggaaatgttctagcccgacaaagcctggagttctttgattgattgaaaaggcaacaccaacactcgccgcagcatactccatctctcgggctgt

SEQ ID NO: 12779 - DNA, 450 bp, Zea mays
  unsure (1)..(450): unsure at all n locations; Clone ID: LIB3158-006-Q1-K1-D12
gcggaacgcgctcctcatcgccgccgcgctgctcctctactggatcctcttctccgtcacccagctcgtcgtcaggctcgagcagatgcagcagcgcgtcgacaagctcaggaagcgcgacgactgatggatccgcatccatccggtgggctcgttcttcctttgcctgccttgtcttcctgctttatgttgtggtgctgatgttttagatctcggatcgtaatttgagacctgctggtagcatttgcttcctttgccttgccgtcttcagataaaaaagaacagcgctcttggaaacgatgatatgtttaggatgtttggacgaatggtatctgtcgtaattgatgtcttcatccatgactnggttacttggttggtgtcactgaatgtacactgagatattggttaatagctactagtggctgttttatcatgtgattatgccccatg

SEQ ID NO: 12780 - DNA, 384 bp, Zea mays
  Clone ID: LIB3158-006-Q1-K1-D2
tgcttgtatcggtgcatggcatccggctagggtctcctatacggttgctcgtgctggtcagaatgggtaccaccaccgcactgagatgaacaagaaggtttacaagatcggcaaggctggacaagagacccacgatgcctccacagagtttgacaggactgagaaggacatcactcccatgggtggcttcccccattatggtatcgtgaagggtgactacctgatgatcaagggctgctgtgtgggtccaaagaagagggtggtgaccctccgccagtccctcctgaagcagacttcccggctggcgctggaggagatcaaactcaagttcatcgacacatcgtccaaatttgggcacggtcgctttcagactaccgatgagaa

SEQ ID NO: 12781 - DNA, 406 bp, Zea mays
  Clone ID: LIB3158-006-Q1-K1-D3
cagaatccccagagggcaggagaaattcctctgcatcgttgatctcaagggctgggggtactcaaactgtgacgtccgggcatacattgccgctatagagatcttgcagaactactacccggagcggctcggcaaggcgctgatgatccacgtgccctacatcttcatgaaggcgtggaagatgatctaccccttcatcgacaccaacaccagggacaagttcgtgttcgtggaggacaagagcctgcaggagacgctgcggcgggagatcgacgaggggcagctcccagagttcctcggcggcaagatggacgtgatcccactcaaggactatggcgtgcagcagcagcctcaggccgtgtaatgccatgcgtatatacagcatacacgagttgtgttgagctat

SEQ ID NO: 12782 - DNA, 460 bp, Zea mays
  unsure (1)..(460): unsure at all n locations; Clone ID: LIB3158-006-Q1-K1-D6
attattactagagagcctcacttgtatgcattctcattcaagaacgggagactggaggttactgagatcttcaacttttctcaagatgatttgttaactgaagacatgatgatacttgacacacatggtgaagttttcatttggattggtcagtatgtggaatcaaaagagaaacagaaggcatttgacattggccagaaatacgtggagcatgcaaattctattgaagatctttctccacatgtaccactatataaagtcatggaagggaatgagccatgcttcttcaagacgtacttttcttgggataacacaaaatctttggttcatggaaattccttccagaagaaactctcgctgctttttggattgcgttctgagggtgcacctaggagctctggtaatggtgggccaactcagagggcatctgcattagcagctctatcatncgcattcaatc

SEQ ID NO: 12783 - DNA, 277 bp, Zea mays
  Clone ID: LIB3158-006-Q1-K1-D7
gtcatattccagcagaagaagactgcctctggctgagatgatgcctctcgctgcctgcatatggagacttgttttgagcgacatttttttgaagttaaaagcttggacttcatcctatcttggttgttgcctgatactgcattttcttaccataagttgtaacctcgtttcttgcggtttggtgtaggacacgacttttctgttaataatgttgtggcttgaactttccaggctgtggagattggtgaaaactcagcgctgatatcatttgttactt

SEQ ID NO: 12784 - DNA, 393 bp, Zea mays
  Clone ID: LIB3158-006-Q1-K1-D8
gccggaacgctttctcggtgacgaccgctctaggctgctgcagcaccttttctggtccaacgggccggagacggcgcatcccgggcccgggaacaagcagtgcgccgccaaggaggtggtggtggacacggcgtgcatgctgctggccgagctgttccggcgctacgacgacttcgaggtggagggcacctccttcaccaagctcgtcaagcgccaggcgtcgccgagcgtggcgcaggcagccgccgccgccggagcgcagcagtgagtgcgctgtataggatccatcggtggcgtgcgacgtcgccggcgccggcgccggccaagcaataaagtaatgagtaggccctcctcgtcatccacatgctcgtctgtgttcgacttcgatcggtg

SEQ ID NO: 12785 - DNA, 279 bp, Zea mays
  unsure (1)..(279): unsure at all n locations; Clone ID: LIB3158-006-Q1-K1-E1
agcgagtcgaggcattcgagagcgatatgtttgtttcatttccctccttcccgccttgtgattatctggtgtgtgtgactgacgaggtcgtggcaatttacgtaactcgcttagaaggtatttcccccgtgtttgagcccccacccncaccaaaaaaaaagaaggtatcatgctatctctgttccataagtagacatgatgtaatcgtactaagtgtttatttttattattttttacttatttcacttcaatcaatggaaaattatgcttcccanttta

SEQ ID NO: 12786 - DNA, 239 bp, Zea mays
  unsure (1)..(239): unsure at all n locations; Clone ID: LIB3158-006-Q1-K1-E11
ctcaaccattcactcctgctgtttgagtacaagaagagccacgacggcaacgggtatgaccatttcacaatctcacgcgactaccgggacatcctcgcttgctccatcgacaactgcccccggagcacgctggcttnctgaagtcccacagtgtcgtagttgcagaccaggaaattaattcgtagcttttttgtactggaccgaccaataaatgaggccttttcttttttaataaaata

SEQ ID NO: 12787 - DNA, 454 bp, Zea mays
  Clone ID: LIB3158-006-Q1-K1-E12
ccaagtcgggcggcgacgacgtggacgacgagttcgcggacctgtacatcgtcaagtggacgtcgctgatgatcccgcccatcgtgatcatgatggtgaacctgatcggcatcgcggtcgggttcagccgcaccatctacagcgagatcccgcagtggagcaagctgctgggcggcgtcttcttcagcttctgggtgctggcgcacctgtacccgttcgccaagggcctgatggggcggaggggccgcacgccaaccatcgtcttcgtctgggcgggcctcctctacatcaccatctcgctgctgtgggtggccatcaacccgccgtcccagaaccagcagattggtgggtcgttcacattcccgggaaagctctctgggccaatggcgggattcatgcatgcttcgacgcagtgggatccttgcgttgctctgcatcagttcctggttgcagc

SEQ ID NO: 12788 - DNA, 433 bp, Zea mays
  Clone ID: LIB3158-006-Q1-K1-E2
gttcggcgaggccgtctggttcaaggccggctcccagatcttcagcgagggcgggctggactaccttggcaaccccagcctgatccacgcgcagagcatcctcgccatctgggcctgccaggtcgtgctcatgggcgccgtcgagggctaccgtattgccggcgggccgctcggcgaggtcgtcgacccgctgtaccctggcggcagcttcgaccccctcggcctggccgacgaccccgaggccttcgccgagctcaaggtgaaggagctcaagaacggccgcctcgccatgttttccatgttcggcttcttcgtccaggccatcgtcaccggcaagggcccgctcgagaacctcgctgaccacatcgctgacccagtcaacaacaacgcatgggcctacgccaccaacttcgtccccgggcactaagctcaa

SEQ ID NO: 12789 - DNA, 411 bp, Zea mays
  Clone ID: LIB3158-006-Q1-K1-E3
ggcgtactcttctctgtactagctttcttcttcctcctcctcttcctcctcccaaacagactggatttcatcaagataatcctgaaactggagccaacaagcagacagagaaagaagagcaagaagaccggctcccagccgatacaaggtaggagtgagcagcgttagatcagttttcatcacaggatcgatatggtgacagtgagagaggagactcgcaaggggccatggacagagcaggaggacctgcaactggtatgcactgtccgtctgttcggtgaacgtcgttgggatttcattgccaaagtatcagggctcaaccggacaggcaagagctgccggctgcgctgggtcaactacctccaccctggcctcaagcgtgggcgcatgtctccccatggaagagcgact

SEQ ID NO: 12790 - DNA, 269 bp, Zea mays
  Clone ID: LIB3158-006-Q1-K1-E5
cggacgcgtgggcctgagcatctgtttggtgaaggttgcctttggtgcaatctatcctcaggtaaagaagaaagcgtctaggcggatccccaggagtgccagcacttcggcgagttcgtggtttacgctagcgacctagcacagtcagctgcctgtggtgggtgtgcttacgttggctacgtttcgattctgtgtgctttgattgatattatgtaaatggctctagtctgtaatattatgacttactctgtattgctattcgaagcatt

SEQ ID NO: 12791 - DNA, 419 bp, Zea mays
  Clone ID: LIB3158-006-Q1-K1-E6
cggacgcgtgggataaaccgtcaggtacgcgcgcatacagcatacctccatgcacggcccttcccagttcccacttcccctcggccggtgcccggtggttccaagttttgatttggttaggtcactgcgtattcctcttctgtggattgtctcgcctcttcgaattccccgtgtttaggagtgttaggacaagatggtggccaatggtgatgcacctgctagagggagcgcggcggcagctgcaagcctgcgtaggcgtaggaccacaagtggtgctgctgctggtggaggcggtgccagctcaatgctccaattctacactgacgagactgctgggccgcaaatgtcaccaaacactgttctgatcatgagtattgggttcgtagcccgtcgtgctgtgcttcatgtattcgggaagc

SEQ ID NO: 12792 - DNA, 416 bp, Zea mays
  unsure (1)..(416): unsure at all n locations; Clone ID: LIB3158-006-Q1-K1-E7
cgcaagaacaggaggctgatgccaatcactatggcaaatggacacggatctgggttcggggctggcagagggaagtttgatgttgagaagggaaaggatgcttatccatacctttgggagactgtagaggatctgtcaaaggagcacccgaatggggtagcattcaagaaagcctttgagctgatcgaaggcgccagagcgcgtgggatggaggagaagctacgaaaattcaggctgacagagatcagacaccagctgcgacgtatggaattgatgaaggagacagtgaagatggtgcttgatgcgctggaaggttgactgagtaatgatcttctggtgggtgaagttgtgcaatgtttaaaggagcaatcagtgtcttcttttgtttctagatagagnttctgtgactgaattac

SEQ ID NO: 12793 - DNA, 394 bp, Zea mays
  Clone ID: LIB3158-006-Q1-K1-E8
gaagatgattcccaccaagcccatggtggtggagacattctcgcagtatcctccccttggtgggtttgctgtccgcgacatgaggcagacagttgctgttggagtcatcaagagtgtggagaagaaggacccgaccggcgccaaggttaccaaggcagctgccaaaaagaaatgatgcaacctgtcgttaatcctgtatctgcttttgcaatacctgacttgtcactccatcccgaagttttgtatgcggttgttactgttattgtgtactgttaagctctgctgcggcgtgccctgttgtttgggtagcgtcaacgtcgagcgccacttgcgggtgtgcctttgtctgctatcagtagcggcaaaaattggaaagctctcgaaacttatgtcc

SEQ ID NO: 12794 - DNA, 378 bp, Zea mays
  Clone ID: LIB3158-006-Q1-K1-F1
cggacgcgtgggcggacgcgtgggcggacgcgtgggctcgaagcttgcgttcttgtagtagaggtcggcagcaagcggtggtagagcgagaggtcgagaagatgaagagcagcactctgttggcgatcctagttctccaggcccttctggtctctgcggccgtggccaaaggacctgcagggccgacgacgaagaagcagtgctggtgcggcgagtgcaccagctggtcgggcgtgtggacctgcgacgacctcctcaccaagtgcgccgccacctgcaagaactgcgtccccgtgtccacggacaagggggccatcaagtacaggtgcccgcgacttcctccccgaaaactgcggctgcaagatccactaagagact

SEQ ID NO: 12795 - DNA, 316 bp, Zea mays
  unsure (1)..(316): unsure at all n locations; Clone ID: LIB3158-006-Q1-K1-F10
aaggnngacccacgcgacgcgtccgcatcaacatgattcttcattaccccatgtttcctctcatcgacaacccatccagcgggggggagcctgctctcccccccaccacccccataatcaagagcttcgctctaccagacaggacgctcatggcgtcgatcaaaatatcagacgctctattgcttagcacctttaaccccatatcaccaatggagcacggcagtttcaacaactcactatctgaaagcattttgtgaaactctaacataaagtcttgctttccctgctcatacgtgcattttaacgcctgcatatt

SEQ ID NO: 12796 - DNA, 430 bp, Zea mays
  Clone ID: LIB3158-006-Q1-K1-F11
cgaaaaacgcacccttcatgcaaaatcgtacagttttagccaaagctagggattattctttgaggaatatgctatcagaactgcaagagctccacaaggctgaggtcgacaaattcatgagccaatggtgtgaaagtaaggccttcagagaggactacgagaagagaatcctcacctccctaaacagccgacagctgactcgagatggtcggatgaggaatcctgatgagaagcccatatttatcgagtcacaggcgccagctccagagccagagccgttccctgtaaaattgcctgcaaaacaagtcaaggaagtgcctgctcctcaggcagataatgcttccaagattgaagctccttcaaaaggacctgtccagttgcacaaggcaaaagctgctctcgatgctgatgatgattatgaggccgagcc

SEQ ID NO: 12797 - DNA, 373 bp, Zea mays
  Clone ID: LIB3158-006-Q1-K1-F2
ctcggcgccatctcgttgcccaccgtcggcatggtcgtcccctacggcgccttcttcgtccctgccggctccgggaacgccggcggcgggacctacgcgaaggacaagctgggcaacgacatcacggtggaggcgtggctcaacacgcacggtcccaacgaccgcacgctcgcgcaggggctcaagggtgaccccacgtacctggtggtggagcaggacaagacgctggccacctacgggatcaacgccgtgtgcactcacctcggctgcgtcgtgccgtggaacggcgccgagaacaagttcatctgcccatgccacggatcccagtacaacaaccagggcaaggtggtccgtggaccggcgcctctgtcgc

SEQ ID NO: 12798 - DNA, 410 bp, Zea mays
  Clone ID: LIB3158-006-Q1-K1-F3
ctccaagcagtgatcaaccttccattcttggtcctcagccaataccaagcgttggtgctgctattccaccagcacagggtagtgttccttctgcagccaccaattcagtaatgccaccaggggatccatcagttgctctaccttctaatccttccagtgagccactcctgcaagcacctgttgtttcctctggagggcctccgcattaccctaatcaggccatcctacaaggcccacttggtgttgttgcacggttcccaggctatggtgccctgcagtttgctcagggctcagctcaagctcaaatggtgcagccttcaggccaaggaagtcaacatatgtcaggtcatgtaaaatatcagcttcctaaggttcagcccaatcatgcagtatctcacaacgaagcatca

SEQ ID NO: 12799 - DNA, 437 bp, Zea mays
  unsure (1)..(437): unsure at all n locations; Clone ID: LIB3158-006-Q1-K1-F4
cttctgtccaaggagattcttcatgagcccatgaaggacattgtagaaaagtatccaaaatggctggaggataatagagataagataagcaaagaagaatatgggcgttataataatcagcttgaactcatggtgaagcttattgaggtctatgaaaatgatcctgagaacatgactaggatttttgacatcatgcaaaacatgcaagaatgtggtcaaccccccagtgatcttgtccaagatattgtacctgatctggatctaagcaagttgggacaactgtctcctgagatgcttgaatcagctccaaattgttgcgtaatgtgaggaccaaaagcattccatttgggattcgaattccatgaagttttctttacctgtacgaacccccctttctgggcttagtagatngaagataatttccatctggataatct

SEQ ID NO: 12800 - DNA, 396 bp, Zea mays
  unsure (1)..(396): unsure at all n locations; Clone ID: LIB3158-006-Q1-K1-F5
ggcaacattgtcctcagtggtggatccaccatgttccctggcatcgccgaccgcatgagcaaggagatcactgcgctcgcgccaagcagcatgaagaacaaggtcgtcgctccaccagagaggaagtacagtgtctggatcggaggatcaatccttgcatccctgagcacatttcagcaggtaacaccaagttttccggcggctattctgtatctactatctgagtctattttgtgaagttctgacataagttcttgttttccctgtgcagatgtggatctcaagggctgagtatgaggagtctggtccagctattgtccacaggaagtgcttctagacgtcacctagccctaattctnctctggaaataccttcgtttgatgacatatctatggg

SEQ ID NO: 12801 - DNA, 432 bp, Zea mays
  Clone ID: LIB3158-006-Q1-K1-F7
gccatggcgtccatgaccggcctctcgcagggcgttctgcccagcaggcgcgccggcaacagggccaggacggccgccgtcgtcagggcgtccgccgaggcgcaggcgcaggcgggccgccgcgccgtgctcgggctggtggccactggcatcgtcggcggcgccttgtcgcaggcggtgcacgccgagaccgtcaagaccatcaagatcggagccccgccgccgccctccggtggactccccgggactctgaactctgaccaggcgagggacttcgacctccccttgaaggagcggttctacctgcagccgctgccgccggcggaggcggtggcgagggtgaagaccgtcggcgcacgacatcatcaacctcaagccactcatcgacaagaaggcgtggccgtacgtccagaacgacctccgcctccgggc

SEQ ID NO: 12802 - DNA, 414 bp, Zea mays
  Clone ID: LIB3158-006-Q1-K1-F9
catggacatggcgcagctggagtggctgtcggggctcttcgacgacgcatccatcccgcacgagccggcgttccccggcgcggcgcccatcatcaagagctccgcgctggcggccggcgcgctgctgccgccggacaagatggaggacgcgctgctgttccgcagctccagccccatctcggtgctggagcacggcagcttcaacaacgccaacggcggtggcggcggctgctccgcgtcgtcggagtcgtcctcggcgtcctcgtcctcggagtctttctccggcagcgggagcgggagcggcgaaggccacgcgtggtcggcgcccgtgtcgccgccgcccgtgctcgtcataccggcgcgcgcgcggagcaagcgctcccgcccgtccgcgttcacgcgcgccggggcgga

SEQ ID NO: 12803 - DNA, 408 bp, Zea mays
  Clone ID: LIB3158-006-Q1-K1-G1
agaagatccacgtcatctacaacttcttcctgatacgcaagatcatcgcgcacatcatcaccttctcgttctactgcgtcatcatcccggcaaccatcttcgtccccgaggtccgcatacccaagtggggctgcgtctacatcccctcggccatcaccctcctcaactctgtcggcactcccaggtctttccacctgcttttcttctgggtcgccttcgagaacgtcatgtccctgcacagaacaaaggccacgctgatcggcttgctggaggccggcagggccaacgagtgggtggtgacggcgaagctcggcagcgccatgaagatgaaatcggctaacaaagcggggctcaagaagcagttcatgaggatattgggagaggctgcacgtcacggaacttcggggt

SEQ ID NO: 12804 - DNA, 61 bp, Zea mays
  Clone ID: LIB3158-006-Q1-K1-G10
cccggtcgcccactcgtgctggcaactgccgtgaagaggtgaggagctgattcgtggagga

SEQ ID NO: 12805 - DNA, 344 bp, Zea mays
  Clone ID: LIB3158-006-Q1-K1-G11
ggcgatccggaacgacgaggagcttgggaagctgttgggcggcgtgaccatcgctcacggcggtgtgctccccaatatcaaccctgttctgctgcccaagaagacggcggagaaggcgtccagtggcgggagcaaggaggcaaagtcgcccaagaaggtcgctaagtcccccaagaaggcatagactgactgtccggtgtgatctgatgtttagcagtaccttgttaccagtatgcggtgatgcgtatgctgtagatgggacgaatgtgctggtgtgtgtatgtgtcctgctgcaagttgccctttgctatttaaaatggaagaagacatgcctggtttctctg

SEQ ID NO: 12806 - DNA, 309 bp, Zea mays
  Clone ID: LIB3158-006-Q1-K1-G12
caagaacggcattaagaaacccaagcgccaccgccagacctccaccaaggggatggacccgaagttcctgaggaacctgaggtattctaggaagggcaacaaaaagagtggtgaggctgaagctgaggagtaggaaggaaagcatggctttgtttcctctgtttttagctcagttccacctttaggacctggggttttgctaaagatggaacttaagtggtgttactgtatgatggcaaggaccttttgctgccgaaggttatgttttgaagttcatgctaccttttaaagtacggattaccttgtgcc

SEQ ID NO: 12807 - DNA, 384 bp, Zea mays
  Clone ID: LIB3158-006-Q1-K1-G2
cggacgcgtgggcggacgcgtgggggagaggggagccctactacgtcgaagcggcgccgccggtggacgtgaacaagaacacagagtggttcatgtacccgggcgtctggaccacctacatcctcctgctcttcttcgcttggctcctcgtcctctccgtctctggttgctcccccggagcagcctggacggtcgtaaacctcgcgcacttcgccatcacttaccacttcttccattggaagaaaggaaccccttttgctgctgatgaccaaggcatctacagcagattgacatggtgggagcaaattgacaatggtatctgatcgcatcgcacttgactgactacaagcagccgatgtttttcctcaatccaatggcagtttt

SEQ ID NO: 12808 - DNA, 429 bp, Zea mays
  unsure (1)..(429): unsure at all n locations; Clone ID: LIB3158-006-Q1-K1-G4
gaagatgattcccaccaagcccatggtggtggagacattctcgcagtatccctccccttggtagggttgctgtccgcgacatgaggcagacagttgctgttggagtcatcaagagtgtggagaagaaggacccgaccggcgccaaggttaccaaggcagctgccaaaaagaaatgatgcaacctgtcgttaatcctgtatctgcttttgcaatacctgacttgtcactccatcccgaagttttgtatgcggctgttactgatattgtgtactgctaagctctgctgcggcgtgccctgttgtttgggtagcgtcaacgtcgagcgccacttgcgggtgtgcctttgtctgctatcagtagcggcaaaaattgaaagctctcgagacttatgtccngctgaaccanctttgntttttttnccctgaatct

SEQ ID NO: 12809 - DNA, 222 bp, Zea mays
  unsure (1)..(222): unsure at all n locations; Clone ID: LIB3158-006-Q1-K1-G5
ctgcgtgctgctgcttctgctgcttcaaaacttgtaagtgctgcctcaaggttatttgttgttgttgttagttttgttgggagggcatggccgtccataatcgtggaaatgtggccttccggaacaccaaccgccgaataaaatgctgtacttatatgcacgcacgttagaaaatgcattaagtgtctggttggaaggggatctttttgtnngtgtgtgtgc

SEQ ID NO: 12810 - DNA, 288 bp, Zea mays
  unsure (1)..(288): unsure at all n locations; Clone ID: LIB3158-006-Q1-K1-G6
cggacgcgtgggcggcacggggttcaccacgctcggcatcgtcaagcacgtcaacccggagaacgtcacgctgctcgaccagtccccgcaccagctcgacaaggcccggcagaaggaggccctcaagggggtcaccatcatggagggcgacgccgaggacctnccgttccccaccgactccttcgaccgatacatctncgccggcagcatcgagtactggccaaacccacaagcggggatcaaggaaacctacagggtcctgagatttggtgggctagcttgtgtgat

SEQ ID NO: 12811 - DNA, 222 bp, Zea mays
  Clone ID: LIB3158-006-Q1-K1-G7
cggacgcgtgggtggggaggggcagacatgatctgccatctgaattagaataagaggtatcttgttgccgtctggcaatattgtaacttcagtcacgaattgttatttcagaatcgaagcacttgtacgtactgtgcaatagaatagatgacgcggtcacattcgtattcatatatgttcgcatatctttcagatcgacgtgatgagaaatgtcttagaagg

SEQ ID NO: 12812 - DNA, 276 bp, Zea mays
  Clone ID: LIB3158-006-Q1-K1-G8
atccagtagtactagtagtagtgagatttcttcggtgctgtcgtgtcgtcgtcgcattttggtcggatctggtttccttggtgcagggagggtttctataccatgtcgtggtgtcggttgtgtgatctcatcccccccttgtagatagtactctgctatctcgtcgtgatcgtgagtggtgattctgtctggttgctatttgctactgatattggtcccatttgagatacgcgttgctgctaatctcgtctttctctgcgcttgatttatcgttat

SEQ ID NO: 12813 - DNA, 424 bp, Zea mays
  Clone ID: LIB3158-006-Q1-K1-G9
ggaaaaggagcgcagtcgcacacccaatggcagtaggagcccaaggagccccagcccaagggctgaggtgagcccaccactgaaggataatggtgcacgcaatggctcagaccatgaaggcagccctggtggtggagagaacagcaagaggagtcggagcccatctgatggctaccgtagccctgtggccaatgggcgcagcccgagcccgagggacgatcggagcccaagccccaagggcaacaacgaagatgacttcctctaggtgaacccacgcgtccgatcgcccacggcggcgtgttgcccaacatcaacccggtcctgctgcccaagaagacggcggagaaggcgtccagcggcgggagcaaggaggccaagtcgcccaagaaggccgccaagtccttcagaaggcatagggtttgga

SEQ ID NO: 12814 - DNA, 361 bp, Zea mays
  unsure (1)..(361): unsure at all n locations; Clone ID: LIB3158-006-Q1-K1-H1
cccacgcgtccgcccacgcgtncggggttccgtaggtttcggtctaaaatcgtgtgctttgcaagatcagcttcttgtttggacttcgaaactgaaacctggtccaggcaatcggcaaatcatcctgccatcttgcgatactgtatccaagccagcttaaactcacctggatctgacgtcctgattttctgggccctttcggctggcacatgccttctgcttcagccatttatgcttctcttttctgctgttgcttgaactgtgtacctgaatgttttactgcttaccctagctaaaattttcttgtatggctatttgctatggcacacagcaaaagcttatgttgcaaggtcatgttttg

SEQ ID NO: 12815 - DNA, 312 bp, Zea mays
  unsure (1)..(312): unsure at all n locations; Clone ID: LIB3158-006-Q1-K1-H10
agaggggggcttcgcnnagttgctcccggcggagggggcccaggccccgtgccgcccatgacggagngnngttgcgtgccggagaatnttaaaagaaattacccatgctnnnaaaaacncnnntctgctgaaggggtaagatnngctgcgcttaagccccgttgaagcnntggtggatggtnntctgggttccccaatatnntctttcgcttcttggatgaccaagaaaaaatgccagatgacagggttnttttggagacctganntggtgttagattgggtcgtgggatgaccatctcattataatttcgt

SEQ ID NO: 12816 - DNA, 331 bp, Zea mays
  unsure (1)..(331): unsure at all n locations; Clone ID: LIB3158-006-Q1-K1-H2
gggaggattagtgattgaattcgggcagaaggtgcttgatatctcaatcaggaacagggcgaagcaaatggaggcgttcttgaggcaaccacttgacttctaacagccttttggataaaagaagcatcatcggaatgcagaggctgtcctgttgaaggttttcctgtgtctgcaattttaatctgtccttttgaataaaatgtttcctctaacaagtgaagggcactgtttttattgtctcgtgggccacagatgcctgctgaacaaattatgttcatttcttcttttcttaaagaagcatgcactaagaacatgaangatgcatgtcatg

SEQ ID NO: 12817 - DNA, 119 bp, Zea mays
  Clone ID: LIB3158-006-Q1-K1-H3
ccgggtcgacccagcgtcgattaccagcgactcacggcgagacaccacaccagacagacagcacggaggcggctcatgactctgacttgcggggctaggcgcgcctgcgcggctctctg

SEQ ID NO: 12818 - DNA, 278 bp, Zea mays
  Clone ID: LIB3158-006-Q1-K1-H4
gaccccgaccgtcgtggcgaccgaggaagcgccggtggtggaaaccccggctccgcccgccgtcgtgcccgaggaggctgcccccgccgccgaggccaaggtggaggagccagctgccgccgctgagcccgaggcggcccccgtggcggcggaggaagagacgccaaaggaggaagagacggcaaaggagccggagccggcggcggctgaagaggtgaaggaggaaacggcagcgcccgctgccgagacagaagcagaaccggcagccgctgagcccg

SEQ ID NO: 12819 - DNA, 317 bp, Zea mays
  Clone ID: LIB3158-006-Q1-K1-H6
gtggtatgggagctgggcgcaagctcaagacccacagaaggaaccagaggtgggctgacaaagcctacaagaagagccatctcggcaacgagtggaagaaaccctttgctgggtcatctcacgcaaagggaatcgtccttgagaagatcggcattgaggctaagcagcctaactctgctatccgtaagtgcgctcgtgtccagctggtgaagaacgggaagaagattgctgcctttgtgccaaacgatggttgcttgaactacatcgaggagaacgatgaggtgctgattgctggattcggtcgtaagggccatgct

SEQ ID NO: 12820 - DNA, 385 bp, Zea mays
  Clone ID: LIB3158-006-Q1-K1-H9
gtaaatttaatatgggcacaagagctttatttatttaatttacacacgacgatgatgagcgaattgaaataaaggataatggaggatggagcaggtacgtagctagcagtagctcccctgctattattcgaattaaatctgacgcaagtaaacaccgatagcatcgacgagcctggttcccgcccgcgcatagaatcccacgatgctgctgccgatgggcgccgtgacggagaaacgcgtcccgttctcgacaccccaggggccccaggttctgctgctggtgacgagcctgagcgaggtcagcgtagtggcaccttcaaatgcgccgtatgttcccgagacttccctgacatcctcggcgtcgccaaggtcgatcgttcgaaca

SEQ ID NO: 12821 - DNA, 293 bp, Zea mays
  Clone ID: LIB3158-008-Q1-K1-A1
tgaaaaaacagcagggaacaatggcactatcacgaagtatgagagcatgtttgcacagtggaagacttgcacttcttgccatattggtctctggtggaattgtattgcaaatcttggcttgtgctctctataacaactggtggccaatgctaacagttctcatgtatcttatcctaccaatgcccctctatttttcctgggttctgatacttcctccatgatgtccaatgggggagactgctgggtgaacttcacgaaattcttgactggcgcattaatatgttggagcatcg

SEQ ID NO: 12822 - DNA, 266 bp, Zea mays
  unsure (1)..(266): unsure at all n locations; Clone ID: LIB3158-008-Q1-K1-A10
cattccctcttttttacantttatatatactatattaaggtactttttctatctggtagttataaatcacatgaactgcttttcatcttcctccaccttcatctccatctacgattgtgtcttgacaaaatccaaatcccttcagtactaattcactttatttttatttacaaaaaaccacaatnttgttcaatctctctactaatgctcactctgtcccactcagtactaattaacccacctaagctcactttgtcccatctaat

SEQ ID NO: 12823 - DNA, 312 bp, Zea mays
  unsure (1)..(312): unsure at all n locations; Clone ID: LIB3158-008-Q1-K1-A11
cgcgtncgctcgaagccaccatcacaactccacatgttctagaacctaataacctgcagacgagagggtgatgttctcgatgaggagatggccgacgccgctggcgacaggtgcgaggcgctagcaacgcacttttcgaagggcagcctgactgctctgccgtgggcgactgccaacctgctgctagacctccaccacctgctgatgctacacgtaatcaacgattcccgactactatcatagcgaggccattctctacgaatacaacagctccccgataattattctctctgaattctatgaccctatcat

SEQ ID NO: 12824 - DNA, 243 bp, Zea mays
  unsure (1)..(243): unsure at all n locations; Clone ID: LIB3158-008-Q1-K1-A12
taccctataccttccccaagaacctccacgtngattttatacactggggatggcccattctcttcccgctcctttacttctacccagaactgctctcccacaacatcctcaagttctgcgagccaatttacttcaatgcgatctcccatatcttcaacgagggcggactgtactacctaatcaaccctatcctcctccacgcgcttatcatcctacccatcttcacgttccaccatgtactca

SEQ ID NO: 12825 - DNA, 332 bp, Zea mays
  Clone ID: LIB3158-008-Q1-K1-A2
ccctttcatcagcctgcctgtccactgttggcttggtgacttcctccgctccgctccgctgccctccgctcccgaacggtcgatctttgcatggcagcagcagctggctccaaggggcgggcgatcgctggaagcttcgtcagccgcgtcctcgccggcaaggccgcctcgccgaggagggccgtgacgcctcggcgtacgacaagaacctggaggaccaggtgcgcccggcgttcgtgccggacgatgtgatcggcagcgccgggagccccgacaagtactggagcccccaccccaagaccggcgtgttcggcccggctgcggttgacccc

SEQ ID NO: 12826 - DNA, 417 bp, Zea mays
  Clone ID: LIB3158-008-Q1-K1-A4
tagaagcgtaaccctaagtctcggaccccaaccctcgaggaaggcgaccggagatggcggcggcgtctgctgtggagaagctcaaggtcctctgggactcgcaggtcaacgactaggagcagtgggcgctcaattataagctgctgaaggccgttggtctgtttgcgggatccatcttcctgatgcgaacttcggtgatctgatggccatttagtaggcttatcagctgtgcttacttggatcctattagtgttgttttgatgttccaatatattcctgctatgaatatgaaagttattttgctctgaagagtacttgatctgtttctatagtgcttgattcttagactttgtagccatagagattagaccctttaatatttggtgtgtaccgtgtatattttgtgacgattgtatt

SEQ ID NO: 12827 - DNA, 411 bp, Zea mays
  Clone ID: LIB3158-008-Q1-K1-B12
cgcgaacgcggacgcgtgggttacaacaccaggcaccatgactttgagagttcagtaatcgcacgaggagacctttggaggttggagtcatctcgtggcaatttaacttcatggaatgatagctcaccacttttccttgttcaacttgggcctttactgtttgttcgagactccacgcttcttttgccggttcatctgacaaagcaacaccttctttggtatggttatgatcgcaagaacggaatgcactccctatgcccagctatctggtcaaagcatataaaatggatgctgatgtcaatgatgtgcctcaaccctgtagcttgttccttcatggatgtgcaatttccaaatggacaaatgacatatgttgctggtgaggggataacagcaagtggttttatcccttta

SEQ ID NO: 12828 - DNA, 434 bp, Zea mays
  Clone ID: LIB3158-008-Q1-K1-B2
cacgtctaagttgaagaccaagtttttgggaaattcagtggaaatttacccagttggaaggactcgagtgacactaaaaaaatctggtgtcgtgttggatttggtgccaccactaacaaaggttaacaacctgatatttgggcgcacttgggttgattctcctggagagatggtcatgacgaacctacaactggagacaaagttgtgctatatttccagccatgcggctggtttggggctggccgttacgaggtggatgggtatgtgtacagtgcagcggaagaacccaaaataatgattacagggaagtggaacaagtccctgagttgccaaccatgtgaccaagaaagcgatcctctttcaggcacagagctgaaggagatctggagagttgcttctgccccacagggcgacaagtattattacacacactt

SEQ ID NO: 12829 - DNA, 241 bp, Zea mays
  Clone ID: LIB3158-008-Q1-K1-B3
cacgtctaagttgaagaccaattttttgggaaatccagtggaaattcacccacttggaaggactggagtgacactaaaaaaatcttgtgtcgaatttgattttgtgccaccactaacagaagttgaccgccgggctatatgtgcacacttgggttgattttcctggagagatggttacgacaaacctacaactgtagacaaagttgtgcttttatttccagtcatgctgctggtttggggc

SEQ ID NO: 12830 - DNA, 400 bp, Zea mays
  Clone ID: LIB3158-008-Q1-K1-B4
cgacgtcaagccccgcgttcccagcacccgcaagcctaagcctaccaagctcaggtcgagcatcacgcctgggacggtgctgatcctcctcgcagggcgcttcatggggaagagagtggtgtttctcaagcagctcaagtccggcctgctccttatctctgggcctttcaagatcaatggagtaccgtccgccgtgtgaaccagacctatgtcattgctacatcaaccaaagttgacatctctggtgttgatgtcgccaagtttgatgacaagtactttgccagggagaagaagcaaaaggtgaagaagaccgatggcgagctttttgagacagaaaaggaggcatccaagtcactgcctgacttcaagaaaggtgaccagaaggctggggattctgctc

SEQ ID NO: 12831 - DNA, 442 bp, Zea mays
  Clone ID: LIB3158-008-Q1-K1-B5
taagccatctattcaggctcttatccatgggctgaatagacactactactcaattgcaatcaattaccggaaaaatgagcttgaggagaaaatgctgttgaacttgcacaaaaagaaatggaccgatgggctaattttgaagaggtttgacactcactcgaaaaccaacgagcagactgtccagaaatgctaaacctagccatcaagtacaacaaggcagtgcaggaggaggacgaactgcctcctgagaaacttgcgatagcaaatgtgggtcggcaagatgcaaaaaagcatttggaagagcatgtgtcgaatttgatgtcatcaaacatagttcagaccctaggaaccatgctcgacacggttgtcttttagtctactaatagtattgttgcccaaactgaaacatatccacactatctaagcacacgtgcgatgagct

SEQ ID NO: 12832 - DNA, 249 bp, Zea mays
  Clone ID: LIB3158-008-Q1-K1-B6
gcaaggatggcatctcttctgttagataatcaggagtatactgaagcccttaccctgggtacttgtcttatcaaggaagtccggatactagatgacttgctacttcttgtggacattgaccttatggaaagcaaacttcactccttccttaaaaatctgtcaaaggccaaagcctcttttaacactgctagaactgcagcaaatgccattaatgattccatctgctcaactaggcactattgacctcca

SEQ ID NO: 12833 - DNA, 254 bp, Zea mays
  Clone ID: LIB3158-008-Q1-K1-B7
ctcgactccattgctactcagagaggaagcagtgttggtgacgccggttgtgctgctgagggggtgtttaaccagctgcttactgagatggatggcatgaatgccaagaagacggattttattatctgtgcaactaacagaccgggcattattgacccatccttgctgatgccagggctgtttatcagcttatttatatttctctggccgaagagcatgtcaggctttataatctataagtcttgtttaagaaa

SEQ ID NO: 12834 - DNA, 366 bp, Zea mays
  Clone ID: LIB3158-008-Q1-K1-B9
ctaccagctatgccactaccacacctgcacccgttttaaaacctaggcccctccctctacgtcggccatgttcttctctaggagctcccccacgccgatggccaaatgtgcctgactctaccaacgctcttctcgaagcgtcaccccgctgatctgcactccgtggagaacaacctcctctctgcctaccaccacctcctgttgctcctcgtcataaacgagcccgactaccaacagatccagaccatcctcttcgtatacatccactccccgttgatcatcttctcagaattctattaccctatcattgctaagaactatctatcaaagtcggacatataaaccttggacaattctgaacactac

SEQ ID NO: 12835 - DNA, 315 bp, Zea mays
  Clone ID: LIB3158-008-Q1-K1-C3
ggaggctgctcttcgactgtgtcaatgaatcgttgggcgcgagatgcgcttactacttcggcggtggctacggcctgtggttcacgggaacggcggtcctgcagagcttgtcggcagaagggatccaccgagagatgaccagcctgcaggtcggcgaggagtggatggtggacgagctcgtgtacaggagatgagtggtcctctggggagctgggtcgacttcaaggtggagtcgtaccaatgcggcggtgacatggcggcggagctgctctgctccttgatcgactaaagtggtcgctgatcttcttgaccacc

SEQ ID NO: 12836 - DNA, 380 bp, Zea mays
  unsure (1)..(380): unsure at all n locations; Clone ID: LIB3158-008-Q1-K1-C4
ccggnnccggaaacccgggacgacccacgcgnccggaagaaaaagaccagacaancnnccccggcaaacaagaccggaccaaaggaccagcagaaggccgggcccacaacaaagagagggaggcgcaaaggaagaggagcaacacggacacggcaaacaacacncagcgcagcggggagagccagaacggcgacaaaggacaacaggaggcagnggaacaacgcaagccacagaccacggcaacaaacaagaaaacaaaagacaaggcacgaacagacaggagagcagaaaacaggaccaacaaagggagccaacagacaaacaccacccggaggaaaagggaggcgcaacaaagaaacacaaaggaaagaacacggggc

SEQ ID NO: 12837 - DNA, 348 bp, Zea mays
  Clone ID: LIB3158-008-Q1-K1-C7
ggaaggccggggcgacccacgcgaccgagcacacggagaggcgcccgaagcgggcgcgaggcgaggggagcacgaagggagccgggggggaggaacggccgagaaggcacgaaacaaacgcccaccaggagccgaccggaccggaccggccgagcaaaggaaaacacaggaagcaagggcaggccaacacagaagagggaaacacggccagaggggaagggaaagaggacaagggacgcaagaggggagaaggcaaaaggaagaaacggaggagcaaaacgcaggaggggggaaagaaaaaaaagccaagcaagaaacaggagcagaggaggaaaaaagcaggggaca

SEQ ID NO: 12838 - DNA, 334 bp, Zea mays
  Clone ID: LIB3158-008-Q1-K1-D1
gtcattgcattcagctgtccggaacgaaccctttttatggaagtgcatccatattgactcgcgcttggggaagaagatgtctgatgctgatcttctgtgcctgacacagaagtccccaggttctatgcagtgcctgagtcttatgcactgtaacaacatcacagatcagggattgaaagctgttttaagagtaatctacagttaacaaagttgggcatttttggtgctatccggattacttatcaaggtcttattgacagtctgaggtcatttaatatggaaacagatattggtataaagaaactcatagttacaaatcacgtcactgcatcag

SEQ ID NO: 12839 - DNA, 355 bp, Zea mays
  Clone ID: LIB3158-008-Q1-K1-D10
cacaacccctatcctaatcttcttcctttctaacctttccggtcctttattcatttctcgtctcttcaatattcatatcttttataatacccttaccttcaatactatcacccttaatttttaatcttctgacaccatttacaattttttttctaatattcattacaataatttcattctctccttaccatatcttcttatctttttcatctattaatttatatacttactctcactttcttaacttcaacatttattatgatctaacacctacatttttatcttctcctttattataatcatactatatctttttcaatacctattactttcaatacaattcatctctttattt

SEQ ID NO: 12840 - DNA, 421 bp, Zea mays
  Clone ID: LIB3158-008-Q1-K1-D2
gctggatcagtattgacctgaagtatggtacatgtccaagatccggcattattcaggattgcaaggcaatctgtacatattatacttgaaaacaacagatgaagctgtggaattaaagaaaagaaatcaagtccaccgaatggttggtggtgtcattgttttttttattcccatttggcagggtatatgtcctcaattactgtatttatcgatatcgagggtttgacgatagagtggcttgtgcatggcatgcctaccacgcctataaaagaatgaaaagtgaaagtgtctaggcgtctagctcctagttgagttttggtgattaatagtaatataagattattgaattattatgactaaagtgtgttcgtagaaagaatatgagttaggtcacgataatataaattgatttgcttatatg

SEQ ID NO: 12841 - DNA, 266 bp, Zea mays
  Clone ID: LIB3158-008-Q1-K1-D3
tgatagcatatcttgaagaggcaacttttctatttgtagtttacgggtctattcaagataggaaggctatctatacataaaaaatattgaaaacaacatattatgctttggaattaaataaaattaaattcaagttcacctaattgatggtggtgtcatttattttttttattctatttatcactgtatatgtcctttatttctatatttttctattttaaatttatatactttatagttgttttttcacgttttgcctactatac

SEQ ID NO: 12842 - DNA, 396 bp, Zea mays
  Clone ID: LIB3158-008-Q1-K1-D4
ccgcaaagcctttcttggctggacaagtatttgttggtggtcttcttcagaagggcagtgatgtcgtctatgttactgatgatggtcaggaacagcagtataatgtgcctcaagtcaagggtcatcgacttagaggtgggccacagatgattcagctgagcttggatggcaagaggatatacgtgaaaactcacttttcagccgatgggatgagcagtttttcggtgatgatcttgtcaagaagggctcccacatgttgcagatcgatgtcgacaccgagaaaggaggcctggctgtcaaccccaactttttcgtctaattttggcaccgagcctgatggtcctgccctggcccacgagatgagatattctggtggggactgcaccttttgtatat

SEQ ID NO: 12843 - DNA, 234 bp, Zea mays
  Clone ID: LIB3158-008-Q1-K1-D5
gctcccgcttaacgctaatcagtaatgacagtggtttttcccagcgcttgctctggcggaggtttcatgggctcatgaaggagctctttaccatcgcgtgttctatagctgcacggctccggggctgctgcacatggacgtgccaaacggtgcatagtgctcgtgaggccataatgtatgaacatggcaaggtgtggttgttctcatgtataaagcctatctctttgttgactc

SEQ ID NO: 12844 - DNA, 253 bp, Zea mays
  Clone ID: LIB3158-008-Q1-K1-D6
cgattagtgccaccgtctaattttgtttgttaccctgtcatagcatgcatatgatggagagggactgttaagcaaatggagactggggccgtgtatctgggtggcaacgctgacttgctgcattgagtggtatatacatattctaccagcggatttgaattgtttattcttgggtgtgcctagccgctcttttgctaccaccgtagcgcgttgctttgtttattgttacttgaattccatattcatcttgttt

SEQ ID NO: 12845 - DNA, 374 bp, Zea mays
  Clone ID: LIB3158-008-Q1-K1-E11
atgcattcatatttactttcccacggtaaatttaataaatcatgattttcatttatccaattatttcatacatatcctttatcgtatctcctctgctttatattccatgcaaattctttactcatgtattctcatactcatcaccttctataaatcaagacatgctatttcattcttgaatgcaaatctttatacacttttcaaaattcttatttttaattcatttaacttaacccaacttatatatgctttcctcatcttattgtatcataacaattttctgcttcttttgttcttattacttaactacacacatttactctttaaaaaaaatatttttattatttttttaaataaaaaaaacaaaaattttc

SEQ ID NO: 12846 - DNA, 331 bp, Zea mays
  Clone ID: LIB3158-008-Q1-K1-E2
tggtctcgctgggcctggccgctggcggcaagggagagatggggaagaaccaggcgtatagaggcgatgcatcgggcgaggctggggtcctcgtccggcgcacctggcgccgtcgacgcccccgaagacggcatgactgacggttcatttcattctccagagtggcatgcggcgcgcctggccagcctaacatgactcacaccgtttcctgggaggagtttatatagaagcagaatgatgaggaattgtaaaggtgtgagctggagggcttcctatataaaatgtttagagttgttagagcttaactggatgcttaatgagcttatatgct

SEQ ID NO: 12847 - DNA, 434 bp, Zea mays
  Clone ID: LIB3158-008-Q1-K1-E5
ggcttttatcattttatgatgctgcagttgattatttgtccaccacaagagttataccaagacttgttgtggttgtcaagggatctactaaatagaattgtggtcagagttgtctgtgttgtctttctgttaattgctggcaaagggtgcatttgctgcccagatgatcgatctttgattgccctaatagttcaaaacttgaaatctcaagcatggactgatgtggatctgttatatgctttgaattatctatagtggggtctcatagaaaatcttattatgttgtgttctttttataaattcaaacattatgtttttctttgtcttacttgactggatcttcattgttctaataattccatgtttctttgcgagggtaacatttactattttttaaaatataattgattcttatatatcttataattatttta

SEQ ID NO: 12848 - DNA, 300 bp, Zea mays
  Clone ID: LIB3158-008-Q1-K1-E6
cccttacgccttcgctcgcgccgccgccgtctacaccgctacgccccgcaccttgctggaggtcgtgtcgccaagatgacgaaacgcaccaagaatgccggaattgtaggcaaatatggaaccaggtatggtgctagcttgcgtaagcaaatcaagaagatggaggtatctcatcataccaagtctttatgcgagttctgtgggaagtttgctgtgaagtaggaaagcaatttgtaattttgtggtgcatggtctgtggtaaggtgaatgctggtgatgcttacaccatttatactgcta

SEQ ID NO: 12849 - DNA, 359 bp, Zea mays
  Clone ID: LIB3158-008-Q1-K1-F1
cttcctcagcctcgccgacctgaaccatgtgtctgtcactctctgcctgttcgctacgccggacgcatctgtgctcgacgcctacccgcatgtgaaggcctggtggtctggtctgatggagaggccgtctgtccagaaggtcgctgccttgatgaagccgtctgcttgaaacggttgccctgtcatcggtgaatggaataagccaagtctgttctgggttgtttgcttgttcagtgatgtgtctttctatgacgaaagttgagtgcctatgtgtgagcatgcttgcttgtaacgagacctttgaattgttcgaaaatgagccattcttgtgcttcttcttgaaaaaaataaaaaataaa

SEQ ID NO: 12850 - DNA, 371 bp, Zea mays
  Clone ID: LIB3158-008-Q1-K1-F4
gcgccggcgtggccagggcctcgtccactgcgccacgcttcgggagcgcaacctcctcggcgacgtgtgcgcgcacctggagcggcatcgcgaggcgggggcgcggcggcgcgacctcctccgcctggtagcctcgtcgctgcgcggcgcggggcacgacgcctccgtctgcgtctcccgctgggacaattcccgtcccacccggtcggcgagcacgcttacatcgacgtgctccttccggcggcctcagaccgcggcgcgcgcgagcgcgtcctggtggacgtggacttcctgtcggcgttcgaggtcgcgcgacccaccaaggcgttccgcgccctgctgcaacggctgccggctgtgttcgtgggcaa

SEQ ID NO: 12851 - DNA, 320 bp, Zea mays
  Clone ID: LIB3158-008-Q1-K1-F7
gcatggatattccgcatggatgagattatgaaggctattgggaagaagctagaccgctacgggaacccatggttagagttgaaaattcagtacggccaaaataaagggaagttctataacgaggaatgtgaccgctttatgctttgcatggtgcacaaacttggatatggaaactgggatgtctgaaagctgtcttccgtatgtctcccttgtttcgatttgattggtttgtgaagtccagaactactccagatttgtctattcggtgtgattctcttttttctaacttgtttttagaaaagataatcatttatttttta

SEQ ID NO: 12852 - DNA, 183 bp, Zea mays
  Clone ID: LIB3158-008-Q1-K1-F8
aaagaaaccaccggagcctaaggtgatatgcattcaaagccgcgtgcccctgcataggagggcgtggaggaagatggcagtgcatgctagggttagcactggtagactctcttctgcactttcattgtaagctactgtccctactagttttggatcttctgctatcttttcgtgaagtgtttc

SEQ ID NO: 12853 - DNA, 141 bp, Zea mays
  unsure (1)..(141): unsure at all n locations; Clone ID: LIB3158-008-Q1-K1-G1
cagaaagcacangcaggacggagaagaagcaaagagacgggcaacgagggggcggaaacgaagcgaaggggcaagcaaggaccgaccaaaaagcgggagaggcaaggacgaacgcagaaagaagaaggaaggaggccacga

SEQ ID NO: 12854 - DNA, 346 bp, Zea mays
  Clone ID: LIB3158-008-Q1-K1-G3
gggattaaaccacatgatcttgcatccctgaaggaaaagcttgagcaagaggcaaaagagagtcttggcatggctatggtctacactcttgtttcatcagccaaagagtggctaagtgagatatatggtcagaatggtggtgatgaggaacctgaagaaactgaagcagaagaggaggttattatacacatggtgaagctgttactgtagagagctttctggcgtggagagaccgatttgaagctgagttggccttacagcgtgctaaacttatgccagattcaactcttacattctcaaaggaaaagaaacttacaggacggcagttttttgaaagtggaaagca

SEQ ID NO: 12855 - DNA, 374 bp, Zea mays
  Clone ID: LIB3158-008-Q1-K1-G4
gcaaggttctggtaaactatgcccggtcctcgaaagaggctgaagaggtctccaaagagattgaagcatctggtggtgaggctatcaccttcggaggagatgtttcaaaagaagctgatgtagagtctatgatgaaagcagctcttgataaatggggaacaatagatgtgctggtaaataatgcagggatacacgagacacattgttgatgaggatgaagaaatctcagtggcaagacgtaattgatctgaatcttactggcgtctttctttgtacacaggcttgcacaaaagtaatgatgaaaaagagaaaggggaaaaatataacattgcattctgagttggtcttactggcaatgttggccaagctaatta

SEQ ID NO: 12856 - DNA, 184 bp, Zea mays
  unsure (1)..(184): unsure at all n locations; Clone ID: LIB3158-008-Q1-K1-G5
ccgggccgacccacgcggacgagaacacacaggcagacgcgagggcggacgcaaggganccacaaacaaacagagcgggggggggaaaaacaancgaaaaagggcaaggaggaaaaagccacaagagggaaaccaccaaaggaagggacagcggaggcgccgaaagccccgaaaagacaaaaag

SEQ ID NO: 12857 - DNA, 301 bp, Zea mays
  Clone ID: LIB3158-008-Q1-K1-H11
ctgtttaagattttcagaattttgggctttttaactaatgaaacatggccaggctttgcggtcgtttttgattacaagtgagctttcccaaattggccacctttggatcttgcaactgtggttcctacactctaacctgctgtaatcgatcttctatttaaaatgctttctctagatcccatcaagaggatcaccttccgcgctttccttttgcactactactttatggacctcttgcactccttgcattatatggattgattgataaaccatttttccttcccttcttcctctttaaatt

SEQ ID NO: 12858 - DNA, 199 bp, Zea mays
  Clone ID: LIB3158-008-Q1-K1-H2
aaatataaaaaattaattaaaaattataatttatataataattaaataatttaaaaaaaaaaggtatataatattatatataaaatataaaaattatataaaaaaaataaaaaattaatggggcggcctttctaaagttttcaagtttatttactctatcatgcaatatattatttcttttattatttcccctaaaatt

SEQ ID NO: 12859 - DNA, 216 bp, Zea mays
  Clone ID: LIB3158-010-Q1-K1-A1
accacgcgtccggacaagccatggcgtccatgaccggcctctcgcagggcgttctgcccagcaggcgcgccgccaacagggccaggacggccgccgtcgtcagggcgtccgccgaggcgcaggcgcaggcgggccgccgcgccgtgctcgggctggtggccactggcatcgtcggcggcgccttgtcgcatgcggtgcacgccgagaccgttaaga

SEQ ID NO: 12860 - DNA, 347 bp, Zea mays
  Clone ID: LIB3158-010-Q1-K1-A10
gaagggcatcgcctacgagtactcggagcaggagctgctgggcggcgccaagagcgacatggtcctccgctccaacccggtgcacaagaagatccccgtgctcctccacgacggccgccccgtctgcgagtccctcgtcatcctcaactacctcgaggaggccttcccggaggcctcccccaggctgctccccgacgccgcctacgcgcgcgcgcaggcccgcttctgggcggcctactccgacaaggtctacgacgccggcacgcggctgtggaagctcaggggcgacgcgcgggcgcaggcgcgcgccgagatcgtgcaggtggtccggaacctcgacggcgagc

SEQ ID NO: 12861 - DNA, 289 bp, Zea mays
  Clone ID: LIB3158-010-Q1-K1-A11
gagcagagacctgagctgtccttcctttacggacggcattctgggtcgaccgcacgatgtcggggcgcacatgggacctgcgacttactggacccgacgcttacctgcaacacgggtctgacccagcagcgccacggccgtcagggcaccgcggaggtctggaagacgacaagctacagacaggactgtggccccggctggcatcgtctgccgacacaccgtttgacacaccggattaaccttaaatccccacgtgtcgctggccagtgacactcgactgtgagatgcc

SEQ ID NO: 12862 - DNA, 431 bp, Zea mays
  Clone ID: LIB3158-010-Q1-K1-A12
cgagcaggaggcggacaaggtaagcagcaatcgcaggaaccctagcgccgccgcacccgcgggaatgggtatcgacctcgtcgccggtgggaggaataagaagaccaagcgcactgcgcccaagtctgacgatgtctacctcaagctcctcgtcaagctctaccgtttcttggtcaggaggaccaagagcaatttcaacgctgtcattctcaagaggcttttcatgagtaaaaccaaccgaccaccaatctccatgcgccgccttgtcaagtttatggaaggaaaggagaagaacattgctgtcattgttggcacagtcacagatgacaaaaggatccaggaggttccagcaatgaaggttactgccctgaggttcacggagacagcaagggccaggattgtcaatgctggtggcgagtgccttacatttg

SEQ ID NO: 12863 - DNA, 295 bp, Zea mays
  unsure (1)..(295): unsure at all n locations; Clone ID: LIB3158-010-Q1-K1-A3
cacgcgggcgtggacgcgtgttttcagatccatggagacccttaagcaactgacatagattttacttcagnagcacatatctttgatattggcattaacataacaacacaagtctgcctgacagatgatgatctcttggacctaacaaactctaaagggaagcatgcatcgttcttatatgatatcgccaatttctacagagattggcatgccaagtctgatggttttcatggaattttccttcatgatcctagtagcttcactgccatacttcatccacagtacttcacattca

SEQ ID NO: 12864 - DNA, 269 bp, Zea mays
  Clone ID: LIB3158-010-Q1-K1-A6
cgtccggattcccggtcgaccccgcgctcggaaaaaaaaattaatatataataaaaaaaaatttttataaaaaaaaaaaaaaaaaaaatataggggggaatatatatataaaaaaagggggtaagaaaggtaataaaaaattgtaggtggtaatttatgttgggtggggggttttttggtttaaaggttttttggttgtgtttcggggggtttgtttttttttttttggtgttaaatttttttaaattggtgggggtttgtataattgg

SEQ ID NO: 12865 - DNA, 109 bp, Zea mays
  Clone ID: LIB3158-010-Q1-K1-A7
cccacgcgtccgggcagccaataaggtaaggggtgacgaaaatggctccaacgaccgccaccaaagacgacagtggctacggcgacgagcgccggctcgagctgcagcg

SEQ ID NO: 12866 - DNA, 222 bp, Zea mays
  Clone ID: LIB3158-010-Q1-K1-A8
gtgtgactggtttttggtgtcttggaacccgtgttaggcttcttacatacccttgtgacgagaccgagtttgttgtaacccttgctttttttgcctttttgttttagttctatcattgttaacgaagcagcctatttcctatactttgaacaacattaaggtagtttttttttgcatgttgcggtactgtggagagtaataaaacaaaaagactctaggttt

SEQ ID NO: 12867 - DNA, 348 bp, Zea mays
  Clone ID: LIB3158-010-Q1-K1-A9
cggttgcaatcgcttacatgttttggtttgagaacatggatctaaccacggttatcagaagctaacctccataaggccctgtggacccagcaagagagccatccgcgccgcaacctatgatctagctaagaacgatccatccaaagagccttttgagaaccttccggagcacgcttttgagggcgttgcagactgggagaggaagttgattcatgaccgggtgcgtgctcttcacgaagcatgagcagaagaaactttctccacgcgtcaagaaggggggaactaagcttcctaatgaggcaatggctgtgcttcggcaccagatcattagatgtcgaaacgataaag

SEQ ID NO: 12868 - DNA, 439 bp, Zea mays
  Clone ID: LIB3158-010-Q1-K1-B11
ggagaaaagaagtgtcgtggttccaaagtctccaatgactattgaagaagcacttccattcggtcgacagtggtggccatcatgggatacaagaaaacatatcagtgttattactacagaggctgcagggattgagcagacatgtgaaagattggggggcatggttagagagtcaagaggagtgctttcacaagcaagacaaatgcagattatacaccagtgcagggtttcaaaccttatttgggtcggtcgggacaggttaggccctttggagcctcgtcaagtggaaaagatactaggttacccttataaccacacaaatttgtttgaattaaaccaacctgatcgacttgctgccatgaaatatgcattccagactgatacattgtcatatcttttatcagtcctgaaaggtaagtatcaagatggaataagagtg

SEQ ID NO: 12869 - DNA, 444 bp, Zea mays
  Clone ID: LIB3158-010-Q1-K1-B12
cctcgacgccgccggtaaaaccaccatcctctacaagctcaagctcggcgagatcgtcaccagcatccccaccatcggtttcaatgttgaaactgttgagtacaagaacattagcttcactgtctgggatgtcgggggtcaggacaagatcagacctctttggaggcattacttccagaacacccagggtcttatttttgttgtggacagcaatgaccgtgaccgtgttgttgaagccagagatgagctccacaggatgctgaacgaggatgagctacgtgatgctgtgctgcttgtttttgccaacaagcaagatcttcccaatgccatgaatgctgctgagattactgacaagcttggattacactccctgcgccagcgacactggtacatccagagcacttgtgccacaactggcgagggtctgtatgagggcctggactg

SEQ ID NO: 12870 - DNA, 360 bp, Zea mays
  Clone ID: LIB3158-010-Q1-K1-B7
gtccaagatcatcctcgatcgggagacgcagaggtctcgcggcttcggcttcgtcaccttgtccacggaggaggcgatgcggaacgccatcgagggcatgaacggcaaggagctggacggccgcaacatcaccgtcaacgaggcccagtcccgcggcggccgtggaggcggcggcggcgggtacggtggtggccgtggaggcggcggctacggcggtggcgggcgccgtgatggcggcggctacggcggtggcggcggcggctacggtggcggcggtggctacggtggcggtggtggcggctaccgcggtggcaaccgtggcggcggctacggcaactccgacgggaactggaggaactg

SEQ ID NO: 12871 - DNA, 442 bp, Zea mays
  unsure (1)..(442): unsure at all n locations; Clone ID: LIB3158-010-Q1-K1-B8
agtacacctggaagctctactccgagaggctgatgaccctgaccggcgtgtacgggttctggaagtacgtgagcaacctggagaggcgcgagacccgccgctacatcgaaatgttctacgccctgaagtaccgtagcctggcaagccaggttccgctgtccttcgattagtacggggaaagaagaagcccaggccggagaaccatcgcctgcatttcgatctgtttcaccgcaattcgcattgttagtcgtgtgttggagttatgtgtacttggtttccaagagctttggttccttcttgttttttttcctttcttgtttgagcgtttttgggcagcgctggcctggttcctagtatggtgggaattggctgcaccttttgcttcgaataaaaatgcctgctcgttcacctgtcaaaaanaaaaaaaaaaannatannnttt

SEQ ID NO: 12872 - DNA, 421 bp, Zea mays
  Clone ID: LIB3158-010-Q1-K1-B9
cgcgctgaaccctacggggaggcgcgcggcgacgaagctcctgcggaagaagatggtgggcgaccaggtggcgcagtggtacccctacgacatcaagcgcgacgacccgctcgtcatggcgcgcgaggagaaggagcgtctggctaaactggaaatgctgaagcgtcgtggcaagggcccgccgaagaagggtcagggaaggcgtgccgtcaagaggagcaagtagtcgagctgtgctaccctatcaatgctcatctctgtttctggagcttgccttgttcttacattgctgtaacgtactaccagtgatttgtcgggtgagtgggcgacgacagatgcaaaaaaaaacccaccttttctatcaagtttagcttacagatgttttttttttcatcaaattgcaatgaacccgcttttatgt

SEQ ID NO: 12873 - DNA, 412 bp, Zea mays
  unsure (1)..(412): unsure at all n locations; Clone ID: LIB3158-010-Q1-K1-C10
atcaagattgacatcaaacgtgtccccaagaagtcaaccttgatcaaggctatggaggaagctgatgtgaagactaagtgggagaacagctcatggggcaagaagctgattgtccagaagaggagggctgcactcagtgactttgacaggttcaaggtcatgctggcaaggatcaagaggggtggtggctatcaggcaagagctctccaagctgaagaaggcgtccactgcttaagtcccttttggtggatgacatgttagtttttggtttcatgttggatcagcaanttgttttgagtgttgtcaaagccagaattagtaatatgtttcctgtgtaccagtttcaaacttcatcaagaatgggtgtgctctggatattttgtcgggaatgatatggaacacttaaattagc

SEQ ID NO: 12874 - DNA, 280 bp, Zea mays
  unsure (1)..(280): unsure at all n locations; Clone ID: LIB3158-010-Q1-K1-C11
ctaaagatgaggttgtaagtaagcagtagataccattttttcctaggaggtgttctcgggggagggagtattcctgctgcaggacgacagctggacggaattttggaatacaccggcagagtagctgaaataactgctaggaatttctgagaaatttcatgttagggaaccaacgatgctgtttaatagaattggctgtacatacctgtccgccgagctattttcctgtgtcttgtacgttgaaataaaattcctgcaaatgtttgccttacggtcnana

SEQ ID NO: 12875 - DNA, 442 bp, Zea mays
  Clone ID: LIB3158-010-Q1-K1-C12
ctacactctgctcagttgtggcagctggtgctgttgttggttttgttgtaatgggtcagagggggcagcaggaccattggcaccttcatcaatttaagttcagtgtcagcggtgagagcatgaatcgagtcattggagcattcagtcgtttgaaggatgggcttcctgggagtgagcaactaagatctatgctgccgactcgcgtactcccacaacagccgctgagcgcttgagtacatgcaccaaattttggtgggctgcttctagtgtcaatttttgttgcttatatgatcttgagaaagttcattctttttcttgtgctacttgattttatgttactgtaaattagtggtcgagacttctcacggtgctgttctttaaaacatagcaaccgtgaagggacatggtggaaacacagagggcactataacaatatgtattc

SEQ ID NO: 12876 - DNA, 407 bp, Zea mays
  Clone ID: LIB3158-010-Q1-K1-C3
gtcagcatcccctacaccatcagcacctccaccgactgctccagggtgaactaaaacctagaccacgcgcgacgacggccgcctgatcgatcgaccaaccattccgccgtcgccgccggccggatcatcgatcgtcgtcatgatgatatctatcaatctacgcgtgatgatcgatgactacttgtctactgctatgtactactaaataaaatctctccgtgtgtacaccgtacgcttgcatgtgcatggtagcatgtacgtacgacgtcgtccatgtatgtgtgtgtgacgtgtgagacggacagagagagagagacaggatcgatcgagagacggtcatgtccttttggctgtttggtttattcatatcacaacttttgagtgtatacaagattatttctgtgggc

SEQ ID NO: 12877 - DNA, 440 bp, Zea mays
  Clone ID: LIB3158-010-Q1-K1-C8
tcccgggccgccgccgccgccgcgaaaaaccctagcaggcttcgccgctgtcactcctaggggcgcgaccatggtggccacaaagaagacgaagaaatccacggacaacatcaataacaagctgcagcttgttatgaagagtggcaagtacactctcggctacaagaccgtcctcaggactctcaggaactctaagtcgaagctagtgatcatcgctaacaactgcccgccccttcgtaagtctgaaattgagtactatgctatgctggccaaggtcactgtccaccacttccatggaaacaatgttgaccttggaactgcctgtggtaaatactttcgggtctgctgcctcagcattattgatcctggtgattctgatatcatcaagactacaccgggtgagcagtaaagaagaagcccctgcactgcagtagggggat

SEQ ID NO: 12878 - DNA, 396 bp, Zea mays
  Clone ID: LIB3158-010-Q1-K1-C9
gtcgatgagacttctgatgatgtgactccaccttccgttttaatggagcatccacctcttgcagtgtttgtcaacggtgtttcagcagcaatgaatgagctaagaccgtgcgcaccattgagcttgaaagttgtccttgctcaggaggtggtcaagggactacatgcagtctctgactccctagtaagatacaaagctatgcggatgcttcgtggaaatgagtccgcccttttcctttcactatgccagacattcatcgaggttgcatatccttgttgtgccgcatgttttggccgatgctacccggacggggcaacattgatctcagagtgtcaaggcacatttgacgctgtccgtcagttattgaccgtgccggcaagatctaacagtttcagc

SEQ ID NO: 12879 - DNA, 411 bp, Zea mays
  Clone ID: LIB3158-010-Q1-K1-D10
cccgcggttgctgacggcgatgaaggttctgggccggggtggcatcgaggacatcaagtacgtcggcagggccccgtcggctgctacggcgacgggcttctactcggtgcacgtgcaggagcagacggagctggtgcagaaggcgctgcagcgcgaccccctcaactacccgttctgaaagaaacgaggcccctgtagattcttggaattggggggccttttgaatttgatataataccaatatagagagaacaggccttaaattttatctgtgcagccatttggtgaaataatcgtttcgactctgcagtaccgcatgaaacaaaccgttgtaggttttggaaaaactccatctcgcagcgttgattttgtgttcctaaatgctggaaagtttgtatggctgaaagcctg

SEQ ID NO: 12880 - DNA, 84 bp, Zea mays
  Clone ID: LIB3158-010-Q1-K1-D11
ggggtctctttgtcgattcagcccataaataaagtgtgaaataaaagccgcaggtggaggcaggaacctgctgattgagggaac

SEQ ID NO: 12881 - DNA, 399 bp, Zea mays
  Clone ID: LIB3158-010-Q1-K1-D7
atgtaaatgaactctaggtgttatgtattttggaactggaatttagctgattccttagtcttgtggttcaacaaattgaaaatattttcatattgtggttcatattgtattaaagacttaccgtcaatgaaacccattaatttttttttggtgaaaacagatccttgccccactgccaattgggttcgcggtgttcctggtccaccttgccaccatccccatcaccggcaccggcatcaacccggctaggagccttggcgccgccatcatctacaaccgggatcatgcctggagcgaccattggatcttctgggtcggccccttcatcggcgccgccctggctgccatctaccaccaggtgatcatcagggccatcccgttcaagagcaggtcttaagc

SEQ ID NO: 12882 - DNA, 439 bp, Zea mays
  Clone ID: LIB3158-010-Q1-K1-D8
attcaatgggaaaaagcttgaagatattgttccttcatcacacaactgtgacattccgcatgtgaaccgtactgagtatcagctgattgatatttctgaggatggatttgtgagccttcttacttcagatggcaacactaaggatgatcttagactcccaactgatgagactcttgtggcccagattaaggaagggttcgaaagcgggaaggatcttgttgtgactgtccagtctgcgatgggggaggagcagatctgcgcgttgaaggatgttggccccaagtaacttccttggctttggagacggaaccctactgtatctcaacttaaatcggaaaagaagtgtatcaccaaaggattgctaccgagacattcacctggcttgagcttgcttttgctatagcgtgcaagggggttgctggtgtcgtacctacctgac

SEQ ID NO: 12883 - DNA, 415 bp, Zea mays
  unsure (1)..(415): unsure at all n locations; Clone ID: LIB3158-010-Q1-K1-D9
cggacgcgtgggctgcaaggctggggaggaccagtacagcctcgcctcccgcgacggcaaggtctgcctcgtgcgcacggaccgtgatgacgacgcgcagcactggatcaaggacatgaagtacagcaccagggtgaaggatgaggaaggctaccctgccatcgtcctcgtcaacaaagccactggagaggctctcaagcattcccttggccagtcacaccctgttcttctgacccgccataatccagactccctggacgagtctgtcctgtggacagagagcagggacgttggggatgggttccgctgcattaggatggtcaacaacatctacctgaactttgatgctntacatggagacaaggaccatggtggtgtgcgcgacgggacggcccttgtgctgtgggagtggtgc

SEQ ID NO: 12884 - DNA, 427 bp, Zea mays
  Clone ID: LIB3158-010-Q1-K1-E10
ggaccggagataccggcggtactgcgagcagatgcgggcgctggcgggcgggttcgaggcggtggccggggagcgcgcggcggcggcgtacacggcgctggcgtcgcgcaccatctcgcggcacttccggagcctccgggacggcgtggtggcgcagctgcaggcggcgcgcagggcgctcggggagaaggacgtggcggtgcccgggatgacgcgcggggacacgcccaggctcagggtgctcgaccagtgcatccgccagcacaaggcgctcacccaggccgccggcatgatggagagccacccgtggcgcccgcagcgcggactccccgagcgcgccgtcaccatcctccgggcgtggctcttcgagcacttcctgcacccgtatccaagcgacgtcgacaagcatatcctggctcgccagacg

SEQ ID NO: 12885 - DNA, 431 bp, Zea mays
  Clone ID: LIB3158-010-Q1-K1-E11
gcgcattcgtgcagcctgcgttctacgaagcgttcggcctgactgtgatcgagtccatgacgtgcggtctgccaacgatcgcgacctgccatggtggccctgctgagatcatcgtggacggggtatctggcctgcacattgacccttaccacagcgacaaggccgcggatatcctggtcaacttctttgacaaatgcaagggagatccgagctactgggacaagatctcacagggcggcctgcagagaatctatgagaagtacacctggaagctctactccgagaggctgatgaccctgaccggcgtgtacgggtttctggaagtacgtgagcaacctggagaggcgcgagacccgccgctacatcgagatgttctacgccctgaagtaccgtagcctggcaagccaggttccgctgtccttcgattagta

SEQ ID NO: 12886 - DNA, 279 bp, Zea mays
  unsure (1)..(279): unsure at all n locations; Clone ID: LIB3158-010-Q1-K1-E12
ctcgatgacgcctagatccgctgctgctgctgctgctgctactcaggttctgccagctttgcgtgtcatcttgtttcggaccttggtgtaacgctgcaaggttaaggtttactcctccacacatggacttttggggataggcttgccatcgtgttttgctagatgagtcgtgaaataagcttttacttcctcgctgctgtgggtgaagtaactggaattcggaaatttggaactaacaaaaccccccgtggatttgtatgatatgttttgttcgacana

SEQ ID NO: 12887 - DNA, 397 bp, Zea mays
  Clone ID: LIB3158-010-Q1-K1-E4
caccagcgagcgctacaacggctatgtccatggagcataccttgcaggtatcgactccgcagacgtcctcatcaactacatcttcaagaacgaggagtacaaggtccgtggcaagtacgacgtcgacgacataatcgcacaggctagatgaagacgacgagtgcacacgccggatgccctgcgccacgagagagacagacagaataaactgccatggctttatttgccctgtggagcgatgcatgcttcccccttccctttcgagctagagcaaccccagcaggcgccctacaccgtctgtcgtctgctgttcatgtcctgtgtctctgtgtgtttttggattggatgccaatggaataagaacgtataggcttgagggcctctgttgactgttcac

SEQ ID NO: 12888 - DNA, 455 bp, Zea mays
  Clone ID: LIB3158-010-Q1-K1-E7
gaggatgtcgggatccaaggtgtacaccctcgaggaggtggctaagcacaacaccaaggacgactgctggctcgtcatcggcggcaaggtgtacaatgtgaccaagtttctggaggatcaccctggaggcgatgatgttctgctgtcttccactgccaaggatgctaccgatgatttcgaagatgtggggcacagcagcactgcccgtgcaatgatggacgagtacttagtgggtgagattgatgcagccacgatacccaccaaggtgaagtacacgccccccaagcagccgcactacaaccaggacaagacccaggagttcgtcatcaagatcctccagtttttggtccccctcgcaatactgggtctggccgtcgctgtaaggatgtacaccaagtcggaatctgcctagtctcttgtcatcaacgcttcaacatcatttcacaaactgataa

SEQ ID NO: 12889 - DNA, 397 bp, Zea mays
  unsure (1)..(397): unsure at all n locations; Clone ID: LIB3158-010-Q1-K1-E8
gttgatattgacgcgagtgacaggacaatacaaaagaaggtacgggaagctcaactggcccaattcaactacattcttgtcgtaggtgcacaagaggccgagactggaaatatatgcgttagggtaagagacaatgctgacctggccacaatgagtgtagatggcttcatcacacgtttgagggaggaaatcgcagccttcaaatgattttgatgctgcataatttcctactactcgtttgtgattttgacgagtttttagtgaccagcatcgagtttcctcgtgttactgttcttgtttgtatgaagctaaaaggctgtctttttgttattaattacagatgcgaagttaaatactgccactagtaaaaaaatatgcttgttgacttccagtgntt

SEQ ID NO: 12890 - DNA, 404 bp, Zea mays
  Clone ID: LIB3158-010-Q1-K1-E9
cgacaaggtgcgccgcagcgcgcgctactactcgcccggctggcgcacctgggcggccgggggcgttcagctggcctggaggaggtacaagcaccgcaagacgctctcgtcgctctccttcatccgcccgcggcgcccgctgtcccgctgctcctcgctcggggaggagaagctccgcctgtacacggccatcctcacctcgcccaagcccaaccaggacgacgagttctagctagcttagctaggccgttccaggccggattctcttctcctcagcgaggagtatatatatcaaacaacatgcatttattagtagtattcattactcgcatgtcgcatgagacacagagccatgaccgcattttgcatccaagttccgatgtggaaagcacgaaattgatgtc

SEQ ID NO: 12891 - DNA, 366 bp, Zea mays
  Clone ID: LIB3158-010-Q1-K1-F10
ggccaaggtctccgacgaaccctccgacgccgagctcgtcatcaaggcgctcaacgagcccgagagggaccggaagaaggtcaagaacatcaagcacagcggcaacatcggcctcgacgacgtcatccagatcgacaggaccatgaggaacaggtccatggccaacgagttggccggcaccgtcaaggagatcctcggcacctgcgtcagcgtcgggtgcaccgtcgacggcaaggaccccaacgacctgcagcacgagattgatgactgagaggtccagatcccgtccgcttgaagactagccatacaaggggactttcattggcgctgctgaagtgtcgaagtactgcatgctatcgatgtacc

SEQ ID NO: 12892 - DNA, 359 bp, Zea mays
  Clone ID: LIB3158-010-Q1-K1-F11
caaccgaacactacataccacagatgaaagacagatagtgccagtaaagaaacagatggtaaagccaatttgcagagcaaaggggccagataagtggcgatctttgcattgaaggttggccacaacgaactgcagttctccgtgccgctcagatttatctgttttgtgacggcctcgaacaagctgctacatcggctcttatctgcgttccaatttgttttttggtcttctttttccttcctatttaaaagccgacataaactatataatggctttgaaactgctgcggcagtcttcaccgatgtattacagaacatgtaagtaaagaacgactgaatatcagtaaagaaccgagtgcg

SEQ ID NO: 12893 - DNA, 445 bp, Zea mays
  Clone ID: LIB3158-010-Q1-K1-F12
ctggaaaggaagcttttgtgtcctcatccgagaagcccttcacagtcgacgggaaagaagctggcgttctaaagagccacggtcctttgagtttcttgaaggttcacgatgctggtcacatggtacctatggatcaaccgaaggctgctctggagatgctgaagaggtggacttctggaaacctttcggagccatcttcaagctcccagaggcttgattttacaatgtaacaaaacacacatgctgctcatgacatttcgagcatgtacctctggatgtttgtaggctcagaaaaggtcctggtcttaggctctgaaaacctcatctggcgaccatacgttatttaccttgtatgggcgctccgcttgctggtgagacacggtgttacgagttacgactcgatgaacatgtaataaaagctttcagagaattgtaggcccggcat

SEQ ID NO: 12894 - DNA, 390 bp, Zea mays
  Clone ID: LIB3158-010-Q1-K1-F3
cggacgcgtgggctgcaaggctggggaggaccagtacagcctcgcctcccgcgacggcaaggtctgcctcgtgcgcacggaccgtgatgacgacgcgcagcactggatcaaggacatgaagtacagcaccagggtgaaggatgaggaaggctaccctgccatcgtcctcgtcaacaaagccactggagaggctctcaagcattcccttggccagtcacaccctgttcttctgacccgccataatccagactccctggacgagtctgtcctgtggacagagagcagggacgttggggatgggttccgctgcattaggatggtcaacaacatctacctgaactttgatgctttacatggagacaaggaccatggtggtgtgcgcgacgggac

SEQ ID NO: 12895 - DNA, 159 bp, Zea mays
  unsure (1)..(159): unsure at all n locations; Clone ID: LIB3158-010-Q1-K1-F4
gggaggcatacgtacgctgtactaccataatggaagtactccggtccggtcctgtcctgtgtgagccttatgtacgtgcaattntaatgtgttttgatattacaagacttgacggttggcaatagatgttgctgacttgctgttgtgtttcgattgatc

SEQ ID NO: 12896 - DNA, 436 bp, Zea mays
  Clone ID: LIB3158-010-Q1-K1-F5
cgccgtcctggccctccaggaagccgccgaggcctacctcgtcggcctgttcgaggacaccaacctctgcgccatccacgccaagcgcgtcaccatcatgcccaaagacatccagctcgcccgccgcatccgcggcgagcgcgcgtaggcgtatctcgcgcccggccccagtggcggcggagggatggaggagggcaatttgtaaccttatgatgtttgttcgcttttagacggcgtggtgaagaactagtgtaaaaacggctttaaagtctattttgtgcggtagttcgtgtaggccgcttcgtcccgaagcgatcttggtaaaagacttattcgtgttgccaaacgacacaattcgtattttttttgtgtgccgtgtagaacacggtttgttgttattggaatggttcatcgaaatctgtgtgcccgttggggt

SEQ ID NO: 12897 - DNA, 367 bp, Zea mays
  Clone ID: LIB3158-010-Q1-K1-F7
gcaagggcaatgcatatgctcaggttgccattggcaccaatgatgtgtacaagagcgccgaggcggttgatctggcgaccaaagaactaggtggcaagattttgcggcagccagggcctctacctgggatcaacactaagatcgcctcttttgttgatccagatggctggaaagtggttctggttgacaacaccgacttcctcaaggaactccactgaaggctcgggatacccaggtgctgtgctaggatgtagtaatgcttgtctgtggtgtaataagatgtgggtggtttgtttctgccctgatgaacttataatactgaatgttgctacagaggttgtgcttctgccagtgaaggtttgggatt

SEQ ID NO: 12898 - DNA, 351 bp, Zea mays
  unsure (1)..(351): unsure at all n locations; Clone ID: LIB3158-010-Q1-K1-G10
gaanaaccggggcgaccgaggcgtccgcgaccattctgcaaggatgattagatacttattgatgaagatactgactttggctcaggccgctggacctattgtctcatgccacaccatctcagcagattgccaggatagtgaagatgctcatgattaatatgcccaaattgtgacaagttaatgcttaatgatcatctggttgatttttatgcaaatagtattcttaactgtatagattataatggcgtctaggattccaatgtcatcaaacctttcatgcatgacgatcccatttttactgacccatattttttaaatattcatatagaacgattttacacttaaacaaaa

SEQ ID NO: 12899 - DNA, 437 bp, Zea mays
  Clone ID: LIB3158-010-Q1-K1-G11
gcagtaggaagggctgtagacctgacaaagcttagtggctacagcgatctttgccagaagcgggaggagatgtttgacatccagggggagctgggttccacactaaagaaatggcgggtcattttcactgatgatgaggatgacatgatgcttgttggagatgatccttgggagtaagaaccctttgtctctgtattaacgagtgcatgttttccattattggaagtcctaatccctgtgcaatgcatcttccttcagtgagttttgcaggatggtgaaaaggatttacatttacacatacgaggaggcaaagaagctgacatccaagtcaaagttaccggttagcagtgacagcagcaagctgagcgctgcgaactcactgtctgaatgactatgaacaaaaactgcagagtgctaacgtcccctctaaatttgta

SEQ ID NO: 12900 - DNA, 439 bp, Zea mays
  Clone ID: LIB3158-010-Q1-K1-G12
tggagctggtgccaggcttatcaattgcataattctggatgatgttgaaattatggaaaatgctgttgttatacattcaattgtagggtggaaatcatccattggaaaatggtcacgtgtacagggcgaaggtgatcacaatgccaaacttggcattactattcttggtgaagccgttgatgttgaagatgaagtagttgtagttaacagcatcgtgctcccaaataaaactctcaatgtcagtgtccaagaggagatcatcctataataaccatcgtttttttttgtctaattccatataaggtctgagtaccaatcacatagtttaagtttattcgttctcaccatgtaatgtaaccttccattagattgagattattagtttgcatttatacctgtcttgcagcatgacactgcacaatcttgacttgctatgcta

SEQ ID NO: 12901 - DNA, 414 bp, Zea mays
  Clone ID: LIB3158-010-Q1-K1-G5
cggggacccgtggccggacccgtgggttgaaatacaaagaagggggtgttctgaaacgagctggacacaccgaggcatctgttgaccttgccatgttggctggattacctcctgttgctgtcctttgtgaaattgtggatgatgcagatggttctatggctcgcctaccaaagttgcgtgtctttgctgaaaaggagaacttaaagattatatctattgctgacttgattaggtataggaggaaaagagacaggctaattgaacgcgcttctgttgcacgcttgcctttgaaatggggcaatgtccatgcatattgctacaaatctgttattgatggcattgagcatattgccatggtgaaaggtgatattggtgacggccaagacattttggtgagggtgcactctgagtgcc

SEQ ID NO: 12902 - DNA, 64 bp, Zea mays
  Clone ID: LIB3158-010-Q1-K1-G6
cccgaccccttggttttggtaacaataataattaatttaaaatgtgaaccattgaatgcgttgg

SEQ ID NO: 12903 - DNA, 165 bp, Zea mays
  Clone ID: LIB3158-010-Q1-K1-G7
ctccactatccttcccctgacaaacgcttcctccaccatctttgatttcatgtcggactgtgcgaacactctcctccggatcacacacatgacatcccaatcatagtcactattgagctacttaatcccgacgccaaagcccaccttcacatgcttcaatccacc

SEQ ID NO: 12904 - DNA, 227 bp, Zea mays
  Clone ID: LIB3158-010-Q1-K1-G8
gcggcggcggctacggtggcggcggcggctacggtggtggtggcggcggctacggcggtgggaaccgtggcggcggctacggcaactccgacgggaactggaggaactgagcggtggggcccgcgcggccaagttatcctgttcgctaccgtgttgtttaccctagtccagagggtttatcttcgttcgtctcatgtttgttgttgcccatctgtgtttttgattgc

SEQ ID NO: 12905 - DNA, 442 bp, Zea mays
  Clone ID: LIB3158-010-Q1-K1-G9
cggacaccgccgccgagctcaaggtgaaggagctcaagaacggccgccttgccatgttcggggtgttcggcttcttcgtgcaggccatcgtcaccggcaagggccccatcgagaacctcttcgaccacgtcgccgaccccgtcgccaacaacgcctgggcatacgccacgaacttcgtccccggcaactaactgactgagcaacgccgtacatgtgtactaccatcagacccatccattcgtccgtccgtccgtccgtccgtcgagtgaacagtgtggtcttccctgtactctacttgttcagatcgtaggcgtgtagtagttgcaccagccggcgtatgctcatgatcgatgtgtgtgctcatcaatcaatgtcaatggctgcctgctgtaagcggtcgaatgtaactaagcacagacgcatgtatcgtcatcagtggatg

SEQ ID NO: 12906 - DNA, 346 bp, Zea mays
  Clone ID: LIB3158-010-Q1-K1-H10
caggaacccgggcctcgccagcctgctcgtggaccccgagttcgcgcaggagatcatggacaggcaggcggcgtggcgcaaggtggtgtgcctcgccatcaacaacggcgtcagcaccccgggaatgtccgctagcctggcctactttgactcctaccgcagggacaggctgcctgccaacctagtgcaggcccagagggactacttcggggctcacacctacgagagggtcgacatgcctggctctttccacaccgagtggttcaagattgcgcgcaacatctccaacaactgatgagctgctcaacggattggcatgccatgccacgtacgcattgttgttgac

SEQ ID NO: 12907 - DNA, 274 bp, Zea mays
  unsure (1)..(274): unsure at all n locations; Clone ID: LIB3158-010-Q1-K1-H11
ttccatggtgccncccgtcgcntggctgnttgtgaagaagctgcccgcttggatttttagtggcgattttgattccgtgtgcccacttcctgctacgaggatttccatccatgatcttaacctgcacgtcaccactccatggtgcccgtggacagcaaacatggaggtcggaggatatgttcaacaataccagggaggattcacgtttgcctctgtcagaggagctggtcatatggttcccgcttcccaggctgatagagcattaatattattg

SEQ ID NO: 12908 - DNA, 443 bp, Zea mays
  unsure (1)..(443): unsure at all n locations; Clone ID: LIB3158-010-Q1-K1-H4
gcggaagaaccggggcgacccacgcctccggcggacaagaaccctgggcgccgccgtcatctacaacaaggacaagccctgggacgaccactggagcttctgggtgggccccctcgtgggcgctgccatcgcgggccttctaccaccagtacatnctnccgggctggcgccatcaaggccctcggcttccttcaggagcaacgcgtgatgagncgggcttggctgtggagcaatggcgggcgacctacgggcggngggccgtgagcgaggagaatgccatcattcatcgatcgacttgggtgccggtggttggttcgggtcgccttattttgtttcaacaacctgctgcgttgcgcgcgtgcgtgagattnggtttggtttcgttcccctgcaatgtaatcatgtcgtgactctctcaagggattattccgctctgctcttat

SEQ ID NO: 12909 - DNA, 316 bp, Zea mays
  unsure (1)..(316): unsure at all n locations; Clone ID: LIB3158-010-Q1-K1-H5
gttggtcagcgtgcgcgaacttgaactggacggacgcaccgatttccatggtgccaacagtcgcatggctgattgagaagaagctgcccgtttggattttagtggcgatattgattccgtgtgcccacttnctgctacgaggttttccatccatgatcttaacctgcacgtgaccactccatggcgcccgtggacagtaaacatggaggtcggaggatatgttcaacaataccagggaggattcacgtttgcctctgtcagaggagctggtcatatggttccgtcttcccaggctgatagagcattagtattattg

SEQ ID NO: 12910 - DNA, 358 bp, Zea mays
  unsure (1)..(358): unsure at all n locations; Clone ID: LIB3158-010-Q1-K1-H6
aacaacttaggttctgaaatccatctgttggaggagcaaggccattcaagtaaaggaatacttgctctggtcttcttccatgggcggtgccgtggaccacctgattgtctcacgtatttgaccagcaacaagggacaaagtttggagctgtgtgaatggtgtggaggcgacaacggtcaagagcatttcatctgatcccttttctctgatggatatgctgatattcaaggctgtggaagagcangtcaagaagagagtagagaacaaggcaaggatcttcgagcagaatgccactgatagtgaagtgcaaggtcgatcctaaagtgctcttccaagctatatgatcagtgggtgatgc

SEQ ID NO: 12911 - DNA, 426 bp, Zea mays
  Clone ID: LIB3158-010-Q1-K1-H7
tggtggttttgtgaggtcgaaagcggcgagcgaattagaagatgctggacaagctgtgggaggacgtggtggccgggcctcgcccggagacgggcctcgagaagctccgcaaggccaccaccgcccgcccgctcgtcatcaacaaagacgcggacggcggcagctacaagcgggcgcagtcgacgccgtcgaccccgacgacgccggtgacgccgtcgtcgtcgacgacgccgcgcggcgccggcaacgtgtggcgcagcgtcttccacccggggagcaacctggccaccaagggcatgggcgccaacctcttcgaccggccgcagcccaactccctcaccgtctacgactggctctacagcgacgagactcagagcaaccaccgctagatcgggcgagatggacagtgaagaggcccggtgtctc

SEQ ID NO: 12912 - DNA, 426 bp, Zea mays
  Clone ID: LIB3158-010-Q1-K1-H8
gggaaagcccgacctcaggaagaaagtgatgcctgccgtcatcgtccgccagcgcaagccgtggcgtcgcaaggacggtgtctacatgtacttcgaagataatgctggagtgattgtgaatcccaagggtgagatgaaaggttctgcaatcactggacctatcggcaaggagtgtgctgacctttggcctaggatcgctagtgcagcaaatgccatcgtttgagagcttgttggaatgtgtttagacttgagtatgatcatctcaattgtgtgttgcagctgttgtaagggtgctattggacttgatggctccttttatgtttggtcactcaaatttgtagtgaacagaaatttgtctacccctgttgcctcaagttgctgtctgagatggttatattattaattttgtctaaagcgacttttgtc

SEQ ID NO: 12913 - DNA, 363 bp, Zea mays
  unsure (1)..(363): unsure at all n locations; Clone ID: LIB3158-010-Q1-K1-H9
caaattgggtcttatgtcttgctttgtcaaggctgctgtttctgcacttcaaaaccagccagtggttaatgctgtcattgatggcgatgacatcatatacagagactacgtagacgtcagtgttgctgttggcacttccaagggccttgtggtgcctgttatccgagatgctgataccatgaactttgctgacattgagaaagggataaacaaccttgcaaagaaggcaaatgagggggcgctctcgattgatgacatggcaggaggaacattcactatctccaatggtggtgtctatggaagcctcctcagcacacctatcnatcaacccccacagtcgtcaattctgggggatgcatttca

SEQ ID NO: 12914 - DNA, 359 bp, Zea mays
  Clone ID: LIB3158-011-Q1-K1-A1
cgctcgccgttctccccgcgtttccttatcatacgcagctcgtccagatgtcgtccgaggcgtcgaaggtagcggtgccggagtcggtgctccgcaagcggaagcgcgaggaacagtgggccaccgagaagaaggagaaggccctagtcgagaagaagaagtccatcgagagccgcaagctcatcttcacccgcgcaaagcagtacgccgaggaatacgatgcccaggagaaggaactggtgcagcttaagcgcgaggcccgtttgaagggtggtttctatgtcagtcctgaggcaaagctgctctttgtggtccgcatccggggtattaacgccatgcaccctaagaccaggaagatc

SEQ ID NO: 12915 - DNA, 230 bp, Zea mays
  Clone ID: LIB3158-011-Q1-K1-A10
ataggcttgacgcagagaccccatctcatctgcgctcccgcgcgtggcctaacgctaacggagccagaagcaaaggagaggattccacaagcttcgagttgccgaaacattttgttaaatctactgcttgtgtgggatcattagtgcaaatccggtgcttgcgcgtgcaggctgtgctacccatgcgtcttggctattgtgaataaaaggtttcgcctgttgcatctgtc

SEQ ID NO: 12916 - DNA, 230 bp, Zea mays
  Clone ID: LIB3158-011-Q1-K1-A11
atatgcttgacgcagagaccccatcttatttgcgctcccgcgcgtggactaacgctgacggagccagaagcaaaggagaggattccacaagcttcgagttgccgaaacattttgttaaatctactgcttgtgtgggatcattagtgcaaatccggtgctcgcgcgtgcaggctgtgctacccatgcgtcttggctattgtgaataaaaggtttcgcctggcgcatctttc

SEQ ID NO: 12917 - DNA, 416 bp, Zea mays
  Clone ID: LIB3158-011-Q1-K1-A12
gagaaactccccggctcgaggagatcgtgacattgagaggacgatgggagggcgcgcgctcctcctcctcctggtctcggcgttggtctttcagatccacgcctccgacccgctgctgtacgagccgttcgatgaggactttgaggggagatgggtcgtctccaagaaggatgaataccaaggtgtgtggaagcatgccaagagtgatggtcatgaggactatggcctccttgttagtgagaaggcaaggaaatatgccataatcaaggagcttgatgagccagttaccttgaaagatgggacagtgggcctgcagtttgaagtgagacttcagaatggccttgaatgtggaggtgcctacattaagtacatccgccctcaggatgctggatgggatgccaaagagtttgataatg

SEQ ID NO: 12918 - DNA, 322 bp, Zea mays
  unsure (1)..(322): unsure at all n locations; Clone ID: LIB3158-011-Q1-K1-A3
accggaatgaaggggcggaccgaccggtccggaggagcactgagacgattttaaggttgacctaattccagtccagggggtgcatggcttactagaagcagtttaaatgttgaattgagcaatttctagttgaccctgcaacttcccccccccccnnnnnnnnnttatttttatacatgaggagttaaaagagtgcgagtctggtgatgccgaaactattacctcttggtatcttgtaatcctgcaatttatttatggggcttgggagtgacagtcagacgatccggatccattttatgaatgaatcaaaattgctccatgc

SEQ ID NO: 12919 - DNA, 346 bp, Zea mays
  Clone ID: LIB3158-011-Q1-K1-A6
ctctggaattacactcaagggcaaggtgacaattatcgccaagcctgaagtgaagttggagattccagatggaaacgtacttgaaaacaaaggatgtcaatggccctgaggatctttaagcaatgtttgtcatcaccagttttttcccaaggacatgtcacaggaaactgccgagcctaatcactcctactgagctctatatttttgtaattttcatgtgcattccgattccgctgcgaaggtcatgtgagcccgctagagaataattgtaatcttctttgctgcgtctgtacttgtgtttttgtgcgccaggacgtatatttttactgaaatgatactccgaaga

SEQ ID NO: 12920 - DNA, 381 bp, Zea mays
  Clone ID: LIB3158-011-Q1-K1-A7
cttcccaaggcgtgcacgcaaggtgaaggctggtgactctactccagaggagcttgccactgctacccaggtccagggtgactacatgccatttactcgtggtgagaaacgttcagttgaggttgtgaaggtcacagatgagatgaagtcatttgctgcctatggcaagctccgccttgagcggatgaacaagaaacatcttggtgcccgccagaagaaggcagctgaggcagagaaagaagataagaagtgaagcggttgaagatagtaccctgttttgttctattcagtcattagtgaatgctactacttaaagtgcttgttctatgttttttgcggtaatgaaatagagccagacaacattttgtgtctactgttgat

SEQ ID NO: 12921 - DNA, 384 bp, Zea mays
  Clone ID: LIB3158-011-Q1-K1-A8
ggaaattttcttgggcgttcttcggcttcattgtcacaaggttcgagttcgtcaccgtctagtacgactgtgcgagggaggaagaggcgaggagaagatgcagatcttcgtgaagaccctgacggggaagaccatcaccctcgaggtggagagcagcgacaccgtcgacaacgtcaaggccaaaatccaggacaaggaagggattcccccagatcaacagcgactgatattcgctggcaagcagctggaggatggacgcacgctggctgactacaacatccaaaaggagtcaactcttcatttggtcctcaggcttaggggtggaaccatgatcaaagtcaaaactctcactgggaaagagatcgagatcgacattgaacccac

SEQ ID NO: 12922 - DNA, 340 bp, Zea mays
  unsure (1)..(340): unsure at all n locations; Clone ID: LIB3158-011-Q1-K1-A9
acgtcatggacccgcagaaggcagtggacatggtggacgagaacaccatctgtgtcgcggccatcctcggttccacgctgaacggcgagttcnaggacgtgaagctgctcaacgacctgctcaccaagaagaacgcggagacaggctgggacacgccgatccacgtggacgcggcgagcggcgggttcatcgcgccgttcctgtacccggaactggagtgggacttccgactgccgctcgtgaagagcatcaacgtcagtggacacaagtatggtctggtctacgccggcatcgggtggtgcatctggaggaccaatgaggacctgccggaggagctcat

SEQ ID NO: 12923 - DNA, 270 bp, Zea mays
  unsure (1)..(270): unsure at all n locations; Clone ID: LIB3158-011-Q1-K1-B1
ggggcgaccaacgcgtccgatcaaatccaagcccggccggtgtacaacaattgactatttgaaattttgtatccttactggtatggttgcaattgtataaagtagagcaatctgagtgaaacaacaaatcgaagtaatttaccttccacgcatggacattatgaagtccaacactaggactgttatgatcagatgattcagggaaccaatctaaaaaaactcatgtgatattgtagccaggaatcactttcatgaatcttaaannaaaaa

SEQ ID NO: 12924 - DNA, 333 bp, Zea mays
  Clone ID: LIB3158-011-Q1-K1-B10
tatatcacgcattcagctcctctgcttacggtgccagaccgaccgagcaagatccattgatcgatatggagctgcttcctctgctcacgtggctcctccttgcgcacgccatggcctacctggcctggatggccgccgcgcgccgccggcagtcgcggtgctacctcctggactacgtgtgccacaagccccgcgaagaccgcaagctgtccacggaggcggccggcgccgtgatccagcgcaacgcgcggctggggctgacagactaccgcttcctcctccgcgtcatcgtccgctccggcatcggcgaagagacctacgccccgcgcaaca

SEQ ID NO: 12925 - DNA, 247 bp, Zea mays
  Clone ID: LIB3158-011-Q1-K1-B11
agcaagtgccgatagatatatatgccctttgttcatggaatctgcttaaactatcaggggcggggctggaaagatagtatatgttgatggccgtgtagtttgtgcatttgatgcacacgcacccatgcaaggttttacctctctatgtatcttgtcggtcaattctttcatatgactattggactggtcatcgctagtaatgctggttctgctctgaaccgtgcctgtacataacatacactaaaaa

SEQ ID NO: 12926 - DNA, 169 bp, Zea mays
  Clone ID: LIB3158-011-Q1-K1-B12
tgaatccgccgctggacgcctctgctttctgttccggtcgcctggtgccacactcatggggcgatctgaaaagatgcgctctgtctattctcctattacttatccatccgttgggcaagctgacctgcatggtcttatttctctgagtgtcttttgcggccaaactctt

SEQ ID NO: 12927 - DNA, 319 bp, Zea mays
  Clone ID: LIB3158-011-Q1-K1-B3
tgaaaccggaccagaccattttgaaggtcggtgaaggccaacctgcccagggcttcagtggatcaacagctttggccatcccaccacctcgtggccccctctggatcctgggcgatgttttcatgggagtctaccacaccgtcttcgattacggcaagctgagggttggcttcgcggagtcggcctaaggaacgtatggtttggcgcctcctccagaggaggcaaaacgcatgcgccgagagaaaagcttcgcttgtttttaacttgtgtatttatgcggccggcggtgtgtgtatatatgctacatgtttagtgatgc

SEQ ID NO: 12928 - DNA, 298 bp, Zea mays
  Clone ID: LIB3158-011-Q1-K1-B4
gtcatccactcccgctgggccatgctgggcgcgttgtgctgcgtgttcccggagctgctcgcccgcaacggcgtcaagttcggcgaggccgtgtggttcaaggccgggtcgcagatcttcagcgagggtgggctggactacctcggcaacccgagcctgatccacgcgcagagcatcctcgccattttgggcctgccaggtcgtgctcatgggcgccatcgaggggtaccgcgtcgccggcggcccgctcggagaggtcgtcgacccgctctaccccggcggcagcttcgacccgctc

SEQ ID NO: 12929 - DNA, 351 bp, Zea mays
  Clone ID: LIB3158-011-Q1-K1-B5
cagaaatctgcaaaggctgaactccagtatttgcaccaccatgctggtgttgctgcaagtgttggcctaaatgcaaaccctgttgttaacctttctggtgtattcggaactaaagctattgctgttggcgctgatgctgcatttgatacttcttctggggacttaaccaaatacaatgctggactgagctacacgacgcctgactttgttgctgcagcgactttgaacaacaaaggagacaacattgccgcttcctactaccactcggtgagtccaaccacagccgtcggaggagaactgagccacagcttctcgaccaacgggaacaccatcacctttgggacgcagcat

SEQ ID NO: 12930 - DNA, 319 bp, Zea mays
  Clone ID: LIB3158-011-Q1-K1-B6
ctacactcccggcggcggcggcggcggcgcatcagcggcagcagcatccgaagatggtgaagttcctcaagcccggcaaggccgttatcctcctccagggccgcttcgccggcaggaaggcagttatcgtgcgcgtgttcgaggagggcacccgcgaccgcccctatggccactgcctcgtcgcatgcctcgccaagtacccaaagaaggtgatccgcaaggactccgccaagaagactgcgaagaagtcgcgcgtcaagtgcttcatcaagctcgtcaacttcactcacctcatgcccacccgctacaccctcgacgt

SEQ ID NO: 12931 - DNA, 281 bp, Zea mays
  Clone ID: LIB3158-011-Q1-K1-B7
ctcagctgcgtcctcctgccacccatggcaaacgcttctctgcaatccttccttctcccgcacgaccattctttcgccggcgccggcggcagccgtgacggctccgcgtccgccgtgcacaagctctccaccaacaccagcggcagcatttccttcaggctctacaccaaaacctccccctcggtgacagcagcctcagccaccaattcgtcagctccgactccagttgccccggcatctgcaccagcggcaggggacgaagaagaagaagaaggcccctc

SEQ ID NO: 12932 - DNA, 322 bp, Zea mays
  Clone ID: LIB3158-011-Q1-K1-B8
gagaacacgatcgagcacacaagcacgaagactcgtttaggagaaaccacaaaccaccaagccgtgaaagcatcatggagtacggtcagcaggggcagcacggccacggcgccacgggccatgtcgaccagtacggcaacccagtcggcggcgtcgagcacggcaccggcggcatgaggcacggcacgggaaccggcggcatgggccagctgggtgagcacggcggcgctggcatgggtggcgggcagttccagcctgcgagggaggagcacaagaccggcggcatcctgcatcgctccggcagctccagctccagctcgtc

SEQ ID NO: 12933 - DNA, 359 bp, Zea mays
  Clone ID: LIB3158-011-Q1-K1-B9
gtaaccgcgcaggtaactctggagcgtgacttgactaacgtttcatctgaggttggtccagtccatgcgccaaggtgtcccaagcctaacgaagaaggctggtggctggtgattggggacagctccacaaaccagttactggcaatcaaaagagtggcactccatatgagggcgagagtgaaacttgagttttctgctcctgcagaggctgggagaaaggactacatgatttacttgatgtcagactcttacttgcgctgcgatcaggagtatgaattcaccgttgatgtcaatgatgctggatgggattgatgattaaataccgtgacactatgttgcatagaagttagaattgtgtg

SEQ ID NO: 12934 - DNA, 263 bp, Zea mays
  Clone ID: LIB3158-011-Q1-K1-C1
tccatgttggttgggttcattcaattattatattcgttgcttacctttacttttgcttggttaatcttaattaaatcgtgtgagttttcttttcttttcttgagtatatatatgtatgtacgtagagcgtgatgagtgccttttcaagtttattgtttttttttactttttcctctcgtgcatatggttcaaatccatgatgatgatgtaatgcatgtaattaataatgacaatcaagtcaataaacacacatgcaatttttt

SEQ ID NO: 12935 - DNA, 278 bp, Zea mays
  Clone ID: LIB3158-011-Q1-K1-C10
gaacattgctgtgattgttggcacagtcacagatgacaagaggatccaagaggttccagcaatgaaggttactgccctgaggttcaccgagacggcaagggccaggattgttaatgctggtggggagtgcctaacatttgaccagcttgctctgcgtgctccacttggcgagaacacagtcctcttgaggggccccaataatgcccacgaggcagagaggcacttcggcaaggctcctggagtgccgcacagacacaccaagccatatgtgcgctaca

SEQ ID NO: 12936 - DNA, 224 bp, Zea mays
  Clone ID: LIB3158-011-Q1-K1-C11
gaacatcgttgtgattgtcggcacattttcaaatgacaagaggatccaagaggttccagcagtgaatgttactgccctgaggttcaccgaaaccgcaagggccaagattgtcaatgctggtggggagtgccttacattggaccagcttgctctcacggctccacttggctagaacacagcactcttgaggggccccaaaaatgcccacgaggcggagagacact

SEQ ID NO: 12937 - DNA, 165 bp, Zea mays
  Clone ID: LIB3158-011-Q1-K1-C12
gtacattgctgtgattatctccacatttttttatgacaagaggaaccaatgtgaacgggcggtgaattttactgccgtgaggctcaactaaaaaacacccccctcattgccaatgctggtcttgagggcctcacattttaccagcttgctctactatgctccact

SEQ ID NO: 12938 - DNA, 419 bp, Zea mays
  unsure (1)..(419): unsure at all n locations; Clone ID: LIB3158-011-Q1-K1-C2
ttnttttttttttttttttttttttttttttttttggagcagggtaaacacccattccgcaggcgacagtgctattatactgtacatggtcaaagtctcacaagaaggataaatgttcaaaaacaaagccgggcaaacccagcagatcccggggtcttcaaatcaaagaagtatctgagcttgtacggaagcggcaaacacaggcatttgaaggaatgcagaaagggttcttcagatgttcggttacaacttgagggaactggagaaaagcaagagcatgaggtcgcagcatctagcgagatgtcaatgactcaatacaaggacaatattccatcttgcatgagttcaactttctctgcatttctccttctattctaccctctgtcttttgttctctcctgctgtcagacacatgaatg

SEQ ID NO: 12939 - DNA, 409 bp, Zea mays
  Clone ID: LIB3158-011-Q1-K1-C3
ggcatctatagcaaccggtccaacactttcacgctcaggcgctcagctctagcaatggctgcctccaccatggcgatctcctccacggcgatggccggtacccccatcaaggtgggctccttcggcgagggccgcatcaccatgcgcaagaccgttggcaagcccaaggtggcggcgtccggcagcccctggtacggccccgaccgcgtcaagtacctcggccccttctccggcgagcccccgagctacctcaccggcgagttccccggcgactacggctgggacaccgccgggctgtccgccgaccccgagaccttcgccaagaaccgcgagcttgaggtgatccactcccgctgggcccatgctcgcgcgctcggctgcgtcttccccgagctgctctcccgcaacg

SEQ ID NO: 12940 - DNA, 390 bp, Zea mays
  Clone ID: LIB3158-011-Q1-K1-C4
gctagatggcgggacccgagacggacgtcaacgacgcaatgacggcgatggcagcagtcgcatccgtagtggcctccatgcagtcggcgtcctagcgcgagagcgcatcagccatcgtgttgatgcatctgggccagtatttgactatgaagtcgtatccgaacaacatcgatatgatggagatgatccgaccatgaatcattgtagattagtatatcatcaatgaaaactagcatgaacctgtagagaaaggggcacagggcgtcgttcatgacgctttggaatgtcgctggtgcattggtgagcccgaacgccatcaaactcaaagtggctgtgatgagtgaggaacgccgtcttcttaatgcattcacatgcatgtggacctaatga

SEQ ID NO: 12941 - DNA, 400 bp, Zea mays
  unsure (1)..(400): unsure at all n locations; Clone ID: LIB3158-011-Q1-K1-C5
cttcattcttcttttcgcctccatttttgccactggtatattggagcttagatggagcggtgttggcattgaagattggtggagaaatgagcagttttgggttattggtggcacctctgcccatctcttcgcagtgttccagggtctgctgaaagtgttggctgggattgataccaacttcacagttacctcaaaggcatctgatgaggatggcgactttgctgagctatatgtgttcaagtggaccagtttgctcattcctccgaccactgttcttgtcattaacctggtcggaatggtggcaggaatttcgtatgccattaacagtggctaccaatcctgnggtacgctcttttgaaaagctgttcttctcgatctgggtgatcctncatctctaccc

SEQ ID NO: 12942 - DNA, 272 bp, Zea mays
  Clone ID: LIB3158-011-Q1-K1-C7
ctagttcttggtgaaaaaaaaaaaaaaaaaaaaaaaaaaaaaaaaaaaaaaaaaaaaaaaaaaaaaaaaaaaaaaaaaaaaaaaaaaaaaaaaaaaaaaaaaaaaaaaaaaaaaaaaaaaaaaaaaaaaaaaaaaaaaaaaaaaggggggggccgttttagaggatcaaagttatcgtccccttgtttgcaatgtaatattttttttttggggcacctaaaattaatttcatgggccggggttttaaaacagtgggatgggaaaaaccttgg

SEQ ID NO: 12943 - DNA, 414 bp, Zea mays
  Clone ID: LIB3158-011-Q1-K1-C8
aagatctagaacctaagaacctgcagaggagaggaagaggagcttggggaggagatggccggcgccgagggcgagaggtgggtggggctagcaacggacttctcggaggggagccgggcggcgctgcggtgggcggcggccaacctgctgcgagccggcgaccacctgctgctgctgcacgtcatcaaggagcccgactacgagcagagcgaggccatcctctgggaatccaccggctccccgttgattcccctctcggaattctctgaccctatcattgcgaagaaatatggagcaaagccggacatagaaaccttggacattctgaacactacagctacccagaaggatatcgtggtggttgtgaaagtcctgtggggtgatccgcgtgagaagctctgtcaagttatccat

SEQ ID NO: 12944 - DNA, 270 bp, Zea mays
  Clone ID: LIB3158-011-Q1-K1-C9
gtcgatccaattgtcacttgctctccctccaacaagctaattaaggccggtcatccctcttctagctcgtttcattatccatggcggaggagaagcaccaccaccaccacctgttccaccacaagaaggacgaggagcagctcgccggcggcgggtacggcgagtccgccgagtacacggaggccacggtgacggaggtggtgtccacgggcgagaacgagtacgacgagtacaagaaggaggagaaggagcacaagcacaagcagcacc

SEQ ID NO: 12945 - DNA, 423 bp, Zea mays
  Clone ID: LIB3158-011-Q1-K1-D1
gccgcaagccgatcttcccaggaaccgagtgcctgaaccagctcaagctcatcgtcaacgtcctcggcaccatgggcgaggcagacctcgcgttcatcgacaacccgaaggcccgcaagtacatcaagtcccttccgtatgccccgggcgcccccttcaccggcatgtaccctcaggcgcaccctctcgccatcgacctgctgcagaagatgctcgtgttcgacccgtccaagaggatcagcgtcaccgaggcgctggagcacccgtacatgtctccgctctatgacccgagcgcgaaccctcccgcgcaggtgccgatcgacctcgacatcgacgagaaccctcgcgtcgacatgatcagggagatgatgtggcaggagatgatccactaccaccccgaggtcctcacgagaatcagcatgt

SEQ ID NO: 12946 - DNA, 315 bp, Zea mays
  Clone ID: LIB3158-011-Q1-K1-D10
cccggcggctcctacttcgacccgctcggcctggcggacgaccctgagaagaaggagcggctgtagctgtctgagaacaagcacgcgcgcctagccatggtcgccttcctcggcttcgccgtgcaggccggcgccaccggcaaggggccggtcaacaactgggcgcacccacctgagcgacccgctccacaccaccatcttcgacacgttcggagggtgctcttaagcccgccattgctccagcccgtgcattgaccggccggagcgtgttcttggaactactaactacaatctctatgagcctggggatggatc

SEQ ID NO: 12947 - DNA, 110 bp, Zea mays
  Clone ID: LIB3158-011-Q1-K1-D3
accacgcgtccggtgatcggtggctctagaacccatgtactttatttttatcagtctaacaagatcacatccagggggtggacttttttaccttgggcttctacaaaaag

SEQ ID NO: 12948 - DNA, 170 bp, Zea mays
  unsure (1)..(170): unsure at all n locations; Clone ID: LIB3158-011-Q1-K1-D4
cgcgagtggtggcacccacgcacactcttttccccccagtccggaccccggaggagccaagccatggcgtccacctcctgctgcctcctccaccagtcaaccgcccgcctcggcgcgtcgccgcgcctggccgncgncccgccgcgcagcgccccagcttgctcgttctg

SEQ ID NO: 12949 - DNA, 331 bp, Zea mays
  Clone ID: LIB3158-011-Q1-K1-D6
ggggtacagaaacatcatgcagaactgccaggagaacgccgcgatactgcgggagggcatcgcggcgacgggccgcttcgacgtcctgtccaaggacgccggggtgccgctggtggccttctcgctcagggacagcagccggttcagcgtgttcgacgtctccgagaacctgcggcggttcggctggatcgtgccggcgtacacaatgccggccgacgcggagcacgtggcggtgctccgagtcgtcgtcagggaagacttcagccgcaggctcgccgaacggctggtctcggacgtccgcaagatcctgcgcgagctggacgcgcgcgcg

SEQ ID NO: 12950 - DNA, 98 bp, Zea mays
  Clone ID: LIB3158-011-Q1-K1-D7
aaaataatggcatcgtcggtatgcatgaataaaatgtatcagaatgttcatcctttcacgattggatatatgaaaatgtgctcagttgtttggtttcc

SEQ ID NO: 12951 - DNA, 414 bp, Zea mays
  Clone ID: LIB3158-011-Q1-K1-D8
ctgcaagtctcgctacgtagcagtgcaatacaaaaaaagcagccgcaatggcgagcagcaccatggccctctcctccacggccttcgccggcaaggccgtgaacgtgccgtcgtcgtccgccttcggcgaggcccgcgtgacgatgcgcaagacggcggcgaaggccaagcctgcggcggcgtccgggagcccgtggtacggccccgaccgcgtgctgtacctgggcccactgtccggcgagccaccgagctacctgacgggcgagttcccgggcgactacggctgggacaccgcggggctgtcggcggacccggagacgttcgccaagaaccgggagctggaggtgatccactcccgctgggccatgctgggcgcgctcggctgcgtcttccccgagctgctcgcccgcaacg

SEQ ID NO: 12952 - DNA, 363 bp, Zea mays
  Clone ID: LIB3158-011-Q1-K1-D9
gcccgccctgaccaacatggtctccgccgctaagctcatccgcacccagctcgccagcgccaagtgagcaccttttttttgcctttttcgtttccgaggagggcgtcgtcgatgccaatttgtttccaataaacagggctgtgcccgccgttctgttgtactccgtctgtggttaggttagtagttttcttgatctcgcccccacgcggtacctgttttactactctctgtttggtggtttctgaggcaagttgcccgtgtacttgtatcgtaaaaaccgagtgggacatctgcatcgtttcatctgccaccactcccccgaggtgtgctgtttcacggctcaaagaaagatgtcgtatcggc

SEQ ID NO: 12953 - DNA, 391 bp, Zea mays
  Clone ID: LIB3158-011-Q1-K1-E10
gatcatgggacccggtgtccaccgaacaagctctcgccttgaagagatccttgtggactgcagcggagatgacaacgaagaaaagaatccagaaaccgccttttcgaacaagaaaacagcgcttttgaagattatcgaggagtctcctgtccgcaaaacaattgttttctgcaacaagattgagacatgtagaaaagttgagaatgcgctgaggcgggttgacaggaaggcctcgcagatcaaagttctccccttccatgctgcgctggatcaggcccagcgcatcgcaaacatcaaggagtttctgaacaagcaaacggctgactccatgttccttgtgtgcacagatagggcgtcgcggggcatcgactttgcgaacgtgaaccacgtg

SEQ ID NO: 12954 - DNA, 345 bp, Zea mays
  Clone ID: LIB3158-011-Q1-K1-E11
aagaaactaaagttgacaatatgggatactgctggccaggagaggtttaggacaataactagttcttactacagaggtgctcagggaattattttagtatatgatgtcacaaagagagagagtttctcaaatttggctgatgtttggactaaggaaatagaagcaaactcaacaaacaaagactgcataaaaatgcttgttggaaacaaagttgacaaggatgatgaaagaatggtcacagaagaagaaggtcttgcttttgctgaagaatctggttgtctgtttcttgagagcagtgcaaaaacacgagaaaatgttgagaaatgttttgaagaacttgcattg

SEQ ID NO: 12955 - DNA, 414 bp, Zea mays
  Clone ID: LIB3158-011-Q1-K1-E12
ggcatctggctgcgctaccagagcagaaccggataccacaacatgtacaaggagtaccgcgacacgaccctgaatggcgctgtggagcagatgtacaacgagatggcctctcgccaccgcgtgaggtccccctgcatccagatcatcaagactgcgacggtgcacttcaagctctgcaagagggacaacactaagcagttccacaacagtgagatcaagttcccgctcgtgcaccgcaaggtcaggccgccgaccaggaagctgaggaccacgttcaaggcttcgaggcccaacctgttcatgtgatttagctgtggtcagtgtatgcgatcataagagtcacaagtgtttctgttttttttttaagttttgacttgctaatagtaatacttaatcggtttgatgattcaactc

SEQ ID NO: 12956 - DNA, 391 bp, Zea mays
  unsure (1)..(391): unsure at all n locations; Clone ID: LIB3158-011-Q1-K1-E2
cacgtgcaaatgtaagcggcaaggtgcaatctcttcttcaggatatcaagaaggtgacagaaaaacccgtggctgttggctttggtgtgtcgactccagagcatgtccggcagattgcaggatggggcgcagatggtgtgattatcggtagcgcagtgatgaagacgttggaggaagctgcttctccagaagaaggattgaagaagctagaagagttcgccaagaacctgaaggccgcattgccgtgaaccaaccattttcgttagcaaagaaattaagattttttttttcctttcaatcttggctttcagggttgttggttgttgtgtagtgaaaataattgtgtccctatgttgaatgctcaaatgaataaatcaagatcccatttntt

SEQ ID NO: 12957 - DNA, 139 bp, Zea mays
  Clone ID: LIB3158-011-Q1-K1-E3
gaaaagaatggtgcttctgaatcaaacaaaatattattaaggatataaaaaaaaggaacagaaaaacccgaggcatgatggatgtggtgagtcaactccagaacatgtgcggccgattgcaagatggcgcgcatatggc

SEQ ID NO: 12958 - DNA, 404 bp, Zea mays
  Clone ID: LIB3158-011-Q1-K1-E4
ccgtcaggcgcgcacctccgtcgccatcaccttcggcaccgtcctctgtttcatcctcctgtccctcatctcctcgtaccgccttttcagcgcctacgaggcgcccccgtcgtcggcgctcggcagcaagggcgtcgagatcgccgcctacccgcgctgaagccgctggagggaggcctcgttgcaaatctctgttatgcgtagtcgatcatgtaataatggcttatcgcatatatacttcgttgatagtttgctgtcacatatgattagtacagtgctgctgctgctgctgctaaattgtgcttgactgggtaattatatagtttgcatcgttcttgtgtgtcctggatggattgagcttaaaattcttattaaaattcttactacagacgtagtttctgtgc

SEQ ID NO: 12959 - DNA, 214 bp, Zea mays
  Clone ID: LIB3158-011-Q1-K1-E7
ctttaagaggggatgcttgcagcgtacactttgagtcctggaccgaacctgaagacgtgtttattatctgagggctaagctccactcgagctttactgtctatacaacaaccacatggggtgacgcctcagaaggatcatagttccgtgccacaaggatgcacggctgacgatgaggcttttggtgacatagttgcaatcccatgacatcgttt

SEQ ID NO: 12960 - DNA, 418 bp, Zea mays
  Clone ID: LIB3158-011-Q1-K1-E8
catatgacggcgctaaagcatcaagtagtcgatctagtcgtcgtttcggaagcagaaggattagtccccaagtatcgtctggtaactatgaagttggacaggtttcatacaaatacaacttgctcaaatccagaggccccaggagaatgaattgcactcttgaatgcccttcagcgcaagagacctgggaaaactcactcaagacaaagttcaggaggcccttgggtcccacaactttgcgaaacaaagcgcctcgctggcatgagcagctgcagtgctggtgcttaaacttccatgggcgggtaacagttgcatcggtcaagaatttccagcttgtggctgctgccggccccagtgaccctactggcaacgtggacgaggaaacggttctgctgcagtttggtaaggtcgacgatga

SEQ ID NO: 12961 - DNA, 417 bp, Zea mays
  unsure (1)..(417): unsure at all n locations; Clone ID: LIB3158-011-Q1-K1-F1
ggagcttggcattactgcactgcacattaagcttcgtgccaccggaggcaacaagaccaagacccctggacctggtgcccagtctgccctcagggcgcttgctcgttccgggatgaaaatcggacgcattgaggacgttaccccggtccccacggacagcactcgcagaaagggcggtaggaggggaaggaggctgtangcgtctcttctgcgtgccatttgctggctcttgtcgggtggccatcatgaagctagtcctctctgggtggtgttgctgttttctgtgtttgtcaagacgagctttaattntgctctatgtggatgactgtttaccgttagtcgaacctgtatgatgttgcatggataatgttttttggctgaggaantggctcgtcatatttctatatgcattttcac

SEQ ID NO: 12962 - DNA, 405 bp, Zea mays
  Clone ID: LIB3158-011-Q1-K1-F10
gcaagctatatgggcaactatactgttaataacaatcagacaagcagaggtatcacttcctagggagagtactattatattcatatatgacttgggataggtgaaacacccactactatatcaggctttcaggtgcatgactgcgaattggtgatgtcagattaatatacaggttagttgcttgtttctaggtaaccagaggtgtggtttacaacaccaaaatgctagaggagccgatacaaacattctagtttaatttctacatctattaggccttttgttttttgaatgagatgtgcagtgttgattgcggcacatacttagaagtgttccaacataaagctggaattctgtcatacgggaagataaacttgtataccaaggggatgctgtattattatcttt

SEQ ID NO: 12963 - DNA, 400 bp, Zea mays
  Clone ID: LIB3158-011-Q1-K1-F11
gtgagaagagaagttaatgctggaattgcgtccgtatcacggatgatggagcgtctggaaactagaggaaatagcagaacaagtgatagcccggcagcatccacttctgaagttccctctgctacagaatcaagcaatgaaagggttacagagagcaactctgctgctgctgctgctggtggtggtactaccactacgggtaccagcgctagcaacgcctccgccccttgtgttgcgacatccggttcaaattaggacatgtttgtgagcctggcggcagagcagaagtgcagtaacatgatgccgtcatttttttctcaaccactgcataaacggctgcaaggggaaaaaaaccaaacggtgatttgatgtattggctcgataaaatggtggtgcgtgt

SEQ ID NO: 12964 - DNA, 373 bp, Zea mays
  Clone ID: LIB3158-011-Q1-K1-F12
ggatctctctccagttagcagcaagcgtaggaaggaattgtccccacaggccatggatgaggaagtattcttcccactgaattcttgccctcagaagacacaacaagatgtggagatgcactcaccaacgcagcctgctgcgtggctccatgagtttactggggtgatgagaaacgcctgtgggccagtgactgctgccaagtctatctatgaggatgaccagggctacttaataatggtcagcttgccgtttgttgatcagcagagggtgaaggtttcgtggaggaacactctgactcatggcattgtgaagatcgtttgtgttagtactgctaggatgcaacatataaggagacatggcaagatgttcgcg

SEQ ID NO: 12965 - DNA, 313 bp, Zea mays
  unsure (1)..(313): unsure at all n locations; Clone ID: LIB3158-011-Q1-K1-F2
gtacatgcccttggacaaccaaggagacgttcaaagccattctcatcacattgaaatgtgaggacaggaggatgcaaacttgacaaaggggggggggggggggggggcgacttgatgtaccctatatatacacttgaattagatgttcataactgtaacgatcttatgtttagcatgcttagtccttgaacaatctgtatccctgtggtttctgtgttaaggctgacacggtcttgtttagtaataattgccttctccnaaaaaaaaggngaatatgatatttgttttttgtaaaaaaataatttttaatttt

SEQ ID NO: 12966 - DNA, 302 bp, Zea mays
  Clone ID: LIB3158-011-Q1-K1-F3
atggaccgcgactacggcatcctcaaccgcgtgttccacaacatcacggacacgcacgtcgcgcaccacctcttctccaccatgccgcactaccacgccatggaggccaccaaggcgatcaggcccatcctcggcgactactaccacttcgacccgacccctgtcgccaaggcgacctggcgcgaggccggggaatgcatctacgtcgagcccgaggaccgcaagggcgtcttctggtacaacaagaagttctagccgccgccgctcgcagagctgaggacgctaccgtaggaatgggagca

SEQ ID NO: 12967 - DNA, 406 bp, Zea mays
  unsure (1)..(406): unsure at all n locations; Clone ID: LIB3158-011-Q1-K1-F4
ttctgttccggcgatgtggtgcccggtttcttcgtcgccgaatcagctcttgatgagtggcgctccctgtttttggcctgaggtccaggtaagtagtagagttggaggatgaattagcggcggagtggccagaatctccacgtgaaccttgtccagaggacttcatttcccttgcagagcacatagaaaccttttggggcatcgagtacgactcagataatatgcctagtttctctgattagggggtagttcaggttatgtgatgagttatgtcatgaaccatgtttatgtatcagctatgaaccaagttatgtcatgnaaccatgttatgtctagtgtattagctgtgactagttngtatcagcaaaactgagttcatgtatgtgcttgtgacatgagtaaaact

SEQ ID NO: 12968 - DNA, 327 bp, Zea mays
  Clone ID: LIB3158-011-Q1-K1-F7
ggagcgggcgcccactcagactacggtctgtttactctcctggcaaccgatgatgtaggggggctccaaatatgcaaggacaagaacgctcagcctcaactgtgggaatacgtatctccgttgaaaggcggatttatcgtcaaccttggcgacatgctcgaaaggtggagtaacggcgttttcaggtcaaccttacatcgagtggtcctagatgggcgagaacgctactcgatagcctacttcgtggaaccaagccactactgcgtggtggagtgcctgccgacctgcatgtccgaatcaaatcctccaaagttcccttcgatcacc

SEQ ID NO: 12969 - DNA, 392 bp, Zea mays
  Clone ID: LIB3158-011-Q1-K1-F8
gctttctcaactcgtgaggaagcatctcaggctttaactgaaatgaatggcaaaatgatatctggaaaaccattgtatgttgcatttgcacagcgcaaagaagatagaaaagcgatgttgcaggcacagttttctcagatgcgccctgctgtaccaatgacacccactctagccccacgccttccaatgtactctccgatggctcctcagcaactcttctatggacaagcgccaccagctatgatgccccctcagccaggatttgctttccagcaacagcttgttccaggcatgaggcctgggggtccccatatgccaaattattatgttccggttgtccaacagggccaacagggtccacgcccaggtattaggcgtggagctggaagccc

SEQ ID NO: 12970 - DNA, 331 bp, Zea mays
  Clone ID: LIB3158-011-Q1-K1-F9
ccctcactctcctccgaagccatcgtccccgtcccagcctccccggactccaggggcaaaagctgcagcgtcgagatggtgaaggggcgcacggggcagcgcgtgaggctctacgtccggggcaccgtccttggatacaagcggtccaagtcgaaccagtacgagactacgtcgctggtgcagatcgagggggtgaacaccaaggaggacgtcgcgtggtactgcgggaagcggatggcctacatctacaaggccaagaccaagagcagcggcacccactaccgctgcatctggggcaaggtcgcccgcccgcatggcaactccggcgtcg

SEQ ID NO: 12971 - DNA, 391 bp, Zea mays
  Clone ID: LIB3158-011-Q1-K1-G1
aggaaatggtagaatggacccgtgcagagaagcgtactttcctccggcagcgtgtggaggcaaggttggcagctctcctgttagagaatcaggagtatactgaagcccttaccctgcttactagtcttatcaaggaagtcaggagacttgatgacaagttacttcttgtggacattgaccttttggaaagcaaacttcacttctccctgagaaatctgccaaaggccaaagcctccttaactgctgctagaacagcagcaaatgccatttatgttccacctgctcagcaaggcactattgacctccagagtggaatcctccatgctgaagagaaggattacaagactgcttacagctacttctttgaagcatttgaagctttcagtgcgct

SEQ ID NO: 12972 - DNA, 248 bp, Zea mays
  unsure (1)..(248): unsure at all n locations; Clone ID: LIB3158-011-Q1-K1-G10
gagtgaacagtgtggtcttctctgtactctacttgttcagatcgtaggcgtgtagtagttgcaccagccggcgtatgctcatgatcgatgtgtgctcatcaatcaatgtcaatggctgcctgctgtaagcggtcgatgtaaactaagcacagacgcatgtatcgtcatcagtggatgaaaaaaaaaaaaaaaaaaaaaaaaaaaaaaaaaaatataaaaaaaaaaaaaaaaaaaaaannaanntnatt

SEQ ID NO: 12973 - DNA, 306 bp, Zea mays
  Clone ID: LIB3158-011-Q1-K1-G12
gctgactctgccagccgcacgcacgccctcgcgcttggagcgttgcgaggatcggctcacaggtcacagctcagtctcagatcggccaccggccgggcgggcaccggaccacagctgtctgctgcctgctccgcttgccgccattgctggccagcgcgagcgagctgccgggaccgcacacggaggaagcgtctactgggcggcaccgcgcgtcgtggttcgcgctcttgaagctggatctggaccgacggtcgatcgagcgagtgcaactgcctgcgagctcttctcccgccgcgatatgggccc

SEQ ID NO: 12974 - DNA, 360 bp, Zea mays
  Clone ID: LIB3158-011-Q1-K1-G3
cccctgtggagctgatcaagaagggtgaaaaggtgggctcgtccgagtctgccctgctcgccaagctgggtatccgccccttctcgtacggcctccaggtcaccagtgtctacgaggatgggtccgtgttcagccctgaggtgcttgacctttccgaggaggacctgattgagaagtttgccactggtgtctccatggttgcctccctgtcactggcgatctcgtacccgacccttgctgctgtgccccacatgttcatcaatgggtacaagaatgtgcttgctgttgctgtcgagacagactactcgtacccacatgctgacaagatcaaggagtacctcaaggacccaagcaagtttg

SEQ ID NO: 12975 - DNA, 313 bp, Zea mays
  Clone ID: LIB3158-011-Q1-K1-G4
gtctagttatcgatcgaggggaacgaagcaagacaagagggagaccgaggaggcctatccgcctagggtagtcccgtccggtctcccgcggccagcgacggactgcctggcgccggcgaatcgatgggctactggtggcaccgcgtcatgctgccggtgcggagcgcgtggatacgcgtcgcgtgccgcttcggagttcgccaaaccgggctgtggaggctgcggcacgaggtgagcacgttgcgagtacaaagacgtgcacatgatgtgggagatgctgagcctgaccacggcgccggagcccgctcccact

SEQ ID NO: 12976 - DNA, 420 bp, Zea mays
  unsure (1)..(420): unsure at all n locations; Clone ID: LIB3158-011-Q1-K1-G5
cggacgcgtgggtttgcatttgtatacccagacaagaatggtcgttttgttgtcagacaggggggttcgaccttcgcttacgggcatggaagaggcgacgatgccaaaactcttgcagagctcggattccagatcggtgattacttgagcgttgcaatcatgtagacggtgcctgcaccggatgtaattgctgtgatgtcaaaagggctctggttgcaacagtaaggcatgattctctgttagcactaggaactgcaaccagaattgtctgtaatacccggtagtatcaaatttacctagacacttncgaacgagcaaggcgtctgtaataccggtacttacatgtggtgcctggagcttccaaatctggatagcgtgggtttttcattgagaatgttaagttggctcgggtttctatga

SEQ ID NO: 12977 - DNA, 352 bp, Zea mays
  unsure (1)..(352): unsure at all n locations; Clone ID: LIB3158-011-Q1-K1-G6
ccaggacccaatttcttttggccaggtgttcgcttcttgggttggggctgatcacttaataggtgcttggtctttgcattcttannccccatcgatacccgtcccgcagaaggggatgatgtatgacactctggtgaggcgtgtcacagtacacagagactccttggacgccgttccagcagaattcttagagaaggagagggcccaagtccctgttcaagggtgctggtgctaacattcttcgtgccattgctggtgctggtgtgctttctggctatgaccagctccagatcctcttttttcggaaagaagtacggcttccggcggtgctttaaatggagaaatatgatga

SEQ ID NO: 12978 - DNA, 339 bp, Zea mays
  Clone ID: LIB3158-011-Q1-K1-G7
gacgggcgtgggcctcgtcgaccagatgggcaacttcttctgcaagacgctgctgttcgtcgccgtcgccggcgtgctgctggtcaggaagaacgaggacgtggagtcgctcaagaagctcatcgacgagactacgttctacgacaggcagtggcaggctacctggcaagatgaccccaccgaggggccaaagaattagttcggcgttgggggcgcaaacgcagaatgttcgcttcttgtctttgcctctttcttcggccctttttgtttcaccgtttagtcaggcttggaggaactttttgatatcgtcataatctatctatctacgtgatcttgtgc

SEQ ID NO: 12979 - DNA, 390 bp, Zea mays
  Clone ID: LIB3158-011-Q1-K1-G8
ctgttactctagctgacattgtaatgacatgcaacctctaccatggaattgcacggatcttgaccaagaccttcacgtctgatttccctcatgtcgagaggtatttctggaccatggttaaccagcctaacttcaagaaggtcattggtgaggtcaagcaggcagagtctgcacctcctattccgaaaaaggctgctccttctaaggagccaaaggcaaaggatgtcaagaaggaggctccaaaggaggcccccaagccaaaggtggttgaggcaccagcagaagaggaagcaccaaagccaaagccaaagaatcctcttgacttgctgccaccaagcaagatggtccttgatgactggaagaggctatactcaaacacaaagactaact

SEQ ID NO: 12980 - DNA, 352 bp, Zea mays
  Clone ID: LIB3158-011-Q1-K1-G9
atgagaacaagcctgtcacaaacagccgtgacactcaggagatacgtctcgaacaaggccttcagatgctcaagatattcaaggatcatgtcagcaagacttccatcctggacgactttgccttctatgagagccgccagaagttgatgcaggataagaggtcgaaacagcagcagctccaaaagcaggtctgggacactaggacccccgtttctgtcaccggtgagcgacagcaggaacctgctaatgggaagcccaatccgtccgtaccagatggtgtcactgcagaggtgaaggcggtgaaggctcccgcagagaacggcatcactgctcctgttgtttcctatgcagc

SEQ ID NO: 12981 - DNA, 249 bp, Zea mays
  Clone ID: LIB3158-011-Q1-K1-H1
cttcataccatgcatttcgtcagccgttggttgccgatgcgaaaaccaaatgtgcgtgaaataaactcgtgacgccgcttcttcagtcgggacgaggccatatatctctgatcccgttacgtgtgaagaaccagctccatctttgtaacaaatttgtgttgggagaaacagaaagacggtggtgtttaacttattgtgaaaggtgatttaataataatatataataaacgggatacgttggatgtgtgt

SEQ ID NO: 12982 - DNA, 393 bp, Zea mays
  Clone ID: LIB3158-011-Q1-K1-H10
cccacgcgtccgtgctgaggtggtgaagctcctaagagaggcttatgggcgggtcaagcgattgcttaggaagcacgagaagcaattacatgctctagcaaatgcgctgctggagcgtgaaacgcttactgcagatgagatcaacaaagtagttcacccgtaccaagaagagccccatctttccttccaagacgaggagtttgccctcgcttaaagattcttttgttgcatcaagatatcggtcaccacccgtgaattgtaaatccgtgtacagtaagtggcgtctagatgagccatggaagttccttcagatgctctcttctgtaaaacagggcgcaacacctatggtaaattagaagattggtgttgcgaaagctgatgcctgcttattga

SEQ ID NO: 12983 - DNA, 402 bp, Zea mays
  Clone ID: LIB3158-011-Q1-K1-H11
gctacgggggcgtactgaggcaaggattctgctgatacacgtttatagccaattcatgcggatgaataacacgcgcgagaagcgataacatgctctaatacaagcactgctcgagcgtgcaacgcttactgcagatgagatcaacaaagtagttcacccgtaccaagaagagccccatctttccttccaagacgaggagtttgccctcgcttaaagattcttttgttgcatcaagatatcggtcaccacccgtgagttgtaaatccgtgtacagtaagtgtcgtctagatgagccatggaaagtcctttagatgctctcttctgtaaaacagggcgcaacacctatggtaaattagaagattggtgatgcgaaagctgatgcctgcttattgacaattcttt

SEQ ID NO: 12984 - DNA, 433 bp, Zea mays
  Clone ID: LIB3158-011-Q1-K1-H12
atgccaggcccggcccgaccgacgcgtccggatctatggatggttacactatcacatttgggatcagaaatgtgacgcacattgagaaagctctatcagaagcttacagaagatggttctaaagcaagggtggaggttcctatgcttggagttgagtcatgtggatgtccctatttttaaatagatagctggttgatggtgatcggcagatagaagacgggcaacatgctaaccaggcatgtgaaccttgaaccttggcaggaaaagtttgctcagatgattcaggaagccggattccaagaggtggaatatgaaaacctcctgagcggtgtagttgccattcattctggacttgaactgtagagctgaatacggatggatgttttttcatgggtgcaccgcttctaccaataagaagatttggtggttttta

SEQ ID NO: 12985 - DNA, 350 bp, Zea mays
  unsure (1)..(350): unsure at all n locations; Clone ID: LIB3158-011-Q1-K1-H3
cttctggactacgtgcaccatgatatcaccagaaagtgggctttgatttacttcaagctgcttttgctggtgatggcgaaggacaccatcatgtacttcaatctgttctaagctcaccttttcagtttctcaaatatccagcaatgcatccgtctctgcactcgtagaataatgatgatggatgaattatgcagccttcgctcttgtattctccctaatgagctngcttttttccagctgccagtttcactctttgtaagtatatcagtctggatgggattgattagtgaccagtcagatgatatccctgattctgcacctctgtaataatgattaatgtcanttggtgc

SEQ ID NO: 12986 - DNA, 335 bp, Zea mays
  unsure (1)..(335): unsure at all n locations; Clone ID: LIB3158-011-Q1-K1-H4
cggacgcgtgggcaaaccctcaaattttcgggatttggaccttatccttgcaagggacaggcagaactatgaagatatattgaactcgtttgagagaatggagacgcanagagccccctccctgatagtgcacccaataaggttaagctgatgtgctcctactgcaaacatcatactgagtctgaagttccagatccttattatggaggccctcagggatttgaaaaggtgctggacttattggaagatgcttgcgagtcgctgcttgatagtatcgtcgcaaacaatgcaagcattttctgggtgacatcgatgtaaatctccacatacagaca

SEQ ID NO: 12987 - DNA, 410 bp, Zea mays
  unsure (1)..(410): unsure at all n locations; Clone ID: LIB3158-011-Q1-K1-H6
ccggaccggaaggcccgacccgcccgacgcgtctggtgcgtccagcagtcggcgtaccccggcaccggcccgttggagaacctcgcctcccacctggccgacccgtggcacaacaacatcggggacatcatcatccccagatcaatctcccctggagctcagctcagctgctggtggctgtttcctgtgtacgactaggccctgcctgtacaacgagcgacgacggtgacttcccgcccggaaattaaaccctcgtaatgtaaagcttatgttattaagtagcggctactcttgtagtcttgtctgtatcaaatataaactggtttgttagctgaatcccaaggntatttctgagcctaaccaggggaaatttagctcanaacggagaaaatacatacgagacccttgat

SEQ ID NO: 12988 - DNA, 383 bp, Zea mays
  Clone ID: LIB3158-011-Q1-K1-H7
catttgcccgccactggattgtacgcaacacacgaactgcgaatcggacggggcagccaactggttacaggctcgtacctggttcgaactgcctgcctttggctctgcctgaggcgaaatttctgaggagggctgggttcttgaagcacaacctttgggtcactcaatacaagcgtggccagatgttccctggaggggagtttcccaaccagaatactcgcatccatgagggtctgccaacatgggtcaagaatgataggcctctggaggaaaccgacattgttctctggtacgtgttcgggctcacccatatccacaggctagaagattggccagaaatgccggtggagcacataggctttatgctcatgccacatggattc

SEQ ID NO: 12989 - DNA, 352 bp, Zea mays
  Clone ID: LIB3158-011-Q1-K1-H8
gtccaccacctcctgccaccgcgcggccccaaccaaccacaccgcagcgcagcaatggcgggcaacggcgccatcgtggagagcgacccgctgaactggggcgcggcggcggcggagctggccgggagccacctggacgaggtgaagcgcatggtggcgcaggcccggcagcccgtggtcaagatcgagggctccaccctccgcgtcggccaggtggccgccgtcgcctccgccaaggacgcgtccggcgtcgccgtcgagctcgacgaggaggcccgcccccgcgtcaaggccagcagcgagtggatcctcgactgcatcgcccacggcggcgacatctacggcgtcacca

SEQ ID NO: 12990 - DNA, 320 bp, Zea mays
  Clone ID: LIB3158-011-Q1-K1-H9
aattcattgtcattaattttttgaaaacattcttttagaaataaacaaaaatatttgaatgttggactatagctgatataacgctatgcacattgatgtataaccatgagttactttcagatacaatggttcgccaagctgcaatggctgtcaagtgcatgctgcttctgtactacaagaactgcagaggtcgtaactaccgtagacagggccaaatgttaacccttgtggagtaccttctgcttctttatcgtgctttgttgccaacttctgtttggtatcgcttctttctgaacaaagaatatgggagtctcttctca

SEQ ID NO: 12991 - DNA, 396 bp, Zea mays
  Clone ID: LIB3158-012-Q1-K1-A1
gaaacacctgctgtttgtgttactatgccttcttggtcatattgatgatccttgctgaagctggagctgctgcattcattttctttgaccatagctggaaagatgtaattccagtggacaagacacataactttgatgttatgtatggctttctgaagaaaaactgggagattgcaagatgggttgctcttggcgtcggtgattttgacgcaatgctctttctattagctctgggtgtcagggcaatgaacaaacctgcggatgtatgacagtgatgatgaaattattgcaattgggcgaagccctaccatgcgggagccattgatccatgcccaaaatgtgccggcctaccgtgttcctgtcccaacactcgatcagcagtcaaatagaaatgat

SEQ ID NO: 12992 - DNA, 191 bp, Zea mays
  Clone ID: LIB3158-012-Q1-K1-A10
ggaagcttaaaatatctcgtcttgttgacatccttgcagttgtcgcgtgaacaagtaatctatgatggcaatgtttgcctggtcatgaagtattattactttcgttgaaaccgtgatgctattaagacttaattttttttattgaacatcgaatgtaaggcatacatggttatgagttttgtactaccctt

SEQ ID NO: 12993 - DNA, 371 bp, Zea mays
  Clone ID: LIB3158-012-Q1-K1-A11
cgacaagtttcaacatgtcaaactttgctaacagggaggatctgcttggtcagagtaaaaaggcagatgacatgagcagagttgctgggttagataaccaagggattgttgtccttcagaggcaaattatgaaagagcaagatgagggtcttgagaaactggaagagacagtgctgagcacaaagcatattgcattagcagtcaatgaagaacttaccctgcacacaagattgatagatgaccttgaagatcatgttgatgttacaaattcacgttttcagcgcgtgcaaaagaggcttgcaattctgagcaagcgcaccataggtggctgctcatgtatgtgcctgcttctatctgttgtcgccatcgtg

SEQ ID NO: 12994 - DNA, 343 bp, Zea mays
  Clone ID: LIB3158-012-Q1-K1-A3
cggacgcgtgggcgaggccgccaagaaggagatcaaggacatctttacccgctacgatcgcaccctcctcgtcgctgacccccggcgctgcgagccgaagaagttcggcggacgtggtgcccgcgccaggttccagaagtcgtaccgttgagcggctgcctgctccatctcgatttttcagatcgttgtgggtgttcttcgctttatttcctatcaatggatctgcttatctgggtctatatctagctgctgctttaccataatgtttagactgtaatgcctaccctcgaaccttgtttgcaatgtgaaattaatgtgagagattatgaagactattttgggt

SEQ ID NO: 12995 - DNA, 363 bp, Zea mays
  unsure (1)..(363): unsure at all n locations; Clone ID: LIB3158-012-Q1-K1-A4
ggcaaggccagcgccgacctgaagctcgtgccgggggactacgccggcgtcgtcacggcttactatctgtcgtcgggcggggacaagcacaacgagttcgacttccagttcctgggcaacgtgacgggcgagccgtacctggtgcagacgaacctgtacatcgacggcgtgggcaaccgggagcagcgcatcgacctgtggtttgaccccacggccgactttcacacgtacgccgtgcttgtggaaccccacccaggtggtgttcatggtggacgacacgcccatccgggtgtacgagaacgccacgctgcaccaagggcacggtcacggncacggacaccaccggcacagtggtgcggcggc

SEQ ID NO: 12996 - DNA, 377 bp, Zea mays
  Clone ID: LIB3158-012-Q1-K1-A6
agaagattgagctgctagttgacaaaactgaaaacctgcgttcttaggcacaggattttagacagcatggcaccaacgtgcggcgaaagatgtggctccaaaacatgaagatcaagctgatcgtcctgggcatcatcatcgcgctgatcctcatcatcatcctgtcggtgtgccatggcttcaaatgcggcagcaacgtgaagatggggggcgtgacttacaaattgctggtgtgccctggcaccggcgaagagaaaaaccattgggagggagttttgctctgcggtccgcgtgttggtgacgcctgcgcttattattcttggtgatccgcagacggagttattgctgatgtcagtgttgattgctgttggatggga

SEQ ID NO: 12997 - DNA, 360 bp, Zea mays
  Clone ID: LIB3158-012-Q1-K1-A7
gggaagaatggggggccgacccgccggcggacgacttgtttgattgattcttcaaaaaatcgagcttcttttgcaccacaaggtccacgatgttttgccgctacagctcaagcttcagatgatgctccagctgcttgagcggatacaactaccctgacctggaggacactagcaccgtcatgcagtccaacatcatacttggagtggccccgaggaagaaagccattcccaagtttgtaaacgactttgaccactctcgaaaaggcgatcaccggtgcactttcgagatcggtttggagttcgaccccttcaactgctgatcacatcgatccgacgaccatggatatgactatgatctat

SEQ ID NO: 12998 - DNA, 390 bp, Zea mays
  Clone ID: LIB3158-012-Q1-K1-A8
cacccgcctccactcccccctcccaggtgctgcccaggtaagtcggcggcggcgatgacaacgcgcttcaagaagaaccgcaagaagcgcggccacgtgttcgccgggcacggccgcatcggcaagcacaggaagcacccgggaggtcgcggtaacgccggtggcatgcaccaccaccgtatcctcttcgacaagtaccatccgggctacttcggcaagggtggcatgcgttactttcataagctccgcaacaagttctactgccccgcggtcaacatcgagcgcctctggtcgatggtgcccgccgacaaagcggcggaggccggcggcgacaaggcaccgcagatcgacgtcacgcagttcggctacttcaaggtgctcgggaaaggg

SEQ ID NO: 12999 - DNA, 422 bp, Zea mays
  Clone ID: LIB3158-012-Q1-K1-A9
gcactatgcctggacaagtgttccaacatatcccagtggtgtcattggatttttgctatgtgcaaaagaaggtcgtgcagtgaacttcttaactcctgtgaatccaattgagaaaatagaaggaacagcaaaagctggaagggaactcagattttacaattccgagatccatagggctgcttttgttctgccaacatttgtaagaagagaactggaagcatataccactcctagtgcctctgctgaaaacgagaaaccgaaagaatcggtgtcagaaccgcagaagataaagatattgtcaaacaacgccattcttacagctacctagccctgagccgtactcaatcttgctcggtatagttgtattctcacagaataaatcagtcactggcttttgctgacaccgcacgagcagcttagta

SEQ ID NO: 13000 - DNA, 368 bp, Zea mays
  Clone ID: LIB3158-012-Q1-K1-B1
cgccctcaacgagcagatcaacgtggagtacaacgcctcgtatgcgtaccactccctcttcgcctacttcgaccgcgacaacgtggctctcaaaggatttgccaagttcttcaaggaatccagcgacgaggagagggagcacgctgaaaagctcatggagtaccagaacaaacgtggaggcagggtgaggctccaatcgattgtgacgcctttaaccgagtttgaccaccctgagaaaggagatgctctgtacgctatggagctggctctggccctggaaaagctggtcaatgagaagctgcacaacctgcatggtgtggcaacaaggtgcaatgatcctcagctgacaaacttcatcgaaagtgagt

SEQ ID NO: 13001 - DNA, 425 bp, Zea mays
  Clone ID: LIB3158-012-Q1-K1-B11
agccaacatatctcctcgcatttccttgcaaccgattgcctatccccctcccaacccaagaccgatggcgcccaaggccgagaagaagcccgcggcgaagaagccggcggaggaggagcccgcggcggagaagacgaccgccgggaagaagcccaaggcggagaagcgggtccccgcgggcaagtccgccggcaaggagggcggcgagggcaagcgtggcaagaagaagggcaagaagagcgtggagacgtacaagatctacatcttcaaggtgctgaagcaggtgcacccggacatcggcatctcctccaaggccatgtccatcatgaactccttcatcaacgacatcttcgagaagctggccggcgaggccgccaagctcgcgcgctacaacaagaagcccaccatcacctcccgcgagatcc

SEQ ID NO: 13002 - DNA, 219 bp, Zea mays
  Clone ID: LIB3158-012-Q1-K1-B2
gcttggcgcacacctcccaggacatcgagaagaccgtcgaggccgctgagaaggttctgaagcggatatagggggtccgcttcaagcaagcatgcggagagcatttcctcgtatctacgttcttgtactcttaattctatatgccaccgaggttttgtattgtgcaaaaacaagacaacttctgtaaattcctctttctgaattaaagggtcttgtttt

SEQ ID NO: 13003 - DNA, 430 bp, Zea mays
  unsure (1)..(430): unsure at all n locations; Clone ID: LIB3158-012-Q1-K1-B3
ggggcggaattggccgggaccgaacccactcctccacgcgatccggccatgtatgtncgccatccaggcctcgtgctttccctgtacgccagtgggctgtacaacatggtatttgtgttcggacttctggtgatggntgtcacgcctacaccgtgcctaatctacgaagcgttantgcccttcctcatgccatcctgcgtcttgaccttgctgggcgtgacctgactgacagcctgatgaagatcctcaccgagagaggttactccttcaccaccacggccgaacgggaaatcgtacgggacatcaaggaaaagcttgcatacgtggctcttgactatgatcaggagctggagaacgccaagagcagctcatctgtggagaagagctacgagctgcctgatggccacgtgatcaccaattgggcggagag

SEQ ID NO: 13004 - DNA, 276 bp, Zea mays
  Clone ID: LIB3158-012-Q1-K1-B5
cgccctcaacgagcagatcaacgtggagtacaacgcctcgtatgcgtaccactccctcttcgcctacttcgaccgcgacaacgtggctctcaaaggatttgccaagttcttcaaggaatccagcgacgaggagagggagcacgctgaaaagctcatggagtaccagaacaaacgtggaggcagggcgaggctccaatcgattgtgacgcctgttaccgagtacgaccaccctgagaaaggagatgctaacatcgctgtagaaacgcttctggccct

SEQ ID NO: 13005 - DNA, 357 bp, Zea mays
  Clone ID: LIB3158-012-Q1-K1-B6
ccggcggcttcgaggcggccaccgagggcggcggctgcgactgcaacacctgcaagtgcggcaccagctgcggctgctcctgctgcagctgcaactgagccggcccggctcggcgatggcgcacgagagtcgagaggacgacgacgaggaggcgtataataataaatataatagcggcgtccaagaaataagatcctgtcaactgcacccgccattattcatggtcgctcgctcctcgcctgcgtgttctgggggtcgtctgaacgaactcgcggcttcacgacagcgatgccgccgccgtcgatcctgtccgtctcgtgccggatttaatatttaaatctatatgcgtggttttct

SEQ ID NO: 13006 - DNA, 306 bp, Zea mays
  unsure (1)..(306): unsure at all n locations; Clone ID: LIB3158-012-Q1-K1-B8
gaaaaacccaaatggtccaatgtacacttctcttggtgttatgacaaggggaacgatcattgaggtaaatgtcagtgagcttggtctggtaactcccgctggaaaagttgtttgggggaaatatgctcaagttacaaacaacccggagaacgatggctgtatcaatgcagttttgctagtgtagagccatagtgagattttgttgatggtggtgaatcgtcccatttgtatctgctccgatatgctattttttgaccatgtcatggctaatcccagtagtttgttgtgcaccatgggcataatgna

SEQ ID NO: 13007 - DNA, 398 bp, Zea mays
  Clone ID: LIB3158-012-Q1-K1-C10
ggagaacgagttctacgtcaagtacctggagccgcggcaccccgggatggaggcggacgacgtgggctacacgacgaaggtgcgcgacttgcgggacctgctggcggcggcgccggcggcgagggccaaggagtgcccgcccgtgcagaacctgctcttctccgagtgcctgctcgccatcaacgacctgtccaacgacctctacgacgtggcctgggacgtggtcctcatggacgggccgtccggatggaaccccaactcgcccggccggatgccgttcatcttcaccaccgacgtgctggcgcgctccggcgccaccgcggccaatggccccactcgcgtgctggtgcacgactttcagtttgaggtggcgcatgtgcttggcatggagttcctgt

SEQ ID NO: 13008 - DNA, 227 bp, Zea mays
  Clone ID: LIB3158-012-Q1-K1-C11
gtgaactggagaagctggaatgacgaagaccaggaagatgctgccgcgtgtgttgtattccaatttgtattattcgtttcaggtgttttacatttgctctcctggttcgttccggctgacagcgtgatgcccatgctgtcactcgaaagaatggtagtagtagctagcatgagtttggtgcccagttacattataaacgtaccttcgaaaaataataatttcccagc

SEQ ID NO: 13009 - DNA, 450 bp, Zea mays
  unsure (1)..(450): unsure at all n locations; Clone ID: LIB3158-012-Q1-K1-C12
atcaccgataagcttggtctccattccctgcgccaacgccactggtatatccaaagcacttgtgctaccacaggagaaggtttgtacgagggtcttgattggctctccaacaacattgcaaacaaggcctgaatggacaattctgctgtttcacggagcacatctgcacatggcgaggcatggtcattttgattggaaagtatcgtatttctatgctaggcttttcagagagattactctctaagaaactgatcttggcattggtactagtagatcgtttactgagtaatgcagtttattttaatgtatcccagttgtgttgtaagatacaactatgcgtccgaattacccattcaatttgaatctagatacgtagtttttgttatatacttatacttggatatatatntgttaatacatggtaaaagtaatatatcaagaaaaatattt

SEQ ID NO: 13010 - DNA, 281 bp, Zea mays
  Clone ID: LIB3158-012-Q1-K1-C2
ggtggacttcgcgcgggtcctgcgcggcgcgctggcgctgccgggcgaccggaccgcggccctcggggagcaacccggggcgcggccccggatgctgatcgtctcgcgcgccagcacccggcgggtgctgaacctggacgacgtggcggcggcagcggacgagctggggttcaacgtgactgcggcggaagcccgcgcggacctgccggcgtttgcggtgcaagtgaacgcggacgacgtgctggagggcgtgcactgcgccgggctgacgaaccaggagt

SEQ ID NO: 13011 - DNA, 439 bp, Zea mays
  Clone ID: LIB3158-012-Q1-K1-C3
ggaatccgatccatccaagccaagccaaggcagagaagaagaagaagaggaggaagaagaagcatcggcagcatgtcggaggggactgccaactgcgtggacatcctgatcgccatcatcctgcctccgctgggggtgttcctcaagtacgggtgcggccacgagttctggatctgcctcctcctcaccttcctcggctacatccccggcatcatctacgccatctacgccatcaccaagaacaactagctagtcatccttgccgacgacgatccatgtctctgtatctgtgtctgttcatatgcctgatgccgacttgtgctgtatgtagttgcttgaattcagtcgtgttcctgttttgctaccgtacccaccccatgcatcatctgtcaccgcgacgcaataatcatagtaataaccaagtcaaataatcgaattc

SEQ ID NO: 13012 - DNA, 307 bp, Zea mays
  unsure (1)..(307): unsure at all n locations; Clone ID: LIB3158-012-Q1-K1-C6
gaatccccaaagcctccgacccccttcctctctccctccgccgccgctgcgcacgcagggaacaagcgacatgggcgtctacaccttcgtgtgccgcaacaacggcggcgagtggaccgccaagcagcactccggcgagatcgaggctttcgccgctaccccatacgagctgcagcgccgcctcgtcgccgctgtctccgcggccgactctgcctacggcgtccagtcgtccttctccatggtcacccccaactccgccgtgttccaagtgatcgtcngtgctgttggtggtggtgcaatgatggtg

SEQ ID NO: 13013 - DNA, 378 bp, Zea mays
  Clone ID: LIB3158-012-Q1-K1-C7
cgaggacggtttcagctatgccagttatgaggttatgggcttggatgccactgctctggcttatggtgaccttgtcaagagggtccttcggtgctttggcccctcggagttttccgttgccgtgaccatcttcggcgggcgtggccatgccgggacatggggaaaggcacttggtgcagaggtctatgactgcaacaacatggtggagcaggagctgcctggaggcgggctcctcgtgtaccagagcttctgtgctgctgaagacgctgatgctacctcgcccaaatctgttttccactgctttgacggcgagaacgtggagagtgctcctcctcctatgaagaaagactacaaactggctaatcttctatgctggga

SEQ ID NO: 13014 - DNA, 233 bp, Zea mays
  Clone ID: LIB3158-012-Q1-K1-C9
cacttgtgaacattttgattatgctattttggagcaccagttgagtgctgtgcaggtggagcaagaaaaagtttatacttgctctcattcatagtttgttcttagcctatgatctagaagtacttgtttaggttttgctgcaagaagcacccttcataatatgattacggtgctgtgttctgtatttacattaatatgacatggaacatggttatgatgacaagttctctctt

SEQ ID NO: 13015 - DNA, 202 bp, Zea mays
  Clone ID: LIB3158-012-Q1-K1-D1
cggactcttgggctagcgggcccgaatctctagctggcagaagacgacggagaacggggtgggatacctgacgattaaccaacttaactggtgggctgaagatgtctttgacaggcagcacgatagccgccacattataacacgctttcattcattttgatggatatgattgaaaataataatcaatcacgtatcactggtg

SEQ ID NO: 13016 - DNA, 241 bp, Zea mays
  Clone ID: LIB3158-012-Q1-K1-D10
gtcccattctggtttcttgagtcgtcttcattggtctattgtgtaacatgtacacaggtttgtggttcgtcacgtcttgtcttgtctgttgtatttgccaccgttgtctggaagttgttgcatgcttatctagaacagcagtataccagggttaattctgtgacatttatggttcctaacttggtgggatcagattaaaaagttgtatggccatgacgatatcaaagaaataattccgggc

SEQ ID NO: 13017 - DNA, 342 bp, Zea mays
  Clone ID: LIB3158-012-Q1-K1-D11
gacgcacaggcctctcgccctccgcgcggctccacaggagagcaaaaatggccaccctctccatggtctccgtccccatcgcaccctcctccttgtccctttccacccggggccgcagctcctccgtattcttccccgctaagaagggaggaatcggtcacggtggcttgcggatcgagtgcatccgtattggtggtgttgagattccaaaccacaagagggtggagtactctctgccgtgcatacatggcattggacgctcacgctcacgccagattctcctggacctcaatttcgataacaagatcaccaaggacctcttccgggaggaggtcatcaccc

SEQ ID NO: 13018 - DNA, 375 bp, Zea mays
  Clone ID: LIB3158-012-Q1-K1-D12
ggacagatgacaaaagtaaagcagtcattattgcaaaccctcgcacttctgaattcgagatttttgaagttggtgatgttgtgatgctggactcgtcacgtgatgttggtgcctctaataatcgcaggcttgcagctttgtactgcaatagggtttctggatttgaggaaattatgggattggtggatagtattgtcaaagttgtcagagctccacatgttaactttggcgagaattactatgtacctacagatgaacctgagttcttcccgaaaagacaatgtaaaattgtgacaagtgatggcaagcaagttggctacttaggaattgtccatgctgaagtcctaaggaaatttgggattccggatccctgca

SEQ ID NO: 13019 - DNA, 306 bp, Zea mays
  Clone ID: LIB3158-012-Q1-K1-D3
aaaaaaaaaaaaaaaaaaaaaaaaaaaaaaaaaaaaaaaaaaaaataaaaaaaaaaaaaaaaaaaaaaaaaaaaaaaaaaaaaaaaaaaaggggggacgaattaaagtgtaataaaaataaatacgaatgcatgcaaagttataaactataaaatagagtaacctcaaatgggggggctggtttttaggttacaaatttttggtccgggaatttccctggtttgccctttttttggggccctccaaatgaaattcttttggccggtttttaaaagggcggggaggggaaaaccgggggggtttcca

SEQ ID NO: 13020 - DNA, 320 bp, Zea mays
  Clone ID: LIB3158-012-Q1-K1-D4
ggacagatgacaaaagtaaagcagtcattattgcaaaccctcgcacttctgaattcgagatttttgaagttggtgatgttgtgatgctggactcgtcacgtgatgttggtgcctctaataatcgcaagcttgcagctttgtactgcaatagggtttctggatttgaggaaattatgggattggtggatagtattgtcaaagttgtcagagctccacatgttaactttggcgagaattactatgtacctacagatgaacctgagttcttcccgaaaagacaatgtaaaattgtgacaagtgatggcaagcaagttggctac

SEQ ID NO: 13021 - DNA, 371 bp, Zea mays
  Clone ID: LIB3158-012-Q1-K1-D5
gttggcttctcctccccctccggttcgggttcgggttcgtgaggttctccggggttcggtttcgtgggtgagcggatcgagatggcggcgtcggatgttgagtaccgctgcttcgtcggcggcctcgcctgggccacggacgaccactccctccacaacgccttcagcacctacggcgaggtcctcgagtccaagattatcctcgatcgggagacgcagaggtcccgcggcttcggcttcgtcaccttctccacggaggaggcgatgcggaacgccatcgagggcatgaacggcaaggagctggacggccgcaacatcaccgtcaacgaggcccagtcccgcggcggccgtggaagcggcggcggcggcta

SEQ ID NO: 13022 - DNA, 361 bp, Zea mays
  Clone ID: LIB3158-012-Q1-K1-D6
ctccacttggtgctgcgcctcaggggaggcatgcagatcttcgtgaagaccctgaccggcaagactatcaccctcgaggtggagtcttcagacaccatcgacaatgtcaaggccaagatccaggacaaggagggcatcccaccggaccagcagcgtttgatcttcgctggcaagcagctggaggatggccgcacccttgcggattacaacatccagaaggagagcaccctccacctggtgctccgtctcaggggtggtatgcagatctttgtgaagacactcactggcaagacaatcacccttgaggtggagtcttcggataccattgacaatgtcaaggccaagatccaagacaaggagg

SEQ ID NO: 13023 - DNA, 386 bp, Zea mays
  Clone ID: LIB3158-012-Q1-K1-D7
gccggactcatatccattattcagtttctctgcggatgagtggcttggatcgcactgtgccatctgcgcgtcgaacagatgcagtgatggatgggcgctcgtcgtcctccagctgtaccgctgtgcgctaggacctgcgtcggctatatacggctgttcggcagtgagctgccaggttgtacagtctgggtaacagcctaacagggtatgcttatacctctcggttttcgttctgtaatacgtacgtattatttgcgcttgccaggagactgttcttcggccgtgtgtatgtttgtagatggttgcaacattggtaaaaaaaaaagtagccgtcgtgaatgtaaatttgtattcttgttaggtcgcatatagcgttggcgatgagc

SEQ ID NO: 13024 - DNA, 329 bp, Zea mays
  Clone ID: LIB3158-012-Q1-K1-D8
cggacgcgtgggtggcgagatcgccgtttgttccgatggatcaggggaaagagcaaggcgccggacgaggagcggccggcaataataaggagcggcaggaggaggaggtgctgctggtgcacagccaggtgcggcggatcaagaaggaggacgaggaggccttcagggagcgcctcctgaagctgcgcctgctggagacccggcccaacaccggcgccggcggcgtggcctggcgagccccgcgctccctgtcgccgctccgccgtgccggcagcgccatcatcccggtcccggtgagcgagtgactagtagcgagcatccgtcgacac

SEQ ID NO: 13025 - DNA, 380 bp, Zea mays
  Clone ID: LIB3158-012-Q1-K1-E10
tcctaccccacacagaagcggcggcggcggagcatacgcaggcgaaggcgagggtgtgagggaaggagcaccagccatggtgcacgtcaacttctaccgcaactatggtaagacgttcaagaaaccaaggcgtccttatgagaaggagcgtcttgatgctgaactgaagctggttggtgagtatgggctgaggtgcaagcgtgagctttggagggtccagtatgcactgagcaggatccgtaatgctgcaaggcacttgctcacccttgacgagaagaacccccgtcttatctttgagggtgaggcactttttcgtcgcatgaaccgctatgggctgcttgctgagggtcaaaacaagcttgattatgttctttccctta

SEQ ID NO: 13026 - DNA, 437 bp, Zea mays
  Clone ID: LIB3158-012-Q1-K1-E11
cggacgcgtgggcttcaactttcaatcatggcggacgtcgatgtcgaaccggaggttgccgccggcgctcccaagaagaggacgttccgcaagtacagctaccgcggcgtcgacctagatgcgcttctcgacatgtccacggacgacctcgtccagctcttccccgcgcgcgccaggagaaggttccagaggggtctgaagaggaagcccatggcactcatcaagaagctgcgcaaggcgaaaaaggatgctcctgctggtgagaaaccagagccagtcaagacacatctccgtaacatgatcattgtccctgagatgattggaagcattgttggggtctacaacggcaagacattcaaccaggttgagatcaagcctgagatgatcggccactaccttgctgagttctccatctcctataagcccgtcaagcatgg

SEQ ID NO: 13027 - DNA, 354 bp, Zea mays
  Clone ID: LIB3158-012-Q1-K1-E12
ggaaggttgtaggctgctcctgtgttgttgtcaaggactacggcgaagaatctgaaggccttaacatagtgcaggagtacgtcaaatcgcactagatacagtctgtcagtatctggaagttgtgttcaacactacattttgcacctgagtttaaatatgtgtttggttcttgggctttgctaggagattagaacagttttcaagtgagcctaggatccatgtgaacgatttgaatatctcgcctcttgtcttgcaagtgttctcatctgctgttaatacaaaatcagcaagagctagtattttgttcacatgaaatgattggaagcattgttggggtctacaacggcaagacat

SEQ ID NO: 13028 - DNA, 381 bp, Zea mays
  unsure (1)..(381): unsure at all n locations; Clone ID: LIB3158-012-Q1-K1-E2
gttatcgagaagggagagaaacagcccaacatcactattggcattttggtctccgttgtcatcgtgttcgttaccgttctcttcaagctcctgtttggtggcaagaaaccagtggcacctgtgaaacctgcagctgaggcgaagaagcccaaggccgcggagacggacggtgctggaagcagtggtgacaaggatgagaaagaggatgaaaaggaggagacaggcccacgtcggaggacccgaagggagacatagacctgtttttgacgtgttttagctcttctggcgtctgcttattttgagacctcttaatatttgtgagtgtataatangagcttatgtcacctctgcggcttcccccgctgctgatttgtttttaat

SEQ ID NO: 13029 - DNA, 429 bp, Zea mays
  Clone ID: LIB3158-012-Q1-K1-E4
gctgaatctttgttaatcataccaaaggtactttctgttaatgccgcaaaagatgcaactgagcttgtagcaaagcttagggcatatcatcatactgctcaaacaaaggccgataagcaacattattcaagtatgggtcttgacctctctaaaggtatcattcgcaacaaccttgagtatggcgtgatagagccatcgatgagcaaagtgaagattattcagtttgccacggaggctgccattactatactgaggattgacgacatgatcaagcttaccaaggaagaaggtaacgaagaagagtaatgagcccaccagtattggtgtagtggactcttgtgcgctggttgtcatagcgtgtaagagcccaccaatattggtgtagtggactcttgtgcgctgggtgtcataacgtgtaacttttttttt

SEQ ID NO: 13030 - DNA, 397 bp, Zea mays
  Clone ID: LIB3158-012-Q1-K1-E5
gcggcagttctcgtgattgggctgctaagggtccgatgctcctgggagttaaagctgtaattgccaagagctttgagcgtatccacagaagcaacttggtggggatgggaatcattcctctgtgcttcaaagctggtgaggatgctgattcacttggcctcactggacatgagcggtacagcatcgatctccctaccaacctcagtgagatccgtcccggccaggatgtgactgttactaccgacaatgggaaatctttcacttgcatcgttcgctttgacactgaagtggagctggcgtacttcaaccatggaggcatcctcccttatgtcatccgcaacttggcagctgcgcataactgaggcaagatcacacaccgtttgacccacaatggcag

SEQ ID NO: 13031 - DNA, 349 bp, Zea mays
  Clone ID: LIB3158-012-Q1-K1-E6
gtgtgactactcttgatgttgttcgtgctaaaacgttttatgctggaaaggctggcgtgccagttactgaggtgaatgttcctgttgtcgggggccatgcgggtattactattctgccactcttctcacaggccactctagcaagcaattcgttgtcccaagaagacattgaggccctcaccaagaggacacaagatggtgggacagaggttgttgaagcaaaggctggaaagggctctgcaacattgtccatggcatatgctggtgctgtttttgcagatgcatgcttgaagggtctgaatggagttccggacattgtagagtgctcttttgtgcaatcaaccgtgac

SEQ ID NO: 13032 - DNA, 417 bp, Zea mays
  unsure (1)..(417): unsure at all n locations; Clone ID: LIB3158-012-Q1-K1-E7
ttccactccagatccaattggcaacaagtactatcttggccctgctcctctgcaggatatggcaaggcaaattgctacagccaatggccctactggctataatagggattacctgttctcaatggagaaggcattagccagcattagccacgaagatgattcgatcatagagcttgcaaacgaggtgaggaaggtgctcaacagaacaaaggagaccaagatcactggtgccaatgcttccatgaaatcacatgcccctcttgtgcacctgtccgcgcttccagaaagcaccgttgtggactcgagatagcgacctctactcggaatttactttcagctcttgcatgtttgtggttgtggccatcatgtactgattttcccttttcaacagntgtcgtgaggctgtatcgtctggat

SEQ ID NO: 13033 - DNA, 396 bp, Zea mays
  Clone ID: LIB3158-012-Q1-K1-E8
cagagagaagctttttcggcggattttttttctttacagacagacatctgcccaagcgaagatgcttgaatttatgcattgagttatattgtgctggctaatggatatgttgtggcgatttgcttaatactcaggcgcttcaccgtttggtacctgtggtggtgactggcgaggatgctctaaccagttgcgcttgtgttcaatataaggtggagcaaggaagaggagtataaaacgtggaaagaaaacataaagaaagggaaccgatttttttttaatgtgttcctgtcagcaattgcattcttgttctactggaagtagaaggtttcttgctgataccgattggtgtgtatttgctcccttgcctttttcgcttggtctttgtcttaaaggatg

SEQ ID NO: 13034 - DNA, 128 bp, Zea mays
  Clone ID: LIB3158-012-Q1-K1-F1
gtgttactacagtggcggatcgtggctaggacacattggtacggatgcctgcctgcgagggtggacccggtgtatttgtggcttacattccttcatctggataataccctgcagattttctttctgaa

SEQ ID NO: 13035 - DNA, 354 bp, Zea mays
  Clone ID: LIB3158-012-Q1-K1-F10
ggaagattttgccggatgagagattgaagaagatcttcaatgtcaattccatggatatgggccaaatgaataaagctttgaccaagcatatctggccattgaattctgagggtcctgtctcttctgatagatcaacacccacagagaagccacaaaagagagacaggagtgaaggaaagaagcaaaagggtggctcttcaggagctggatctggttttctcgtgccccttcaacttttggatgatttagtaataatttatcggtgctggtgagagcatgttattacgatctgatgtcgtgaagaaaatgtggtattacataaaaatggtaccaccctgctaggatcctttttta

SEQ ID NO: 13036 - DNA, 374 bp, Zea mays
  unsure (1)..(374): unsure at all n locations; Clone ID: LIB3158-012-Q1-K1-F4
ctcatgggcgccatcgaggggtaccgcgtcgccggcggcccgctcggagaggtcgtcgacccgctctaccccggcggcagcttcgacccgctcggcctcgccgacgaccccgaggccttcgcggagctcaaggtgaaggagctcaagaacggccgcctcgccatgttctccatgttcgggttcttcgtccaggccatcgtcaccggcaagggcccgctcgagaacctcgccgaccacctcgccgaccccgtcaacaacaacgcatgggcctacgccaccaacttcgtgcccggcaagtgagggggtcggaggcgccacctgccaccgncaccggncaccgntggcgatatctaggtgttcggatgcacgtgagc

SEQ ID NO: 13037 - DNA, 337 bp, Zea mays
  Clone ID: LIB3158-012-Q1-K1-F5
caccactcccaagccagtaccgagtcctacgagcagtcgcacgcaagtgtcaagagacgaaacggtcgacatggctcgcacgcaatctgccgtagcggtcgccgtggtggccgcggtgctgctgctggcagcggcggcgacgacctcggaggccgccatcacctgcgggcaggtgagctccgccatcgcgccctgcctcttctacgcccgcggcacggggtccggcccctccgcgttctgctgtagcggcgtcaggaaccttaagagcgccgtcagcaccgccgccgacaggcgcgccgcctgcaactgccttaagaacgccgccaggggcgttagc

SEQ ID NO: 13038 - DNA, 177 bp, Zea mays
  Clone ID: LIB3158-012-Q1-K1-F6
caaattgcaagggatactgcatttaacctgttggctgagcaactacagaaaagtgctcaaagcacatgagaacaaggctcaccttcattaaattctcaacaatacatgggaacaatgcaaaagggtatggttaaacccccttttatttacatggtttatacgttttgggaatgctct

SEQ ID NO: 13039 - DNA, 405 bp, Zea mays
  Clone ID: LIB3158-012-Q1-K1-F9
ggaagattttgccggatgagagattgaagaagatcttcaatgtcaattccattgatatgtttcaaatgaataaagctttgaccaagcatatctggccattgaattctgagggtcctgtctctcctgatagatcaacacccaaagagaagccacaaaagagagacaggagtgaaggaaagaagcaaaagggtggctcttcaggagctggatctggttttctcgtgccccttcaactttcggatgatttagtaaaatttatcggcactggtgagagcatgttatcacgatctgatgtcgtgaagaaaatgtgggattacataaaagggaacaacctgcaggatccttctgaccggaggaaaataatctgcgatgagaagcttgaagacctatttggagtggaaacat

SEQ ID NO: 13040 - DNA, 404 bp, Zea mays
  Clone ID: LIB3158-012-Q1-K1-G10
ctcggcgcgctcggctgcgtcttccccgagctgctctcccgcaacggcgtcaagttcggcgaggccgtctggttcaaggccggctcccagatcttcagcgagggcgggctggactacctcggcaaccccagcctgatccacgcgcagagcatcctcgccatctgggcctgccaggtcgtgctcatgggtgccgtcgagggctaccgcattgccggcgggccgctcggcgaggtcgtcgacccgctgtaccctggcggcagcttcgaccccctcggcctggccgacgaccccgaggccttcgccgagctcaaggtgaaggagctcaagaacggccgcctcgccatgttttccatgttcggcttcttcgtccaggccatcgtcaccggcaagggcccgctcgagaa

SEQ ID NO: 13041 - DNA, 147 bp, Zea mays
  Clone ID: LIB3158-012-Q1-K1-G11
ccaagggggaggccgctagaatgacagaaacagcagaaggaggtcacggaggctggtgtgtgttctttaggaaaggagagaaactagcccatgtaaacatcataatgttcatatgaaatataacgatgatcaccctgttacgagtcc

SEQ ID NO: 13042 - DNA, 432 bp, Zea mays
  unsure (1)..(432): unsure at all n locations; Clone ID: LIB3158-012-Q1-K1-G12
cttcttcttcatgaacccgcgcccgacgtacgagatcacgttcctcacccagctccccaagaggccttcagacaagcccctgcgtctgccccttcaggatgtgtacaagattggtggtattggaactgtaccggttggtcgtgtggagactggtgtcatcaagcctggtatggtagtcacctttggtccaactggcctgactaccgaggtgaagtctgttgagatgcaccacgaggcacttcaggaggctcttccgggtgacaatgttggcttcaacgtgaagaatgttgctgtcaaggatctcaagcgtgggtttgtggcctccaactccaaggatgaccctgccaaggaggctgccagcttcacctcccaggtcatcatcatgaaccaccctgngcagattgcaacggctattcccctgtgctggactgc

SEQ ID NO: 13043 - DNA, 124 bp, Zea mays
  Clone ID: LIB3158-012-Q1-K1-G3
cggacgcgtgggcggacgcgtgggcggacgcgtgggttcggcgagggtgtcatgcggctggagaggcggcgcatggaagtgcaatgggagatcgaacgaaggtggcaagaagcggacccccccc

SEQ ID NO: 13044 - DNA, 113 bp, Zea mays
  Clone ID: LIB3158-012-Q1-K1-G5
gctagacgtggccggacttcctctaactatcaccacgcggatactacgaccacggggtctgccatcgtatgatcaaagattttattgtgcaaggtgggtgttctaccggaacc

SEQ ID NO: 13045 - DNA, 402 bp, Zea mays
  Clone ID: LIB3158-012-Q1-K1-G6
gggtcaaaccctaagcagggaggtgatttatccgctgcagccatgaataagtagcagtctgcgtctgtcaaggatgccatctcccatattgtgggggatgccaaggagaacaatacgaagttcactgagactgtggaacttcagattggtctgaagaattatgatccacacaacgacaagcgtttcactggctctgttaatttgccccatatcactcgtcccaagatgaaagtgtgcatgcttggtgatgcccaacatgttgaggaggacgtgaagatgggacttgactacatggatgtttaggctcttaagaaaatgaacataaacatgatacttgctaagaagcttgtcaagaagtaccatgctttcttggcattagaagccatcattaatcagatttcc

SEQ ID NO: 13046 - DNA, 51 bp, Zea mays
  Clone ID: LIB3158-012-Q1-K1-G7
gtgatgtataatacagaactcccttctttttcttttacatccccctataaa

SEQ ID NO: 13047 - DNA, 199 bp, Zea mays
  Clone ID: LIB3158-012-Q1-K1-G8
cagcaagtagatcaaaagtgctgcctgtttgtatcgatggatcctgcaacatatagcatctggtgatgttgagaattcggagcagttcatcgactggattctgacgccggcaagcatcgacgtcaatgaatgtgtaatacttagtacatcaagacatgtaataaaactgaaactcccccgttctggttctgattactgt

SEQ ID NO: 13048 - DNA, 364 bp, Zea mays
  Clone ID: LIB3158-012-Q1-K1-H1
gatcaacgcgctggccagggaggcgctcatcaacgccgacggcatcatcgaggagtccttctggccgggaaagtacgccgtcgagctcagctccgtggcgtacggcgcgacgtggcagttcgacacggaggcgctgcccaacgacctcgtcaagcgcgggctggccgtgcgcggggaggacggggagctggagctcaccatcaaagactacccctacgcccacgacgggctcctggtctgggactccatcaagcagtgggcgtgcgagtacgtcaacgtctactacaagttcgacgaggccgtggccgccgaccccgagctgagggcgttctgggacgaggtgcgcaacgtggggcacggcgac

SEQ ID NO: 13049 - DNA, 300 bp, Zea mays
  Clone ID: LIB3158-012-Q1-K1-H10
cgacaagggccgtgtattcaaggaggagatcgagatgatggttcaggacgctgagaagtgcaagtctgaggatgaggagcacaagaagaaggtggaggccaagaacttgctggagaactacttctacaacatgcgcaacacgatcaatgacgagaagattgcgtccaagctgccggccgatgacaagaagaagatcgaggacgccatcgacgcggccatcagctggctggacgccaaccagctcgccgaggcggacgagttcgaggacaagatgaacgagctggagagcctctgcaaccc

SEQ ID NO: 13050 - DNA, 418 bp, Zea mays
  Clone ID: LIB3158-012-Q1-K1-H11
tgagactgtcggagaactcgctggagggaccaatcccgccggagctcgggcagctctcggagctgcaggtgatacttgacctgtgccggaacaggctctccggcaagatcccggcgtctctcggcggactcgtgaagctggagcggctgaacctgtcatccaaccggctggatgggcagataccgtcctcgctgctgcagctgacgagcctgcatcgcctgaacctatccgacaaccacctctcaggcgcggtgcccgcggggctatcgggcttcccggcggcgtcgttcgtcggcaacgaactctgcgccgcgcctctgcagccgtgcgggccgcggtcgcctgctactgctaggcggctgtcgggcacggaggtggtcatgatcgttgcgggcatcgccctggtctttgcggtggt

SEQ ID NO: 13051 - DNA, 382 bp, Zea mays
  Clone ID: LIB3158-012-Q1-K1-H2
ctcttacccacgaacgcttgcggcggcggcggaattaggaggcgatggggcactccaacgtctggaactcgcaccccaagaactacgggcccggatcccgcgtctgccgtgtctgtgcgaaccctcatggactgatcaggaagtacgggctgatgtgctgcaggcagtgcttccgcagcaatgccaacgacattggcttcatcaagtaccgctgaaatcacgtgggaatggaccatgtggtaaatgcgaggctgtagttttatttccagtcatttacatgttttgttcagaagtctgctagtaaagactgctacgtttatgatgaagaacttagccatgttggtcatattgatcatgaggtacctatgttgagcttaaacta

SEQ ID NO: 13052 - DNA, 189 bp, Zea mays
  Clone ID: LIB3158-012-Q1-K1-H3
gaacttggctgtctgccctgtctgcaagtacctcgtcttcttcctggagagaaaaagcagaagacaatacaaagatgtccaagatggcggaggagaaagcggcggcagtgggcggactctgaagagccggggcggcggacgcggcgcaacaacaacagcttgcaacaagggaagccgcggcggcgcggg

SEQ ID NO: 13053 - DNA, 190 bp, Zea mays
  Clone ID: LIB3158-012-Q1-K1-H4
gtgcttattacgactggaatgatattggcactacctcctgcgcccctgcggaaaaatcggcgagatctacaaggcgttccgacttatggccaaagaagacggcatccgctggctgattcggatggacaactacatttcgctgtctacattgtgatctggcctgagcttgggaggaataaaagaagcaaag

SEQ ID NO: 13054 - DNA, 400 bp, Zea mays
  Clone ID: LIB3158-012-Q1-K1-H5
caccctccagcgcctccaccttcctcgccgcctcactccctctgcagaggtcgcagatccgtccggttagacgaagccgcccgcacccatggactccggtgagctcgcctgcacctacgccgccctcattctcagcgacgacggcattgccatcaccgccgagaagatcgccaccatcgggaaagcggccaacatcaaagtcgagttctactggccggcgctcttcgcttagctcctggagaagcgcagcgttgaggatctaatcctctccgtgggatctggtggtggcgctgctccagatgctgctttcgccccaactgggggtgctgcaactgctgctgcccctgctgcagaagagaagaaggaagagcccaaggaggagtctgatgacgacatgggc

SEQ ID NO: 13055 - DNA, 354 bp, Zea mays
  Clone ID: LIB3158-012-Q1-K1-H6
cggccccttgggtggagtattttgtaattgccaccggggtcctggaagtcgtgaccggccttgtgggtctgagtccaagtgttacgagtgtggtgagactggtcactttgctcgtgagtgccgcttgaggattggttctggaggtctaagcagcggaaagcgcccaaaccgtaaccgtagccgcagtcgcagtcccagatatcgccggagtccaaattacaggggaaagagttacagagctgtagcacgctctccaaagcgtcgtaaagcgtctcaccatctcgggcacgcatttatagcgggtcaccacaccacaggggtccacgagaagaatcctcctatgataatggatac

SEQ ID NO: 13056 - DNA, 352 bp, Zea mays
  unsure (1)..(352): unsure at all n locations; Clone ID: LIB3158-012-Q1-K1-H7
caagaaaataactggcagcgtcccgcgagccagcgctgcaatccagttcatgcaagaccctatagtccacggggggtgctggtgtatgtagagagggaacaaggcattcacatacgccgtagagatgaaagagcctctcgtatgttttgtacttttgctccttcagtttgcaatgaactatattaacaaagattgccttggggcagtgaacatttgtcggatgaaaagaataaaaaaagatgggggtcggcggaagaatagaacaatatgatatatttccataaactacagatatgtttcctttttcgcccnnncaacngngnangtcntaaatattgttgcgttaattaat

SEQ ID NO: 13057 - DNA, 443 bp, Zea mays
  Clone ID: LIB3158-012-Q1-K1-H9
ctcagatctcaaggaacttgatgtgagcacgaacatgctgcagagggttggagctcggtgctttgcgcgggcagtcacaaataaaccagattttgtgcagctgaacatcaatggaaattttatctccgatgaaggggttgatgaggtgaaggaaattctgaaggctggtaagaaatctctggatgtgctgggcccactagacgagaatgaacctgatggagagcctgatgatgaggatgccgaggacgatgaggacaagctggatttgaatctgcagagtgtgaaggttgagcaggatgaagatgattgacgatccttaggttaaatatctttagctactcagtaatcatttggatgtccatgagctacgcaaacttttaattaaaaagaatgtactgaggcttttgcattgtcctgagccttttgcaagggtcatacttaca

SEQ ID NO: 13058 - DNA, 358 bp, Zea mays
  unsure (1)..(358): unsure at all n locations; Clone ID: LIB3158-014-Q1-K1-A1
cttgttccctgtttctgcacgcgctcagttcccatggcagccgcacccttcctctgctcggctgcttgcagtgacctctccaccgccctagatttctctatctccctcacggcgccctccctggcgctcgccctgggtgctatcgtctagctcgaacccgcccccagccgcgcctctctttgtcaagcttcctgacgcacgattttctctgccctagcccagcatttttctcctggtggtcgagctccctcaagcttcttagttcgtccgcccgcgaacgcccatggcgcgatcgcctctctgtgcacacgccgtcgccctgatttnctgctccctggctccaactcaagttcgcatg

SEQ ID NO: 13059 - DNA, 253 bp, Zea mays
  Clone ID: LIB3158-014-Q1-K1-A11
ctaacactcacgataacaaatattgcctttcactatggaaggcacccatacaaaaggcgggcttcactagaaaggtgcccatcgtaccacatgtcgctgcttctgacatcttctgagagaaagacatgacttatcatctcaattacatggaggacaacagcgagggctcaaacaaaatctacatgctacatcctgaatgacctgtgcacgtccttagtttctcgacaaccctatctagtcgaaacaaaatcca

SEQ ID NO: 13060 - DNA, 239 bp, Zea mays
  Clone ID: LIB3158-014-Q1-K1-A12
attgacaagcacatgtttcatgacatgttctatgaagggcaaaggttacgccttcaagagcgagatgttgcttatggagagtatccacaaatccaatgctgataaggccagagagaagacactatcagaccagtttgatgccaagcgctccaagaccaatgctagccgttataggtatattgttatgatatgagaaaggttggcccaccgtccataataaataacaccatctttctcat

SEQ ID NO: 13061 - DNA, 386 bp, Zea mays
  Clone ID: LIB3158-014-Q1-K1-A2
taaaaaaaaaaaaaaaaaaaaaaaaaaaaaaaaaataaaaaaaataaattaaaaaaaaaaaagaaggaaaaaataaaaaaaaaaaaaaaaataaaaaaaaaaaaaaaaaaaaaaaaaaaaaaaaaataaaaaaaaaaaaaaaaagatataaaaaaaaaaaaaaaaagggggggcccgttttaagggttcaaactttcctctcccgccctgggaagttttaactttttttttggggcccctaaatttaatttaactgccctacttttaaaaaggcgggtgggggaaaacccttgtggttccaaaatttattggttttgaagcaattccccttttccccagtgggcgtattaccaaagaggcccgcccgaatcccctttccaaaaatt

SEQ ID NO: 13062 - DNA, 384 bp, Zea mays
  Clone ID: LIB3158-014-Q1-K1-A3
gtcagtttgtcaacctgctatagcagaagttgcttttcacatatcctctggtggggctaagatgtttggaagttctagcatgccagggagtgctgttgggattgatgttgttagcgactgttaaggggtagttcatttctggttatctatgaagctttcatcagaggaagctaatattgctttcaaagtattatctggatgcaaggtgaacacagtttgtacactggagtttgatgaaccttaatcagccgttaaagcttgtggcaaggcatcattaatcaacgatatcatgctcggcagcattgcactcttacattggaactattcataaacagatattttgcacataccttgcaacgattgattgtgcaacaatgtttggat

SEQ ID NO: 13063 - DNA, 71 bp, Zea mays
  Clone ID: LIB3158-014-Q1-K1-A4
caaaaaaaaatgacgaattttcctacaactctttatatttctaccgcactcgcaaacacgtggcagggctt

SEQ ID NO: 13064 - DNA, 406 bp, Zea mays
  Clone ID: LIB3158-014-Q1-K1-A5
cacatttacgatggcatcatctgcttctacatgtatgcaactgtatataatgtagctaaaaccatttacgatgtgctgacagttccaaattgtactgttgttccttatcaaagtctgtttgttttcctttcaagaaaaaaggtctctccatctcatactgaaagcatagttaaaccctgtatttgtcaagcgaaaacttagttggagtcactctatgttgccaggggaagttcagatggaccgggcgttggagctgctgaatgttcgtccctgcggtttcaggcctcgccactcgaacaaactgggcaacgagttccggctgttcacgaattatgatcctgctgacagacttggtggttgggagcaaagtgatggtgcccccatttaactattaactaatacaatt

SEQ ID NO: 13065 - DNA, 405 bp, Zea mays
  Clone ID: LIB3158-014-Q1-K1-A6
gtcttacagcatttatgcagaagctgcattctgttcgccagatgggagtgaattggcagggcttgctcttcttagttgtcctgatggagaagcatcaacacaacaagatggagtaattcttctttttgatgcagaaagctcaaaccccattgcctcctggtcggtaaagaaggcatcgggtggcagcatttcttttgtaaaaggtgacgtccctttggatgcaaatgctgatagttcgagagacaaagagccaatgttgcttgtttatgtaaatggttctcatgaatacaccatctttgatccccgggagagtgaggaggtggtcattagcaataacaagcacaagaagattcaagctgaggaacctgcaccaatcggctacccttctatttacagagagcttac

SEQ ID NO: 13066 - DNA, 369 bp, Zea mays
  Clone ID: LIB3158-014-Q1-K1-A7
cggacgcgtgggcggacgcgtgggcggactcgtgggccttgagagcgtgctcgcgaacgagcctgtgtcggtgaagaccacgcctcactcagttgaagtgaaaccgcagggcgtgagcaagggcttggtggctcggcgcatgcttgtgtcgatgaaggagcggggccagtgcccggacttcgtcctgtgcatcggcgacgacaagtccgacgaggacatgttccagctgatcgccaccgctgcctgcggggactcgctggcgtccaaggcggaggtgttcgcgtgcaccgtcggccgcaagcccagcaaggccaagtactacctctacgactcggcggaggtggttaggctgatgcaggggctctccta

SEQ ID NO: 13067 - DNA, 239 bp, Zea mays
  Clone ID: LIB3158-014-Q1-K1-A9
cttgtgctgcccttccggcctttctcgtatgtatatgctgtgagttgtagcacggttgattcatactaaacgtggtggtatgtgttgttttgttttttcatgtctcacatagctgcagatacagctttgggatgcagatttgacgtggaaaaaatatgtagacgatttatacttgctaagttgctacatttttattttttacgctctggaaacataaattaataataaatattatattt

SEQ ID NO: 13068 - DNA, 431 bp, Zea mays
  Clone ID: LIB3158-014-Q1-K1-B1
tcgctcgcaaccttccccagccatggcgaccgcgacgcggaggctgctccccgcgctcctcaagaccctagctccagccggcgcgcgcggcctctccaccgagaaggctgttggtgcagccgccgtcgtcggcagccacaccgctaagtggatgcaggacacgagcaagaagtcgccaatggaactgatcaacgaggtacctccgatcaaggttgatggtcgcattgccgtctgtgaaggggcttctgaaggtgttggacttggccacccaattgagtacatctgccttgatctggaggcacctaatgtgtgcaagtactgtggtctccgttatgttcaagttcaccatcactaaattgggaagatactgccgtctaccgctgcagaagctgagttgaggagtttatgtgcacacacatttgttccacaat

SEQ ID NO: 13069 - DNA, 416 bp, Zea mays
  Clone ID: LIB3158-014-Q1-K1-B10
cggatcgagatggcggcgtcggatgttgagtaccgctgcttcgtcggcggcctcgcctgggccacggacgaccactccctccacaacgccttcagcacctacggcgaggtcctcgagtccaagatcatcctcgatcgggagacgcagaggtcccgcggcttcggcttcgtcaccttctccacggaggaggcgatgcggaacgccatcgagggcatgaacggcaaggagctggacggccgcaacatcaccgtcaacgaggcccagtcccgcggcggccgtggaggcggcggcggtgggtacggtggtggccgtggaggcggcggctacggcggtggcgggcgccgtgatggcggcggcggctaccgcggtggcggcggctaccgtggcggcggcggctacggtggtggtggcggcgg

SEQ ID NO: 13070 - DNA, 305 bp, Zea mays
  Clone ID: LIB3158-014-Q1-K1-B11
ctgcgtacacaactacagtttggatcgatggacacgtacaatctgatctgaatcattggaccccgccacaccactctacgccgtacgtacagtttcgtcgtatgattttatataagcacatgagtctacaggtagacgtaaatcatggatgagctagctacggatgatatatatagcttgtgcgtttttttacaactttttttttggtccttttggtttatacatatttattagcagatacggatcgaatacaaatattaaaaatggttcgttcttttttaaaaaaaaaaaagagtatactaaaa

SEQ ID NO: 13071 - DNA, 397 bp, Zea mays
  Clone ID: LIB3158-014-Q1-K1-B12
ctcccttcccgagcgtcatggacatcaaccagatccgcgagatcctcccccacaggttcgcattccttttggttgatagagtaattgaatacaaggctggagaatatgcagtggggatcaagaatgttacaataaatgataatttcttcccaggacattttcctgaacgccccataatgcccggtgtcctcatggtcgaggctatggcccaggttgggggtctggtgatgctgcaacctgaagttggtggatctcgagacaacttctttttcgccgggattgacaaagttaggttcaggaagccagtgattgctggcgatacactgatcatgaggatgacactgactaagtatcagaagaagtttggactccccaagatggaaggaaaagcttatgt

SEQ ID NO: 13072 - DNA, 443 bp, Zea mays
  Clone ID: LIB3158-014-Q1-K1-B4
gcagaacatggcgcacagcatggccgttgcatccactatgccaatggatggccctatttatcctatggatccctctggcaacccaatgcttccagcggctctcttggcccagtatcctgcattagctcagctgaactggtctgcacctgatgtgaacgctggcatggacgacgaggttagtggtcgttcatcctttgatgccagcgactatgacgaaaacgaagacggtgggtatgtgagtggcccacgcacggggtttggtgagggtgggttgggccaaagctttggcgaaatgggatacgcgagcgacttttggggccggtaaaaatgggatcactggccataaaaacatgcattcatttgtgacgcgatcaatgcccccccttttgtttctttttcttttttagttatcggcgatctgtaccttgcgccttgcttctttt

SEQ ID NO: 13073 - DNA, 387 bp, Zea mays
  Clone ID: LIB3158-014-Q1-K1-B5
agtgaaactccttcgcacatcatcttccactgcccgtttgcacgccaattttggagctccatcggattctctgtcgctgatgatctgggcacccaggacctgccaaacatcagtcgccctgatcgccttccgggtgcagaattcaactcctttgtcctcctctgctgctggcaattgtggaaacgcaaaaatggtgtcggattccgtcaggatcatgccactcttgtgaccactttgcattcatgcgcttctgaagcaaaagcttgggcgttcaggcacaacaggaaagaagcacaagtattaggtgcttggctgttggcgttttctaatcctattatgtaatctcatcattgctttcgcccccctgaactatgctagctacaatgc

SEQ ID NO: 13074 - DNA, 437 bp, Zea mays
  Clone ID: LIB3158-014-Q1-K1-B6
tgctgtacttgttgcagccttcgagtcaactggagcacactttgctactgctcgtctagcgggtgctacaccacctccagcttatgtccttagtcggagcgttggcttgcagggtattggaatgttcttggaggggatctttagtgttccagcaggttcatctgtatcagttgaaaacattggcctccttgggctgacaaaagttggaagtaggagggtgatccagatatcaactgggtttatgatattcttctccatatttgggaaatttggggccttctttgcatcgatcccactgccgatctttgcagcaatttactgcatcttgttcggcattgtagctgctgtgggagtctcgttcatgcagtttgccaacaagaactcgatgaggaacatctatatcatcggactctcgttgttccttggcatctcggtcc

SEQ ID NO: 13075 - DNA, 289 bp, Zea mays
  Clone ID: LIB3158-014-Q1-K1-B7
gggcagatttggtggctgatgagatagcggtgcaggctgcattcttcttcttcggaacgaacgacctgacgcagatgacctttgggtacataagggatgaggtgggaaagttcattcccgactatcttgctcagggcattctacaacatgaccccttcgaggtgctggaccagaggggagtgggctagctggtgaagcttgctacacaaaggggccgcagagctaggactaacttgaaggtgggcatttgttgtgaacacaggggaaagccttcgcctgtggtcttttt

SEQ ID NO: 13076 - DNA, 428 bp, Zea mays
  Clone ID: LIB3158-014-Q1-K1-B8
ggcgtccggaagggcacacagtgctagctcatcaagaccaaatgtcaactggcgcacatctgcgccggagatttgctgcgggcggagatcgctgctggctctgagaacgggaagcgggccaaggaatacatggagaagggtcagctcgtgcctgatgagattgccgtaaatatggtgaaggaacgccttttgcaaccagacgctcaagaaaatggttggattttggacgtgtacccaagaaactctccacaggccatgaccttggaaactcttgaaattcggcctgatactttcattctgttagatgttacagatgaactacttgttgaaagggtggttggaaagaggcattgattctgtaacacggaaaatatatcatttgaagtatttttcgtctgagaatgaagaaaatgctttaaggcttacac

SEQ ID NO: 13077 - DNA, 344 bp, Zea mays
  Clone ID: LIB3158-014-Q1-K1-B9
gtagaatagttctgcagattttatctctgtaaaaaaaaaaaaaaaaaaaaaaaaaaaaaggaaaaaaaaaaaaaaaaaaaaaaaaaaaaaaaaaaaaaaaaaaaaaaaaaaaaaaaaaaaaaaaaaaaaaaaaaaaaaaaaaaaaaaaaggggggggccgttttaaaggatcaaagtttacttccccgtgcttgcaaaaaaatagtttttttatagggtcacctaaataaaattaattggccggggtttaaaaacgtaggaattggaaaaaccttggggttaccaaatttaatccctttgcaaaaaatccccttttcgccacttggtgtaataccaaaaaggcc

SEQ ID NO: 13078 - DNA, 274 bp, Zea mays
  Clone ID: LIB3158-014-Q1-K1-C1
cacacacagagagagacaagtggtttccaaagccaagtgtgtactagcagtctagcaaccagctagctcgggcggcagcaggcagccatcatgtcggaggagaagcaccaccacttcttcaaccaccacaagaaggacgaggagcagcccgccggcgagtacgggtactccgagaccgaggtggtcaccgccaccggcgagggcgagtacgagaggtacaagaaggaggagaaggagcacaagcacaagcagcacctcggcgaggccggcgcca

SEQ ID NO: 13079 - DNA, 287 bp, Zea mays
  Clone ID: LIB3158-014-Q1-K1-C10
gagtgggttaaactgtgtttactttcgctctgcccaccagtgttgtctaaagcccatggggggccctacgacaagggctggtcttggctaatgtactcgatttacgtaaacacttgaacaaagaaatgatttgaagaggtgtgatttatctaggtgacaatctgtccgtacgcaggtgtgctcttttctactggcagatataatgatctctatgttggttttgctcgaaaaatactttcttataaaactgactttgcatattttcttgatgatcaattacatgatta

SEQ ID NO: 13080 - DNA, 153 bp, Zea mays
  Clone ID: LIB3158-014-Q1-K1-C11
atcaacaattagcttggtcaacattccctttacccacgccactggtatatccaaaggaggggagctactcacattagaaggtttacactatgctctccagtgtctctccagcttcaatccagacaccgattcatgtggataaaaaataatgtt

SEQ ID NO: 13081 - DNA, 294 bp, Zea mays
  unsure (1)..(294): unsure at all n locations; Clone ID: LIB3158-014-Q1-K1-C12
gaagnacggggccgacccacgcgtacgaactatcatgacatcaattgtgtttttctttaccaaggggtattaccataaacattggcgggtgccgaagaaaaggccttgacaatcttaatgaacagctgtgccatgatataactaactaagagggaatggagtaaatttgtttactgctgacggaatcaaaccatgatgaggcttttgtatttgaaatggataacatgtacaatatctactgggctatgtatgaagacaactctctctcaaacagacataagtatggcatgtgct

SEQ ID NO: 13082 - DNA, 402 bp, Zea mays
  Clone ID: LIB3158-014-Q1-K1-C2
ggaaagtttcaaggaggtggagccttcaatgtgatccctgattcggtaactataggtggcaccttccgagcctttctgaaagagagttttaatcaattgaagcagcggattgaagaggtgattgtgtctcaagctagcgtgcagcgctgcagcgctgccgtggacttcctcagcaaggaccgtcctttcttcccgccgaccatcaacagccccgagctccacgacttcttcgtgaacgtggccggcgagatggtcggctcgaggaacgtgagggacaggcagccgctgatgggcgccgaggacttcgcgttctacgccgaggcggtcccctccacctactactacttcgtgggcatgtacaacgagacgcgcgggccgcaggcgccccaccactccccctac

SEQ ID NO: 13083 - DNA, 440 bp, Zea mays
  Clone ID: LIB3158-014-Q1-K1-C3
ggaaggagaagagctctggcaagtatgagaagaaggtgtatgtgctccccaagcaccttgatgagaaggttgctgctctccacttgggcaagcttggtgccaagctgaccaagctcaccaagtctcaggccgactacatcagcgtgccgatcgagggtccctacaagcctgcccactaccggtactaggcagccagcacacggcttgcagctcactcgggccgttgtgtgctatgaagttcgctacactggcctgtcagttatcttttgcatgcatatgcattatcatatacgcagtcgcgtagcaggtttccttatggttatcgcttgagctgacggggagggaaagagctgtttgcttttgcttgagaataatggtgtaatccgctggggtgaggcgatgtgcgttgccagatacagttttgtcttggtgactctact

SEQ ID NO: 13084 - DNA, 311 bp, Zea mays
  Clone ID: LIB3158-014-Q1-K1-C4
ggattaggaactagatcgggcgatttttccaccacatgggggccgaagtcttgcagctgaagctcagcctgcggatcaggttaaagctggatcacccggacgaatggccttctcatgaaggatatatgcaccctcgcgcagcccaccagttcacacttgtttttactgccaaacaaagccgtgcctaaggtcaaaaccgacaacgattgatcaactgagctcctgcacggctgtagctggatacgcatatgtttgttctacccgtacacctgatgatcacatcaatcgaccaccatccatactgaatatta

SEQ ID NO: 13085 - DNA, 207 bp, Zea mays
  Clone ID: LIB3158-014-Q1-K1-C5
ggccgcccacgcgtccggggacgagagatcggacgcgtgataagacacatggtcggtcgccgaggtacctatcatggggatgaagaagctggcctcaatctcaatgttaacagctacattaatcgacttgttttaaagtatccggacgggactagtttacccagccaggggctttggaagcatcctcacaagtgaggctagatgcac

SEQ ID NO: 13086 - DNA, 380 bp, Zea mays
  Clone ID: LIB3158-014-Q1-K1-C6
gactcgagcgaggggcagtaaagccggctttacgtgcctagaagctagtacctagtgtgggctgctgtctaatgacactatgcaatgtgatctggaccctggtttcttgggtgcgacgcttgtagcagccgtgttatgattatttgtcgggaaaatttgggggctccccatatgagatgctgtcgggcaagacctctgcatcccacctcgtttcacgcgggggacgctggagcgtggtccggttgtgttgggaagccccttaaactgttgtcgcttgcattttaaccttttcatcgccgttcagtggtcctaaatctatggctcgtctcagaggtctagtatatgttttcttggatctctcttgattcctcacacgggga

SEQ ID NO: 13087 - DNA, 252 bp, Zea mays
  Clone ID: LIB3158-014-Q1-K1-C8
atttgtaccgctgtgtctagctccttgagctagtgatctcttgacggtttatgctggctggtctttctggacagaacttgctcggataggaaacttaacatgtcgggggaaggaagggttgagtgaccatgctggctccaacaagaccctctcaagggtcccgtaccctaaatttagaggacgaggacgtactctacttcctccaacaacgtgctctcaacggttctttaaatttagagaacactgctggat

SEQ ID NO: 13088 - DNA, 401 bp, Zea mays
  Clone ID: LIB3158-014-Q1-K1-C9
gtcaatacttaaaaaaatatgcatttcatgaatccgcgtacataatattttggcatgtcttgcattaaaacaactcaatgcgtgcactgtgtgttgaaactattgtagcgcactaaacatttcagcgcctgaatggacaataatgatgttaaacggaagcacaatatgaacatggcgaggcatggacattttgattggaaagtatcgaatatatatgctaggcttttcagagagattactctctaagaaactgatcttggcattgggggctagtttatcgggtactgagtaatgcagcttattttaatgtatcccagttgtgttgttagatacaactatgcgttcgaattacccattttattaaaatctagatacgtaaaaaattgtgtttacttatactt

SEQ ID NO: 13089 - DNA, 381 bp, Zea mays
  Clone ID: LIB3158-014-Q1-K1-D1
cccacgcgtccgcccacgcgtccgatttgatattgcaccataggaataggattggtagttttggccttgtgcatccagcgttgcgacccttgtttcgctagatgttttttaggcagaatgcactagctggacataataggtccaaacatttgtagcatcgtgcattcgtgcaggcgtaaatcgtaatgtgttatattgctggagttgtttgtaatgtgctgttttgtatctctgaggcagtttggctgtcaaatccgtgggcttgacgaatatcaacaacctggctgctgttaccttttaaaaaaaaaaaaaaaaaaaaaaaaaaataaaaaaaaaaaaaaaaaatataataaaaaaaaataaaaaaataaaatttttttt

SEQ ID NO: 13090 - DNA, 321 bp, Zea mays
  Clone ID: LIB3158-014-Q1-K1-D10
cggacgcgtggggcgccatgggatacctccggattggccgccgacttcgactggaagaagaccgcggagccggtgatgcagctgtacacggaggcaaccgatggctcctacatcgagcacaaggagagcgccatcgtgtggcaccaccacgaggcggatccggacttcggttcctgccaggccaaggaactgctcgaccatctcgagaacgtgctggccaacgagcccgtggtggtgaagagaggccagcacatcgtcgaggttaacccccagggcatcagcaaaggcgtggtagtggacagcctcctgtcgtcgatggtg

SEQ ID NO: 13091 - DNA, 441 bp, Zea mays
  Clone ID: LIB3158-014-Q1-K1-D2
acctgcttctgttttgtttgcatgagattcccccctcctcctttgtgattatttgagcctgccatcttccttaactgcaaacagacatgtctgctggtcttcaaattacaggatggcctgcccatgattcacctgtgagctctgttctttttgggccagcagaaactagcatcttcagcttaggctcggacggaaagatacttgaatggagtttgcacaatcaaggtcagattctttggtcaagagattgcagcagattctgcaatccggagagctttaaaacacgaatgcatgaaatagcattggattcaaatggcaagaggctgctggtcacctccggtttggttcgggccccaatataccaggtacaaggccatgaaagcgaactgaagacactgccgcacagttcatctatcacaagtgtggattggcatccaacac

SEQ ID NO: 13092 - DNA, 445 bp, Zea mays
  unsure (1)..(445): unsure at all n locations; Clone ID: LIB3158-014-Q1-K1-D3
aagatcaccaggttcgaggaggagctccgcgcggtgctgccccaggaggtggaggccgcccgcgtggcggtcgccgagggcaccgcccccgtggcgaaccggatcgcggacagccggtcgttcccgctgtaccgcttcgtgcgcgaggagctcggctgcgtgttcctgaccggcgagaggctcaagtcccccggcgaggagtgcaacaaggtgttcgtcggcatcagccagggcaagctcgtggaccccatgctcgagtgcctcaaggagtgggacggcaagccgctgcccatcaacatcaagtaaaagaacgccaacgagaagaggagggaggggaggaaatacgtgaaaaaaaataaaacctgtacacgtgtctgtccagatcgtgccgncgatcgctcttcgttgttgatttttggttgtattgatcgatccgtatgtgtgc

SEQ ID NO: 13093 - DNA, 350 bp, Zea mays
  Clone ID: LIB3158-014-Q1-K1-D4
gcccctcgcttttcgtctgggaggggtgcatcgcaacctcctcctgaacgccgcaccgcagcccagtccacgcgcccgccatcgcccatccgttccgttccatgcatgctttcgacctgctgctgtttgtttgctctgttggttttgtaacgttcgtaacgtagtgctgtcgttgttgctcgcaagtgatgatcgtcacgtcacgtgattggcttagctgtgtgtgtgagagaggtgagggagggacagagagctagcactattggtttggcatgccaccttgtgcgtgccctgcttattgcaaaaaaaaaaaaaaaaaaaaaaggatgtgtgatatggtatttcttttt

SEQ ID NO: 13094 - DNA, 316 bp, Zea mays
  Clone ID: LIB3158-014-Q1-K1-D5
caccgcggggctcgccatctacgacaccatgcagtacatccgctggcccgtcaccacgctctgcatcggccaggcggcctccatgggctcgctcctcctcgcggctggggcgccgggtgagaggcgcgcgctgcccaacgccagggtcatgatccaccacccctcgggcggggcgcaggggcaggccactgacatcgccatccaggccaaggagatcctcaagctgcgcgaccgcctcaacaagatctaccagaagcacacccgccagcccatcaacaaaatcgagcagtgcatggaaagggacctcttcatggat

SEQ ID NO: 13095 - DNA, 293 bp, Zea mays
  Clone ID: LIB3158-014-Q1-K1-D6
gtgaacgccgcggtggccaccatcaagactaagcgcaccatccagttcgtggactggtgcccgacggggttcaagtgcggcatcaactaccaggcgccgacagtggtgccgggtgccgacctcgccaaggtgcaacgtgccgtgtgcatgatctccaactccaccagcgtcgtcgaggtgttctcccgcatcaacagcaagttcgacctcatgtacgccaagcgcgcgttcgtgcactggtacgtcggcgagggcatggaggagggggagttctccgaggcacgcgaggacct

SEQ ID NO: 13096 - DNA, 377 bp, Zea mays
  Clone ID: LIB3158-014-Q1-K1-D8
aaggaatccgatccatccaagccaagccaaggcagaaaagaagaacaagaggagggagaagaagcatcggccgcatgtctgatgggactgccaactgcgtggacattctgatcgccatcatcctgcctgcgctgggggtgttgctacagtacgggtgcggccacgagttctggatctgcctgcttctcaccttcctcggctacattcgcggcatcatctacgccatctacgccatcaccaagaacaactagctagtcatccttgccgacgacgatccatgtctctgtatctgtgtctgttcatatgcctgatgccgacttgtgctgtatgtagttgccttgaattcacccgtgtttctgtgtaaaaatcatctattt

SEQ ID NO: 13097 - DNA, 295 bp, Zea mays
  Clone ID: LIB3158-014-Q1-K1-D9
ggacgataccgaattcttacgagctggagattgaggttgatcttaatatttaattcggttcatagatgggctcgcactctgtggttttagtctttcatgatgatgggggctagcttgccttgaaagctgctgaaaaactgcgcacttatggatgtgacagagaggttgaagtgaacggagttgttcttattgttgtgagcttatcaagagaagtcattcctgcatttgctcatatactcctgcatacaccatataagaaaatgcacatggttctaccacttttacgtactgaaat

SEQ ID NO: 13098 - DNA, 375 bp, Zea mays
  Clone ID: LIB3158-014-Q1-K1-E1
cggacgcgtgggcaagtatgatgttgagaaggaaaaggagaaggctgaggaggctgctgctggtgcagatggtctttctgacttccagaagaagatttttgacgtcctgtacaagattgctgatattccgttcttggcaccctacaagaccaagattattgatgttatcgagaagggagagaaacagcccaacatcactattggcattttggtctccgttgtcatcgtgttcgttaccgttctcttcaagctcctgtttggtggcaagaaaccagtggcacctgtgaaacctgcagctgaggcgaagaagcccaaggccgcggagacggacggtgctggaagcagtggtgacaaggatgagaaagaggatgaaaa

SEQ ID NO: 13099 - DNA, 335 bp, Zea mays
  Clone ID: LIB3158-014-Q1-K1-E10
cttgagtcaggtgatggtgtctgctaaagaggcaacgaaagctgttgtaccagagaagcggcgcctgtttggatcatgtgggaaagcctgatcgaagtccttgcgttgcgccggctacatgcagtacaagaccgactgcatgatctggttcgtgatgctgctgctactgtgcagctgcttacagatacaacttattgcgttgaacagctgaagtggctattgtacttagcagcgtagcgcaactaaagctaattcataaatcgtaataatgtatgtatgctgccccgctgtaaaaatgcttcatcgttaataaatgccatcgagcctgctgtgcc

SEQ ID NO: 13100 - DNA, 442 bp, Zea mays
  Clone ID: LIB3158-014-Q1-K1-E11
cgctccgtcgctcgcctcacgcctccggcgccacctccaccatggccccgaagaaggagaaggccccgccgccatcgtccaagccggccaagtccggaggcgggaagcagaagaagaagaagtggagcaagggtaagcagaaggagaaggtcaacaacgctgtgctcttcgatcaggccacctacgataagctgctctccgaggtgcccaagtacaagcagatcaccccatccatcctatctgagcgcctcagggttaatggatccttggcacggagggccatcaaggatctgatggcaaaggggctcataaggatggtctctgttcattctagccagcagatatacaccagggcaaccaacacatgaggggtgttttgcgtcttgcggacgttatcagtctagacgacttgatgttgctattatatcaagtttaatttaat

SEQ ID NO: 13101 - DNA, 396 bp, Zea mays
  Clone ID: LIB3158-014-Q1-K1-E2
ctcgctgcgcggcgtggtgccgggcggtgcgcggagacgggacgcgttcgccgcgtccctccggcgtctcgatccgcgggttgttactgtcgtcgaggaggaggctgatctcgtggcttttgaccccggcgcgcccgatgaaagcggcgacacggaggcagcgttcctgaaggtgttcggcgagggcttgcggttcttctcggcttacatggactcgctggaagagagcttccccaagactagcaacgagaggctggcgctggagaggggagccggacgtgccattgtagacttggtctcgtgcccggcgtcggagtccatggagcggcgggagacggcggcttcatgggcccgccgcatgcggtcttccggcttctcttccgggggcgttcagcg

SEQ ID NO: 13102 - DNA, 336 bp, Zea mays
  Clone ID: LIB3158-014-Q1-K1-E3
aaggacatgaccatgtccccacctggcccctctacagtgaaagatgcctactgcttgctgaacttcggggacagcattactacagatcacatttcacctgcaggaagcatacacaaagacagtcctgctgccaagtatttgatggagcgtggtgtggaccggaaggacttcaactcatatggtagccgtcgtggtaatgatgaagtaatggcaaggggaacgtttgcaaacattatgatcgtgaacaagtttttgaacggagaagttggacccaagaccattcatgtttctactggggagaagctttctgtttttgatgcgggcatgagatacaaa

SEQ ID NO: 13103 - DNA, 342 bp, Zea mays
  Clone ID: LIB3158-014-Q1-K1-E4
acaactcacaacccgagccccccaaacccgaagcagcaggagctcccctgaccttgctccgcctccgatcaagggaaaggaagatgagctactaccggcagcagccccccgtcggcgttccgccgcaacaagggttcccggggaaggacggctacccgccagcggggtacccgccggccggctaccccccgccggcgcagggctacccgccgcagggctacccgcagcagggctacccgccgcagtacgcgcagccgccttcacagcagcagcagagcagcgggccttccttcatggaaggatgcttggctgccctctgctgctgctgcctcctggacgcct

SEQ ID NO: 13104 - DNA, 307 bp, Zea mays
  Clone ID: LIB3158-014-Q1-K1-E5
gtggcaccagcggtttccgtgcccttgtaatagtattatgacctgccccctctttctcttattaacgctacagatttattcaggaagtggtgtgttttaaaaaaaaaaaaaaaaaataaaataaaaaaaaatagaaaactaaaaaaacaaaaaaaaagaaacatatataaaaaaaaaagaaaaaaaccaccgacaataacaagattatatgtccgggatggttaataaaaaaataaaaaaaaggggggacgcttttaagggagtaaaattaaaccaccggcaaatgtgaaaatttttttttttaatg

SEQ ID NO: 13105 - DNA, 389 bp, Zea mays
  Clone ID: LIB3158-014-Q1-K1-E6
gcagcagcaggacccatgggcttcaacgttcagaagcgcaactataagctgaagctgcaaggggagaaccctggaaggaaaggtcagctggccatcgcaacagaggttttcgaggtcacgccttccctgtacatggttgagctgcgcaagtccaacggcgacacccttgaattccacaagttctaccacaacatctcaaatgggctgaaggacgtgatgtggaagccggagagcggcatcgtggaaggcgacgaggcgcggcaaaggaggtccccgtgatggggtctgcaaccaagttttagaagtagcgctgcagataactagtcatcagggagcctggcgggaactgagcctgtgactgctttcctgtttgttggaatgtttggttt

SEQ ID NO: 13106 - DNA, 307 bp, Zea mays
  Clone ID: LIB3158-014-Q1-K1-E7
ggaaaatgctgagcgtgatgagcgtgccaagaagtcggtgagcatcaacaagttcctgagacctgttgacggataaaggtactacagccgtcgtggtcgtggaaggggccgtggggatcgtggtggctttacagtcggatacggagggggatacagtcgtggcctaaattctgttgttacatccattgaagtatcatgctcaattacgaagccttgctgggaagtgaatggcgcccagcttctgctgtcacccagcggtgcgctgtctgctggagttatatttcaattttgtccagaaacacttttt

SEQ ID NO: 13107 - DNA, 238 bp, Zea mays
  Clone ID: LIB3158-014-Q1-K1-E8
ctgagcactttctcctcgtcccatatcaagtcaatcgaagccgcgatacgaccatggactgcaccggtaccggagcaaggggttaggggaagaaaggagctgtccggcgcaaggtcggctggccaaagaataaatccgtgttgagggccgttaaagccaggtttcaatttccctgttggcgcatctggcgcttatttaagaaaggccccttcgctcaacgtgataggaactgcccccc

SEQ ID NO: 13108 - DNA, 380 bp, Zea mays
  Clone ID: LIB3158-014-Q1-K1-E9
cgaaggctttgggttgatcttgtgttgatgtcaaagactactgtcaaaactctggaggcggtaacatctcgcaagaatacgacaaatcgcactatctacagcctgtgagtatatctaaattctcttcaacacttcattacgcaccagctattaaatatgttttcggttcttgccatgagataggagaatagagcactgaaaaagaaagccattgatctcatgagaacgcttcgcatatctagaaactagtcttgtgatagtgataatccgctgccagtacatacacatcaacagctcatgttcatgtttacataagatgaacgttagcattgttggtgtctacaacggcaatacattaaggtcggttgatatcaaggatt

SEQ ID NO: 13109 - DNA, 343 bp, Zea mays
  Clone ID: LIB3158-014-Q1-K1-F1
cctgatagagctgataagattaccatatttgctggagatgtggttcctcacaaaaaacctgacccagcaatctacatattagcagcaactacacttggagttgatccacaaagctgtgttgttattgaagacagtactatagggctcgcagcggcaaaagctgccggcatgaagtgtatcgtaacaaaaagcggctacactgcagaagaggacttcgagacagcagatgcagtgttcgattgcattggtgacccgccagaagtgcgcttcgatttggatttctgcgccaagttgctcaagaaacaatatgtgagctgaaagggggctagtgcaagtgatatac

SEQ ID NO: 13110 - DNA, 382 bp, Zea mays
  Clone ID: LIB3158-014-Q1-K1-F11
gaaacggggagagcagcgcgagagagggcacggcggttcgttcaacaccctagcaagcgcagccctagtccggagcccggagccacggcgcggctagggagccgtgcccggcggccgtcggagccgccgcggggaccaggcggcggggcgcccagggtcgccgggacgcgcgccatggcgtggtggcgcgcgcgggtcgtcgcgccggctcgtcgcgcctggctcgccgtcgtcgccgcgcgcgtgcgccgccgcaccgagcgcgcatggatcgtggacctccacagggacgtgcagacctgcgggtaccacgacgtcgaggtgatgtggggcatgctgggcctggacgccgggccgaccaacgcgccggagcgccggaacc

SEQ ID NO: 13111 - DNA, 400 bp, Zea mays
  Clone ID: LIB3158-014-Q1-K1-F12
ggagttaccaagtatttgaagcctgctgttgccggcttcctcatgcagaaggaacttgactaccttgttggagctgttgccaacccaaagaagccatttgccgctattgttggtggatccaaggtctcaagtaagattggtgtcattgagtccttgctggcgaaggtcgatatcctcatccttggtggtggtatgatctacacattttacaaggcacaaggatattctgttggaaaatctctcgtggaagaggataaacttgagctcgcaacttctcttattgagaaggcgaaggcaaagggggtttctcttttgcttcccactgatattgtagtagcggacaagtttgcagctgatgctgagagcaagattgtccctgccactgctatccctgatgact

SEQ ID NO: 13112 - DNA, 322 bp, Zea mays
  Clone ID: LIB3158-014-Q1-K1-F2
ccgactgcgaggatgacttctacagcgtgaatggagatttcactccgtctcgtggcagcgcaccggtctaccagcccagagcgcagacggtgatgagcagcatctttcagccggacacgcgcagttccaaatcaccggagccttctccgactggacggaggaagctcgctgagctgctgcaggaggcaatgcaagacggtcccgaagaaagcgccgacgagcagcagcagcagcagcagtcgcgatctgctggtgctgccgctgatgggaagccgccggtgtctgagtccacgtccagctacgcttgcagcaccgtgccaac

SEQ ID NO: 13113 - DNA, 421 bp, Zea mays
  Clone ID: LIB3158-014-Q1-K1-F4
gggttttcgcgccgccgccgccgccgccgccgcagccgcaacaatgccgtcgcacaagaccttgcggatcaagaagaagctggcgaagaagatgcgccagaaccgccccatcccctactggatccgcatgcgcactgacaataccatcaggtacaacgccaagcgcaggcactggcgccgcaccaagctcggcttctgagcgtcgggattggccggctgctgcgtcggaaggctagggtctaagagctatcttccttctgttttatcaatgtgtcagtttttctgtaagctagcaagtgttgctatgacgcttttattaagattctggggagccgggatggtaaaagaaaaatggcactactgggggggaccccaagatttcctggagcaatggtatgctaagtaagaaacctttatcttt

SEQ ID NO: 13114 - DNA, 398 bp, Zea mays
  Clone ID: LIB3158-014-Q1-K1-F5
ggccacggcggcggcgtgtgtgcgggtggcgtctccgttcacgggcccacctatctggcgtgccagacacgtcatctcaacgaggcggggacccaggagggccgggctggccgtcacggcggcggctgccgccggtggatcgccgcgcactgtgctcgtcaccggcgcgggcggccgaacaggccaaattgtgtacaagaagttgaaggagagggaaggacagtttgtgggacgtggcctagtcaggacgggagagagcaaaggcaaaattggaggcggtgacgacgtgtttgtcggcgacatcagagaccccgagagcattgctcctgcgatcgagggcattgacgcgctcatcattctcaccaacgcgggcccaaagatgaaaaccgggtttgatc

SEQ ID NO: 13115 - DNA, 399 bp, Zea mays
  Clone ID: LIB3158-014-Q1-K1-F6
ggatgatgatgtacgcaagtacgtgaacatataccgcaggacattcactaccaagaacgggaagaaggtcagcaaggcacctaagatccaacggcttgtgacacccttgaccctccagaggaagcgtgctagaatcgctgacaagaagaagaggataactaagaagaagtctgaggctgctgagtaccagaagcttcttgcccagaggctgaaggaacagagggaccgccggagcgagagcttggccaagaggaggtccaagctttctgccgccgtcaaggcttttgctgccacctctgctaaagaatattcaatgtttttggaatcttttgaaaggtctatcttagtacagcgaaaagtgcctttttacttaaaattaattagtaattgttggttttt

SEQ ID NO: 13116 - DNA, 95 bp, Zea mays
  Clone ID: LIB3158-014-Q1-K1-F7
cggggcgacccaccccttccgatgaacaacaaaaggggttccctcttaatttaaaattgcaaaaggcttgggcattgggggattccaacccatgc

SEQ ID NO: 13117 - DNA, 386 bp, Zea mays
  Clone ID: LIB3158-014-Q1-K1-G1
cggacgcgtgggcggctccactgagcgtgcgtgtcaccggcgggaggcaagggcaggcgggggtggcgatggcgtccgctgacgcgcgcttggcggggatcgcctcctccatccgcgtcatccccgacttccccaagccagggatcatgttccaggacatcacgacgttgctgctcgatcccaaggcgttccgtgacaccatcgacctctttgtcgagcggtacaaggaccaagggatcaccgtggttgctggtgttgaagctagagggttcatttttggtcctcctatcgctttagccattggcgcaaaatttgtgcctttgatgaagccgaaaaagttgtcaggcgaggtgatctcccaagagtattctttggaatatggaact

SEQ ID NO: 13118 - DNA, 271 bp, Zea mays
  unsure (1)..(271): unsure at all n locations; Clone ID: LIB3158-014-Q1-K1-G12
gcctgaaagatgcagtgggaggcctaggtgtcgtcagcttcttttcttggtctattgtcagttcagttaaccaaactttagctgtccaagagacatcttattgtggatttttttttatttgtggttttgggtggcagactgtttgcgttacaatttggtcatgttgctcatgaatactcatgtttctgtttgatggaagtactgttaaggctatgatgtttttatactttatgttnaaaaaaaaaaaaaaaaaataaataaaaaataataa

SEQ ID NO: 13119 - DNA, 356 bp, Zea mays
  Clone ID: LIB3158-014-Q1-K1-G2
ggggatgtaatggtgtaaatttgatctggggtggtggaggtaaatggtgagaggggtaaggtattttataattgagggggtcggggatggtatacgtcctggggagaattgggcaggagggtggtgaactggtatactctagtattgtactagctcctttgtgtggtgatgtacataagggaagggtatacatttgtggactctttgaggagggatggatacctaatcctgatcccgatccttgcaatgtttgtttcctaacctggaaaaagactaaggttggtggctcttttttgaaaatggaatgatgattaaccttggtaaaaaaaaaaaaaaaagggccggcccttttaaag

SEQ ID NO: 13120 - DNA, 395 bp, Zea mays
  Clone ID: LIB3158-014-Q1-K1-G4
gctgaagaggattggaccgaagtggtaccgcggtgtccgaaggcatggcctcatcatgggctgctccgtcacaggcgtcaagagagagcgcggtgactctcccttggagcttggtcccaaggcggaggatgtcagcaagccagtgaatccgatcaccttcctcttccgcttcctcgtaggaacgatatgtgctgcctactatgttctggtgcctatttacatgtggataaaggaccagatcgtgccaaaaggcatgccaatctgagtgaaaggaatgagctgcatggaagagaagatagccaacgtctgaattttactcttctctatattagacgcttcctgccttgtttggattaatacctcttggtttccttctgctatttacttcttgcact

SEQ ID NO: 13121 - DNA, 405 bp, Zea mays
  Clone ID: LIB3158-014-Q1-K1-G5
gataaaaaagataaaaaaaaaaaagaaaacaaaaaataaaaaaagaaaagaacaaaaaggggggtggttctacaacgaatcgtgaatacagagcgcggggtccctccctttaagcttggtcctcatgcggctgatttcaattagccggccaatccgatcaccttcctattccggttaaatcccagaacgatctgagctgactactatgttctggtgcctattttcatgcagataaaggaccagatcgtagcccaaggcctgcccatctgactaaaagtaatgaactctatgtgtgaaatgatagccgacctgtgaattctcctattctctatattagacgcttgctgcctgctttgtatccataccacttgctagccttctagccctacttcttgcactgttttt

SEQ ID NO: 13122 - DNA, 321 bp, Zea mays
  unsure (1)..(321): unsure at all n locations; Clone ID: LIB3158-014-Q1-K1-G6
gcagaagccaccgatcggcgtgccgcgtgcgtgaggcgatcggagcatcccgtcccgaggaggaagacaaccggcgacgcggggggaacatggggaagacgccggtgcggatgaaggcggtcgtgtacgcgctgtcgccctttcagcagaaggtaatgccggggctgtggaaggacatcaccaccaagatccaccacaaggtcaccgagaactggatcttcgncacgctcctccttacccccgtcgtgggcacctaccaatacgccatgtggtacaaggagcaagagaagcttttccacaaatattaaatgggcttgcctt

SEQ ID NO: 13123 - DNA, 62 bp, Zea mays
  Clone ID: LIB3158-014-Q1-K1-G7
agaaaaagtactgatcaaaaaaaaacaaacataaaaaaaagaaccacaacaaaaaggagggg

SEQ ID NO: 13124 - DNA, 313 bp, Zea mays
  Clone ID: LIB3158-014-Q1-K1-G9
ctggagacccatgagggcaggaaagtcgttcaggctctcaaggatgtgtatgctgagtgggttgccttggacaggatcctcacctcctacctgtgtttcggtgggcttttcaagctcgcctccaattcgttcttgtcacagaggatctgctctgtcaatgccatctccattctatgtgaggtaaccggagccaatgtttattatgtggtttacgccgtgggcattgacacgataattgttcctatagtccctaacaccagagttgtggtcggtggattatgctttcacaatgacatcctatacctggtgtaca

SEQ ID NO: 13125 - DNA, 400 bp, Zea mays
  Clone ID: LIB3158-014-Q1-K1-H10
ctatagcaaccggtccagcactttcacgctcagctccagcaatggctgcctccaccatggcgatctcctccacggcgatggccggcacccccatcaaggtgggctccttcggcgagggccgcatcaccatgcgcaagaccgtgggcaagcccaaggtggcggcgtccggcagcccctggtacggccccgaccgcgtcaagtacctcggccccttctccggcgagcccccgagctacctcaccggcgagttccccggcgactacggctgggacaccgccgggctgtccgccgaccccgagaccttcgccaagaaccgcgagctggaggtgatccactcccgctgggccatgctcggcgcgctcggctgcgtcttccccgagctgctctcccgcaacggcgt

SEQ ID NO: 13126 - DNA, 380 bp, Zea mays
  Clone ID: LIB3158-014-Q1-K1-H5
cctgggcgtgctggatggagtccgccgacggggcggtgtggatgctcatcggtgcgaatgttgctgtcttcctgctgtggcgtgtggccgatccagggttcatgaggaagcatttcatgatttcactggacaatttcaagagtggacggttgcacaccttgctcacgagtgctttcagccatgcagagtttaatcacctctttgccaatatgtttggcctcttcttctttgggagcagtattacgaatgtgtttggtcctgcctttctattgaagctgtatgttggtggagcacttactggatcagtattcttcttgctggagaaagcttttctagcctatccgcaacaagattatgtaggatgggatacttcaaaaact

SEQ ID NO: 13127 - DNA, 433 bp, Zea mays
  Clone ID: LIB3158-014-Q1-K1-H6
aagcctcccacacacccgacgcccaagccgaccccaccgacgtacaccccttccggaaagcctccgacacccaagccgaccccaccgacgtacactcccacaccgaagccgccggccaccaagccgcccacctacactccgacgccgccggtgtctcacacccccagcccgccgccaccatactactagaaagcgatgcctaccataccacactgctgtcagtctctggagcatttaggtggtctggatcaatggaagggttgtgtcctagccagccggcaaagatgagctgctgatggtaatgatgatgataagaggccactgctaccctactacgtaccctcctctttgtgtgctgccatccgtccccgttagacgatcgaggagagaataacgcagagctctctgctcccggcctgtctactgccgtccc

SEQ ID NO: 13128 - DNA, 358 bp, Zea mays
  Clone ID: LIB3158-014-Q1-K1-H7
acaaactgacttgctctccttgctaatgttatttatgacaacttctgcattgttgaggggtgggggacaactgttcatgccatcactgccacccaaaaaactgttgacggaccctcatccaaagactggagaggtggcagggctgccagctttaacatcatttctagcagcaccggtgctgccaaggctgttggtaaagatcttcctgatctgaatggcaagctcacttgtatgtccttccgtgttcctactgtggaagtttcggttgttgacctcaccgccagaatcaacaaaggggccttctattaggatatcaagaaagctatttatgctgctttctagggtccactcaagggta

SEQ ID NO: 13129 - DNA, 250 bp, Zea mays
  Clone ID: LIB3158-015-Q1-K1-A1
gcttcccggagcttcgccgacgagaagcgccgccgccgcgggcagcccgtgccctcttcctcaccagttccttcggcaagcgccaccccgacggcctcctcttcgtcgtccacctcgactgctccgttcgcgcacccgtcgccgtcgtccgtgcttggacccaccaccaaggaggcgccgctgaacccgcagtccccggagctggtcgcgacaccaacgctcgttctgccgtccgatgagtccgcggagc

SEQ ID NO: 13130 - DNA, 84 bp, Zea mays
  Clone ID: LIB3158-015-Q1-K1-A10
ggttccttctgagtttgatgtgtggtgttcgtttaattcccttgtacaaccccatttagtatcattgtgatgattttggattcc

SEQ ID NO: 13131 - DNA, 277 bp, Zea mays
  Clone ID: LIB3158-015-Q1-K1-A11
ctttcattcgccgccgccgcctcctctctgctgccgtcgccatggggagaaggcctgcgagatgctatcgccaaatcaagaacaagccataccccaagtccaggtactgccgtggtgtccctgaccccaagattaggatctacgatgttggcatgaagagaaagggtgttgatgagttcccctactgtgtgcaccttgtctcttgggagaaggagaatgtctccagtgaggctcttgaggcttgccgtattgcctgcaacaagtacatgaccaagtc

SEQ ID NO: 13132 - DNA, 247 bp, Zea mays
  Clone ID: LIB3158-015-Q1-K1-A12
ggtcaatggtatttcagaactctccatgtctcccgagttgagtaaaacctctggtaaaggaacaatatctaaagtaaatgggaaatgtaccacaaccattgattcaaatgaacatgacccatacacattttaccaggtgtcatatggccaacacctaattctccatccactaaacatgagatgtcttctaaaccattttggaagttctgatatgcttccacctaaaattactgccaaaatattggag

SEQ ID NO: 13133 - DNA, 228 bp, Zea mays
  Clone ID: LIB3158-015-Q1-K1-A4
gggttgcaaactctcaccaacaacttgtgtttcacgtatgccaagtgcacacccccaatatcaatcggtcctcctgcatactattctcatcttgcagccttccgagctcggttttacattgggccagattcaaatgacaacggatctttggcgagcggggcttccacaaggcgtgggccttcaccgggggcacgccacaccaaggcttgtgcctccaatttttctttg

SEQ ID NO: 13134 - DNA, 396 bp, Zea mays
  Clone ID: LIB3158-015-Q1-K1-A5
gccgccgccgccgccgtcgcaactgcctcccgtgatcgtcaggctagccagatcaccttttcccaggacgggaccgttcctaccaggaaggcaacttcagtggctggggtggcaaggcagcgtgagcttagccataccgtcgagagtgagggggacagtaagatgaagaggcaggtgtccagtacgaaatccaaggagctcagtggtcacgacatctttgccgatcacgaagatcccaagcccaacaggtcaaggagatcagactatggcagctctgctgctcagtcaccagtgaaaaatgcaaacgtgagctccttctcgtttggagaggccgacattgacagcacagtgaaaacagcaaagaagaaagggtccagcaacttgtctactgatctg

SEQ ID NO: 13135 - DNA, 321 bp, Zea mays
  Clone ID: LIB3158-015-Q1-K1-A6
ccaggacgtgccggggagcgagaacgaccttcacctccaggagctcgcccgcttcgccgtcgatgagcacaacaagaaggccaatgctcttctggggttcgagaagcttgtgaaggccaagacacaagtggttgctggcacgatgtactatctcactattgaagtgaaggatggcgaagtcaagaagctctacgaagctaaggtctgggagaagccatgggagaacctcaaggggctgcaggaattcaagcctgttgaagagggtgctagcgcctaaggatgtctccttctccatgtgcgagcctgaagctcaaaacaaag

SEQ ID NO: 13136 - DNA, 265 bp, Zea mays
  Clone ID: LIB3158-015-Q1-K1-A7
cggacgcgtgggcggaaggcgaaagagtagcagcagcaggcggcgccgagtagcggctccccacctcgagcttgccaccatggctagaggattgaagaagcatttgaagaggctcaatgcgcccaagcattggatgctggacaagcttggcggagcttttgctcccaagccatcttctggacctcacaagtctagggagtgcctgccactgatcctcattatcaagaacaagctcaagtatgctcttacataccgtgaggtcatt

SEQ ID NO: 13137 - DNA, 353 bp, Zea mays
  Clone ID: LIB3158-015-Q1-K1-A8
gcagctcaaaagaacccgcgtggaagctcaaatggcccgcttggttgctggtgatgaggaaggaaggaggggtgccgtgcaccatttcgttccgagcaagaagcagatgtctcgttaacttaaaacagagtattcagattccggaatggttgatgggggagtggtacttcttttgtgtagttggggctggttatcctcccatggtgtaaaagccgccgaggaggaagtgcatagaatttgtctcttagcccgttttttattttatgcatggatggatggcccaaaagcttgtttctccccctctctctttcttgtagctttgcttgttcccgtttcccccctttctttctttt

SEQ ID NO: 13138 - DNA, 236 bp, Zea mays
  Clone ID: LIB3158-015-Q1-K1-A9
ctagaactagtcggtggatggcttttactagtcatcagcggagcttgttggtaggcacttgctggagtagttgcttcgaacttctttttacgtgttagatgaggtaaaaaaacaattttgtgttattgactctgctgtgagcgagtgaaccttgcgcattttcgttatctcaaatggatagatctgttttacgcttgttttgtgaactgtaatagttgttcgtttcggcaagtgtc

SEQ ID NO: 13139 - DNA, 312 bp, Zea mays
  unsure (1)..(312): unsure at all n locations; Clone ID: LIB3158-015-Q1-K1-B1
aacaagaccaagacccctggacctggtgctcagtctgctctcagggctcttgctcgttctgggatgaaaattggacgcattgaggatgttaccccggttcccactgacagcactcgcataaagggtggtaggaggggaaggaggctgtangcgtgtatccttgctatttgccatcactttgcactggcctctgggtagcgttgctgtttattagcttgccaaaaggagttttaattttgctcattttgctctatgtcgaggatcatttactgttagccgaatctatgatgtgcattgataatgttttgggtg

SEQ ID NO: 13140 - DNA, 381 bp, Zea mays
  Clone ID: LIB3158-015-Q1-K1-B10
cgactgtcgcgaggcaaggccatcgtccgccatgacgctctccctctccacctctttcctccccatccccgccgccgcgaggaccaccgcccgcaccctacgctccgtcgtcccctcccaggggatgcgctgctcgatgcgcaagaaggggttgcacccggagatctacgaggacgcgaaggtgtactgcaacggcgagctggtgctggtgacggggggcaccaagccggagtacacggtggacgtgtggtccggaaaccacccctactacgtcggcgacacctcggcgctcgtggtcatggacagccagatcgagaagttccgcaagaagtggggccacattaaggagtactggcccgaggaccagtggagggagatgca

SEQ ID NO: 13141 - DNA, 127 bp, Zea mays
  Clone ID: LIB3158-015-Q1-K1-B11
ccccgttccacttattcttgtcttggtgtgtactaggaaatctgaaaatgtaacaaggttctgaagacaccgaaaagaaatgtaattaaatccctctgtgaagttttcccattctcgcaggaacctc

SEQ ID NO: 13142 - DNA, 362 bp, Zea mays
  Clone ID: LIB3158-015-Q1-K1-B12
gaccagcttgcgatggcaatggagatgattgagaaggctggaaggggtgtattaatctatcttcgtggacatgaaggaaggggtattggtctgggccacaagcttcgtgcttataacttacaggatgatgggcgtgatactgtggaaactaatgaagaacttggtctttctgtggactcacaggaatacgggaatggcgcacagatattgcgggatctaggagtccgttcaattaatctgatgactaattacccctgcaaatatagtggtctcaaagggcttttgattgagcaattgctggcagggtgccctttgataagcccaatttcccattgagaacccgtaagtacccttggagactt

SEQ ID NO: 13143 - DNA, 343 bp, Zea mays
  Clone ID: LIB3158-015-Q1-K1-B2
cggctgtatgtgcatccaagggtgtttgtctagaaccctttactttatttttcatgggctgtctcgacttgagcatgtctctgttacttagagaaccgtcttgtatttttcatcattactgacatgtgatttctgttaacagtacatcatcagcattagctaaactaagcaaggttgcttctgggggaactggtaaaactccccagactgaaaagaaagaaacaccacaagaaagacttaagaggataatgagcaaacagcttaacaagcaaattaaaaaggacacggctgctgagattgccaagaaacgagaacaggaacgacaaaggcagggaaaacctgc

SEQ ID NO: 13144 - DNA, 344 bp, Zea mays
  Clone ID: LIB3158-015-Q1-K1-B3
tgaaggctctggtactgatattgttctgaatacgataattttcaactcattcgtcttctgtcaggtgttcaatgaaataagctctcgggagatggagaagatcaacgtgctcaagggcatgacaaggaactacgtgttcatggctgtcctcagcagcacggtgatcttccagttcatcatggtgcagtttctaggagagttcgccaacacgacgcccctgaccatacaccagtggctagccagcgtgctcctcggtctggccgggatgcccatcgctgccgccgtcaagctgatcccagtcggctcgtcatgataccattgaagattgctgctgcctgggatgg

SEQ ID NO: 13145 - DNA, 356 bp, Zea mays
  Clone ID: LIB3158-015-Q1-K1-B4
cggacgcgtgggccgggacgaataaggtgcttaggatcgcagagaagggggagaaaggcccagaaatgtggctagagttggagctgaagttagtcgccgatgtaaggattgtaggtgctccaaatgctgggaagagcactctcttgagcgttattagtgctgccaagccagctatagccaattatccttttaccacattgctaccgaaccttggcgtggtctcattagattttgatgctacaatggtagttgctgaccttcctggcttactggaaggcgctcatcgtggttatggtttgggtcatgagttcctaaggcatattgagcgatgctctgtattggtgcatgtcggtgat

SEQ ID NO: 13146 - DNA, 298 bp, Zea mays
  Clone ID: LIB3158-015-Q1-K1-B5
aacaagaccaagacccctggacctggtgctcagtctgctctcagggctcttgctcgttctgggatgaaaattggacgcattgaggatgttaccccggttcccactgacagcactcgcagaaagggtggtaggaggggaaggaggctgtaagcgtgtatccttgctatttgccatcactttgcactggcctctgggtagcgttgctgtttattagcttgccaaaaggagttttaattttgctcattttgctctatgtcgaggatcatttactgttagccgaatctatgatgtgcattga

SEQ ID NO: 13147 - DNA, 341 bp, Zea mays
  Clone ID: LIB3158-015-Q1-K1-B6
cccaggtctcgttcatgaggaatgtgtaaccaaaatgcgcctcatgtctttgctcgatctgagcagccgatgctctggtgaaatcccttattctgcaatcactgttgaactcatgatcaatgatgacgaggtggagcaatggattgtgaaagcaattgcatccaagatattggattgcaaggttgaccagcttaaccagactgtcattgtcagtcggcacacagagaggatctttgggatggaacattggcatgctctgcgcacaaagctcggagcttggaggggaaacatttgcagagctatcaacacaatacaagcttacaaagtcaccgaaaaggggg

SEQ ID NO: 13148 - DNA, 317 bp, Zea mays
  Clone ID: LIB3158-015-Q1-K1-B7
cccctatatgtgaaatttcggcttcgtgaaccttttcacaagccgatactaagttcagaaccatcaatcaatgtgcaaccactacaaccacacgaccagtttctcatatttgcatctgatggactttgggagcacttaaccaaccaagaagctgttgatattgttcacagtagcccccgcagtggctgtgctaggaggctgataagagcggcgctgcaagtggcagccaagaaaagggagatgaggtactcagacctcaagaagatcgaccgcggtgttcgccgccacttccacgacgacataacagtcatagtagt

SEQ ID NO: 13149 - DNA, 387 bp, Zea mays
  Clone ID: LIB3158-015-Q1-K1-B8
cggacgcgtgggggctctccgcaagatgagactggggttctcaaggctgtggaaaaggtgcacgccatgatagacagggaagtagccgatggcatccaccctgagaacatatttgtttgtggattcagtcaaggaggtgctctgacattagctagcattttgctttatctgaagaagttaggtggaggagcagtgttcagtgggtgggtgcctttcagttcatcagtcactgagaggatttcacctgaagcgaggaagacctcgtttctttggtcacatggaatggctgacaaagtagtattgtttgaagctggccaggctggtccaccgtttttgcaaagcgcgggtgttaactgtgaattcaagatctgggccattcgctttcgc

SEQ ID NO: 13150 - DNA, 354 bp, Zea mays
  Clone ID: LIB3158-015-Q1-K1-B9
caagaatgggatgagaaggaagaaggcaatgaagccgtccagcagtgggaggatgattgggatgacgatgatgtgaacgatgatttctcgctgcagctgaggaaagaactggagggaagcaacgcccagaagagctgaagtattatttctccagtttacaaatgatccttctatgccagctacttctggaaatcggaacctttatgtgatttgtgctgctgggagcaatcgaactctggagtaagaaagtaaccataccagtgatttctaagtatgaacggcaggaagttgacggacatcagtcggctatttaaaaaatatctcagttgtggttagaatatgccacagttctta

SEQ ID NO: 13151 - DNA, 79 bp, Zea mays
  Clone ID: LIB3158-015-Q1-K1-C1
caaatggcttactgttttggttcactgaataaatttgaaggcttgtatgtccaaaaaaattataaaaaaaaaaaagaaa

SEQ ID NO: 13152 - DNA, 388 bp, Zea mays
  Clone ID: LIB3158-015-Q1-K1-C10
tgaagacggtggagtagaagagagtcaagtttatgctgttgaggttgatgcagaggatgacggagtagaagaaagtcaggatgaagctgttgaggttgaggctgaggattcaactgatggtgctgtccttgtgaatggaaacaatagtgaggaacagtgggtgctgactcctgagcaatagtggatcaacgggacagcaactttgcaagtggttaagtttgtaaaggttgctgactgctttctagagtacgaaatccatttttctccagcagtattaagcatgggatgtgctctaggattggcttatccacatacgaagttggaccacaatttatcaaaacttcatcattgggctcgataggaaaatttgtgcttttctttttacata

SEQ ID NO: 13153 - DNA, 282 bp, Zea mays
  Clone ID: LIB3158-015-Q1-K1-C11
gcgcgcgaaccagctggcctcctcctcctccctcatggccgcggcttctcctcgcctctccctctcctggcgccggggaggaggtagcggcagcaacaagctcgactccactccagcaagagcaagcgaggagggagggaaggaggggttacttcgaggtggatctctcttcttctaagctttcctgcccttctctctccactcctttctctctcttgtctctcacacagcacatctgtgtgtctgcgttgctgctaccgctggcgctgccgtgccatgata

SEQ ID NO: 13154 - DNA, 405 bp, Zea mays
  Clone ID: LIB3158-015-Q1-K1-C12
ctagaagcaacaattaacagggaacagctgcaaactgtgcaacttaaagaagacattgctcaagcagagaccagaaatgcagagctgacaaaggaacttcaagctgtccgtggccaacttgcttctgagcaatcaagatgtttcaaacttgaggttgacgttgcggaacttcgacaaaagcttcagagtatggacgccctggaaaaggaggtcgaactgcttcggcgacagaaagctgcttcggagcaagcggcgcttgacgcaaagcagaggcaaggttcgggtggtatgtggggttggctcgctggaagcccgccaccatcacagtagttcgtacaggccgtggttcatatattttacttgtaacattacatatcatttgacatttgtctacatttttttttg

SEQ ID NO: 13155 - DNA, 375 bp, Zea mays
  Clone ID: LIB3158-015-Q1-K1-C2
gtacagtagcattgacttggtgacgcttgaggacatggtccttgaaatcgtgaggcaaatcgagaagctgatccgtgcaaaggagatgatggaagctgcagggaagccattctaaacaagatacacatacacaatagttctgctccggcatacctattttctggccagttaccagacctccgatgcttcgctgttcaagaaaccgattgcagttgcctacggctcaaagcacaagcgcgtgaaatctaaggaactgaatctggttgttccactcgaatatgcttatattgtattgcaagatcacttgccaattgatagtgcaaaaaatgcattttgtaagttggattctctagtattgactttaatccatatgta

SEQ ID NO: 13156 - DNA, 299 bp, Zea mays
  Clone ID: LIB3158-015-Q1-K1-C4
gattttcaggcagaggtgccagaatggtctggtccatcatccagcagcgatgtttactttgacgagccctgtgcaattgattctgcagaactaactacatttaatttgtgcaaaatgagtaatcaaagtcattcttccattggtaattggatccaatgccgtgagaccttgaatccaggagattctgacaagcaagttgtctgtggaaaatggagaagggcacccttatatgttgtacagtcagataattgggattgtttttggtgtcttctttgggatccagtccatgctgattgtgc

SEQ ID NO: 13157 - DNA, 321 bp, Zea mays
  Clone ID: LIB3158-015-Q1-K1-C5
cttcaggaggctcttccgggtgacaatgttggcttcaacgtgaagaacgttgctgtcaaggatctcaagcgtgggtttgtggcctccaactccaaggatgaccctgccaaggaggctgccagcttcacctcccaggtcatcatcatgaaccaccctgggcagattggcaacggctatgccccagtgctggactgccacacctcccacattgctgtcaagtttgctgagctcattaccaagatcgacaggcggtctggcaaggagcttgagaaggagccaaagttcctgaagaacggtgatgctggtatggtgaagatgata

SEQ ID NO: 13158 - DNA, 314 bp, Zea mays
  Clone ID: LIB3158-015-Q1-K1-C6
aaaagcctttgggaatgatattttgctggaaagtggagaaattaacagagctctattgggacaaatcgtattttctgacccatcaaaacgtcaacttctaaaccgtcttctggcaccacatatttcttatagcattgtctgggagatagcaaaactgtggatgaaaggctgcaaggttatcatccttgacatcccgctgctgtttgagacaaagatggatagatggacgaatccaatcattgttctctgggttgatccaaaagtccagattgagaggctcatttcaagagatggatgctctgaaggacaagctc

SEQ ID NO: 13159 - DNA, 385 bp, Zea mays
  Clone ID: LIB3158-015-Q1-K1-C7
gtcctggatctgttgcgcgagagcgcggcagcgcgcgagattcgcccccttctcttctcataggaagcaggaagcaagccgatcgctcgctgagcgccgccgccgatggccgtcgcggtgccgatgaagctctggagggtggagacccgcggcaaggccgccgccgcggggcccgacgaccccctgcgcgtcctggtgacggtgaccgtcctcgggagcgccggcccgttgcgcttcatcgtcctcgagggcgacacggtcgccgcgctcatccgcggcgcgcttcgctgctacgcccgcgagggccgcatgccgctgctcggcaccgacccgtccggcttcgtcctctccaccgtcaacggcggatccggcgcactcggagaag

SEQ ID NO: 13160 - DNA, 362 bp, Zea mays
  Clone ID: LIB3158-015-Q1-K1-C8
cacccgcctccccctcttctttcgccccctcctccatccatggtgcgaagaaagtgtaaccatccaagcactttgtcggaggagagggaaagagaggatcaatcaattcgtcctaaatttaaccctcctaaaaaccacttatattactacttttatttatataaatccgtccccatccaccagcccgccccgcctgatccgtcccagcgattgctatgagtttaggttattttaccacagatcttcctcttttttttgtatgtaaataaagtttgaggtccaagctcgtcatgtaaattcgggagcgagtgaaatcgggtacctaagaattaagaacaaaacgagtgtaatgggggcaaaaa

SEQ ID NO: 13161 - DNA, 324 bp, Zea mays
  Clone ID: LIB3158-015-Q1-K1-C9
ctcccctcgactgttgggtgtggtggatttcctccgctcccgccgaacggtcgatcttttgcatggcagcagcggcggctagctccaaggggcgggcgatcgctgggagcttcgtcagccgcgtcctggccggcaaggccgcctccccgaggagggccgtgcacgcctcgtcgtacgacaagaacccggaggagcaggtgcgcccggcgttcgtgccggacgatgtgatcggccgcggcgcggggagccccgacaagtactggagcccccaccccaagaccggcgtgttcggcccggcggcggtggaccccaaccagctgggcg

SEQ ID NO: 13162 - DNA, 206 bp, Zea mays
  Clone ID: LIB3158-015-Q1-K1-D1
cctacacgacggggaagggcttcatccagccgcgtgcgagcctgaccgccagttagagatgagccgcaggctcagtattccggtgaagcttgtgcatgaggcggcgggccacattgtcacgggcgatctcaagaccggcgaggtctaccgcggcttcattgtcgagtgcgaggaccactggaactggcagcttggaaacattaact

SEQ ID NO: 13163 - DNA, 393 bp, Zea mays
  unsure (1)..(393): unsure at all n locations; Clone ID: LIB3158-015-Q1-K1-D10
cggacgcgtgggattgcatattagtcaagatgcaatgcaactcttatttcatcgacttccagtgaaacattctgctagttgtagtttttgaaaggcaatgcagttgctgctttgttcttccctccagtgtgttttcagaactgttgattcatgtgaaactgtaatgattgccctccctgctgtgtcttggttgcagttgaaaccatatgtagctacattcccccttccaccaccttcacacatcaacttctgcttcaccttttttagcatcaatggatggccggttgtttttaatgcgatgatctgcagttatcgtggcngnntaaaaattaataatatttttattttatatattttttttttttttttatattttttattattttttttttt

SEQ ID NO: 13164 - DNA, 167 bp, Zea mays
  Clone ID: LIB3158-015-Q1-K1-D11
aaatttctcgcgggtatggggaatcctggtacttatgctagtagtatgtgagatgggtgtggtttaaattttgagcgtaagttgagttctgttaacttgttaagttcggtggaatgttttaaactatgtggatgtcagattttgttaatgtttgcgcagttgcccca

SEQ ID NO: 13165 - DNA, 308 bp, Zea mays
  Clone ID: LIB3158-015-Q1-K1-D12
gttacacatgggcagccgcctgtgttgtagatcgaaggctacctacgcttacgttccacgctttcgctctcgtgcatgggaacctatatctaattcattgggcgacgtaattcaacgtcactacccgtaaaaccacaacgtcacgactgttaatacccttgcatcacataactttatcgcctggtagcacattagcgtttaggcaggtagcgttctagcttacaagcacgtgcgcatcgtgcatggcaactgttacgcaccctgtatcgccactttaacccccgctggtgcggcgcattcaccccggg

SEQ ID NO: 13166 - DNA, 381 bp, Zea mays
  Clone ID: LIB3158-015-Q1-K1-D2
gcagcctgcgttctacgaagcgttcggcctgactgtgatcgagtccatgacgtgcggtctgccaacgatcgcgacctgccatggtggccctgctgagatcatcgtggacggggtatctggcctgcacattgacccttaccacagcgacaaggccgcggatatcctggtcaacttctttgacaaatgcaagggagatccgagctactgggacaagatctcacaaggcggcctgcagagaatctatgagaagtacacctggaagctctactccgagaggctgatgaccctgaccggcgtgtacgggttctggaagtacgtgagcaacctggagaggcgcgagacccgccgctacatcgagatgttctacgccctgaagtaccg

SEQ ID NO: 13167 - DNA, 311 bp, Zea mays
  Clone ID: LIB3158-015-Q1-K1-D3
ggggatccttctgctgctgtgctacattgtgatcggtgcatgcttctttgttacgaggcaacctgcaagtaacaacaatggcgctgggctgtcgctgccaactggtactttgagtgcacaagctgcatgattgttcaagggtcctgcctgagcctgaacaaatgagcattcaaggcagcaacgcagttgtgagtctgaaacaatgccgtgcaaaggttgatgctttcagaagcggtgaaatctcaaccggtggctcagtgctatgggagaaatgaaggctagctgctggtgcaataaaggtagcgaatttg

SEQ ID NO: 13168 - DNA, 384 bp, Zea mays
  Clone ID: LIB3158-015-Q1-K1-D4
gggcgtgctgcagtccgtggacgtgagcgccaagttcgtcaacggcaagccggcgcggatcgaggccaagtacgtcatgcgcacgccccgggactgggaccgcttcatgcgcttcatggagcggtactctcaagccaacggcctccagttcgtcaagaactgacgagccggctttgagatcgattgcctgcctgctgcgctacgttctgcttgcttgctagtgttcttttttttttctttcctttctcccctgtgctgcgcccctggtgttgtgattgtgacctgcttggtgcttgtgagtgatttttttttttgagagaaaagaaaggaatatggggaggttgtttttaaaaaaaaaaaaattattttaaattattaatttat

SEQ ID NO: 13169 - DNA, 332 bp, Zea mays
  Clone ID: LIB3158-015-Q1-K1-D5
gcgacggctacatcgacgacagcgaggtcgatggcctcatcgagttcgcgcagaagaacctcggcctcaagatcgtcgcctactgatctcacatggggcgcggcgcgcggcggtcggggggtgggacgcactagctcgccatgagctagctatagcgacaatgcaactcaccatcactctctccggctaaaataagagctgcttgatctatcatcgcttgtctgttaaaattgctttccatgtacttagtcaattcgagttcgggatcacgcactagctctctacgctgttggtgtgtgatttatgaaaagtgtgtatgatacccatgcgtg

SEQ ID NO: 13170 - DNA, 225 bp, Zea mays
  Clone ID: LIB3158-015-Q1-K1-D6
gtgagaatcgagcggcagattggcaggaggcagagaaggcaaagtatcttgcaagaaactaggtttaggatcatctgggctctgtggtaaagaactgcagaacgtacggaagctatgcgaaacaggaggttgcagatttattgtttctttgaccttaaacattatgcaggtttcattgggaggaggcaaagatccaagcttgggaaaatctccagaaagcgaaaa

SEQ ID NO: 13171 - DNA, 375 bp, Zea mays
  Clone ID: LIB3158-015-Q1-K1-D7
atcattgaccccaccaaggtggtgagatgctgcttggagcacgccgcgtcggtggccaagaccttcctgacatcagatgttgtggtcgtcgatatcaaggagccggaggctgcacctgtcgcaaacccgatggacaactctggctatggatactgatgagatgctatggccatgccccatgggacgaaggtgatcaccatattaattttttggtaggcgaggagtcgggtcgaggtagctttttagacgaccgaaaggcgaaaataagttgaggatctgcatcccaaatttgtgatgtaaactgagacaacagcagccaaatgaagcagagatatgctgaaagattctgtaactggttgcagctaatgttgaatg

SEQ ID NO: 13172 - DNA, 282 bp, Zea mays
  Clone ID: LIB3158-015-Q1-K1-D8
cggacgcgtgggtagcaaccggtccagcactttcacgctcagctccagcaatggctgcctccaccatggcgatctcctccacggcgatggccggcacccccatcaaggtgggctccttcggcgagggccgcatcaccatgcgcaagaccgtgggcaagcccaaggtggcggcgtccggcagcccctggtacggccccgaccgcgtcaagtacctcggccccttctccggcgagcccccgagctacctcaccggcgagttccccggcgactacggctgggaca

SEQ ID NO: 13173 - DNA, 225 bp, Zea mays
  Clone ID: LIB3158-015-Q1-K1-D9
gggcgatggcggcggctgatgtggagtaccgttgcttcgtcggcgggcttgcctgggccaccagcaacgagtcgctggagaatgccttcgcctcctacggcgagatcctcgactccaaggtcatcaccgaccgggagacggggaggtctcgcggcttcggcttcgttaccttctcctccgagaactccatgctcgacgctatcgagaacatgaacggcaaggagc

SEQ ID NO: 13174 - DNA, 131 bp, Zea mays
  Clone ID: LIB3158-015-Q1-K1-E10
aaaaaaaaaaaaaaaaaaaaaagggctgaaaaaaaaaaaaaaaacaagggggcgcacgcttgtatgccccagctttcctacgcgttcgtgcgacctaatttctattctatagcgcgacctaaacaaaattt

SEQ ID NO: 13175 - DNA, 314 bp, Zea mays
  Clone ID: LIB3158-015-Q1-K1-E11
cggacgcgtgggcgggcctgacgggaagcccattggtcctcctatgggaaatccatggatctacatgtaccctgagggcttgaaggatctccttatgatcatgaaaaacaaatacggaaacccacctatctacatcaccgagaacggaatcggggatgttgataccaaaaagacacctctacccatggaggctgccttaaatgactacaaaaagctagattacattcagcgccacatcgctactcttaaagaatcaatagacttgggatcaaatgtgcaaggctacttcgcttggtctctgctggacaactttg

SEQ ID NO: 13176 - DNA, 404 bp, Zea mays
  Clone ID: LIB3158-015-Q1-K1-E12
gttgaacgagcacccgcgtcgggagttcacgacggaggacgagacggacagcgacgacatgggcgacgagtacaccgacgacggcgaggaaggcgaagacgacggcaaaatgcagtacaagatacagttccagaagccgaacccgggcggcaccaacaccgcgccagcaccggcagcagcgacgacggctgcgccagcggtgccgacttcggctccgaccagcaccttcctcgccatggttcaataggggcgcgggcggcacccctctcaaaccgtacgtacgtatatgcgtccaaaccaaaaacctgcgcgcatcaccgtcaccttcttctttactttaccagtccaccaagcatgcaccatcagtccatcacactgttctcttgttcatcctgtaatccccc

SEQ ID NO: 13177 - DNA, 333 bp, Zea mays
  Clone ID: LIB3158-015-Q1-K1-E2
tggtgctcaacacgggccacgcgatgcccgtgctgggcttcgggaccggctcctccagcacgccggaggatctgccggcgaccatcctccacgccgtccgccttggctaccgccacatcgacacggcctccatgtacggcacggagggggcggtcggagccgccgtctccgacgccgtcgctgcgggggccgtcacctcccgcgctgacctcttcatcacctccaagctcgtgatgaaggacgcgcatccggaccgcgtgctccccgcgatccgggagtcgctggcccgcctaggcctggactacctcgacctcttcctcgtccactggcccg

SEQ ID NO: 13178 - DNA, 228 bp, Zea mays
  Clone ID: LIB3158-015-Q1-K1-E3
aaaaaaaaaaaaagaagatgaacaaaaagtttcgttagacatagcaaaattaaaacaaggcaaactgatagttacaacaatggcgctgggctgtcgctgccaactggtactttgagtgcacaagctgcgtgattgttcaagggtgctgcctgagcctgaacaaatgagcatacaaggcagcatcgcatttgtgagtctgaaacaatgccgtgcacaggttgttgcttt

SEQ ID NO: 13179 - DNA, 323 bp, Zea mays
  unsure (1)..(323): unsure at all n locations; Clone ID: LIB3158-015-Q1-K1-E4
gcttgttggaacttgctctctgctgctaggagatccaacgggggagtagtgacgtaaacagggttctcgcgtaagatggcaacatctctgttaacctagcctctcacggcactgtgcgggggtatttataggtatctaagcgccctgcgtcctgtgttaaggacgcatgtgccctcagacacctaagttatcctcagaatattcccataaagcagggttacagactgttnaaaaaaaaaaaaaaaaaaaaaaaaaaaaaaaaaaaaaaaaaaaaaaataaaaaaaaaaatataaaaaaaaaatttaaaaaaaaaaaataaaat

SEQ ID NO: 13180 - DNA, 359 bp, Zea mays
  Clone ID: LIB3158-015-Q1-K1-E8
cggacgcgtgggtgccgatgctccaagcagaagaggatgaaagatttgtcaaagagtggaagaagtatcttgaggaggaggcgaggatcatgaaagatgttccagggtggaaggtcggcgagagcgtgtacaactctgggaaatggatgcccccggctactggtgagctccgccctgaggtttggtaagggcctgctgcaagcactgaatgccatcatgtcacgggggcacggataaggcttcatttttcattaaggatcagctgtttaaagacctgtatttgttgtacttgaaatctggctggttaataattggacatgtaaagccgacgtttacattgatgtagcgtgttcctgtct

SEQ ID NO: 13181 - DNA, 379 bp, Zea mays
  Clone ID: LIB3158-015-Q1-K1-E9
caagtttgaagccaggagaagttgtctgccccaaatcacaaggaaagttgtgtgaagaacaaacttaatcgtgaaaaagtacagtatcaacaatgcacaggctctcaatccaacattgcacaggcttttatattgaagcaagaaaaatataaggatgttgaacctagtgtaattgatcttttcaaggagatgcattgcagcaagaagaaaggttttagtgaaaatgttcaaaaagctattgtaattgcttgttttgatttcatgtttgtattcacaacttgcaacttgtggtatactatactgatgaataacctttaaattttaaattagggtgacatggaagaaatggtagcagtactagttcaggatggacaacaac

SEQ ID NO: 13182 - DNA, 231 bp, Zea mays
  unsure (1)..(231): unsure at all n locations; Clone ID: LIB3158-015-Q1-K1-F1
ccgacagtcgccaccatacttccctgtccgggacctcctgggctcgccctctggaactctcaggggaatataattaaatacccanntctctatctatatacccgtatcatccttggtcgtcaagtcaagtgcaacccgnngtgtatgtgatgtatctaccgtattgggatttggtatccccatccatgggccgtattgccactattatatantatacacgtattaccagtt

SEQ ID NO: 13183 - DNA, 369 bp, Zea mays
  Clone ID: LIB3158-015-Q1-K1-F10
gcggcggcgatggcatggcgggcgagcctgtctcggagcctaaaggagatccgcgtcctcttctgtcagtcctccccggccagcgccgctgcccgtgagttcgtgaagaagaactatggtgacatcaaggcccgcaacccctccctccccttccttgtccgcgagtgctccggtgtcccgccccagctctgggcgcgctacgatatgggtgtggagagatgcgtgaacttggatggcctgacggaagcacagattgataaaaagctggaggagcttgccaaggccggcgagtctcttaaaaccaaatagtttttgaactctatcctgccatgtttaactttcccaaataaatgatgccatatgggtgag

SEQ ID NO: 13184 - DNA, 393 bp, Zea mays
  Clone ID: LIB3158-015-Q1-K1-F11
aactgattttccaattgacttggaacagtatgaccgaagagagcagcttaagaaaagtggtctgggaaaggtcattatgtttttgtccaaatctgacgaggagactactgcaaataggaaattggctaaggagctggttgataaatggagtcgaccaatattcaacaagagcacgagatttgaggacatgaagagatatgatgatgaaagagcaccttacaggcggccacaaatgaagaaaccttcatcgagtagctctggaatggaatccagagatgatgatcttgatgctgacttttcacaacgcaagtctgggcaaagtagttcaaggcagcacgcttctaagccggaaagcctccctttggactttgtcattcgtccacagtccaaaat

SEQ ID NO: 13185 - DNA, 372 bp, Zea mays
  Clone ID: LIB3158-015-Q1-K1-F12
cagcaatgttcagaatgactacaatcaaacaggattagtgcctttggagggatgttctgccagtgaggcttcacagcttctcagtgatcgctggactgctgcaatcaacatgtacaatgaccaaacaattgacccctcagagaaaccggtaatgtattctggatctagcagctcatcatggggtcacctgaagcttcctcatcagatgaacttcctcgaggagttgcgccgtgcagtggacgctcatacagaatttgcgtcgcctgtcgtcacctggaactaatcgaaatcagcatctgcatcattatgcgttatgactaatttatggaaagcaagctgttcgccaggtctatgtatgatgtattccataca

SEQ ID NO: 13186 - DNA, 381 bp, Zea mays
  Clone ID: LIB3158-015-Q1-K1-F2
atcgggcttcgccggtatggcgatccgcaaggggtcttcgtacgccgtcgcggcacttctcgcgctcgcctctgtcgccgccgtcgcaggggaggtcttcttccaggagaagttcgaagatggctgggaaagtctgcgggtcaagtccgagtggaagaaggatgagaacatggctggtgaatggaaccacacttcgggaaaatggaatggagatgccgaggacaaaggtattcaaacctgcgaggattacaggttctatgccatttcagccgaataccctgagttcagcaacaaggataagaccctggtgctgcagttctctgtgaagcacgagcagaagcttgactgccgtggtggctacgtcaagttgcttggtggtga

SEQ ID NO: 13187 - DNA, 309 bp, Zea mays
  Clone ID: LIB3158-015-Q1-K1-F3
ctcaagcagcagctcaaccaggacgacgaccctttccagctgcctggcgtcgccatggacaactgatacaccgtaccgtcgtctctgtttgcgtttctgtcaagtgtgcatggaataatactgtaactgtgtttcctgccgggcaatgcactgtgatatgatgcccaacgaataaatgtcgcttttatttttattcgacttcccccctgtaccgtgtggaaataaacctattataagcatcgtgttgaaactcaaaaaaaaaaaaaaaaaaaaaaaaataaattaaaaaaaattaaaaaatatatattt

SEQ ID NO: 13188 - DNA, 247 bp, Zea mays
  Clone ID: LIB3158-015-Q1-K1-F4
ctcaagcagcagctcaaccaggacgacgaccctttccagctgcctggcgtcgccatggacaactgatacaccgtaccgtcgtctctgtttgcgtttctgtcaagtgtgcatggaataatactgtaactgtgtttcctgccgggcaatgcactgtgatatgatgcccaacgaataaatgtcgcttttatttttattcgacttcccccctgtaccgtgtggaaataaacctattataagcatcgtgttg

SEQ ID NO: 13189 - DNA, 369 bp, Zea mays
  Clone ID: LIB3158-015-Q1-K1-F5
ctttgagaaacctttcctgtacctcgcaaggaagctggctggtgatccgaaccttcactttgttgaagctgttgctcttaagcctccggaagttaccatcgacatggctatgcagcagcagcatgaagctgagcttgctgcagcagctgcacaacctcttcctgatgacgatgatgatctgattgagtagaaaggatcatgagtcttgaacttgagcaggagttgtgccttgcgtgttttaagttgttctagggtgaactcttgagttctcattgtctggatcatctttttctccttggatgtgttgcatcttttgagtgtggaaatggatggtactcctcgccatgaatttgctggctactttataca

SEQ ID NO: 13190 - DNA, 303 bp, Zea mays
  Clone ID: LIB3158-015-Q1-K1-F6
ggcggaggacgtgctctaccccgaacgcgttgcgatggagacctcggtcaccgcgtaaaacccctgaatgcctccggtgcaccgtcagccgaactttctcgacatctccaggaccgcatcaacgatcacatgtcactcgctccccgagccagggccggtgatgatctcgcgctggaactgaatccaccagcaatggccgggccgaggatcgatttccgacagcaggaagggtgcagcatgtaaagggggaacagatgagatcatgtttgggttggtcccccgttgtatatgtagttatgtatc

SEQ ID NO: 13191 - DNA, 350 bp, Zea mays
  Clone ID: LIB3158-015-Q1-K1-F7
gccaccaccgctctctgctgctctgttcgttctcccgccggggcagaggagggcggggaggcccgttgagcgagcctctgtcggtatggggatctgcgcctcgtccaagcgcgtgcggcatgaggagcgggactccgacgagaacgtggtgtacgtgatggacgagcaaggcggcgggggagaaggcgaggactgccgtggcgctcgcacggcggcatcccgcaaggtggcctccctcttctcgcagaagggcaagaaggggcccaaccaggacgccgtcatactctgccagggattcggcatggaggacggcgtgttctgcggcgtgttcgacgggcacgggcggtgcg

SEQ ID NO: 13192 - DNA, 362 bp, Zea mays
  Clone ID: LIB3158-015-Q1-K1-F8
agggagctcaacaccctcaagggccacgtggagtcggtggtcaagctcaagggcctggacatcgacaccatccagcagaactacacggtgtgagagcccctctgctgcgatgtcgacgacaacacctttgctgcccgacgggagccatctgattacagataaaaattttcctagctgtaaagcgctataccaccagatactgccatatgatggtatggttgggtacccgtctttctagggagtttcttttctctctctcttttttcttattgttatgtttttcaatagtggagtgtgcgcgtgttgtaatcgtttttacctgcgttttcctctaactagccggtgatctcgcgggaagcgag

SEQ ID NO: 13193 - DNA, 252 bp, Zea mays
  Clone ID: LIB3158-015-Q1-K1-F9
gttggtttgacctgttggcagtcagctttagacgaagatggccaatctcctgaaacatatgccaagttgaggaatcataattcatataatgagcttgtagcacaaaagctggtggacatgaagaacagccaggttactataacggtcaatggcgatgaaattcatatggatcagttagggaatgttgatgaccgtaaaaaatctggggttcaggcattgcaaataagatcttgctcccagtgtgccattttg

SEQ ID NO: 13194 - DNA, 274 bp, Zea mays
  unsure (1)..(274): unsure at all n locations; Clone ID: LIB3158-015-Q1-K1-G1
gatcaaattcatgttggcatggtgcactatacaaataccaattattctgcagttgcactacttgtccaaattaaccaaactttgatcggatacatgacaagcacacacgcacgcacacggntgtctgtagaatacatcctcgacgaccgctcagaagaagttggggtcgtatccgttgctggaggtggcgaggatgtaataagcgacgatgtggccgagcgagccccatgcgaggacgtcgacgaggttgaagcccacggggtcgttggacttg

SEQ ID NO: 13195 - DNA, 374 bp, Zea mays
  Clone ID: LIB3158-015-Q1-K1-G3
ctaaccttgtggaagtacccatcaatggtaaagatggctgaactcagtggccatacctctcgtgtccttttcatggctcagagccctgatggttgcacagtagcatcagccgctgcggatgagacccttcgcttctggaacgtatttggagaccctgaagtggccaagcctgcagccaaggcttcccacactgggatgttcaacagcttcaaccatattcgataggaacaagtcatgagaacgatcccttctgttggaaatggccgtgcatcatatgtgaggtctattcctattgatgagatctatccacattgagtaagcacacaacatcagcgagcattgccatcatatgcatcattcagaaatccaagatc

SEQ ID NO: 13196 - DNA, 332 bp, Zea mays
  Clone ID: LIB3158-015-Q1-K1-G4
ctaaccttgtggaagtacccatcaatggttaagattgctgaactcagtggccatacctctcgagggcttttcatggctcagagccctgatggttgcacagtatcatcagccgctgcggatgagaccctttgtttctggaacgttatttggagaccctgaagtggccaagcctgcatccaaggctttccacactgggatgttcaacagcttcaaccatattctattggaacatgtcacgatatcgatcccttcttttggaaatggccgtgcatcatatgtgaggtctattcctattgatgagatcttatcacattgaggtagctcatcatcat

SEQ ID NO: 13197 - DNA, 305 bp, Zea mays
  Clone ID: LIB3158-015-Q1-K1-G5
aaaagagaatcctccgagcaaagatgaagacctcattgggattgatgcgaagaagaaggataaaaggaagggatctaaacaagaggtaaagggccttgaagagcttgaagtccagagtgtttctacaggtatcaccacttcgaaccctggttaacttgaagtgccagacagtaaggaaaagaaaaaggtcaaggaagctaagacgaagaaatctgaagagccgtaccatgccaataacagtagcttaaagaacaaagaagttcaatcttttgtctatgataccagcacgaatgacaagaaagaag

SEQ ID NO: 13198 - DNA, 224 bp, Zea mays
  Clone ID: LIB3158-015-Q1-K1-G7
cggacgcgtgggtcaacaactatggcagcgagatcagcaagtgccagttctacctagacatgctgaacgagtgccgccgtggtggtgtgtctgcctaagctgcctctgggattattcatggattttctttcggtgatgttatctcattaataagataccgggaaacttttgtctccacagcttgaagctaaacttcctgggattaatacattttgttatccctt

SEQ ID NO: 13199 - DNA, 174 bp, Zea mays
  Clone ID: LIB3158-015-Q1-K1-G8
gtacatgtagatagtagaatgagaataatttctgttatttttaacttatataattttgagagagagagaaatgcaggcgttgttttcagactgcttttaaatcatcaatctgttggtttggccgattgagcggaagctcagaaagatgaatttacaaatcatgtttcgtttacc

SEQ ID NO: 13200 - DNA, 352 bp, Zea mays
  Clone ID: LIB3158-015-Q1-K1-G9
gaacataacagacagacggtgccgaggtaaaataacatggtacctggtatctaagttatgatatatcgtttatacttattcatcaggtagttgagcaaaatatggaaaatgggagaacacagtatatcaaccacaatgaaagacagattcagcgataaaggctctcagatctcaagttctcagcaatctcagtttcccagcggtcaccattctcgagcaatttctccttgtcgtacagtagttcctcgtgtgtctcagtagcaaactcaaagttaggcccctcaacaatagcatcgactgggcaaggcctttggcagaacccacagtaaatgcaattggtcatgtcaatatc

SEQ ID NO: 13201 - DNA, 113 bp, Zea mays
  Clone ID: LIB3158-015-Q1-K1-H1
cgtgccataaccaaggtacgtataagttttttttcaagggaaacaaggagggagtgcaatgcacccgtggccatactggatgttattaacaaaatgaagctatttacagaatc

SEQ ID NO: 13202 - DNA, 397 bp, Zea mays
  Clone ID: LIB3158-015-Q1-K1-H11
caaggatgagtacgatgagtctggccctgctatcgtccaccgaaaaatgcttctgagctagctatctggcacgcctttcatagcgggtcaagctggtgagatctgcgttgttgagttgagtgtctctatggagtatcacatactttctgcatgaggggggaagagtatacccaactaagcgcatgcctttcggatgccctgcttcgtgattcagatgctgctttctttcaagggatatgtcgatgtagtgtgcgagcaatgtatttggtttggctacagctgttctgtcgtctgtgcgtaaaacattaactatgtatctatccatatcttgcatatttgaatgtatgggtcgtttctcatatggggtcaagttaaaattcttatgttctcttattaa

SEQ ID NO: 13203 - DNA, 383 bp, Zea mays
  Clone ID: LIB3158-015-Q1-K1-H12
gctttggaatcacatggattccaatagctggagttcttttccccctcatgatcatgcttctggttccagtcaggcagtacatcctccccaagctcttcaaaggtgcgcatctaactgacctagatgcagctgaatatgaggaatcgccggctataccattcagccttgctgcgcaagacatcgatgttgcattcggaaacacccagagtgcagaaatcctagacaacatggtcacaagaagccggggtgagatcaaacgcatcaacagcccaaagatcaccagctcaggtggcacgcctgtggcagaactgaaaggcattcgcagcccatccatttctgaaaaagcatacagccctcgggtcattgagctctggcatgagcgc

SEQ ID NO: 13204 - DNA, 328 bp, Zea mays
  Clone ID: LIB3158-015-Q1-K1-H2
actcccaagccagtaccgagtcctacgagcagtcgcacgcaagtgtcaagagacgaaacggtcgacatggctcgcacgcaatctgccgtagcggtcgccgtggtggccgcggtgctgctgctggcagcggcggcgacgacctcggaggccgccatcacctgcgggcaggtgagctccgccatcgcgccctgcctctcctacgcccgcggcacggggtccgccccctccgcgtcctgctgtagcggcgtcaggaacctcaagagcgccgtcagcaccgtcgtcgacaggcgcgccgtctgcaactgcctcaagaacgccgccaggggcg

SEQ ID NO: 13205 - DNA, 325 bp, Zea mays
  unsure (1)..(325): unsure at all n locations; Clone ID: LIB3158-015-Q1-K1-H3
gaagaaactgcagcttttattagtatagtacgtactagctgtagctgtagcgagtacgaaaaggtagcgaaaccctgctccttggagggagtacatctgatatataggaggagcacaagaaagcaggccatccagcccacacacggcggcgacggcgaccacaggccgctcttctcccgttggtcggacccaaaacgatccagcgtcacatcacatcacatggcacagcgacccgcaccgagaagagacaagacctcgctcgcgctctcccaagaacgtntccggcgtcacagagcgcgggcgcacgcgcgcgtggcttaacacg

SEQ ID NO: 13206 - DNA, 217 bp, Zea mays
  unsure (1)..(217): unsure at all n locations; Clone ID: LIB3158-015-Q1-K1-H4
caaaatctacaaagaaacctaaccaaggctcacttgtgttagtgtacttggatggaggaggaaggccattggagggacctgcaggtggtcaaaggtgtcattagtaggaaattttgtacggtaatcctgctgtaattaaagttataacacttgtcacaaattttgtacggtggtgaacggtaggaaatctatactacttacttattaagaaggtnaa

SEQ ID NO: 13207 - DNA, 285 bp, Zea mays
  Clone ID: LIB3158-015-Q1-K1-H5
agatgatgccatgccctctggcgacaatccccagaatggcttcaactttgggaaccagccctctgttccatcaggtggattcaacttcggctgaagatgcccatttggaatggcggctgtgccattgtgccttggcctagtggttggggctagtcagagttggggtagtggcgtcgtcctccaaaaccttggttcggtcccattggtctggtctcaggtgtttgtcatgtcagtcccagtcagcagggtcagtccttgtgctgcatcaccagtggtgctgcatgg

SEQ ID NO: 13208 - DNA, 85 bp, Zea mays
  unsure (1)..(85): unsure at all n locations; Clone ID: LIB3158-015-Q1-K1-H6
tgacccttacgccttcgctcgcgccgncgtcgncgacgccgctacgccccgcacctngcttcatttcgtgtcggcaagatgacga

SEQ ID NO: 13209 - DNA, 271 bp, Zea mays
  Clone ID: LIB3158-015-Q1-K1-H7
ggctccggcagctggccgccgaggggcaagcgtggctgggcgtcgcccggagccacgaggccgtcgccggggggctccgcgccacgctggaccagctgctgcagcagcagcagcccggcgccggcgttggcggcggcgaagcggaagacgcgcggtcctgcttgttcgagacctccccgccgggccccgtcgccgacgactgcgacgccgcgttccggggctcctcgccgccgtcgtgcaagtcctgcggaggcggcgacgcgttcgtgct

SEQ ID NO: 13210 - DNA, 132 bp, Zea mays
  Clone ID: LIB3158-015-Q1-K1-H8
tattcgctcatcatcgtcgtgtgtaaattaaataaataaagctcttgtgccctttttttttttttttataatatgggcacaagagctttatttatttaatttacacacgacgatgatgagcgaatttggacg

SEQ ID NO: 13211 - DNA, 302 bp, Zea mays
  Clone ID: LIB3158-015-Q1-K1-H9
ggcggaggtggaggtggttcacggggtcctcgcactctatctgacatccaatccaatgaccacagttctctccctgcttgtggatcctgctgtggctaataagcgtgcaaccgttccgcctgatgactacgtataacaaatgaatacacatgcttctgtatgttctgaagaacatcgtagctattgatatgtattttactgtcagacgattgtatcataatcgatatgtcgtttattaacagcctatttacctgtagcttgactctggcatgattcgcatggtacattcatggttcatcttt

SEQ ID NO: 13212 - DNA, 406 bp, Zea mays
  Clone ID: LIB3158-016-Q1-K1-A1
acaccactccgcgctagctgaggacgggacagcggcgcagaggtgcgacggacgacgacgacgacgcaggcgccacacatggcatccgagctctccgccgccgtgccccggttccacggcctccggggctacgccgcgcccaggtccgcggtggcagcgctgccgtccgtgagggtgggcaggaagaggtcgtcgtcgcagggcatccgctgcgactacatcggctccgccaccaacctgatcatggtgacgacgacgacgctgatgctgttcgcggggcggttcgggctggcgccgtccgcgaaccggaaggcgacggcggagctgaagctggaggcgcgcgactccggcctgcagacgggtgaccccgtcgggatcaccctcgccgacacgttggcctgcggcg

SEQ ID NO: 13213 - DNA, 387 bp, Zea mays
  Clone ID: LIB3158-016-Q1-K1-A11
tcgacgccacgcgtgcggattgctaccctgtatggctggagggctgaagacgattcctcatgctcatcagattccagtgtaagtgaatgcgagggccaatttatgaggatgagccgctgcgctacaatcaccgcaccggaaatgccacctgcaagcacgggtctcacagttatagctactcaaattgcatcacctttggcaccacagccgtctcaatctcaaccttgatagccagcaaccgcagggcaagccaccagagtcagcagcgttgcagtaactgagacatccacaaccagctgaattgaggtctgcatggggggcaaatgcaagaagtcaggcgcgcttgctctcctgcaggagttcgagaaggctgtgggcaccggtggc

SEQ ID NO: 13214 - DNA, 417 bp, Zea mays
  Clone ID: LIB3158-016-Q1-K1-A2
ggcaggcaatcctgttctccttgatattaatcctcggcgctacgaaatattcttctgcttcaactctatctcgttcatggcatctattgtcgtagtcatgttcctgttgaacaaatctgcccggaagaaggccgtgccacttgaagtactgcacttgatcatgatactggacctgctggccctcatgactgcttttgctgctggaagctgcagaaaattcaggacttcagtctatgtgtatggtctagtgctcggtgtcgtggtataccttgtgatcgcagttcttttgtcaagtggcattgcaaaatgtctgagacccatggatagaaatagggtttcctctcagagaagtcctattcgcgctcctacagcaagcacaaggatacttggagaccatgcttgatggttccattcctt

SEQ ID NO: 13215 - DNA, 239 bp, Zea mays
  Clone ID: LIB3158-016-Q1-K1-A3
gtcggggtggcgatggcgtccgggattaaggccgccgtcgacccgaacatgcactatgggggctcgcgcagccacgacagttatgttctggctggcaagtacgactacgcgatcgaggtggttggggagccgctcctacacgcagacgttctgcgacaacctgaacctagcgatcccggggcccgtaccgagcgtgatccagtcggtgtacggagtcatcaattgcgtcgtgctcctta

SEQ ID NO: 13216 - DNA, 416 bp, Zea mays
  Clone ID: LIB3158-016-Q1-K1-A4
cggcagcatatctggctacgtgagcggctcaccaaggcacgccggcgcggggcccatgcttttgcagaacaatttccaccactaccagcaccagtacccgacggcgcccgtgcccgtgcctgtgcccgtgccgcaccacggtgggcggtacgacgcgcgcgggtacgtccgggtaggcaactacctggcgccgatggtgcccgctgccaggccgctctcgaggggaggaccggcgccgcacagcgacatggtgacgccgaataagtctgctattgtgtgggactgacccggccggtcgtacgccggaggggcctcttgtaatgaattttttgcaccagtaattcatcatacgatgggcagtgagttgagtgtttgagactgagatgtgtaaatagactgtcggatggatggatgga

SEQ ID NO: 13217 - DNA, 344 bp, Zea mays
  Clone ID: LIB3158-016-Q1-K1-A5
cgacgatcctctccgggatcgaggccaccgtggaccccagcacgcaggtggtgtactcggagagcccggacagcggcgtgctggccgacaagtacgactacgcgatcgtggtggtcggggagccgccatacgcggagacgttcggcgacaacctgaacctgacgatcccggcgcccgggccgagcgtgatccagtcggtgtgcggggccgccaagtgcgtggtggtcctcatctccggcaggccgctggtggtggagccgtacctgggcgacatggacgcgctggtggcggcgtggctgccagggtcggaggggcagggcgtggcggacgtgctgttcggcgac

SEQ ID NO: 13218 - DNA, 275 bp, Zea mays
  Clone ID: LIB3158-016-Q1-K1-A7
cggacgcgtgggcggacacctgggccgacgtgtgccttgatgagaaggttgctgatttccactggcgcaagcgtggtgcccagctcaccaagctcacctagtctaacgccgactacatcaagccgccaatcgagggtacctacaagcctgaccactaccggtactaggcagcccgcacaccgatcgcaactcactcgggccgctgtgtgctatgaagctcgctacactggcctgtcagctatcttttgcatgcatatgcattatcatatacacat

SEQ ID NO: 13219 - DNA, 395 bp, Zea mays
  Clone ID: LIB3158-016-Q1-K1-A8
gggtagcaagaacatgggggacaactgcacctggattaccttatgtcgaggaggcaattaccaatgctggtgactggttggttggtggggacttggaggttatagaaccaatcaagtacaacgatggtctagatcagtatcgcctgtctccagcacagctgcgtgaagagtttgccaggcggaatgctgatgcagtattcgcctttcagcttcgcaatcctgtacacaatgggcatgctcttcttatgaccgacacacgcaaacgtctccttgatatgggttataaaaaccctgatcttctgctccatccactgggaggattcacaaaagcagatgatgtgcctcttaattggagaatgaagcaacatgagaaggttcttgaggaaggtgttctc

SEQ ID NO: 13220 - DNA, 267 bp, Zea mays
  unsure (1)..(267): unsure at all n locations; Clone ID: LIB3158-016-Q1-K1-A9
aatggctacactgaatggctgcagggatgaagacgattcctcatgctcatcagagtcgagtgaaagtgaatgcgagggccaagttatgaggatgagccgctgcgctacaatcaccgcaccggaaatgccacctccaagcacgggtcttccaatcatagttcctcaaattccagcgcctttggcaccacagncgtntnaatctcaacctttagagccgagcaccgcanngcaagccaccagagtcagcagcgttgctgtaactgagac

SEQ ID NO: 13221 - DNA, 73 bp, Zea mays
  Clone ID: LIB3158-016-Q1-K1-B11
gcgtaatgcctggcgcgcgtatataaaccgtacaattcatcgtgactctcttcaattgttactgatgcttttc

SEQ ID NO: 13222 - DNA, 371 bp, Zea mays
  Clone ID: LIB3158-016-Q1-K1-B3
gcgaccgcgagcacggtggcgtcttgtacacgcaagttaactttgtggccgcaggcgtgcgcgtacacgacgttcgcgacgacggtggcggcggcgcaggcgtgcgtggtcgcgctggacggcgcgcacgcgctgcagtggaccaagctctgcaacatctacacgcgcttctgcgagcaggtcgccggcagcctcgtgctcgggatgctggccgccgtcggcaccgccgtcctctcggccgcctgcgcgcgcaacgtattccgccactacgcgtcgttggagacctacgccgcgcactaggctcgcggcccaaggcggcgtcagctgggccgggtgcgccactcctctaaaacactgggccgtaacgaatt

SEQ ID NO: 13223 - DNA, 223 bp, Zea mays
  Clone ID: LIB3158-016-Q1-K1-B4
ctccggccggcgctcaaagacatcgtctggtcggcctacccccagcccgccgacgtgtgacgcccgagctggcgcctgcccgctcattgtgtctggatacgagtggtgccatagtttagtcagtgtcactctcattcccatagtgattgcgtcactgttttcgatctgataatgatgtgagatctactgagtgtggggggaagtcaagaatatcaattttacc

SEQ ID NO: 13224 - DNA, 222 bp, Zea mays
  Clone ID: LIB3158-016-Q1-K1-B5
gtctcagaagagctgtttatgactccagatgtagattatgattatcgagaaacgttttgtacttagaacccttgattcacttattagaagtatgccacaaagacctagcagagtttgctattagccccagtttcatacttcatatccaaattggaatcaggaacgcatagaagaagcctgaagttcagaaatgaaatttgttatggttgtgtacagttttgt

SEQ ID NO: 13225 - DNA, 305 bp, Zea mays
  unsure (1)..(305): unsure at all n locations; Clone ID: LIB3158-016-Q1-K1-B6
cggacgcgtgggctattattgtagtgccctcgcctgaagaggatcaaatctattatttcattgttaaccagacaacgcatgaggggacatgatcgcacctacacacaaagggccttgaaaccacgtaccacccactaggcgcacccctgatggtccggcgccgncgcggacgacttcatacatacacacacgtccactaacatctcacacatagacacacacgacacacgatctggactcacgcgcgccataccagacaacttatattttggagcgggaaccacgtatccagctcgtatctagca

SEQ ID NO: 13226 - DNA, 404 bp, Zea mays
  Clone ID: LIB3158-016-Q1-K1-B7
ggtgagccaccggaagcggagacgtgagcactcgaccaaccccgtcgatccggctgcggcgcggcgtgctagatcgctaccgaccatggtggtggaggagatcgccgagggggtgaagaacctaaccgtcaccggagatgcggcggcttcaggcggagaggggcagaggaggggcggcggcggcagcagcaaccgcatccaggtgtccaacaccaagaaacccctcttcttctacgtcaacctcgccaagaggtatatgcaacagcacggcgatgtagagctatccgctcttgggatggccatagcaacagttgtgaccgtggcagaaattctgaagaacaatggatttgctgttgaaaagaaaattaggacctctactgttgaaataaacgacgaatcaagag

SEQ ID NO: 13227 - DNA, 355 bp, Zea mays
  Clone ID: LIB3158-016-Q1-K1-B8
gcacacttgaggaagcttattcaccattcattgtcaacactaccagcggcttgggggcaagccgcatttcaagcggtggggattgtcagcatactgtcatgtggggcctcgacagattggcaatgggtcacctccagctacaaaagagggagctgttcaggaaagcacgcatcgaagaatcattttgagaacctagactctatctttcaactactgctcatcttcttccttccttctctcatgtactcggattctcttccttctagaacacgacagctattgtgcttctccaatctacttctcttgctgctacccttcctaaactcctttctgattgtaccatattatatgctta

SEQ ID NO: 13228 - DNA, 175 bp, Zea mays
  Clone ID: LIB3158-016-Q1-K1-B9
ggaccatgcatggtgctctggtcgatgccgtacgtgtgtccctgatacaatactattagtactgatgctagtcatcatatatatcgagctcgccactgcgaagtctgggagataatgcatgtatgcttgacggcgagatctgaggaaaaataatactatatatgcatgtttcgag

SEQ ID NO: 13229 - DNA, 415 bp, Zea mays
  Clone ID: LIB3158-016-Q1-K1-C1
aggaaactcaccagcccaccacagacccgagcggaagaagccatgtccgggcgcggtaagggtggcaaggggctcggcaagggcggcgcgaagcgtcaccggaaggtgctgcgcgacaacatccagggcatcaccaagccggcgatccggcggctggcgaggaggggcggcgtcaagcgcatctcggggctcatctacgaggagacccgcggcgtgctcaagatcttcctcgagaacgtcatccgcgacgccgtcacctacactgagcacgcccgccgcaagaccgtcaccgccatggacgtcgtctacgcgctcaagcgccagggccgcaccctctacggcttcggcggctaggctgatgggctcctcgcgatgttctccccttctgcagatgcgacgttttctggccgtgccc

SEQ ID NO: 13230 - DNA, 249 bp, Zea mays
  unsure (1)..(249): unsure at all n locations; Clone ID: LIB3158-016-Q1-K1-C12
cccacgcgtgctaacacgtcagaaaggacctctgaatgggacctcaccaattctcattgatgagtattttacatcatccttagccactttaacatttttttcccttaccctaccttctacttatcatanctttatattttttattctgtcttatcaaccttgcttgttctaacctttgcttttacagagtttttttttttgtttttattatgctaccaaaattctacttccatagatccttttgatgac

SEQ ID NO: 13231 - DNA, 326 bp, Zea mays
  unsure (1)..(326): unsure at all n locations; Clone ID: LIB3158-016-Q1-K1-C2
gagaacgccgtcgccatgcccgtctcagcagctgccaatgaggcgttcaagaaggcgaggagcctggggctgggagaccaggatttttcggcggtctatgaggttgtgaagggcgcgggtggttctggatctggccagccgtgatagaaggaccatttgtgactgtgttagcccatttccatgccgatttgcaacatagcgacgtacgagtacgtgtgtattcgagatttggaaccagaccatacgttgcaaaagaaataataaatcaaagagatggtgctnncnaaaacaacatgaacataatatactcgctcaagcgccatggc

SEQ ID NO: 13232 - DNA, 414 bp, Zea mays
  Clone ID: LIB3158-016-Q1-K1-C3
gcggagcggagaggagggcccttctgcttgtttctccgctttgcaagatgtcgtccccgagcaagcgccgcgagatggaccttatgaagctgatgatgagcgactacaaggtggagatggtgaacgacgggatgcaggaattcttcgtcgaattcaagggcccggccgaaagtatctaccaaggtggtgtctggaaggttcgggtagaactgcctgatgcatacccttacaaatccccgtccatcggcttcatcaacaagatttatcacccgaatgtcgatgagatgtctggctctgtctgtttggatgtcataaaccagacatggagcccaatgtttgatctagtaaatggttttgaagtattccttccacagctgttgctgtacccaaatccttctgatccattaaatgggg

SEQ ID NO: 13233 - DNA, 398 bp, Zea mays
  Clone ID: LIB3158-016-Q1-K1-C4
atcctgtcagccaatttcgaaaatggaatttgagtttgaacagaagtttaccaaagaggacgtcaaggaacttatattccaggagatactgcagtaccatcctcagcttctgaaggattacaagaacggctctgaaaagacgagttttctatatcccagcgccgttgacaggttccgtaggcaatttgctagcttagaagaaaatggagagaggaatgccgcgcttgacaggaaacatgtttctctcccaaggacaacaaccgttcactccactccaattcctgcaaaggaaggtccagcagcaacctcccaggttgctcaaaggattccagcagctagaccaggaagagtggtaggcccagtattgtcattcgagagcgcatgcgtcaccgatcaac

SEQ ID NO: 13234 - DNA, 395 bp, Zea mays
  unsure (1)..(395): unsure at all n locations; Clone ID: LIB3158-016-Q1-K1-C5
atggaatgatgttgatggtgcatctatagacgatgatgaacacagcagcccaagagatgaagaacgtcatgaaataagtttgcccattatgaaatcttctggtgctaatgctgactctgccaaaagtgctgataacacagatgacgctgttgatgcagacttccctaactgcattctgaaatgcaaatctgtgtttaagtgcaagctctgtcctaggatcatgtgcttaaatgtggagatggtcaagatacatctgaaatcaaagaggcatgctcgttccgagaaactactaggagaagggaggcttaagctgatgctcaacagcgatggtgaactggaggaagagcaagagacacatgctgaacgacatgctncgactatagccctttcccagc

SEQ ID NO: 13235 - DNA, 407 bp, Zea mays
  Clone ID: LIB3158-016-Q1-K1-C6
ccgaggccggcctcgaggccggtgcgtgggggtcgtcacaggtgaacttggaggagctggttgccagattcttagagtcgagcaattcaactcgggcggctgccattctgggaagcgatgagcaagacaaggaaaatgatgatatagcaggagaagttggcaaggaaaaaaagaggagcggcacagaagccggtgagcctgagagcaaggcgatcgagcctttagctgaggaaaagccgactgaaaatatggacggtgaggctaaagagaagaaacaaaagaagaagaaagacaagggtgacccttcagctgcgaatgctgctagcgagggaacaactgaaattgtgaagaacgccgaccagaatgacgatgaggccaaggagaagaaacagaagaagaagaaggac

SEQ ID NO: 13236 - DNA, 407 bp, Zea mays
  Clone ID: LIB3158-016-Q1-K1-C7
agggtgttcactgggcagtgcaaaatggtctccatctatcaagaagcactgtggtgtacttcaagcacaatgatatggcttcacttgcaagcactttggaaaaacttactcgtggaaataaacgtgctgaaaagattagacgctacattgttgtagaatccatctaccagaattctggccaaattgcccccttggatgagattgtcaggttgaaggagaaatatcgattccgtgttattctggaggagagtcattcttttggggtgcttggcaagtctgggcgtggccttgctgaacattatggagttcctattgaaaaaattgatatcatcactgctggaatgggaaatgcattagctactgatggtggcttttgtacaggaagtgtcagagttgttgatcatcag

SEQ ID NO: 13237 - DNA, 362 bp, Zea mays
  Clone ID: LIB3158-016-Q1-K1-C8
cggacgcgtgggttctccgcgaagctcaccccccagcaggtcaaggatctcaaggagcaaccaggtgttctccaggttgtgccgagccagacttaccagctacatggccctgggtctggcactcaccagggcacgacacacaccttgggccttatgtgaaggcgtatgagaatcaagaagactttgtttagtatggctgtatggcacaggtctgacgaatgtgtatagtacagtactatgtaagaataagggacgtatcgtctatatactgctttgcgcatgctcagccctgttctaaagcttgtaatgcaccaatgcgtatgttttcaatacaatgacaagtatgctatcttgtttggtgc

SEQ ID NO: 13238 - DNA, 416 bp, Zea mays
  Clone ID: LIB3158-016-Q1-K1-D1
ctgctcctcacgccgccgccgccgccgccgccgccgtcgccgccaccacatccgtagcgcccagccgccggagaagaggagggagccagcaccagccaccatgggtcgcgtccgcaccaagaccgtgaagaagacctccaggcaggtgatcgagaagtactactcccgcatgaccctcgacttccacaccaacaagaaggtgctggaagaggtctcgatcctcccctcgaagcgcctccgcaacaaggttgccggcttcaccacccacctgatgcgccgcatccagcggggccccgtccgtggcatctcgctcaagctgcaggaggaggagcgggagcgccggatggacttcgtcccggagaagtcagcgctcgaggtcgaagagatccgcgtcgacaggaagaccatggagatgc

SEQ ID NO: 13239 - DNA, 408 bp, Zea mays
  Clone ID: LIB3158-016-Q1-K1-D2
gcggaaaggaccgaacggctcgggttgatccatcggatccgaaggggcatggctctggtcagattggcgtttcccgtgttcttcttcctcgcagcggcggagttcgcggcggggacgaggtcgccgtcggctttcgtacaaaacgccatctactccaaccgcatcaccatcttctccaagacttactgcccctactccatgcgtgctaagcacatatttcgagaccttaaggaagatccatatgttgttgaactagatacccgagtggatgggcgtgacattcaaagtgttctcctggacctagttgggcgtcgtactgtgccacagatacagtaaatgcgctttcaaatggacagctccagaaacttctcgggaagagtcagtcacaatgatgggtcgctggacaag

SEQ ID NO: 13240 - DNA, 416 bp, Zea mays
  Clone ID: LIB3158-016-Q1-K1-D3
ggggctttgacatcatggatttagacggtggtatcggatgggaactcctcacctcgatggtccggtacaaagcacggcagaggaccagtgctaaggccgcattggcacacccgtacttcaaccgtgaagggctccttggcctctccgtcatgcaaaacgtacggctgcaactgttccgcgcaacccagaaggactacagtgaagcagcgcggtgggttatcggcctcatggcaaggtcaggaactgaagatgtgggaggctttacagaagcacagcttcaagagctcagggaaataaaaccaaagaaaagcagcacccagcggaacgcgcttgcctccgtgctgcgcctgcagaggaagatcatgagaacgatcaaggagagcatggacgagctcaacagccagcgcaaaagcatt

SEQ ID NO: 13241 - DNA, 163 bp, Zea mays
  Clone ID: LIB3158-016-Q1-K1-D4
ccacgcgtcgtggtatcccgttagtataattgttctacgtgcactcggagacccgagacatctgcggagagacatcctgcgcagccgcccccctcatccttgctgccgaccagccgactctgacaagctttactgcggcgggcttctacgcgatctacatgaa

SEQ ID NO: 13242 - DNA, 412 bp, Zea mays
  unsure (1)..(412): unsure at all n locations; Clone ID: LIB3158-016-Q1-K1-D6
cccgcttgtactacaaagcgtccctagtagttcgaccgctgtagagactcggttccttcaacagccagcacagcccaacctccaatcctttcagctggctgtacctcctgagatgatcttcgacgaggcggacatgatgctaaagcatcgcctagcttcaggtcgagaaaccacatctctaccagtaggacatgaggccaagcctggtaggcaggaagcatgcatggtaaattctgatatttctaacagaggttcactcgggaaagaagtatntatgccctacttgcatagcttgcagagcggcgatacggagggaggtctgagggcaggatcaaactaactacacgggtggtcaccctgcaggattttcccatcgggattgacagaggtgcctagctaggagtcgctagtc

SEQ ID NO: 13243 - DNA, 408 bp, Zea mays
  Clone ID: LIB3158-016-Q1-K1-D7
caaaattttccacccaaatgtgcatttcaagacaggtgaaatttgtcttgatatattgaagaatgcatggagccctgcatggacccttcagtctgtttgtagagcgataattgctctgatggcccatcctgaaccagacagcccacttaactgtgattcaggcaatctcctgcggtcgggtgacatcagaggctatcaatcaatggcccgcatgtatacaaggctggctgccatgccaaagaaaggttagatgtagaacatgtgccaagccaagagcctatgtcagtccatatgttgtcaggtttgctgtgtgctgtctgtctgtgaacttggtggctcttgtttcctaataagtcctaaccattcatgtgtgtgtattctggattctgtatccccgattcccgatgc

SEQ ID NO: 13244 - DNA, 299 bp, Zea mays
  Clone ID: LIB3158-016-Q1-K1-D8
tgaagatcatcttgcatagtcatttgcttccaggaggcgcacaggaggtggagtaaaaacgaacgtatttatggtgcctagaggacggttttttcagccactgccaaaacggattgaatgacgccaccgaggtagtggagttcaaatggctcattgtttgccgcaacctaaattataagcgggtatgtgcagtgacttatagcttgttctgtccgattgatggctggtttgttttagattgtataatttgggctagttgcttactgcagtaaatacgcattattgatgtatgacggaag

SEQ ID NO: 13245 - DNA, 370 bp, Zea mays
  Clone ID: LIB3158-016-Q1-K1-E1
tatctatcgagtggacgcgacgccaacagcgtcagcgcctcctcccgctctccggctcctgtcctgctcgcgctcgtcgcccccctgccgctcggctccccttggcccctccaatgccgccacccatggcactgctgccgctctcctccgcatccgcgtccgccgcgctgccgcccttccgctcctgcccgcccgctgcgatgctgcttcgcctcccctgccccgccccctcccatttcgcccgcccccgcgcggtctccaccgggtacgcggcgtccttctacggcggctcggcgatgtccgcggcaggcggcgcggacgaggaggaggaggtcggctactagtcggggttcggcccggtgctagggct

SEQ ID NO: 13246 - DNA, 102 bp, Zea mays
  Clone ID: LIB3158-016-Q1-K1-E11
tacacgcgtgcatacactacagataggactttacaaagctcacactaatctataactctcagtatatacattcccagtgtaaaactcttcattcataccaac

SEQ ID NO: 13247 - DNA, 87 bp, Zea mays
  Clone ID: LIB3158-016-Q1-K1-E12
tacaggcgtgagaacacttcagaaaggactattcaagggccacactaatctagaacgcacggtatatacatccccactgtcaaacgc

SEQ ID NO: 13248 - DNA, 398 bp, Zea mays
  unsure (1)..(398): unsure at all n locations; Clone ID: LIB3158-016-Q1-K1-E2
tgacttatttaagttggattatataatctatagagtaaacaaacagggccttagtctaagaaaaaggtagaatcttgacagtacatgacagcagaatcacaagctagggggggtagctatgaaaatcctattaccacatgaacagatgcaatgacatacaaaggacaaaacaatttggtgcctacatagtaaatacttttgatcgtctcactcattttacactcaagccatcaataaaatcgctatcatgctctttctaccatactcttatgccagtattgctgtaaactgcgatttcatcagcctgaaagaaattaaaaaaaactgtaattcctggcangtacctggtggtggcactgctgcacctcccatgctacggnctgttcgccctggtgctg

SEQ ID NO: 13249 - DNA, 411 bp, Zea mays
  unsure (1)..(411): unsure at all n locations; Clone ID: LIB3158-016-Q1-K1-E3
gttctcccaattccttccccacctcctcggtcgtcgcctcccccagagagcaggagccgcctcgtccctgccggtcccgacccccatcccgtccgcgtccaacgccatgaatcccgagtacgactacctcttcaagctgctcctcatcggcgactccggtgttgggaagtcttgcctgctgctgaggtttgcggatgattcatatctggagagctatatcagtactattggagttgattttaaaatccgcaccgttgagcaagatgggaagacaataaagctacagatttgggatactgctggccaagaacgctntaggaccatcacaagcagctactaccgtggagctcatggcattatgggtgtgtatgatgtaactgaccaggagagctntaacaatgtcaagcagtg

SEQ ID NO: 13250 - DNA, 251 bp, Zea mays
  Clone ID: LIB3158-016-Q1-K1-E4
ggtcatcctgcagtacatcgacgaggtgtgggcggggacggggccggacgtgctttcggtcgacccctacaagcgcgcggtggctcggttctggggcgcgtacattgacgacaaggaggagactgcgtgtctggggatgctgttcaggtgcgctaacgaggaggaaagggctgccggtgtctctcgcgcccgtgaggcgcttgactcgctagatggctcgttcctggactgctccaaggggaggtccttct
